United States Patent Application Publication US 2007/0083945 A1 - sequence listing, part 25

SEQ ID NO: 169315 - DNA, 350 bp, Glycine max
agcttctcgatttattatgcaccttaattatacttccgttagaaaagttatgaccatttgaatttctcgagagcttccattgtttaattttaagcttctcgatatattatgcacctgaatcagacttccgtttgaaaagttatgaccatttgaatttctcgagagcttctgttgttcaatttcaagcttctcgatatattatgcgcctgaattggacttccgtgtgacaagttatgaccatattaatttctcgagagcattcgttcttcaatttcgagtgtctcgatatattatgcgcctgaatcggacttccgtgtgataagttatgaccatttgaatttctcgagagc

SEQ ID NO: 169316 - DNA, 444 bp, Glycine max
ttgatgcaacatctggagaggttaatgaaacaacttgattatgcgctccatgagagggtggatcaaatggagaatagagatcataatgaagaagaaaggaggagaagagggaatgatggtgttcctagacaaaaccgaattgatggtattaaactcaacattcctccatttaaaggaaagaatgatccggaggcctacttggagtgggagatgaaaatagagcatgttttctcatgcaacaactatgaggaggaccagaaggtgaagcttgccgccacggagttttccgactatgctcttgtgtggtggaacaagctacaaaaggagagagcaagaaatgaagagccaatggttgatacatggacggagatgaataagatcatgaggaagcggtatgtgccggctagttactcaagggacttgaaattcagctcaaaaactaac

SEQ ID NO: 169317 - DNA, 441 bp, Glycine max
ctatcttcttctcagccttggcctatttcggtgccactgatgattatcacaaagaaaggacaagcttcagagaaacagagcttcaagtcgaatcttcaaaattgatgcaacattgcaacagcagaaagcgcttgaaggtgaagacaaagacgccatcacgacagactggccaagagctttgtgcacacacaactatttccaacatagatctggtttttgcatacacactttaccaaagaaccaactttgatgttgagaggaagtgaggtcgtgtgcgcttctcaaagtgtgagagggtgcgagagagaaaggaagtcaagcatgagagttaggccttaacagagtggcaaaggtagcatagcggtggcagccaaagtgagaggacacgagagtgaaaaaggaaaactcgtctcattcaaagatgggtttttgaaactaatg

SEQ ID NO: 169318 - DNA, 461 bp, Glycine max
  unsure (1)..(461): unsure at all n locations
atgtttcctaacacactattaaaccccctcccnctttttgtgtgattaactggattggaagccaaatacagataaagttcgtaagccgcacaattcggctaggagtgttgttgatagaattcagaagcctcgtgcaaggcaacgtatctaggttccccattaagttaaacaaaatgtgtttaaaagcctatcttggaaggaaggaaaatctactggtttgaagcctagaattacagggcctaagttagtcaatatgcggcaatctatgttgcataaggaagagagtcaaaagtttgaaagtataaagaagcaaattcaatatgagcaagaaaaggattgaattgtaatggtagatgagcatccatttccttaagggaaaataagggtagctaaatttaatgtagaanatataatgcaaactctatggataactatccaaaatgatgacagggtgacttctt

SEQ ID NO: 169319 - DNA, 404 bp, Glycine max
ttaattaactctaggaatagatatgagcactatatgtcagattgctggagaagggagttcttaggaatacctggatccataaaacaattctgattgagacgtattttgaagttgtagtgataaaaatggttggttcagtcatcttcctcaaccaaatctcgttgctccttatgggaccttggagagaggagaaaactgtttctaatttggtatggaccataattgtgctttatgtttttaacccattagagtttccattatgtcccaatggttaaaactcgcaatccaataattaattccatattattttctattggcagcctaggggctatctaaattagatcacttaaattgagtcaatctaaatgtaaataactaatataagatgtttgggttgcttctac

SEQ ID NO: 169320 - DNA, 463 bp, Glycine max
  unsure (1)..(463): unsure at all n locations
cttgtggagcttctatggaggctggatcnttgagcttcaatgaggtccttcaatggtgatttttcaccatggagatgcagcggaaggcaaaggagaagaggagaggggaggcaccatccactatggaataagccaaggaagaaggagcttcaccaccaagaattgccttggataaaaagcttgaagaggatgctttaatggaggaaaagaaagagagaaggggggagcacgaaattgaaggaataaaagagggaaagaagtggaactttgaagtgtatctcataagattntcattcatcaaagttacaacaagtgttacacatgcttctatntatagactaggtagcttccttgagaagttttcttaagaaaacttccttgagaagcgtctntgagaaaacttccttgagaagctagagtttagctacacacacccatctaaaaactaagctcaccttcttga

SEQ ID NO: 169321 - DNA, 444 bp, Glycine max
  unsure (1)..(444): unsure at all n locations
accttaagnaccgcggctgcgcttgaattggtttcgcggatagattttttgngtctaaaaagaggcaaatttgattatcctgctttgatgaatatgaagctcgtggaaaatggagagaataatatagagggaggaatccatgttgtgactgccgtccctacatggccaaatttcccaccaactcaacaatgtcaacacttagctagtatcagtcattctcattacccaccaccctactagtcaagaacacttaatcatccacaaaggccacccttaaatcagccacaaagtccacctgccgcacatccgatatcaaacaccacccttaacacaaaccanaacactaaccagggaaggaatttttcataaaagaaggatgtagaattcaccccaattccagtgtcgtatgttaatttgctcccatggttgctcaataatgcaatg

SEQ ID NO: 169322 - DNA, 472 bp, Glycine max
  unsure (1)..(472): unsure at all n locations
taaagagcatganacccttactntagttattggttagataattntacaatgcctaacacatnttgatagatgaggcatttgtattgattgtttttagtctagccatgtgtgtgctttagttttttatatgtttcatgcttagtgtttgattaattatgaagtagatgaataattctttgtctctaagtttcttaagaactcatttatgagaatttaagtatacaagttttgagcatacaagttttgatgatgccaaagtatatccaaaacaagattgcttcaagatcaagcaaacaagatcaagataagataaggccttagtccatttgttaaaagaatctcatattgattgatataagttttggcctcaaagtttatttttgaaatgtctttaaaaaagattgatcagttcaaaataagtatttttgaattggtaattgattaccaagtgttgtaatcgattaccaaagat

SEQ ID NO: 169323 - DNA, 449 bp, Glycine max
  unsure (1)..(449): unsure at all n locations
agctntgtgaaaagcttgccgctggagctgattcatcaactgccctaactcttttagactggtgattcctaggctcttgaccttgacttgatagaacctcattttaagcaaaggcatttgacttgatcccatgttttactaaagtgaaacaaaatctagtgcgaatcanaactctgacatctatcatgggtggaatggatgaatgcatgaagaaatgcatatgacacagatgcaatttatgaatacgggagcccgggaaattgtctccttcttagatacaacgtcttggggtagcacagtgcccgacgtatgtatttaagaaggtgacatggaccctccgttggtttgccaaagagagggcatcaagacagaacccgtgcatggtgcatatgcgaaaggcacaacacggggatgtacatagtacaacaatattcacaaacaaatataac

SEQ ID NO: 169324 - DNA, 467 bp, Glycine max
tcaggttgctcattgactccagattgctgcaaagaaggacagagatctgtatggtgatctgcagaagaacatagaccacagactcttgcaacaggtgcagatttctgattcatggaaagctgagttactaagttgaccaaggcatcaatttttccctcaagctttttattttcagtagatgaaaatgaatctgtggccacctcatggactcctctaaggacaatagcatcatttcttgcactgaattgttgggagttggaagtcatcttctcaatcaaattcctagcctcagcaggtgtcatatcaccaagggctccaccattggcagcatcaatcatactcctctccatgttgctaagtccctcatagaaatattgaagaatgagttgctcagaaattagtggtgaggacagcttgcacataatttcttgaatactatctaagactcatacaagctctctccacta

SEQ ID NO: 169325 - DNA, 467 bp, Glycine max
tgcggcatgcaagcttgtagatgagataaaattacctgattgatatttgatagctctcaacgcctcttaaaaaaacaaaacaaagcatcaatccaaaacactgaagtcaatagtagtttctgatgctgagaacaatgatgaactttttaagaaagatgaagaggaactgacattcttaaccaaaagagtacaaagactactcggaagaagaaaatgaccaagaagaaacttctctagaagagacttccagcaagaaaaaaattccaggcaattcagatgttgagtgcaacaaacctgatcacatcaaaactgactattacctttcaacaacaaaaaaatgggaaaagataaagacccaagtggagagcactcaaggcacatatgtacgctttaatttttaaaggacgagaaggaacatagctgagcgctatttggtaactttttaagttttagttgtgattgagtat

SEQ ID NO: 169326 - DNA, 452 bp, Glycine max
  unsure (1)..(452): unsure at all n locations
actcagcttttaacatcattcttatgaaacaggtcaagttcttcttgcattgttntgacccatctttcaccttccaaggcattattcactgtctttggttctacttctaagatgagagcactcttgccttgttgaaatgatggccttgttcatactttgtcttgtgggctcccaattatttggttgtgtccggatggttcatttgacagttgcgtccaattggttctctttgttcttctactggaccgtccaggggtatcttagactcttcaacttattgctcattattggacttgtccttgtctgttgagtttagaccactattcaatctgagataaatggttcatctagctgtgataattccttatcagatattatgtcattgaacttcacatggattggttcttctacaactaagtttctagagtcataaatttgcatgtcattgaagt

SEQ ID NO: 169327 - DNA, 370 bp, Glycine max
  unsure (1)..(370): unsure at all n locations
agctctcataagtgaaatcaagtgcatttatcttctttagagtcctctcacgaggtggaggttgagccatgttctcattatgaaaattactcattgaatattcacaatcaccaacaacagaatactcacaatgctcaaaatgctcacaatgcatanaatgatcaggatgcacactatgcctaactaatctatgaaaggttctatctatttcatgatcaaagggttgtaaatcacctggattgcccctactcatgcaccatatgcagcaaataatgtgttctcaaacaaacacctaacaagggggtaaaactacaactatagtcaaaagatatctcaagtagctgaaattttgtgagcaacaccctcaaat

SEQ ID NO: 169328 - DNA, 413 bp, Glycine max
  unsure (1)..(413): unsure at all n locations
actcagctnttaagcgcgggtctgggagacaaaggtcaagtgttcgttatatgctaagatgatgttccgagtactttggatttggtacgaccatgccctcttgatttccagctgggaaattggcgagtggaagaacgccccggcattcacgcaacgagcataatgtaaacctttacggttgtaaaagctctatagttgggcctaggctttagagtttttccttttgttaaggctttgtgtcttttgtttttgaatttataatacaaggatctttcttcatctgttcctatgtctctacccattctcattcatttgcatgtttacttctttttctgaaatggcagatctgatgacgagtcccccgaaggtactaatacctgggacccgcctatcgacttcgagcaagaaatgaa

SEQ ID NO: 169329 - DNA, 444 bp, Glycine max
  unsure (1)..(444): unsure at all n locations
agcttgtgttacttactcttaaaatcttattatatccattccgtgggacgtctggaaagacaccttggagattatagttgaacgatatgtcaatgactgacaatgatccaatgctgaatatcccctgtggaaatgttccatgcaacccacaataaacaagacttaagatggccagatttttcaaatgggaaaatgtgtcatgcacgggggatgataaattgttttgatcaagaacaatgactgataaattcttaagagttgccatggaaggatccaaaggtcctgagagattgcaatgtgacatgctaagntcttgcatgtcacgcagtaacaagaaggcactgcaccattcatgtcctggaacttttatacttactccatccagatacagttgcctaatactggtgagatttggacaagctttgtagatttgggtctctattt

SEQ ID NO: 169330 - DNA, 461 bp, Glycine max
tagtgccatatggccaagatatagcaagtcaatatgcgttttctctataccacactgtatggccatcctagacttataggactaactcctcaacacactcctcatcgaaggtttattttcttgtcaccatggggttcaactgcacgggtactaaatgttgacgaaaggcaaactatagttaagatccaatcatggcttgaacaacatgaatatatgagtgagaaccccatcccctcacaccttgtggtgtgaaaactaccaattgaccatcgtcttgcaagctttgacaaattccagcatgatgtctccatgtgactctcttcaacttgcatctcagcgttgcaccgtgtatacgtgtttgcatgtgcgtctcttaagcgcgctattattactagaataaaatcttagtcacactagtactcatattagtgtccttgtgaactaacacacaataatgcatg

SEQ ID NO: 169331 - DNA, 372 bp, Glycine max
  unsure (1)..(372): unsure at all n locations
agctntatttacctatctatccnccaaatgtctttgcaaagactcaatagataaaatgcatggagttctaattctagatgtttgctttgacgcatgggcataatacaatcactctatgtcttgcaatgattatgatatcttttcttcttgttctattaagagttatcctctcccgagcgtctaactcctaaaactaatgcatgcatatcttctttaaatcttatttaggagttaccctctcccgagcatctaacccctaacagaatataaatatgagtatgcaaggtaaaaacagaaaagaaaataggaaagaaaaacctggtattgcattgataaatagtgaagagtacatcatgcatcacattggcttct

SEQ ID NO: 169332 - DNA, 443 bp, Glycine max
  unsure (1)..(443): unsure at all n locations
tccacatcaagcaagntcatctcagagctcttatgctaacaatagaattcaaaagttggagaatttgcttggaaaccttgtagctgtgcttaaagtacgatttgcagaagatccacaaattaatcaagtcttagaagctatagatcaagaggtatgaatttataattctacttattcaacgatttaactatgatatgatactttacaaagaanaaacattcttttaatttaggtacctacaaatggttctaccagtaaagatcatcaaactacaaacaatcttaactagaggtgagttgaaatttagatggtaatgaagatgcgagccggcgacaaaatgttatttcaggaacatgatttatatggtaatgaagatgtgagccggcgacaaaatgttcaagtgtttggttgttactttgtctatctgtctgacaactcgaatt

SEQ ID NO: 169333 - DNA, 435 bp, Glycine max
agcttatgcgcatatatgcctacgaacgtttatttgcacaagacatcctattaactaagaaatatgcacccatatacaatcaaggtagcttcattacctagattatttacatgtactcccaaggtgtatttgttatttacatcacacacgcctccttggctgaatttacacatatgcatactcaaagcattttggggtaccaaaaattgcacatgcgcacaccttggtatttttaatacctatacatatacaaacttcacgatgaatcttgactacctattctacacctacacattcatgacgagcaaaattcctaatcatctaggcgtaaggaaaatattgtagtgtggcccatagctgattgctggcaaaaagggtaactgtacccaatatgcacttacttttgtgtactctatgcataaaaatttagtttct

SEQ ID NO: 169334 - DNA, 416 bp, Glycine max
  unsure (1)..(416): unsure at all n locations
tgaaccaaaaccggngagagagtgaccttactctgtgagtgataatctttgcatgaatctctgaattgtagaatgaaaatgtataaatgaagacatgatgaaggccatgattgtacatacacaaaccttttgaccaaaaagcttaccttgaatgataattataacttttgcaccctttttgagctgaatgatatggtcaaaaatttgaaccctgaacttaaataattatctccagataccttgtttggattctatgagagcatatggttcaaggaatatntaccccaaatttgggggagtggaactaattgggatgcaaagaaagagataaagcatcaacacacacaacacacaagttgtctcttaaaaaataanaagtgtgttgatgtaacaaggtcaaaagcaaatgaaagtga

SEQ ID NO: 169335 - DNA, 409 bp, Glycine max
  unsure (1)..(409): unsure at all n locations
agcttcctacttggggtattcattatcaatatttttattngatgangattgcatttactatcctctaagcttattttcaagtcattggcttacttaattatgtgttttggaaggaccccatgatgtcagagttagaatgaaggctgttggtatttgtgggagtgatgttcactacctcaaggtagatatttgatagatatcttactatctgtttaatactttctccaatgaaaaataaaaggaagaataaaactgaaaatcgattcaatccaacctgctttggattggattggatttaaattgtaaagagaactgattggatgatgaattaagaaaaccgatgtgatttaatcagatgaattttcttatcnaaaccgatccaatccatgaacacccacattctattaca

SEQ ID NO: 169336 - DNA, 409 bp, Glycine max
  unsure (1)..(409): unsure at all n locations
tgttaaaaagccttataagcctgataggtcggcctatatatatatatttatattattctttggtaccaatttatacttatattattttttggatacaattaattattctttaaaccagcagacttgattacacattactgctccataacttccattcctataatcaagtaagattttaattacaatttaggtgtctttatattactcattatttttattggctttcctattctggttaacgttttctttttcattaactttcctatttttctaccccaaagcaaacaaatataaaaaggcttttaaaaaggctatcangtcaggctagacttttaaaaaggtcaggccgagccaaaataaaagcttttgataggctataggccaggctcacgcctaaaaaattcatcgt

SEQ ID NO: 169337 - DNA, 437 bp, Glycine max
  unsure (1)..(437): unsure at all n locations
agcttcatgatgaatcaagattgattcatggagttttgatgataacaaagataatgacaaaaagctcaaaagtcaagatcacttcatgataacaaagatgatgacattcatgaatgagttcaagattgagttcaagattgagtcaagaacacttcaaggatcaagaggaaatttgatttcaagaatcaagaatcaagattcaagattcaagattcaagattcatgattcaagattcacgaataatcaagatcaagattcaggactcaaagattcaagaatcacgagaagacttaatcaagataagaattaaaaaagtttttcaaaacattgagtagcacaagaagtttcacaaaatcattaccaaagagttntactctctggtaatcgattaccagattatagtaatcgattaccagtggttgtaaaacattaagat

SEQ ID NO: 169338 - DNA, 460 bp, Glycine max
  unsure (1)..(460): unsure at all n locations
tcatgcattagattatnttcatctctaatatggtgacattatgagtcaagtgtttggagatacaatacttacagtggatttgatatgaacacttatcaagacatggactagaatccagacaaagattcctctcagttcactgattttcagattgcaaattttcattctcatcatcacattctcagctactgttattctaatcaactaactaaaagctctagctaccgggactgattgttaaaggtattagtcatgtccaactactgctattctgcttccttgtacatttttgctcgggtgtggccgctgcatgattaatatcagaatgctaccttttttttctttntttgtgaatgagaatatagccatagagactntcatcttcccaaaagccatgaaatgganatcaaaagtttcgaaataagtaaattatctaaagtatattcttaagatttgaatt

SEQ ID NO: 169339 - DNA, 441 bp, Glycine max
agcttacccctatggctggcctccgaacttcactccccgtgccaccccagaagatttaagccaagcccctactttcgaggggcaactcccaccttatgacgactatcccgggcaagacgatgaggaaggagatacccatctcggtcccctgctccacctcaaagatccgtccgcccatgaaataccccaaccaaacatagtccgccatatcccggcttcacccacacccgtaaaagaatctgttcccttcgtggaagataagggaaagattgaggcgcttgaagagaggttgagagcagtcgagggcctcggcaattacccattctcgaatctagtggacttatgtctcgtacccaacatcatcatccctcccaagttcaaagtaccagactttgataaatacaaagggacgacatgtccaaaagggcatctccggatgta

SEQ ID NO: 169340 - DNA, 412 bp, Glycine max
  unsure (1)..(412): unsure at all n locations
tcttagtttcagatgatgcagatgggtttgtagctacctcatgcactcctctaatgactatggcatcatttctggcgctaaactgttgagagttggaggccatcttctcaattaaatttctggcttcagcaggagtcatgtctccaagggctccaccactggcagcatctatcatacttctctccatattactgagtccttcataaaaatattggagaagaagctgttctgaaatctgatggtgagggcaactggcacatagtttcttaaatcgctcccagtactcatacaggctctctccactgagctgtctaatacctgagatatctttcctgatggctgtggtcctggaagcannggaaaatttttctaagaatactctcttaaggcatcccagctcgtgatggacctt

SEQ ID NO: 169341 - DNA, 449 bp, Glycine max
  unsure (1)..(449): unsure at all n locations
agctttgatggtgttgagaagaaatcacatgtttgtcatcatcaaaaagggggagaatgtgaatgtatgtatacatgattntgatgatgtcaaaagaagaatcaaacaaggctcattttgcttcaagattaatacaagattgtttcaacaaacaaagccttgattcaagatttcttcaagatcaagccttgcctcacaatgaaaggtttcaagtcattcaaggcacatgtaatcgattaccaatacatgtaatcgattagcaatggttaaaagtgtgtaatcgattacacatcatatgtaatcgattaccagagactctgaacattgggaattcaaatttttaaatgaagggtcacaactgttcaagaaaaacaactgtgtaatcgattacactaattctgtaatcgattaccacagaggattntcaaggaatatcgccaatagtcaca

SEQ ID NO: 169342 - DNA, 453 bp, Glycine max
acttgagtcatcaagagattattaatatgtgaccatggcatgtatttaaaataatctatcttcaatcaatctttcaaatatctttcaactctttctacagaattttcttattcattttctcttcatctttctaaaagtttttgttcaaaactttctctttcaagaaaagttctttgatcaaaaacttgtgctattcatctttttcattctcttctccctttgccaaaagaacagaaggactaaccgcctgaattcttttgtgcctctcttctccctttgccaaaagacagaaggactaactacatgaattcttttgtgtctctcttctcctttacaaaagattcaaagaactaaccgcctgagaattcttttgattcttcccttccccttaagcaaaagatttcaaaggactaactgcctgagatatcttttgtttcccctttacaaagattc

SEQ ID NO: 169343 - DNA, 435 bp, Glycine max
  unsure (1)..(435): unsure at all n locations
gactctnggcgatttctntaatactattgacttaaaacagtgtgacttttgaaaaaatcttcagaaacaagtcacttgaagaattgtgacttttgaaaatttatttttcgaaatcagtcactggtaatcgattaccattaaggtataatcgattacacatcaacagatgtgactcttcattttaaattttgaaaattaaaacgtttagaagctctggtaatcgattacaagtattgtgtaatcgattacacaagttgaaaatgtttaaacacaagttttaactcttgaaatttgaaatcttaacgttttaaaacactggtaatctattactaccttctggtaatcgattaccagagagcaaaactcttttggtatgattttgtgaaaacttcttgtgctactaatgttatgaaaaaaatctcttacctatcttga

SEQ ID NO: 169344 - DNA, 471 bp, Glycine max
  unsure (1)..(471): unsure at all n locations
ntaccttaacaaataacaacattcctctgcaatcacatgtttcattatttttttatccgtgagaatcgaaaaaaatatcagtagatttataacaactcattcactcttattcaatgaagggaattacaccttcttgacaatcacacattccatataagtgctctccaccatgctttaacgttcctccctttgcaagtcgtgagtattttgccagaaatgatccttcaatgaatttgggagggcaatatggatttcgtatacatattgatttcgatttcaatactctttttgttcatatnagtgtaaccattttccattttagtctcagtaatntaaaatatgtcaattcaattaatctttgtagttgcgtgttgttttttcaatatgatcctccttgtgaagtctatgctaatgccatttaattangcaaaaacaaaagaagatgtggaataattaattaatatatatata

SEQ ID NO: 169345 - DNA, 434 bp, Glycine max
ttcacaccctgtttatgtcaatattattataaaatatgcaattatgtattgcaaatgcattgcacttatgaaattatgattctgctaccataattgcctagtttcaatttgcaagttaagattttggattagcctaaccaaaaagattcagtaactctttcattattgatattatcatcatactaaataactgctaggtattttgtgaccatgatcatgccatttggtatttttagtgaggaagtagtttctctttgaatgaggatatataaagataaatattccttggaaaaccaacaaataatgtacatgtcaaagaggttttatataagagatacttgtatcatatacaacatcgatgtacacattggatgttgatctggagtaattattgctagggttacccttaattggatgttgatttggagtaatta

SEQ ID NO: 169346 - DNA, 489 bp, Glycine max
  unsure (1)..(489): unsure at all n locations
gacctataaaactaagcttatgatgatgaatcaagtagttntaaagatgacaaacagctcctaagaatgatttcaagattgattcaacatgttcaagatcaagattagtttcaagattcattagaagaaatcaagaagattcaagattcaagaaaagttgatttcaagattcaagaaaagacatcaagaagaatcaagattcaagagaagataaattcaagattcaagagaagaaatcaagaagcaactagtcaagacttcacaagggaagtattgaaaaggatttttcaaaaaccaaacatagcacaattntgttttacaaaagagtcttctcaaatttttctaagttaccagagtatttactctctggtaatcgattaccagtttcctgtaatcgattaccagcgataaaatttgatttcaaaaagtttttaactgaatttgcaatgttccaaatgatntttaaatggtgtaatcgattacaatata

SEQ ID NO: 169347 - DNA, 435 bp, Glycine max
  unsure (1)..(435): unsure at all n locations
agctntgatggtgttgagaagaaatcacatgtttgtcatcatcaaaaagggggagaatgtgaatgtatgtatacatgattttgatgatgtcaaaagaagaatcaaacaaggctcattttgcttcaagattaatacaagattgtttcaacaaacaaagccttgattcaagatttcttcaagatcaagccttgcctcacaatgaaaggtttcaagtcattcaaggcacatgtaatcgattaccaatacatgtaatcgattaccaatggtttgaaagtgtgtaatcgattacacatcatatgtaatcgattaccagagactctgaacgttgggaattcaaattttaaatgaaaggttacaactgttcaagaaaaacaactgtgtaatcgattacactaattctgntatcgattaccagagagggatttcaaggaatat

SEQ ID NO: 169348 - DNA, 402 bp, Glycine max
  unsure (1)..(402): unsure at all n locations
tgctctaaatntacattgatgnttgtatttatgggaggaggttattttctctttttgctttaagagtaatgtcccactggtaaaactaactttccgaatgtttgcctttgcaggaatggccccgaggaagcttgcctcaaagaggtccaagaaggacaaggcggccgaaggaactagttccgccccggagtacgacagtcaccgctttaggagcgttgtacaccagcagcgcttcgaagccatcaagggatggtcgtttcttcgggagcgacgcgtccagctcatggacgacgagtatactgatttccaggaggaaatanggcgccggcggtgggcaccactggttactcccatggccaagtttgatccagaagtagtccttgagttttatgccaatgcttg

SEQ ID NO: 169349 - DNA, 413 bp, Glycine max
  unsure (1)..(413): unsure at all n locations
taataagctgtgatctaatcagagaaccatatatgatgagtgtgaccgttttgtatgctcgcgctgaatacatcacataaccctcgcgcatgctcagaagtcctacaaacgaatgtaatcctatgcgatattggcacatatactagccagggcatgagaacacaaatatagaaattcctgtacgctgctgttatcgtataaaaactccaatcctgagagatcaatcgcacttggatagttcatcagttaaaacgcgtcattccacattacaattatgtggttggataaacaaaatgctctgccctgattgtngatgtggcatatgtgagagaggtggatgttgtatagccagatctctatgagaatgttgatctagatactgttgatgttggactcagcctgatattgctggt

SEQ ID NO: 169350 - DNA, 431 bp, Glycine max
gcttctgcaacaatattgaacaatatgtgtgctattggatcaccttgtctgactcctctttgtgggatgaattcagtggtggggctgccttttaccactaccgaagcatatacagatttaaggatttcctcaatacattggatccacttgggacataagcccaatctccccaacatgtatgataaaaaatcccacgagacagaatcatatgccttttgataatctactttgaacaccaggcatgacttttgacacctctatgctaactccaccgcttcattgcctataattacactatgcagcaaatgtcttcctcctatgaatgcacactgtctttcatctattatggctgacattaccttcttcaatctatgtgctaacagcttggccacaatcttgtacacacagcctattagtgaaataggtatgaa

SEQ ID NO: 169351 - DNA, 362 bp, Glycine max
ctcaatgaagggctctaacgtgaataagaatacgcacacagaatgaagatgatgcatgatgattaatagttgatccggatgatgatgaagcacattctgtttcgcggggagagatagagtccaagttttttaataaataattattgaggggcattatgcctcttgtcacaacaatctgatgggtgcacctagctgacctctcttccgccaacataatgggctccttttttcatttaaaggaaaacatactgcagtaccttagggcattgcctatgttgtctaatgaattaaaaatatcacttatctgtgaaggtatgataatgagtcgattgcggtattatgagtattctcatgataacact

SEQ ID NO: 169352 - DNA, 386 bp, Glycine max
agcttgagaaggtggcagaaagagatttatttttaatagagacaaggtttaaaagatagaacagttttgtagtgaaagacaaaacgaaatatctggctcaaacttgattcaatggcctgaattgaatagctcaaggaaatataagcacccatgaggttgtggcatgtacttcatcaattaattgatatatctttagaaactataactataataattgatacaaaaaaaaaatgtggacatattgagaccatactgcagatgagcaagtaatatgcgttttgaggttcataatattcattgatggctacacaaattcttcactctaagttaaaatactaacaagcatcttgaagatcaacttttcacgtttgatgtgtaatcttgcc

SEQ ID NO: 169353 - DNA, 402 bp, Glycine max
cgctcgacaaaagcattgatgaataagcacagaaagctctttgtttgtggttgtggacactcgtgcactgcactgcactgtacactcgtacactcgtgcaagtacctctcttacgtttatttttttttttttttaaatttcaaagttaccttttcttcagaaattaaattcttggttccaacaacttctttttggaaatgttataataatttgaggaaactacttttcagaagaaaaattaaggattatatggatttgtgaagggagacacgaatccgactccctaaatgttgtcgcctaggagtctactctaatgaaagcaacatgaagggcataatggcaatgtcaacagacaagtggtactcgatgatggtgtattgcattcacggagagagatttgtc

SEQ ID NO: 169354 - DNA, 418 bp, Glycine max
agcttcttagtttcagatgatgcagctgtttttgtaactaccttatgtactcctctaatgactatagcatcatttctggcgctaaactactgggagttgaaagccatcttctcaattaaatttctggcttcaacgggagtcatgtctccaagggctccaccactggcagcatctatcatacttctctcaatattactgagtccttcataaaaatagtggagaagcagctgctctgaaatctgatggtgagggcaactggcacatagttttttaaatctctcccagtattcatacaggctctctccactgagttgtctaatacctgagatatccttcctgatggctgtggtcctggaagaaggtgaaaaatattctaagactactctcttcatgtcataccatcttcttgatggacctt

SEQ ID NO: 169355 - DNA, 446 bp, Glycine max
  unsure (1)..(446): unsure at all n locations
actcaagctgttaaaaaggaagaaaagaaatcgaaattgaatganattaatatgaatgccaaaattngaaaatttatatttgcacccccattttgataatttcaccccttctttcgtaatttacggaaaagttacggaagcctatatgacttgattttcttttttttttcctgttccttctcacccatattaagtgaaatatgcttatttagggttatgggaattttgcggaagcattacgggtgttccggaagcccattttttaacaaaacgggggaggtggttgccacctagctcgccaggcgagctaggttgcttccaccttaagcaagaaatttcccacaaacctctagaagggcccagatttgaaaattactatttgcacccccattttactaaatacacccccttctgccttttgttgctgattcttttctgttacgtac

SEQ ID NO: 169356 - DNA, 227 bp, Glycine max
aacgtgacgcatgaactaattttcactaatgaaaaaagctcaatatattatgagctctgatcaccggcacctataaatggttgttgagaagtggatctaaacacggccttaatggatacagggaacgaatgacaagaaaattggaactgagaaaagaacaatcttgcagctagagtgtcgtttgccaataagggggggctgtgaaacagaagctgtgtcgcacgcac

SEQ ID NO: 169357 - DNA, 275 bp, Glycine max
  unsure (1)..(275): unsure at all n locations
ttaataatataattatcgtgtaaatgtcaaattcacgccttggattatgactcaatcaattactaacaggttttacagaattgcgtccattacaaaaaccaaaataaatgtcataaattgatataatgatagcataaataaaaatatttgataatcgagagatatcaataaacaaaaataatacggaaatatttattgacagaaatgaaagnngcatacgctaaatctaacacatgtgtatatgaaataatattataataactttaaactgttta

SEQ ID NO: 169358 - DNA, 406 bp, Glycine max
  unsure (1)..(406): unsure at all n locations
agcttataactgatgataaggncttttcttttatctttaacatatttatcaaattttttgattatcttttttaaataaattattattttaattttctttctttattatttacacttttcagttatttcaataattaattttgttaaatacttataatttaataagttaattaattatttaatttctccttattaattaataaatttttaatttttaactaattntttaattatttttggtgaacgtaacctatatgcacaatgtttatttcttcaaacaagtccacctttgatgtacctttgacattttcttgaaattaaaggcagattcccagtccaaagataaaacaactaaaacatatatttttttattagtttttataaaataaaaggtcacataagctaac

SEQ ID NO: 169359 - DNA, 432 bp, Glycine max
  unsure (1)..(432): unsure at all n locations
taagaaaaagataaagtgcaaagctaagcataactttattcttatattatactngaaaattcagaaattcctcttcaaacatttacaccaaaataatgcaaacaccaatttacttaagtagagtagggacaagaccagatatttctggaatctttatcacactcccaacctggaaaaaacatgaaaattaaaaacattaatcacagaagcaggaatcaaatggatagaatagttcgtaagtcaagactaacgtgttgaagggccatttgcccagctgactggactttangatgtgttgatagttgattagatgatagttgatagttgatagttntgttttagaaagaaggttatgtcattgatttcttttatgatcaattacaacataccaattgcctatttatagactcaagtcaccaacctctcaatgat

SEQ ID NO: 169360 - DNA, 310 bp, Glycine max
tgagcacccacggaagaagcacgctgccgcagatgtaatgtctactgcggaagacagcactttgcgcaagaagaacgacaccgctggaagaaaatctcatgggtcgaatctgaaacgcttacaccattctactaccaaaaataaataatcaaccacagaaaagcagctatgtaccttagctgacaaatatcacaccaaagcagagcacaagcccaaccagcacggacaaataacgcacaacacacagcccaaaatggagaaaacgcacgagagaatgccgaacgcaacatgaaataacaacaaaacagct

SEQ ID NO: 169361 - DNA, 248 bp, Glycine max
ttgatggactatgctcactgatgaaaaaaggctggtgaacatctgcctcaaccccatatgctgctccttacgggacctcggagagaggagaaaacagcttctaatgtggtatggaccataatcgtgctttatgtttttaacccattacagcctccattatgtcccaatggctaaaactcgccactccaatcattaattccatattattttctattggcagcctaggggctatctaaaatacatcactt

SEQ ID NO: 169362 - DNA, 63 bp, Glycine max
  unsure (1)..(63): unsure at all n locations
ctaagctgctcttgagctttatggngctggatcttggctttttttgtcctcaatggtgatttt

SEQ ID NO: 169363 - DNA, 375 bp, Glycine max
agcttgttcaagaacttagacaagagcattatttatcttgttcgcacatcgctcccgagaatgatatccactccacaagggttgaagtagaggagaccttcaatcctattacgcaacatggtagacaaaagtgggcagacaacttgaatgcgcattattgccaatgcggaaggtattctgtgctacactatccatgttcacacattattgcagcttgtggttatgtgagcatgaactactaccagtatatagatgctgtaacacaaatgagcacatcttaaaagcttactccacacaatggtggcctcttggagatgaagcgactatatctccttctaatgacgcatggacactaatccctgacccaactacaat

SEQ ID NO: 169364 - DNA, 378 bp, Glycine max
acccttggtaagtctcgaatcttcaatgcttatcaatcccaaggtctgtccttggtgaatcttgcttctccacaagctctccaaacccaaggttcgcccttggtgagtctcgtttccctacaggctctcaaaatccaaggtccatccttaatgagtctcgcatctccaaaggctcattaaacccaaggtctgtccttggtgagtctcacttctccaaaggctcgtaaaacccaaggtttatccttggtgagtctcgcaggcttatcaaacccaaggtccgcccttggtgagtctcacttctccaaaggctcacaaaacccaaggtccgcccttggtgagtctcacttccctaaaggctcacaaaatccaaggtctatc

SEQ ID NO: 169365 - DNA, 395 bp, Glycine max
  unsure (1)..(395): unsure at all n locations
agctngtcggccgcgattgacgaagggcacatattacgacgttagtctctgcgtgctatcaggcttttcgtcttacagatagcaaaaaagaatgtttatacggataaccacttgggtatttccgcccgtcaacgtgactcaaatgtcagtatgacaaatcttgtgagcgtggaagatgacgtaaatcttcgcgtgtcaacggtcttgtcggccgcgattgacgaagggcgcacaagacgacgtcagtctctgcgtgctatcaggcttttcgtcttacagacaacaaaaaagaatgtttattcggatatccactcgggaatttccgcccgtcagcgtgagcgtggaagatgacgtaaatctccgcgtgtcaacgggcttgtcggccacgattcacg

SEQ ID NO: 169366 - DNA, 427 bp, Glycine max
  unsure (1)..(427): unsure at all n locations
tactactttctccccggagtacgacagtcaccggtttaagagcgtgcgacaccatcagcgcttcgaacccatcaagggatgcgcgtttctactggagcgactcgtacatcttagggacgtaccgtatactgatttccagcaggaaatatggcgccggcggtgggcaccactggttactcccatggtcaagcttgatccataaatagaccttgagtttatgccaatgcttggccaacagaggatggcgtgcgtgacatgacatcctgtgttaggggtcagtagatcccgtacgatgccgacgctatcatccagctcctgngatattcgatggtattggaagacggccatgaatgctagtatggccagaggatgaacctgtctgatgggtcgatgatgaggccatcaccagctgctatgtataccgggg

SEQ ID NO: 169367 - DNA, 439 bp, Glycine max
  unsure (1)..(439): unsure at all n locations
gcttttccagatgcaccttggattattattatttatatntattttatacacacaaggtaaagagcatatcagaatctacattgttaatttgtttagtgggaagatttaaagaattgtgtaataaatattatatttagccatttaggcgggttagaacactctttaaatttgtttatttgaaattcaaatgttgagattttctaaaatttgcaatattattctcatttaaatttttcataactttttttttatgttttttgaaattatttttcatcacatcattcctttaatctcacaattctcttctcttcctatgtagaagtgttgtgaaaaatttaacaaaagtgccattactcttctataatatttgattactttaacaccatgcatgtatgttacaagttagagtacaataataatatgtgtgtgtaatcacacc

SEQ ID NO: 169368 - DNA, 458 bp, Glycine max
  unsure (1)..(458): unsure at all n locations
tgattgtgaaggtgacattgacattcttgggatgtaaacattatcgccaagaattttgccagaaatgatttcagttgcaatgacatgtttgactagtctagtaattactaatctagtaccattacagagtccttgcatttggtctaagtttcttagcaacattataggactaccgatttttagcttgatacgatgatttggcagaccagatgtgtttagtgaattgagaaattcagttgtgattgattggaaattgccaactgtcaatgtttctgacttctctatataatcagagcttaagtattccatttgttcacctattatatntatntgaggtagcatgcacagttaaatagagaataaatactgagtagaccttagtttttgtaaaattcatatgtgcataaataccttgaatcaaggaaagtatataatcattgacctcttcaactgtttca

SEQ ID NO: 169369 - DNA, 439 bp, Glycine max
  unsure (1)..(439): unsure at all n locations
gtcaccgcggctgcagcttcacatagcagttatcttttgtctttatgcaaacaatataattcaaaagttggagaattttcttggaaaccttgtagctgtgcttaaagtacgatttgcagaagatccacaaattaatcaagtcttagaagctatagatcaagaggtatgaatttataattctacttattcaacgatttaactatgatatgatactttacaaagaaaaaacattctttcaatttaggtacctacaaatggttctaccagtaaagatcatcaaactacaaacaatcttaactagaggtgagttgaaatttatatggtaatgaagatgcgagccggcgacacaatgttatttcaggaacatgatttagatggtaatgaatgtgtgagcccagcgacaaatgtncaagtgtttgagttttactttgactatttt

SEQ ID NO: 169370 - DNA, 437 bp, Glycine max
  unsure (1)..(437): unsure at all n locations
accatanaatactaagctggcggactataccttcgaccgaacacgggcgtgtttctgtctatgcccanattcaaggcgggctgcagcaccggctccgcttccctaactgtactggaggcggttgccgcggcttaatcctctatggttttctggagttttaacatgaccttcgagatggaagccatttgatcttttaaggccgatagatcggccttcatctgttcctgcaccccctcttcattattcaatttttctggatcgagtgatatangggttccttggtggtttctagttatgatgaaattcctacagagataaacaacggtgagtatgccaccaaaacatgagtatgcaaatggatgatcggagcacttggatccacccaagtntttagatatgtatgagtcagaactctattntataaaagacaaagcttc

SEQ ID NO: 169371 - DNA, 443 bp, Glycine max
agcttggctctagccatcagaaccatctttttctctacatcatccatcttggaataaacattctgatcaagtgagtgcttctctgcatcaaacaaatcaaatgtgatcttttggtcatctattcctatttccatattacctttccccgtatccaccacacaattggtgattagcatgaagggatggcccaaaatcacagggatttcagcatcctcttcaatgtccatgatcacaacgttcgcaggtgtcataccctaatttcgtccggggacctttgctcgatgacgtgcgaccattctttggtcctcgtgaggtgcttggcacccatcattaggcaatttgtgaaattccaggacatgccgaaaaaaacaaaaaaatattgatgcacaatccgtaagtttccgtgacacaccggaaatacaacggaagcatcgttgcataaa

SEQ ID NO: 169372 - DNA, 462 bp, Glycine max
gagagggtgcttcaatggaggaaaagaaagatggatatatagagagaggggggagcacgaaattgaaggaaaaaaagggagagaagttgaactttgagttgtgtctcacaagactctcattcatcaaagttacaataagtgttacacatgcttctatttatagactaggtagcttccttgagaagctttcttgagaagcttctttgagaaaacttccttgagaagctagagcttagctacacaccccctataatagctaagctcacccccatgacaaaaaaaacatgaaaatacaaaaaaaagtccttactacaaagactactcaaaattccccgaaatacaaggctaaaaccctatactactagaatggccaaaatacaacgccaaacgaaggaagaacctattctaatatttacaaagataagcgggctcatacttagcccatgggctcgaaatctaccc

SEQ ID NO: 169373 - DNA, 377 bp, Glycine max
agctcattgagaatgacacaggactcgtttgttatggggagaacacaaccactgcagctcgtgatgaatggtgggaagccaaaattcacgtatttgtcattcaacaaaaatagagcttccgtgcattcccgctgtaatttcgctccatctctgcatatcatcacaacttcagaggcttggttctaggattcaacttccaaaggcttacttactctaatatatctccgattcaaattgttctgtgagttttcctgtaataatctgaggcttcgagctcctgttgatagatatgccaaaggcaaatcgcagtttctaatttgtcgaaactacaaagattgagcttacaactgaaagaagagctactgtgtgtacaaact

SEQ ID NO: 169374 - DNA, 439 bp, Glycine max
  unsure (1)..(439): unsure at all n locations
ggaatatagttttagncctcgataaagattcatattttgttgtctttgantaaatctacttttgaatcaggtttttaatatttgaaaaattatgtccgagattcctgtcatttatcgaaatccgctatatgcttacgtggtcgttaaccgaccacgcaggcatgtcacgtgtgtacacatgtgtgtcacgtgtaatttttgtttgagttgactagcgatggttaaagtgggggtttttaagtgattgcatgttacccaaaccaccggaaaccccaaaccccacaagccttatcactcggaaactccttctttagatgaatcacgtgagcattcgtgaaagccctttcttccaattccttgttcttagtcttctttatcacctcctcaatctttgtttaacttcgtcacccctatggtgtgtacactcccttttgctact

SEQ ID NO: 169375 - DNA, 418 bp, Glycine max
agccttctccctattttgctataaatatgtgtataagtgaagaagaaaagggttcagcctcttaggcacttctctctctctcaaaattgctgaggaaaattatttccgtgaagaaaattcaagccgaggcgcttccgtaacgtttccgtgagtaattacccgaagattctcgaccgttcttcaagatacatctttcgttcttcattttcttcagtcttcaacgggtaagtacctcaaaccgagcttttcaattcattctatgtacccgtggtggttcacattttgtttcatgtatttttattctcgctttcatttgctttttatacccccttttgacgtgcttaagccatatatttaagtcatttttcgcttaatctaaaaataaaataaatttccaccgactcgttgaattgtatca

SEQ ID NO: 169376 - DNA, 408 bp, Glycine max
ccacacccacatgcacacaagatattagcaaaacactgtggtaattaaatcaaagaagagcaaagtgatataaatgataaagataaacataatttaaccataattgttacccgagtatatataccatctttaaaatgatgcatttgtaactcaaattaaaggagtatttaacattctaagattgtttttaaaagaaaatcgtcttagatagctacatctaaagatggttatagataaaaatcgccgttaaattctgaatttttaattttatttaaagtaaatattaaatatacgaagagagtttgctatcaaatcgatatcaaatatgaccttctaagacaggttttgaatcgacgtggaaagtcagtactttccacaacatcgactattgtaacatccattttttgg

SEQ ID NO: 169377 - DNA, 414 bp, Glycine max
  unsure (1)..(414): unsure at all n locations
agcttcagaanaaagtgatgatgtacatattccaaaaggcagagcttgaaagagcccgggtagtcgaagagaagttcaagtccatagccatcaaagtctgaaaagagtatgatgaactaaaggacgtcaatatggccacagctgaagccttggaacgagaaaccaagaaggcccgaaaggaagaacacgaccaaagaaaagttttgaggggctttataggccagcaatagtgagctcaagctccgaagaggtgaaaggaatcatcacgggtcaaaggcatgatcttgaaggacgagctaaaggcttgccttatgtcgaaaagaaatttgtcccaacagttaatcgagactgaagggaatatgtgggccatcatcgatgagtgcaaagagaagctaaatctagctgcgactcaca

SEQ ID NO: 169378 - DNA, 461 bp, Glycine max
  unsure (1)..(461): unsure at all n locations
tatannagttgatgctgagaccttcaactcttttctgaataccccgataaacttggagcctgnggagcactacatcacttactccaaattctgtcattcacatctagatccctaagagctggcttctagactttgcattccagggtgaggatttgtgcttaatgctaagagcgcgccttggaagcttcttaggaaggacatgaccaccctagcccagacctggagtgttttatcatactccaacctcacccccacctctcacacgtccgatcttaatatggacagggtgaggttagtctacggactggtcatgaagatggatatggacttgggctcgctcatttcangccaaatctcacagatggcccaatccaactcctcttggctcgactttcatgcacttattacagccttggcgtagccagaggagtagtatccgactcccttaccttcgagtccct

SEQ ID NO: 169379 - DNA, 431 bp, Glycine max
agcttaatccgatgcacctgactcctcttatgaggtagctgaatgttgtttccaaacacttcctggaattcttctagtataggttttaagcctttgggaaccactgacttggttgcttccattgactgtagatgaacccaccaccaacccagctcagttctgctatgagtatcctcaagataggagttcaaataacattgtctgaccaccttactgccttgaccttgcaatttcaccaactcattttcataagaaaattgcatagtcatggccttccaatccataatcaccttcccaagagtgcttaaccaggcaactcctaactccatatccattctccctagctccaacaccaacgcatccacaatcacttcaatccccccccatcttcatattgacccctttacacactccatttgtatcaccttatg

SEQ ID NO: 169380 - DNA, 464 bp, Glycine max
  unsure (1)..(464): unsure at all n locations
tcttgcagaggtctnttaaggaatcatcatggtgaatttattgcggatattacgatattgaggctcaattagattntgaggaggcaattcatttaattatggatggttgtgagaagtaccatggttgcttccatattgttcgtgcaatcaaggagacgtgtgctcaccctatgaaagtttcttttaaccatttgcttagagagtgcaatagttctccacactaagttagggttgtctttataacaagccatagtttattttcttcagcctcttgtggctattttaagtactttgctagctgatagtttagctctttatcccagtgtttagttttgtttgttttgggcattagccccgttgagtcagcanaaaaaaaactacatacagaaatatatatatatatatatatatatatatgtcatttgataactatttcacggtaaatattaagtttacatgtcatg

SEQ ID NO: 169381 - DNA, 444 bp, Glycine max
agcttggctgggaactccatttgtggcatgttttatccacatgcaagaagctgtacttcctctcgctcttccttttcatgtccctggtacattaaagttaaaatattcacttaaaacgtgtttgggaatggagaaattttttcatttttggaaatcatcattcctgataatcatgttttctagggataaataaaacttgttttgttgtctattgaaaatctctagataagtttgtaggaataaaagaattatatatttttactaattattttaattatttatcacattatataatttaataaaaaataacatgatatttttattatattaaaaaaattaaacttaataaagtaagaatttcaccttctcattaatttttctcataaaaaactgattaaaaaatatttctacaaatatccttttttaaaatgttatttttaaaat

SEQ ID NO: 169382 - DNA, 473 bp, Glycine max
ctgagacgattcccaatgatgagagggaaaagggggatgttttttgttttgttcaatagaattggagaaagttgcagaggttaaggaaagtttcctagttatgtgtgttctgggaaacttgaggagaaggtgttgtgttgggaaattgaggaacaggggaattgttggaaagaaaagaggaagaaggggtccgatttggaggtgccgcctgccaaacctgaaaagaggaaaaattaaaagtaaaataggaatggaacaggaatgtgagagaacccctaacaaacaaaacaagagtcgaatatgcgtaaagagtgccgacgaaattactctcttgcccttgacacgtttttgttgtccttaattttcttcaggtttatagatgtaattggagcatgatataacatgaacaagactatttaagataagataagatgaattattatatcttattctaaataattatttgatatatt

SEQ ID NO: 169383 - DNA, 419 bp, Glycine max
agcttatggtgagaatatcaacaattctgattattactcattgagaatcaacaaccccaatctgatcatgcacgtgtctctcaacctatgggggcaacacatgaagtcccccaagaccacaatcttgccaggttcagggtttatcctggatataccactgaagggcagacattttttggcatccctgtgctgaacgctcctgaaatatctcaatgtcgcccgttatcacaacccttgcattttgtaagcggagaggggccttccatagtacttgagaaggaaaggattgggcatatgcaggagaggcaacgtgccattgaaggaggaggaaattatgcctttgctcacatggtagagttgtgctcggtaccagatgtggttattcctccaaacttcaaggtgccacaatttcataagta

SEQ ID NO: 169384 - DNA, 447 bp, Glycine max
  unsure (1)..(447): unsure at all n locations
ctccctttccaaatctgatnttatgcttaaataggtggctttgttcgtgcttgcgcgcttagtgcaattctgaaccgcttagcgctcattaggggatttcggcttagcgcatgcttttctcgcttagctgatggactgaagcggtgtgcttggctggatgatccttcgcttagcgcaaatgcacaaatcatccttcttccaaattcttccttccactcagccgagtagtgttgcgctcagcggatggctcgctatgccagaagattggcttagcgagatggtgcaaatcagcacttcacaaacttgccaaattaacatgaaatttagagaaaatgattattaaacacaccaaatggacatactaagtaattattacctatctttaacaaaaattaattacaatactacaagataaccataaattggaggaagttgatacaatntaca

SEQ ID NO: 169385 - DNA, 447 bp, Glycine max
gcttgtggatatggggacccatcatatgtggtactaggtggcggccgggcgatggtgcacaacaagttttccacatccacaatgcgcgcataaacccaccatcccctgttgcccaccttcatctgagctcacgtactcccacgtagcccatattctcgtttctctcaacaccgggtccccatcaatcctcccaagcttccacaacatccaagcaaagcaacattcaaaccgcacaagctatcacagccaagcaaaacagagcaaaggcagaaaactctgccaaaacaccaaccaaatcacagcttttctcacttaaagaccccagtaacaatttcttcgatccaattcgttaaccgttggatcgactccaaaattttactggaagtctatagtgtataagcctaccatttgaccgtggggatctacaagcaaacatccagaactcac

SEQ ID NO: 169386 - DNA, 385 bp, Glycine max
  unsure (1)..(385): unsure at all n locations
ttatatatggctaatttcagcttataggtgagaatgaagctactttagctcctatatataaccattgattaatagcaatatggcactctgagcaagatttactctctataagttttcatatcaagagtcaaatgctattgaaatggataaatgcacaatataattggtgtgtatcaaccctaacacaacaacactaccacaaaaacacacaccctatgatccacaatntgaaacgaagggaaaaagtcatgataagtgaaaaagaagagaacctatctgatgtaagctccattggagcttgaggcctatgatcttcttatcaatggattcctttgcttcttggaaatgaatggcaccggaatggagaatgaagagggagaggaaa

SEQ ID NO: 169387 - DNA, 408 bp, Glycine max
  unsure (1)..(408): unsure at all n locations
aatgaatgtttaatttgagaaaacaaatgttaattttattattattattttttataaataaataactgcttctctttccagttaagaataagaaaagtattgcaagacgcaagtaatttaacgtttaaaaaaacaaacgcatttaattttggagaaagtgaaaaaacagtaccgtgaacgtgaacttagtgtaagtgaaaaataaaaataaaaagcggcgttagtttattgcttgttgcatcatcactgccgttgcatgttttgagaagttgaggaggcggcaaatggaaaattggaataaggcttgtttcgttctctttcctttctcgctctcctcacccacccctctctacgctctcttactcgctntccaatttcaaaccctattctctttctatctcacctttt

SEQ ID NO: 169388 - DNA, 487 bp, Glycine max
  unsure (1)..(487): unsure at all n locations
gacctataaaactaagcttgcggaaacagttttctctctctctgttatatctctattctgtttattgcttccacgtacggttgttgacctcatcttttggtttcagacccaaggtaatattgcaaaatggaggaagaaagaaggagaaaaggtcagttagtatatagttcttatattttgatggttatggatcatacttttgtttgtgctgatgctttcattttggagattgacttctttgaattaattaatcttttcgacattggtacttattaatctaacagatagaagtgggggatgtactatgtgaaattgaaactgacaaagctacactagaattngaaagtcttgaagaggggtaattntctttntcatcctttcaattntntcttcccatgttntggatgaacctgtaattaagccttatatacttcagtntcttaccatctagaaaattagtatgtctggtccacttctttctaagtgg

SEQ ID NO: 169389 - DNA, 448 bp, Glycine max
  unsure (1)..(448): unsure at all n locations
agcttcaagaaaaagatggcctcagcaaactctttatttccagaagggaattctatcaatagacctccaatctttaatggagagggttaccatgactggaaaacccgaatgcaaatttttattgaggcaatagatctaaatatttgggaagccatagaaatagggccttatatacccaccacagtggaaagagtttcaatagatggagttcatcaagtgaaagcataactatagaaaaacctagagatagatggtctgaagaggatagaaaacgagtacaatacaacttaaaagccaaaaatataataacatctgccctgtgaatggatgaatatttcagggtttcaaattgtaagagtgctaaggaaatgtgggacactcttctattaacacatgaaggaactacagatgttaaaagatctangataaatgcactaactcatgagta

SEQ ID NO: 169390 - DNA, 477 bp, Glycine max
  unsure (1)..(477): unsure at all n locations
ctcagctgttgagtactggaaagattaagaaatgtgtgcagttgttctcccaccagatttctgagcaacttcttcaatatttctataagggacttagcaacatggagaagagtatgactgatgctaccagtggtggagctcttggtgatatgacccctgctgaagctaagaacttgattgagaagatggcttccaactcccaacaattcagtgcaagaaatgatgctattgttcttagaggagtccatgaggtggccatggattcatcttcatctactgaaaataaaaagcttgaaggaaaacttgatgccttggtcaacctagtaacccatattgccatgaattagaaatctacacctgttgcaagagtctgtggtctatgttcttctgcaaatcaccattcagatctttgtccttctttgcangaatctagagtcaatgaacaacctgaagcttatgctgcaaacatttataata

SEQ ID NO: 169391 - DNA, 442 bp, Glycine max
  unsure (1)..(442): unsure at all n locations
agcttcaaagtccaccccaagaaggttattatatgattttaggttgccatggattaaggatgaaacttgatggatgtaagcaagtccttgtgctacatcttctgctattttcaagcatgatgtccaatgcaatggttttgccctcgctgatcttgaacctgngcataataatcatcatcaaacatcaattgggcaataactgatagcatgtttgaggtggccgtgaggtgagtcaaaattaattttgatttcatggtagatgtgaaacacattattttggaaaaatcatggtgacaatgattcttttttatcagatgatgctgattttgaggtaatcaccatgatttttaatggtatcccaacatgctatggaactgattggtccccccacacaccaagaagttcaggtcttttgactagaattactataaaaattgaaaat

SEQ ID NO: 169392 - DNA, 459 bp, Glycine max
  unsure (1)..(459): unsure at all n locations
ngaacgaatgtaagacacatcttcttcaacctttgtgattcttgactccatttcattgaagcgcatatccacttgtaattccaaagtgtcaaacctttcaccaacaaaggtttgaataccatcaaacctgtccattatctttgaaagaagagatgaatcttctccatcatgtccttcttcaccaatatttcgagcacccttcttcacccaagagccatcatgctctttttgataaccaaaggatgctatgactgaagcgcctataaggaaggatctcttgattggaacatagggttcaaaatcaagagggatgttgaagtgttgaaggaaaagggtaacaagatgaggataaggcaatggagcattcaatcgcaatgccttatacatgtgatatctaacaagatgtgcccaatcaatntgtaaacctttatgaaaggccacatgacaatgagatcttct

SEQ ID NO: 169393 - DNA, 429 bp, Glycine max
agcttatcatcctcatttataacaacttttgtattatgaaggtacaacaacaacataatgatgtactgaaacaatgaataattgggaggtacatttagttatatgacttcaatctacatttaacttgttttattttgcaacatcctagcatttctactatgcaaactctatttttacctatgacgaactgattgaatgaataatggggagatatctaaggatgctgttggttggagctgcccttgagttcaacaaaatccaacaaattccacctattcaaagattagataaaaattgattagaaacacatgaaattttataaaaaggaaacaatttggtagtgtatgtcatgcgaaagctcttgtatactttctctaatttaagtgtagcaatgtgtttagggctatttggatttaaaagtgttgattg

SEQ ID NO: 169394 - DNA, 462 bp, Glycine max
tgtgagcttataagggagttggaagaaaggaaggtggagctaaatttggtcacttacaacactgttatgtatggattttccagtcatggaaaggaggaatgggttttgcaggttttggggagaatgttggtaaatggagtgaagccagatgccattactgttaatgtagttatttatgcgtactctaagttgggtaaggttagaactgccatccagtttttggatagaattacagcaggaaaggaattgtgtcctgacataatagctcataccagccttttgtggggtatctgtaattcgttaggcattgaagaggcaattgtgtatctaaataaaatgttaaataaaggaatctttcccaatattgccacttgggatgtgttagttcgaggctctcttaagaaattgggtcatatgggaccaatccgcatcttggatgatatcttgggaaaaggataatac

SEQ ID NO: 169395 - DNA, 418 bp, Glycine max
agcttcatcatcaactcaagagggatgtgttttgaggacttaattgaaatagacaaagatgatgatcttagtctgtttgtaaaaagattcaactaattcttgaaaataagaggaaatcatagaagatcgaattttaaatccaagaaaagagcagaagattcatcctttactccaagatgttgagaatgcaaccaacctggacatctgagggttgattgtccaatgttcaagaaaagaataatgaaatctgaaaagaaagccttcaatgaaaagaaggctaagaaggcctacattatatgggatgacaatgatatggactcatctgaggaattagagaacgaagttgtaaacctgagtctaatggctaagaactatgaaagcgatgaagaggtaacatcttccgataataacttatcct

SEQ ID NO: 169396 - DNA, 450 bp, Glycine max
  unsure (1)..(450): unsure at all n locations
cttgatcacgtgcttgatctctagatgtgtggattactattatcaactaaagtggcatactctngacttggcttcaaagttaaaaaaatgtgcattggttttcagaggttagtcattaagattttttttttgtttttttttttcattacatttgttaatttaattgataatggcattataagaagatggtcgttttatgcattagttccattggcaaatatttttatttggtgtttttggtgcagaatgaataggatctatgtgttactgtagggttggttatgttatttttattgtgttagggtaattttggggttagtatattattttgaaaacattatttattttaggaaattagtgtttatttaagattggactagggttttgaccatccttgattataaatacttatttagatggcttatgtcttcatgctctcaatgtgattag

SEQ ID NO: 169397 - DNA, 388 bp, Glycine max
tcgactgcagctgcagcttaaccacgaccatgatctgtatttttaatagtttcgtaaccttgacatcataacctctctccaacaatcaagtttgctcgcctctttaaaggaatgtggcctacgatgagtagagatggacaaccacacagaagtatgattacaagaacacttaaacaaataaaaaaaggattgcaaaggataaagattctgtaaacaaggagaagaataatatgaaatagtgccacaatagtaatcacacacataaccgagaggtgttatgagtctactagacaatctgacaggatctgcagtgattggaaatatgtcattattagaaatatacttactcgaacaattatacaaaggttctaatacttgattctaacca

SEQ ID NO: 169398 - DNA, 470 bp, Glycine max
  unsure (1)..(470): unsure at all n locations
gaaactcacgctatgctganatattacaatagacctccacaacctcagattcttattaaccacagcagagcaantatgaccttttcagctacagatacaaccctggatggaggaatcaccctaacctcaaatggtccagccctcagcaacaacaacagcagcctgctccttccttccaaaatgctgctggcccaagcagaccatacattcctccaccaatccaacaacagcaacaaccccagaaatagccaacagttgaggcccctccacaaccttccctcgaaaaacttgtgaggcaaatgactatgcagaacatgcagtttcagcaagagaccagagcctccattcagagcttaaccaatcagataggacaattggctacccaattgaatcaacaacagtcccagaattctgacaagctgccttctcaagctgtccaaaatcccagaaatgtcagtgccatttcattg

SEQ ID NO: 169399 - DNA, 440 bp, Glycine max
  unsure (1)..(440): unsure at all n locations
ttcattaatttgtttgtgaaagatacaacttatgaatgaatctttgttttggttngaatgtcaaatgctaaacttgcaagttatgaatacaataaaacatttaagtcattcatacacttaaatcaaataattacaaattgatatctcatggcccttttacaagttgtaattaatgaaatatagtgtcaactatgtataaccatagaacaaaagaacactaaatatctaatttaatcgacactatacaaaaataaaatggaaaagaaaggacaagaacacatcttcatgtccttacaagtccatctgcattgtctttnttttttagacaaatatgagttggatcggttattactttaaaacaaggacaaagtatgttcataaggaaggcccctaccaaatccacatatacaaagaggtttcgaaattgcaaaatagaaaat

SEQ ID NO: 169400 - DNA, 268 bp, Glycine max
gccatagcagaggtgtgcatagaagccattgcatcactcaccccatactacgaccagcctttgagatgcttcacattcggagacttccaattagtaccaaccattgaagaatttgaagaaattctaggatgttctctcgggggaagaaaaccatatctttcctccggatgtctcccctctttgagcagaattgcaactgtggtcatggattcaacaagaggtttggaccgcatgaaacagactcggaacggcatagtgggcctaccac

SEQ ID NO: 169401 - DNA, 460 bp, Glycine max
  unsure (1)..(460): unsure at all n locations
tctngtgtagccgctcttggtgctcagaatatcccanaatcaaatctttcttattactagctatgttgaattctttagttccttaatgtgcaaccttcaaattgttgctcatttccctctttattttctgcaaaaaagaaaatcaatatcaaagaaaacatggatgaagtcctaaggatgtcatgtacatgtgtatttctgaagatatagtatttatattccatcaagcatacattgactgttgattacatgtaatagactttntataacatggttgccccaaattacaattaaaaagcacaactaccaatctttcggagtcctttggttaattngtcttgtctccttctgtagtggggttctgcttaataatattatacttttgccttccaaaaaaaaacttatgactgatcctcttttcattaatcttatgttgtatgttattgtataaaagatcatg

SEQ ID NO: 169402 - DNA, 455 bp, Glycine max
cccgggatccttgagtcacctgcggcatgcaagcttacagccaggaagcgttgatgtgttttcgacccttcatccccggtcaaacgccatgtgaagtggaagatggtcccccacaagaagacaggggagatgactactgaggccgcaaaggaaattgctgagaagattgtaagtcattttcaactaaccattacaattatgtgtcaatattttgagaatgccatgtaccactgtgtgttttctgtgtaggattcgtttgatgagcaggccacacggggatcgttcgtcccttatggacgtcaggatgttcttgccgctgctattggttgtccagagcaccctggacgtgtccgtgctgctggagccagtgtcaccatcaagcaatactttggatcggctccacggacgtcccgcaacgctttctccctgtcttcttgacgaatacagcagctgac

SEQ ID NO: 169403 - DNA, 473 bp, Glycine max
  unsure (1)..(473): unsure at all n locations
accttgagtcacctgcggcatgcaagcttcttctcataactaagctcacctcttttatatgcttccttaagaagattcctaaagaagctagagcttagctacacatacctctctaatagctaagttcacctccttgagatgagaagctagagcttagctacacaccctctataatagctaagctcacccccatgacaaaatacatgaaaatacaaaaaaaatccctactacaaagactactcaaaatgcctcgaaatacaaggctaaaaccctatactactagaatggtcaaaatacaaggtccaaacgaagaaaaaacctattctaatatctacaaagacaagagggctcatacttagtccatgggctcaaaatctaccctaaggctcatgagaaccctagggccttcccttggatctctatccaatgaccttgcggggtaggatngcatcatcattggtacaatctttggg

SEQ ID NO: 169404 - DNA, 458 bp, Glycine max
  unsure (1)..(458): unsure at all n locations
attgatgtgataattgtaagtttggatggtggggtagtcaataatgggattaaaagctcatattttcaaagaacttttattgcaaaagattttgtaactttagttgagctagaacttttagcttcggttaagttttgtcaaaattgggttacacaaatttagttaaagctacgatttttggctcaactaaattttgatagaattgtgtttntacaaatctagttgaagctatgattnttagctaagctagtttttgataggattggatttgcacaaatttagctcaagctatantttttgctcaagctaaaattgtggctttagctagatttaggtaggatgttttatttatccttaaaactttcttgagagtttctaagccaattccaagtgcatataatatattttgagtttttattgttatgttaaaatntattacaagttaagatgaagtaatt

SEQ ID NO: 169405 - DNA, 442 bp, Glycine max
  unsure (1)..(442): unsure at all n locations
agcttgcttctacatacacgccctcgccttcttatggctgaacgccctcaccttcagaggactacacgtcctcgctgtcgcagcgtgcccttttgcgggcgagcgaggcgaggcacacgggtgcgctttccaaaggaggaaagatgcgcggagtcgccaccaatgtttatttgtggaaaacgtcgggaaaaccgaaggaaaccggtcaaaatgaaaattctaagttcgggagttgtatttacgttgaggaaggtattagcacctctcacgtttgtctcanaggacaacagcctattttttagaattgtggaaattgtgttaccttaactttatttctttttattttttgaggtcgacaaaagcggggctcttgctcctacgtaccctctatcaaagaggaaatcagacctacgtaggtctttcttatgcgtgaatcaagtga

SEQ ID NO: 169406 - DNA, 463 bp, Glycine max
  unsure (1)..(463): unsure at all n locations
gaaattgtcatctctatttacctcgcttaggttntaggagagcacattgngttaagataattttgccccaaatttgggggagtttgtntgatggataatttaaaaggtaagaaacagcaacacacacaacaaattaataaaatgttttatgtgttaaaaaaagagaaattcanataagtgtgtgctattaaaacaaagtcaagtgaaaggctagtgaatggactaagtggattgaaaagacaaactgggttagtctaggatttgttctctcttagaactcaagtgtttgcatcatagaaaaaccaatattttttgtagcccagcctcagtacaagctaataaaagtccttctgattcaatntgtgcatttctaaatttatggcatgagataaagtataaagaatggacctctngttagttgttattgctaaatagtntaaacacttatgcgtgagtgatacag

SEQ ID NO: 169407 - DNA, 451 bp, Glycine max
tgcggcatgcaagcttgtaggattatggtgtacccatcacatgtggtactaggtggcggccgagcgatggtgcacaacaagttttccacattcacaaatcgcgcataaacccaccatcccctgttgcccacctccaactgagctcacgtactcccacgtagcccatatcctcgtttctctcaacactgggtccccatcaaccctcccaagcttccccaacatccaagtaattcaacattcaaacaacacaaactatcacagccaataaaacagggcaaaggcagaaaactctgtccaaaacaccaaccaaaatcacagcttttctcacttaaagaccccagtaacaattccttcgttccagttcgttaaccggtggatcgactctaaaattttaatggaagtctctagtacataagcctacactttgacccgtgggatctactagcaaaca

SEQ ID NO: 169408 - DNA, 409 bp, Glycine max
  unsure (1)..(409): unsure at all n locations
aatggatcatttntaaggtccaacgctntaaaatgatcacctcttaagcaaaaaaagaatcacttgataagaaagaactacgtaggtctgagttcctcattgaggatacgtaggagcaaaagccccgcttttgtcgaccaccccaagagatcgttaatggtccaatgccttaacgtttctctcctttcaaaaacaaaagatcgttaatggtccaatgccttaacgtttctctcctttcaaaaacaagagatcgttaatggtccanagccttaacgtttctcccctttcaaaaatcaaaagaccgtttaatgggtcaacaccttatatgaccttctgttcaataaaaacatantttgcaaaanaggacaaaaacaacttaaccaaacacttttgttcgaaagaactacgt

SEQ ID NO: 169409 - DNA, 396 bp, Glycine max
tgcggcatgcaagcatgtctccatctgtgtcgtgacgggctatttctttcttcttcctcaccattgaagctccatcaaagctccaacctttgcacaccattattgctccaaatcgcgaaaggaagccatatatggagtcgtgaagcgcacctctccattgggggacttcacatttcaggtgtgggtagacttcttctcacataaattttcgtggaaattgggttttgggagatatgatgggcagaactataaggtttatgcctcatgatagttatttgtgaagaaatttgatgaaagcatgttcaacttgtcatgtttggtatgagtcaagcttacccattctgtttacggttttatgacatgcttgtaagcctgatccccaacaggcgatggaaa

SEQ ID NO: 169410 - DNA, 466 bp, Glycine max
  unsure (1)..(466): unsure at all n locations
aaatctaagcttagtactctggcatctagatttacattgagagtctttattgatatgcnctacagtcgattttcagtgaatatctaattgtcataatatatgattcatggatatgatctaggcattctttctttctttatattttaagccactggccaaacaactatcccaatatatattattgtttccatatgcaagccctatgagccaaacacttgatatntttggaacactaaccttggataaaagtttcctaccttaccttaagtttggagagcaagggtgtctttgatgggaatttttatcattcggtggctaatatgatgtgaatacttcattattatgggtgtctaagaaaattaaatttttatctcaaaagaaaactcctaaaattgaactcaactactagagaaaagaaaaggaacgggagaactagttcttatggatacacaatgtttgaatatat

SEQ ID NO: 169411 - DNA, 444 bp, Glycine max
  unsure (1)..(444): unsure at all n locations
cgaccttaagtcacctgcggcatgcaagcttatgcatccttggtcactctcgagaatggttgtttgtttggagaaaagggaacaccactcattttcttaaaatntctatctaatctctgatgccaatcctcctaggaagagaccagtcactagagtcatgagcaagaggctccaacaggattggactatagctgctgaagaaggccctatggttctcatgaacctcagggtagatttttgagcccatgggccaatgttgggtccaattatctttgtacatattagactaggatgtcattatatgtggtccttatatttagggatccataatgtaggtagggtaccctagaaatataggattttttaacccttgtattttagggcacctagactactttttgtattaagggtagttttgtaatttcacatgcactacgtgaatat

SEQ ID NO: 169412 - DNA, 472 bp, Glycine max
  unsure (1)..(472): unsure at all n locations
ttaataatgaaatcattttaagattaataatatttataaccattgattataattaaaattatattatcattttcacgttcattctcaaattgattgtttcatttttttatataaactgtaccttaaagggttgtaaatatccacccaatttttttttagtgtgctttctatcttctttttcttcttttcattgntataatatgatttctttcattcttttatttttatttttatgtatgaaaaagtatacttgaatgtgttattgatcatcaaaattgacaatttgactcttttagatcggtaaggtataaggtggatctatattcataattgataaaaaaataatatatttaacattttatttntagtgttatttattattatattcttattctaggtttaactatttctttgaatgaattttatgagatcgaataaacatttgaatcaacatgatgttttattataaaat

SEQ ID NO: 169413 - DNA, 442 bp, Glycine max
  unsure (1)..(442): unsure at all n locations
agcttgngattgcattggggcacctattttgattctcctatgctgnacctacatacataaaaatagccccaccatcccaattgttacagaatcatattcatacaccattggggcatttcactgagcacttggtgagcgcatgttacgacatgaattgcaaaagaatgggagcaatgtggcatgccccattgcttcagaatacaacctaggcctaaggccttttcattcaaatcctcaattcaagaaaacaagcaccaaagcaaaccaaaattgcgtcacaaatataagcatgttctcacaatctaaggcaccagaagatgaagaaaacacatcaatgggaagcaaaaacatcaaggatggaatacttacttgttggagtgaatngaaacaccaaaaatgaaagcaaaggcaaccaaaagtggcttgagggggcatgaaccac

SEQ ID NO: 169414 - DNA, 460 bp, Glycine max
gtgatctaccaccaccaccgtcaccaagatgttatgtttctattatgactaatattattagcactgcgatttctagctgtgtatttggctatattattatgacatttgaacaaattagtatttctttgatttgcatagtatggctgaacaattatgaattatgttatatgactatgtgggttttatatatttgatctattcatgtttcttgcttcatgattggtttagattttttcaatgaatgtcttgtgaatgattagtaagtgatgtatgttttatatttgttgtcgactatggcttttttgttgatgccaaagggggagagaaatagggattacatcaagcactcacataagtaattaactaaatttcaagtgaagcataaactcaaaacaaagagggagaatatggagaattggtgatcgactagaaaaaagttatgtatgtgtttcttgattcc

SEQ ID NO: 169415 - DNA, 433 bp, Glycine max
  unsure (1)..(433): unsure at all n locations
agcttaactgcgtaggggattattgcgtgtattttttttaccaagngggtacaaaattaccacacgtacaaaattcatcatggctatgattctttagcttttgcctgttttgagtcctttttccttaaaacacttcatgatcacccgtctaacctaactaatagtaaactatgagttcagtccacaaaatatattataaaatgcatgtaataggcctacacctacacataaaaaaggttatcaaaatctagcttatcaaatttgtttttgtctccagtcatatgcctagagcatccatttgtcaagaatngcatctttctcctcttgttgtggtacaaacattcctttttcttgtcataatatgccatgagacatagatttgtgaaatcttcttatcttttttagaggatgatgaatatgtggtatcctatct

SEQ ID NO: 169416 - DNA, 466 bp, Glycine max
  unsure (1)..(466): unsure at all n locations
ggccacgcanaaactgacttagcaaagagtgttacaacattctttatataaatgttggattntgcataatagtaataaattcatgattaagcattcatatcttgaacattgtgagtgtgtgttaatactcattggacaataggtccttggatgcaacaatggacgacgtatagaagttaattcattcattaacagatattattccatggcaatttcttaacaaaatcaacctttcttcaattaagggttttgtgaaaatgtcagcaagttgatcattattgaatacaaattgtaaatccattgtcctgttcagagcatgatctcttattaaatgatacttaatttctatatgtttatctctagaacagaatgttggatttttagaaagactaataccagctttattgtcacaatagatggggattttaatctcataaattttgtcacaacttgttgctgatgtaac

SEQ ID NO: 169417 - DNA, 446 bp, Glycine max
agctttctactgcattgaagacttatggttttcgtcaatcttgcttggactattccctcttcactttacggactacaactgtacatcttgtggtgctagtttacgtggatgatcttattgtttccggtaatgattctgaagctattcttcggtttaagctctatcttcatagatgctttcatatgaaggatttgggaagattgaaatattttcttggagtggaagttgctcgctcacccaaaggaatttacttgtgtcaaagaaaatacgccacggatattattcttgagactgggttacttggagccaaaccaatgtctcttcctcttgaagacaatcatcggttagcattggctgaggggtccgtgttctctgatcctgaacgttatcgccgacttgttgggcgactcatctacttgtgttcactaggcctgaactctcttact

SEQ ID NO: 169418 - DNA, 444 bp, Glycine max
  unsure (1)..(444): unsure at all n locations
tcttgcgtagccgntcttggtgctcagaanatcccataaacaaatccctcttattactagctattttgaattctttagttcctgaatgtacaaccttcaaattgttgcttgttcccctctttcttttctgcaaaaaagaaaatcaaatgctgtcaaaacatggatgaagtcctaagaaaatcaatatcaaagaaaacatggatgaaatcacaattaaaaagcacaactacctatctttcagagtcctttggttaatttgtcttgtctccttatgtggtggggttttgtttaataatcttatacttttgccttccaaaaaaaacttatcactaatcctcttttcattaatccaattttgtatgttattgtataaaagatcatgggttctccacctgcctncactactcctcctnctcctccttctcctnctnatncttctacttc

SEQ ID NO: 169419 - DNA, 443 bp, Glycine max
agcttggaaggatgcttcaatggaggattttatagagggagagaaagagagaggggggagcacgaaattgaaggaataaaagagggagagaagtgaaactttgaagtatgtctcacaagattcttattcatcaaagttacaacaagtgttacacatgcttctatttatagaccaggtagcttccttgagaagctttcttgagaaaacttccttgagaagcttctttgagaaaacttccttgaaaagctagaacttagctgcacacacccctctaataactaagctcgcctccttgagaagcttccttgagaagattcctaaagaagctagagcttagctacacacatcccctataatagctaagctcacccccaagccaaaatacatgagaatataaaaaaaagtccctaatacaaagactactcaaaatgccctgaaataca

SEQ ID NO: 169420 - DNA, 467 bp, Glycine max
  unsure (1)..(467): unsure at all n locations
ggaaagntatgtctcgtatcggtttaatcaattatcgatatctcataatcgattagtctgttgtttgagacaatgactaatttatccaggagtctttgcttcaatcgattaccaagtggtttaatcaattacttctctctcgtttagttgttcagaagtgaacaaaaacactttaattgattactttgagtatctaatcgattacatcattcttgatttatttccaaatgttggtaagaacactttaatcgattaaaaagataatctaatcaattacttcgtttaattaattgattattttgtagatttaatcgattgcaagcagttataactgttttctctatagataactagcttgtgctcccttccatatacatcaagagaatactcaatatctcgaaaataacacataaacatctgaatgagataaaaatcttgagttggtattagtgaaaaaagaagagaaa

SEQ ID NO: 169421 - DNA, 437 bp, Glycine max
  unsure (1)..(437): unsure at all n locations
agctntaggatcaaatatttttctctctttttctctcaaccgttcttcattcttcttcctcttttcacttctgttcttccaatttcttgcacaaaattttgtgccttttccattggtgatgatcatggaaggctaaacacttaatcaatcaaaggatccactccaagcaaggctaaatttgagtttttgtttagtatttctaatctttctgaatgttcatctttttcttcaatcctatttttgattttcatgagtatgattatgcttaggattataaatggattaggttatcgattcatttcctaatttcgaaatttaatcagagaatgtttggatgatcttccaacctaatttgcgatctctaacaatttagggattgattcgattgaactatctctaatgtatttgactgaactntcacactctgaacatcattc

SEQ ID NO: 169422 - DNA, 461 bp, Glycine max
ggttgttgctatcatgtgatgtgaacaaccttaggaatgtatgcatgtgttgaattgattaagtgttggtgtagagttgataatcttaggttttggaaattgtcatcatgtgctatgcgcatagttgcgtgctaagcgtgtatgtattgttgcaagagacacacttggcgcatgatagctcgctaagcgcacataaactctcgctaagcgcaaaaagccgtgccgagcccaaaaatctctatgcatggagtcatttcaaattgggcttagaacaagatagcctgctaagcaccccaaaactctcgctaagtgtgaagcgtcgcgtgaagctcaaaatcccctatgtctagaattatttcacattgggcttagagcacctaatacgcaaagcccaaattcctttctgtttggagcttccatgtattgggcttagcgtgcgaagcgcacacttactagcatgc

SEQ ID NO: 169423 - DNA, 390 bp, Glycine max
  unsure (1)..(390): unsure at all n locations
agcttaaaaggggttgtccagtcgggtgtttgtatgatgggggtggtagtcagcgctcttttgaggcaatcaaaagcctctttgcatctgtcattaaagtcaaactccacctccttttgcaacaagttggacaatggaagggctactttgctaaaatcccttataaagcgcctgtagaatcctgcatgaccaagaaaagatcgcacctctcgcacacaagaggggtaaggcaattgtgaaataacagaaatttttgtaggatctacttcaatacccttattggaaataatgtggcctaaaactataccttgctcaaccataaaatgacattntttcaaaattagaacaaggttagtttcaatgcatctattcaaaactttttccaaacta

SEQ ID NO: 169424 - DNA, 344 bp, Glycine max
gaaacatatagtggatgactactcaagatggacatgggttatgttccttgctcacgagaatgagtcctttgtggtattctctaaattttgtaaaaggattcaaaatgaaaagggagtatgcattactttaattagaagtggtcatggtagagagtttgagaatgaaagcattcatatattctgtgaagagaatggagttcttcataatttctctaatgctagaacacctctacaaaatagtgttgtcgagagaaaggatatattcatacaagaaatggcttgaactatgctcaatgataactctacacctaaacactctcgagctaaaggagtgaatactactt

SEQ ID NO: 169425 - DNA, 447 bp, Glycine max
  unsure (1)..(447): unsure at all n locations
agcttcgaccaaatcttgtgaaacctacttatatgcaacctagtatgtaatgtgcctcccacattggaatagaatatgagggaattgttaatggaagttaatcgtgtcatccaaaggaccttaatgccgtggataattgacataatatatacctagcttgtttgtttatttgcctatctgaagcattngtatcataatgtgattgtcatttgtcaacataatgcttttgaagatactcaaaagtatggtcttcttacaacaattatgtcatagaagcacaatatgttatgcgttaaaaaaaacataaaagattctagttcaatgacaagttattgcagccctttgtatttggtatacgattcttatgcaaaaaaaaatgttcacgcattgaaattttaattggttgaacagtaatgagttgttgaaccctctggacatgtatttgat

SEQ ID NO: 169426 - DNA, 434 bp, Glycine max
  unsure (1)..(434): unsure at all n locations
cacctgcggcatgcaagcttccttgagatgctagagcttagctacacacatctatctaanaactaagctcacctccttgacaaaatacatgaaaatacaaaaaaaagtccctactacaaagactactcaaaatgccgtgaaatacaaggctaaaaccctatactaatagaatggccaaaatacaaggcccaaaagaaggaaaaacctattctaatatttacaaagaagagtggatccaaccttaacgcatgggctaaaaaatctaccctaaggttcatgagaaccctagggccttctttagtagctctagcccaagcctcttgaagtcttctatccaatacccttggggggtaggattgcatcaaatgatcagtggaaatttattctattnttgattaggcgagaaaatgacttaaataaatgattaaatcacg

SEQ ID NO: 169427 - DNA, 463 bp, Glycine max
  unsure (1)..(463): unsure at all n locations
ntgtgtggagcttcaatggagaatgaagaagaagaaatggctcgtgagggagagagagggctgtctgaaatttcttgtntgctgagtgaggagagagaaaagctttttggtcttaaataaaaggttttcctctttttctattattntattcaagctctgccacatgtccctatttgattggagcaaaaagggctcactttctctttttgactgtgacccatactcagtcacaaaagtgagaaaaatctgacctttgaaacgctaaaatcctgcctcgatttgcgtgccgtttctctgattccagtttctcgcgtttctctgcgtctgtcggggccagttttctaaagcaagcaatatatatatcataacgctcagaataaaacccccagcgtggttcagaggttggtttcgttaaattttaagtcgtacgcacaacgatgatttttaactaattaattaggaa

SEQ ID NO: 169428 - DNA, 449 bp, Glycine max
agcttcatggtgaatcaaaggtgattcaaaggtgttttaatgataacaatgatgataagaaaagatgatgacaaaggtgatgacaaacagctcaaatatcaatcaaagaacaaatcaagtgaatcaaagatcaatcaagaacaattcaagagttcaagataagaatcaagaagaattcacgactaaagaagaaagtctagagacaagaatgaagagaagactcaacaagataagtattaaaaagtttttcaaaactttgaatagcacatgagtttttgacaaaaccttttaccaaagagtttttactctctggtaatcgattaccagattgttgtaatcgattaccagtagcaaaatggttttgacaaagttttcaaattgaatttacaacgttccaattattttcaaaaagctgtaatcaattacaatggtttggtaatcgattacca

SEQ ID NO: 169429 - DNA, 457 bp, Glycine max
  unsure (1)..(457): unsure at all n locations
tataccatactcaagctntannaattgaattaaaatgctcacaaactgctggtaattgattatcatatattgtgtcacncgattacctagggcaaattttgaattcaaattctaatagctgatgcaaatcagttttggccactggttatcgattaccagagaagaaatttcttgtaaaaaactttttaacttaattttcttggacaaaccttttgctaattcaattggaattcccttcctatataatataccctttctaagactctatagactgtcttgatcatccatcttgaatatatttaattgctttgtcttgaataaagctttgagacgcatgtgatcttctggcatcatcaaaacatcggcttgatcctttgtctacaagagagaggcgtccagctcacggacgatgagtacacacatttttaggaggagatagctcgccgacattggacgt

SEQ ID NO: 169430 - DNA, 393 bp, Glycine max
  unsure (1)..(393): unsure at all n locations
tttatacttctccgattgttaattattattactagttattgctgagaatagggattagtgtttaatttctgattatatatggcattattggctctgctgctctctggtttattatatttgttgcccaaaatcattgtaggtgtggggaagagttgtctacttttgaggttttctgatggctcattcacaacaagttctatcaccaccattgggttagtatattatgtgtaaaccacctttttcttatcgcttgtgaaaaatgctgcagangctncttggcttggttcaagattcttacatccgtatatcactagttaacaactgttattcgattgtgtcatacacaacaaaatattattcatgaatattttaaatatacacaatctttttaaa

SEQ ID NO: 169431 - DNA, 413 bp, Glycine max
  unsure (1)..(413): unsure at all n locations
agtttccaagtgccaattcgtcttcttttttattccagncttcttctggcttcaatccatcagtgggctttccttctgtgtccagcatcttgggatgttcccagcctttgatgacagctttccaggttctgctatccagtgatttgaggaaggccaccatccttgctttccagtattcatagttggttccatccagaattggtggtctgttcactggtcctccttctttctccatgttcatcagaatttatctccctaggtctcactcagtgatttcgagtgcctgctctgataccaattgaaattctgataccaatgccagatgtcgtacaggatgtcacgacatcacgcttcacaacatgcagattatctctgagtgtatgaacagattaaacaagtaaataacacaagag

SEQ ID NO: 169432 - DNA, 450 bp, Glycine max
taagctttgagcatattcaaacgacaataactgtttactcggatgtctgattgagtccccgaatatatcgacacgctcgaaattgaatgttgaagctctgagcaaattcaaacgacaatagatttttactcggatgtctgatatagtcccgtaatatatcgagacgctcgaagttgaatgctgaagctctgagcaaattcaaacgacaataacattttactcggatgtctgattgagtcccgtaatatatcgagacgctcgaaattgaatgttgaagctctgagcaaattcaaacgacaataactttttactcggatgtctgattgagtcccgtacatatcgagacgctcgaaattgaatgttgaagctctcagccaattcaaacgacaataactttttactcggatgtctgattgagtcccttcatatatcgagacgcttgaaattgaa

SEQ ID NO: 169433 - DNA, 383 bp, Glycine max
  unsure (1)..(383): unsure at all n locations
aagcaccaacaagaatcaagccaacgctattgtgcaagcaatcataggggcaaaacacaccaaaagactaagacgatgatggctcaaatcctcacaaaggtaaactcaccactttcaaactgagcttgcaaaactatcatgacatgtagaggaaaaacaaggatttcaaatcacaaaatgtcaagagactttcattttcagaacaattacccatttcttgaacatatcctacaattcaaagaaaaatatgcaaacgtgttcatgccaacagaactgacctaaaactattaactagaaacccaacaaaactcacaaaactaacactactagcanaaccaaaaccaaagaacactcgcccccatacttatacaacacatatgcct

SEQ ID NO: 169434 - DNA, 433 bp, Glycine max
  unsure (1)..(433): unsure at all n locations
agctttagtcaaacagagaaatccgaanatttattttatttgggtgnngaaaaaccataacaaaactttctgtgatttgtttaaagatacaatctttgcagatgagaatgcttcataaacattaagaaaactagcagatgggcctaaaagaaatgttataacctggcaaggatacggcataaacaggtattcattttacacaaaagcacaagatgacaaaagtacaatgcagaacagcggggtcaccctaagggctgaatctcaacactttgcaagtttcaatgatgtcaatccctgtgtagcttccatcccttactttgggttcattgatgaaatctgggagcttaactatgtgaaatttacggtatgtgttttaaatgtaaatgggttgacagcaacaccggtgtgcgcactgatgatatatggattacat

SEQ ID NO: 169435 - DNA, 457 bp, Glycine max
  unsure (1)..(457): unsure at all n locations
acactatgaaactcagcttgtaaataatgtctgacactatttatcagaaatgtattgtctctcanacgctcccacagccttacatcttatatntttgcgtggtgtcaaagtgaacatctaattagtttatctttcgttatttattgtatcgctgctgagaacaatttgaattagaatagaataattctatttcctccacatatctattgtctctcttctctcctctgttttttataatttcctcctcaaaaccaacaattggtatcaagagctctattcttacgggacctgtaccatggaaggtgatggagagaattatgatctttgggaagtgaaaatgcaatcctacatggattctttggattaatgggatgctgtagaagaagattatgaaatatatccgctgcctgaaaatcccaccatggcccaaattataaatcacaaggaaagaaagatg

SEQ ID NO: 169436 - DNA, 158 bp, Glycine max
  unsure (1)..(158): unsure at all n locations
aaaggaccccagggaagcncaaagagccagccnccagagaagccccacaagcaagcgnacagcacaaagggcgcacaaagaacaacgacgacgcgnngcaaanccagaagaaggcancaaagggcaacaaacaccaanncnnggaggaaacccggaca

SEQ ID NO: 169437 - DNA, 382 bp, Glycine max
agcttgtcaagaagcagacatggtatctgtgttatgatgaaggaccaatctcacatattttttaaaatctgaggatcaaaaccaatgacaaataaagattaagggccaaaacaaaatttaatcaatttttttagaaccaaaacatatttaatccgataaattattttaaaaaacttaaaaatcatcaagaccataataaaaaatgtaaaattacatttaattctattttaaaaaaatatatatgtttaagccttatctaagattttgcccaccaaaaaaaaatgttaatgtgatttttatctatcatcaatttagccctctattgttgacaccaacgatgttaattttatgattgaaacaatggtcttgcttgacacttatt

SEQ ID NO: 169438 - DNA, 351 bp, Glycine max
gtgtgtggcaaccccagagagttttattgtttattttccgcctgcaaactttctgtaacttgtatatttgaaacctcccccaataccacaacctttttttccatagggctttcctatgttataaacatttgaaattctcctaatatctcttacgtgtgttaggataacgtaatctaattacgtaatgcattttttccgtgaattaaatttcttcctatcaaaaacaactgttcggattttttactaaaaggaatctaaaacttaatgattctacgaaagaattttacgtatcccaacaaatacaacttccaattccatctcaagagatagaatttacaacatttcactctt

SEQ ID NO: 169439 - DNA, 371 bp, Glycine max
  unsure (1)..(371): unsure at all n locations
actccagcttataaagggtgacgctgagaccatcaacttctttctgaatactcccgaaaacttggagcctgcggagcactacatcacttactccaaaatctgtcattcacatctacatccctaacagctggcttttacactttgcattccatggtgaggatttgtgctaaatgctaagagcgcgccttggaagcctcttatgaaggacatgaccactctagcccagacctggagtgttttatcatactccaaccttacctccacctctcacacgttcgatcctaatatggacatggtgaggtaagactactgactggtaatgaatgattgatatgactcgggctntctcattctatgccaaatctcacata

SEQ ID NO: 169440 - DNA, 438 bp, Glycine max
  unsure (1)..(438): unsure at all n locations
gcaagctngctngnggggcttctatggagggtgtattattagcttaatggggncctttaagggngattttccaccatggagatgcagcggaagacaaaggaaaggaggtgagaggaggcgtcatccattaaggaataagccatggaagaaggagcttcaccaccaagatgagccttggataacaagcttggagaggatgcttcaatggaggaaaagaaagagggagagaaagagggaggggggagcacgaaattgaaggaagaaaaagggagagaagttgaactttgagttgtgtctcacaagactctcattcatcaaagttacaacaagtgttacacatgcttctatttatagactaggtagtttccttgagaagctttctttagaaaacttncttgagaagctagagcttagctacacacacccctctcataacta

SEQ ID NO: 169441 - DNA, 473 bp, Glycine max
  unsure (1)..(473): unsure at all n locations
ctaagcttctctcttataatgtgttgtcgctggtattccatattttctctttttattatcttgagtgatgatacctctagaaaacagtcgtgtgagttatgaattgttggggagtagttgttagagacccctagatattgtcctataggttcccaaataggggcaaagagcaaacacgctccgtgccattcgttctcatgcatnttttggtaaatagcactagtttatagttttgctagtgaatgttggtttctttagagtaatacgtaacctttttaatactacgttgaggcgccatcatgcccaaaacgtaacattaaagttggatctctgcagtctcgtatgtgtgaattacccctntgtgttgttttctttccgtntcatgcatgcgcatctgcatcataccgtcacacatgcgtngtatgtgggtctcgtcttttgtcatgggaagcctgaagatccatatcgtcttc

SEQ ID NO: 169442 - DNA, 437 bp, Glycine max
cacctgcggcatgcaagcttgaatcctttagggttttctatcctgcttcacttgatatctttgagatacttaagagcaccttcgtcacgctctgaaatctatgtttcataaggaaacaataagactactaaacatgaaaattggctgcaagatgtatgccagaaaattaaaattaactattgaacccaacagactaacctcctcagccaacacttcattgtttttcatagcagtaagccaaaatgcaggcactcctttctctacacgagcaaattcttgtatcaagtattattgaattgaaacactgttaatagacaaaattcatgtatttgtaattattaccttgatcctcttcattatcaggtgctgtttctttcacttgcccttcttcaacttccgtagtaccatttactatttcgtaccgctgaattcaatca

SEQ ID NO: 169443 - DNA, 467 bp, Glycine max
  unsure (1)..(467): unsure at all n locations
cctataaaactaagcttacgcaaaacatatgtaacaaaaatctactattattttttcaagaataccactggagaaatgttctagcagccagcgggcagtttttgcaaaggcaatatttaacaaaggcggtttccatgtaaatcagagatattacaaaatcaaaatatactactaggacatatatactattatttatgacggtacagtatttattttaaattttgaaacagtaagaaaatgaataagcaatggcaggaagaattaaaaagagtgaaattgagcatgttaacacttgcaaacaagcatggggggaaatcaaagacacatacccttacatcaaccatagaagttcgagtgcgcttgnttggaacaacatttntggtacgttcttcagacatttggtgctcaagttcaaaaccacctgtgacaggatgaccttgaactccaaccttacctatgctttggcc

SEQ ID NO: 169444 - DNA, 179 bp, Glycine max
  unsure (1)..(179): unsure at all n locations
agcttgtatgcagatagctagttttatctttactcatatatttagccggaggaggccaatngatgggtggaaatatatgattgatttggtgggaccaaatgctaagagagggaagggtagtgtttctaaataccaaatttaatccatccctctaccccacccattaagggaggaaaaaa

SEQ ID NO: 169445 - DNA, 458 bp, Glycine max
  unsure (1)..(458): unsure at all n locations
tagcctttatttgcttttcttggttaagctggtttaacctaatttcatgcatataaacaaagtaaagcagaggcaaatatttgtacgtataagttttagacagaaaaggagagtaaattatagagataatgaagtttgctctctttaattcgcagtaatgttatccatcatatctaaatgcttattcctgttcttgtccttttctcttttatcggagttaatttattttatataattaaagttagcctatattctctttcatagattattcatcttctatggaggcacatcaatccttaatcatattgagttttgagaagcattatcgctaaagctccgctaattatgtccaataaacgatattggtgtatgatgttatgatagcaaatacataatctaatataatctaatctatacgtgccacanaaagggcatggactctatctcaaagaaattgg

SEQ ID NO: 169446 - DNA, 358 bp, Glycine max
  unsure (1)..(358): unsure at all n locations
agctnttatccttaaaaaaaagtttaaaatcaaccttatgcgtaactttcttgctttcaaagaactacgtaggtctgagttcctcattgtaattgaggatacgtaggagcaagagcctcgctcttgtcgaccccaaaaagtaaaaaaaacttaataaagggaaaataaacaaatattgaagtcatgattttgcacatttgattaaaggttgtcgtcccttgaggcggacgcatggggtgctaatacctttcccgtgcgtaaacaactcccgaacctttgttcttaaaattcgtagaccctctttaggttttttctaacgttttcctcaaataaacgttggtggcgactccgcacgttt

SEQ ID NO: 169447 - DNA, 433 bp, Glycine max
  unsure (1)..(433): unsure at all n locations
tgtatntccttttagtagggaatctatcctntctaatattgatccaaacccagtcaccctcattaagaactagctcatttcttcctttattgcctttagttgaatacacctttgtttggttctctatttggttcttaaccctctcatgcaacttctttacaaactctgacctagattccccttctttatgtataaaagaagtgtccaatgggaggggaatgaggtctaacggtgttaggggattaaacccatagacaacctcaaaaggggactgtttggtggttctatgaaccccncctattatatgcatattctacatgaggaagatactcatctcaagacttatggttgtctttcaaaagagctcttaaaaaggtggataaagacctattaactacctctgtttgctcatcattttgtatatgacaagtgg

SEQ ID NO: 169448 - DNA, 420 bp, Glycine max
  unsure (1)..(420): unsure at all n locations
agcttacatcacatcttgttatgttcttatgtggatatattctcaacgttcgactagtatttggatccaacatacgaattccatccaaaccgatctgaaagaattagcattgacaaaatcactaattcagatcaaccaccatggtagtgaaaaacagaaaatagtttaatgaatgcatataaaaaattatgctaaatcccttcggaatagagattcccagaaaaggtaggttcttgcatacctatggaattctgactctggatgcaatagtaatacacgtatacaacaacaacaacataagctttatcccaggtgaaagcttttagcaataaatgaaaaatanaattgatcatccttactaaccatcaaagtgtcgagcacacacacatatagngaattcttctctcttcttatctctct

SEQ ID NO: 169449 - DNA, 463 bp, Glycine max
  unsure (1)..(463): unsure at all n locations
ggttnnccctcctcaacctcctgctcatcgnactttattctcatcagcagnagcatcctgatattgctggtactctgccaccaaatcgttcatgttgctctctgcctcagtgaactccatttcgtccattccttcaccagtgtaccagtgcaagaaggccttgcgcctgtacattgcagtgaattgctcactcacccttctgaacatctcctgaattgaggtggagtttccaatgaaagtgcacgacatcttcaagttcctcggagggatgtcacacacactcgacttaacgttgttgggaatccactcaacgaagtaggacgagttcttgttctgcacgttgatcatttgctcgtccacttccttggtgctcatctttcccctgaacatggctgatgctgtcaggtaacggccatggcggngatcggcggcacacatcatgttcttggcgcccacatttgct

SEQ ID NO: 169450 - DNA, 400 bp, Glycine max
tgctcaatgcataactctcgtgcataggccacacttttgttctctatgtaaagcttgcattctcaacattttgaaaggaagattctattactttttcttctatgcagcgaacttatgcttccctcgactatgcctttaactttttcttcttactatatacttatgaagtgatgactgcactcctaatagtattaccggttaatctgctcaaactgacctctaaccgacctttatcttccatttctggatcacgaattacataacatgttgcactaacccccacttattattacccaaggtttctgtatcttaacacaatagtcaaacgatgccattcgctttcctgttattctcttctacaacatagagtactaatcttggacaatactcccactcatga

SEQ ID NO: 169451 - DNA, 400 bp, Glycine max
agactgcatttgaggcttctatggatgttttatctttgagcttcaataaggtcctttaatggtgattttacaccatggagatgcagcggaagacaaaggagaataggtgagaggaggcgccatccactagggaataagccatggaagaaggagctttcccaccaagatgagccttggataataagcttggagaggatgcttcaatggaggaaaagaaagacggagagaaagagagaaggaggatcacgaaattgaaggaagaaaaagggagagaagttgaactttgagttgtgtctcacaagactctcattcatcaaagttacaacaagtgttacacatgcttctatttatagacattggaggcctctttgagaagctttctttagaaaacttccttgag

SEQ ID NO: 169452 - DNA, 319 bp, Glycine max
cggatccttaagtcaccgcggctgcgcttcaccgatctgcgaaaccttctctttgcaacctagtatgtaatgtgcctcccacattggaatagaatatgagggaattgttaatggaagctaatcctgtcatccaaaggaccttaatgccgtggataattgacataatatatacctagcttgttggtttatttgcctatctgaagcatttgtaataaaatgtgattgtcatttgccacataatgctttgagatactaaaaatatggcttttacacaatattttttagacaccatttgttatgcgttaaaaacataaaaaat

SEQ ID NO: 169453 - DNA, 391 bp, Glycine max
  unsure (1)..(391): unsure at all n locations
ngcttggcgcaatatgaagaagctggaggatattataagctctcacagccgcatctcttaagaattattcataaagcaaagaacggaacctttgcacagagtggaacctccaaagatacaatttcagaagaaggtgcacttgtggatgcctattttcatactctctccgatgcatcctgttgatatacaactctcacacgaagattattcatcccttggcacgatacaagaacagatgtacttgcgagatcaagcacaacctacccttctggtctgcacatctcaagggaaactaacatcaagatggttgctgatagagtttgtccgtgtttaccaatgtgggatgctaccaacaataagggatttgggctactaacaacaatagatatgt

SEQ ID NO: 169454 - DNA, 431 bp, Glycine max
  unsure (1)..(431): unsure at all n locations
gcttcttgagataacttccatgagaagctttttttataaaacctccttgagaagctagagcttacctacacacaccgcctctcataactaagctcacctcctggagaagcttccttaagaagatcgctcaagaagctagagcttagcgccgcatacctcaataatagctaagctcacctccttgagatgagaagctagagcttanctacacaccccctataatagctaagctcacccccatgacaaaaaacatgaaaataacaaagaaaagtccttattacaaagacaacctcacatgcgccgaaatacaaggctaaaaccctatactactagaatggccaaaatacaaggcctagacgaaggaataacctactctaatatttacaaagagaagcgggctcatacttagcccatgggctcgaaatctaccc

SEQ ID NO: 169455 - DNA, 454 bp, Glycine max
  unsure (1)..(454): unsure at all n locations
ctgcagctgagctataaaagacttgctcattctttattgctaatttctctaccttcacaggttagttagtttaagatctcttataactgtcaaaagaagaaattatctcttaatgagctcatttcatactgtctgtgcaagaagatgaaaggttgaagcaagaaaggactgaaagcgctcatgttgtgagtacctctaaagacaagggcaaaagaaaaagaactgaggagcccaagaatgaagctgctaagggtctatgacaaaagagacaaaatcagggtgacaattgtttcgtttgtagaagcttggacatgtaaagaagaaatgtaccaaatatcacgcttagcatgcaaagaagggtatgtttcttactttggtctattctgaggtcagnttagcttcagtacctggaaacacttggtggttagattctggtgccactactaacatcagt

SEQ ID NO: 169456 - DNA, 396 bp, Glycine max
  unsure (1)..(396): unsure at all n locations
agcntcatctanattgatagtcggatccattcatggtatctgacacgaccgaaataagagacatatattgtgcactactgatgagaacatgtgagaatcatgaaacatcggacatttatatatgcttcattcataacgactacctctccaaccgttngttttaaaacgactacttttaaagcgtttagctttacaacataaaatcatgaatttaaaatataacaccgacctacatagttaaaattaaagaccaaacacaacattagcacctaacaacctaacattcaatatcctagtttttatcctaaattggtcacaatactttttgcggtcttggcgttgtttgttccacatatcagatctatccctcatgaggatttcatactccatgttctt

SEQ ID NO: 169457 - DNA, 452 bp, Glycine max
  unsure (1)..(452): unsure at all n locations
cgtcccggatccttaagncacctgcggcatcaagctttagatgaatatgtctatgacatctttttgataatatgcataacaccaacctcatatcagtcatcaataaatgtccaatacacacaagtatgcattttacttactagattgagttaatgtcattggcataactatccaatgtgaatgactttatgtctaatagattgtagattaagtttgattcgttagtgctaggtatttcattgacaaataaatagtcctaaggagtagtacgtatgtatgtttttcttttcttaaaattaaaaaataggtggatgctgacttacttctcatagtattaatcaaatacggggctgctcatcacgacccgttccattgtatagaggctaagaaagaaacacaacatggcccttgcacaaaacttatgggtttttctcatttgttccgcttctaca

SEQ ID NO: 169458 - DNA, 439 bp, Glycine max
tgcagcttgaggaatcttatgaaacctcttatatctactatcgctggtagactacacacatgagcccacttaaaggtaagggatgagttactcatgcttacggattaaaataaacatatgtaaggatccctaaagatcaattctgggttgttttatgaaattcaattatgttcccatgcttttaatcatgaattgactgtgtttgataaaccaattgatgtctcgatgtacaattgttgtgaaattgatgtgttttattcccttgtctcatgctttgaaaatttatctatgattataatatgtgtctttctcttgtttctcgtacttataaattgtacatttgatttctttattatcgcgaattgagtgtgctttcactacatttgtgtcacgagatatctatttcattttaatatattaatgttcaattagctactga

SEQ ID NO: 169459 - DNA, 367 bp, Glycine max
  unsure (1)..(367): unsure at all n locations
ctcgaccgggatcttaagtcacgccgctgcactataaatgttctattatctttgggaacttcattaaacaatatttgttatatttaattgcgatgaacacctaaaaataaatacctaaatgtcgatacaagataacgataaagcttagggtaatataattggcccgaaaaaggggggggagagagaagcttactggaaatgccggtaacatatctggggaggctggttaggacacagggccaaagaacggacacaccgggatggttgggttgtgtgtgaaaattggaactggtcaggaacgaaacacagaagggaanggtacgtgtccttcattaatgaatcgaccgagcccattttacctacccta

SEQ ID NO: 169460 - DNA, 442 bp, Glycine max
agctacgatacgagtgtgctgaccaagtctttatcatcgacggtaaacgtattcttctccatctggttgccatcctatgaatgtgttgtgctaacctcatatctgacactcatacttgaacttgcatttgccactaatacgacacacacggaatccatcttaaggctgggggtaatagctacaagaccaaaagaacagcccccaaatccaatgacatctacctcaaattacttgtccagggcccattctttttgctattaccttcccttatttattgtaaatgcgaactttacatccgttgtgtgatttagtctttcacgacgacgacgataaacgtgatcccacctcattatgagacccttcgccacttgaaagggctgggaatataaatttttccacatttgtctgagccctcacacacctttctctcgcacatacatgc

SEQ ID NO: 169461 - DNA, 474 bp, Glycine max
gacctctaagcacctgcagcatgcagctttcggattggtcgtcgctggcgatattatcattgtgaggctagaaagacgccaatctgatcatcatgcttcgataaatgcaaaaaaaaactggggcaaatgaaaagggtcagaatgagggagaaacttatgttgtgactgccattcctatacggccaagtttctcaccaacccaacaatgtcattactcatgcaataacaacccttctccttacccaccacccagttatccacaaaggccatccctaaatcaaccacaacccacctaccacacaaccaatgctaaacaccacctttagcacgaaccaaaacaccaaccaaggaaggaattttgcaccaaacagcctgtagaattcaccacacatttggcgtcctatgctaacttgctcccttatctacttgataatgccatggtacccataacccctgctaggtttcctaaacctc

SEQ ID NO: 169462 - DNA, 446 bp, Glycine max
gctgcaacttaagtttgccacaaggaaacattcaattgaatggcatgtatcagcaaataaaatccactaaatctataattaggtcaattaaaaatgtccctttatgcatagacccacccaaaagcatgggtaattactatgtgaaagctcatgaatgcatacacctaccacctactttatgctaaaattcaatagttaatcataagagggtaacaaaaagataagcatcccaacttaactttgatatcatgcaaaaaaaccaacatttcaattatatgttaagctaccacacaacaaataattaaataaataaaaagtaaaaaagagctacttttaagtttctacacacagtagaacagtacaaataaaataggcatgctatcggccaatgaaatgcaatacatctttaatcacgtcaattaaaaatgtccttttctgttttcttc

SEQ ID NO: 169463 - DNA, 410 bp, Glycine max
  unsure (1)..(410): unsure at all n locations
agctntctttccttctggaaatttaattatatacgacgtcttattcttctgaagggatgccatctcatctttcattgctagctcccactcaatagagtcattcccttgcgtagccttactgaaacattttggctcaccagcatcagttaacaacaaataatgcaatgaaaaggaatacctatctggtggtactgaaattctgctagatcttcttggaggagttgatggttctagttctgactcaacctctacgcttgtactttggtttctattgggtacatcactttctgaaatttcttcaagtgttgctttctcagaaatttctgacaatttacctacacatgtagattctacagaaaatttgtccttataaaataagttcttattaaaagtgacatttctgcttctga

SEQ ID NO: 169464 - DNA, 197 bp, Glycine max
gatcaaataacatgaagagacaaacgtccctcaactctcctttatatctgatttatccaacaaaaagacctccacaacaacacaccccatgtgaaattgatctcatatgatggacacatcgcttgccatgtgggctacatgcaagcctttacaccaacagcagaaagtagtcctagaaagcagtatgaaagcctgaa

SEQ ID NO: 169465 - DNA, 379 bp, Glycine max
  unsure (1)..(379): unsure at all n locations
agcttcancaactgacaactcaagtgattggtttgttataaaaaacaccgaaaaacccccccacgtgtttaaacaaaaaataattaaaccctcccaaacctccattggacatatggagccccccaccagttcacaagcattgcaaacagtgtcgagtaaagtagaccggatcctaactataccttgcatggctgctaaaaataaaaaattgcattctgggaaagcatcaactgcagggccttgtgaagatccaattgttgaaaaaagcaatccttcgatcccgagggaaaatatatcaagtgatcatcatcagaaggagctgatgacaccaagaacctgaaaacctatagttgcatcttggacccgtttcaaccaatta

SEQ ID NO: 169466 - DNA, 371 bp, Glycine max
gacccggatccttgagtgaccgcggctgcagctgctcggcggccggatttatatgtctgactttgcagagatgaccgaggaacaattatggatcaacttgacacttatgtgctccaagtgagaagaaaagctattttttccacttgtgaagatgttcaaagttcggctatgaacatggttcaaaccgagaaacatttgggattgcctttggctcataaacttattgagctagctctgatattgccggtgtccacagcatccgttgaaagagcttcttcagcaatgaagattatcatgtttaaattgcgcaataagattaacgatgtgtggttcaatgacttgatggtatgttacaccgagcgggagatatt

SEQ ID NO: 169467 - DNA, 467 bp, Glycine max
  unsure (1)..(467): unsure at all n locations
tgcggcatgcaagcttataaactattgtcagagaatcctttgttttatctttgtgttggcatgttnttcatttcatgctttctttgtgtttttcctagccaagaacaagcagtaattgatatattattttatcaatgtttctcaggaacagccttgatcaacttagcattgggtttaagacttcaaaataagcatcaatgtgttgtacaaggtttagcattcctctacaataatttgagaatctgcgagaacagccaggtttgtctgctcagcatttcatgaatatttttgtgcccgtttaagaagaaaatgtgttattattaataaaagatgataataagaaaaagatatcacctttttttatacataggactggctaagttcgtgtacatattctacaaattcttatccaatagaaaattatgctccggtaattattattaaccgctgagtacaaactacaaagc

SEQ ID NO: 169468 - DNA, 428 bp, Glycine max
  unsure (1)..(428): unsure at all n locations
agcttcacagaaaagtcagcggaagagggtatattntcttgacaggggagtgggtcaaagaagcacgccacgttaatataatcaccatttattcaccatgcgatatccaataaaagagacgtctatgggagtctgtaaagcagttgaaagatgcagcgacaggggggctttggtgtattctgggtgactttaactccatcagggaccttgatgaacgctttggtaatcgccataggttacccacagatagtagtatcaatgaatttaatgaatggattgatgatttggagctccttgaggctccatggatgggtagaaagtttacgtggtacagacccaatggtgcatctacgagcacgttggacaggtatttgttgtccccggagtggttggatacatggcccggcagcttacaaactactctcgca

SEQ ID NO: 169469 - DNA, 469 bp, Glycine max
ccggaccttaagtcaccgcggctgcagcttgtggattcactgacaccccatattactggttgaggcccgtgatcaggctggaagctctagtgtcctgttggacttcttcaggtctagtgggtgtctgtgaggcatgatccctgccaattgatagatgacatctgagatcaactaggccacatgaacactcacctgggtcaagatggcataaaccagctggcacttcggcagggggaggtcagaattatgatcactgtggaggatgttgctgagcagcaatgtcatccaaatctgtgttaggttggtcgtgctactgccatgatctgcacccgtctccctgccacgcttcgggcgaagtcctaccccataatacacagctgttgacttgatggcctccttatctaaccccgaggcttggctcctcctctgattgaattcgtagtgttgccccttcttcaagactaaagga

SEQ ID NO: 169470 - DNA, 350 bp, Glycine max
aaattaagttcccacgagtgcgtgatgacccgacatcagtcaaattaaaatattttaaaataatataataattggtgtatatgaaattactagcttacattagattagagctgaaatacatttaattagtttggaattatacttgaatgtagaccagggttgtgtctacaatttttgagtccttagacaaactttatatgttaatttaaatttaatatgatttatcaatttctatatcattctcctaattttctgaactactaattgtgtgcattaaaatttaataatcaagtcatttcaacaatctcatttttgataattcatttaaccattatctagcagcatatagt

SEQ ID NO: 169471 - DNA, 416 bp, Glycine max
  unsure (1)..(416): unsure at all n locations
ncaagctntcgaaaattctatgtacctgttttggttcacattgtgtctcgagcactattattctcattttgtttactttttataccccctgtgacgtgcttaagccattttacttaagtcatttcctcgcttaacttaaaaatcaaataaatttccaccgaacgtttgaattgtattatccattaactttggttaaaatcaattccgaccgttcggtcgcgccgcaaccacgttggaaatcaaaaagaggttaaaaataatttaataatcaaaaagacatcttttagtaaaataaagcggaaaatcaatcggacgttctctctttgggattcttcactcttaatcgaaatgagtaataactaaagtgaaactaagggcttacatcaattcccctagttaagctcgtacatataata

SEQ ID NO: 169472 - DNA, 397 bp, Glycine max
  unsure (1)..(397): unsure at all n locations
agcttgtaccccagtcatccataaacctatttggaacattngacattgtcataccctaatttcgtccggggattattatttgatgatatacaacctttgattggccgcttcaagatacttggcaccctttgttgcacaatatgtgaagtcccgagatgtgccgaaaatcaaaaggaagcaggcttacgcgatccgtgaaaattccgtaatgtgacagaaatcgaaaggaagtgtttttcgcaatccgtgagttttcgtaacttcttcgaaagctaaaaaagagtaaatacataatccgtaaggattcgtaaccttgcggaaggaaaataagtatcgttacgaaattcgtaaagtttcgtaacgttacggaaaaagaattacaaaaagggtaaagggg

SEQ ID NO: 169473 - DNA, 360 bp, Glycine max
  unsure (1)..(360): unsure at all n locations
gctttaatnnnnnnagtttcttatgtcacattgggtttggaatttattctggatattcacttttatacccaccgttgacgtgctcaacccattatacttaagtccacttttgcttaactatagaaataaaatcaatttccaccgaacgtttgaattgtattatctgttaacttcggttaaaatgaattctcgaccgttcggtggagccgtaaccactttggaaatcaaaaagaggtcgactaattgtcttaatcatcacaatagtatttttatgaatgtaagagaaaatgaatcggacggggccactttaggaattctcaatcttaatcgaattgactgaatcactggagtgaaattacc

SEQ ID NO: 169474 - DNA, 450 bp, Glycine max
  unsure (1)..(450): unsure at all n locations
ctgcagctaatcgtttggcttgctcaaattttattgaggggagataccaagggagattgggatgcttgctaagttgaatgaactggttttatggggaaaccagttttcaggacctattcctaaagagattgggaattgtaccaatcttgagaacattgctctgtatgggaataatcttgttggacctatacctaaggaaattgggaacctcagatcattgaggtgtctgtatctttacagaaacaagttgaatggaaccattccaaaggaaattggaaatctttctaaatgtttatgcattgatttctcagagaactctttagtaggtcatatcccttcagagtttggcaaaatacgtggtctaagtttgctctttctctttgagaaccatctaaccggtggtataccaaatgagnttagtaactcgaagaacctgtcaaagctggacct

SEQ ID NO: 169475 - DNA, 444 bp, Glycine max
agcttaatgacttgctgagcaccattatgctatttataacggcattcatgaacatacaacatgttgctcatacatgcatcatgtcaaaatggtggaaggatagttgaaatttttctatagttctattttaccttccattgatttcagcaaccatgttttctttgaattaatgcttgagattgtatcttaacacaatggaaataatcccctacatactattgaccagaatctgcataattactttaaacctgagatattactaatcttgaagggtattttgtgtcttataatatccaaaaactgagtatataaggactattcatcaatcatcaatcttgttttgctgacaagtttttttttctttgtcatctttaacatcttttagcacttcaattccatgatatgatgccaaaagaagaacagaagaccccttagtctcttgat

SEQ ID NO: 169476 - DNA, 367 bp, Glycine max
  unsure (1)..(367): unsure at all n locations
gcgggtgttgaagagacggcatgggcatctccttcctttctttttgcccctgtcgccccgattcttttggcatttacgttcgcggaggaagcataaataaactcttctttatgttattctagattcgactttgtccccgacgaacaccacattcgcaaaactggacggtttgtaacccctaacttctcatagtacaaaactggcagagtgtctaccatcatggagaacatctctctctcaccatgggaggagctacttgtgccgccaaatccctccatcgctgtgcatattctttaaaggtttcaccctctttcttgcaatcacccccnnngagtacggtcaggagcctatcataatttactgatac

SEQ ID NO: 169477 - DNA, 443 bp, Glycine max
  unsure (1)..(443): unsure at all n locations
acgctttgccatggacactaatgatggagttttatcatgtcaaaagacctggttgtggtgagggtgaatcaaaagtaaatggatcaataatgacaacgacgtacgaaactgatggtgcagcgaagaataacgtatcaaatcccacagattgcggacattntaatgttgaggaccataaaaggaatggttcggttctttccgttttcaaaaacccccaactattatctccccctaggtgctttccgcaaataaagatgctatcaacgaaattgatgagttgccaacaaaaacaaaaaacttaaaagaaataacagaaaaaaataaaacacaataggctctgtggaattgatctcataagatagttttggaaataaaaacgaaatacacctattctgatctcataaagtctatacaaacacagcccttacaaaattggctcttat

SEQ ID NO: 169478 - DNA, 441 bp, Glycine max
ctgtaattctatgaatgaagtattttatctctttcccttcacttctatgcaacacataacaaggctagttgttatagttactactaataatgttgcatatagaaactgaatttagggcttaataacttatacgtgccaagttctttccatctgtatagattattgtataggggtgacaacaacaaccaatgttgcatttgaacatgttagttgctaagactagggacttttcagaaacaatattttcataaatatattgtttcttctattatgcatcctttaaacatgtcagctgttagttacaggacattctgtatttgatagaaaaagaaatattagtaaacacaaggaagccagtaacagtgtgtctgtgttttgatgcccagagtatgaagaacctcaagatttgaggtcaaatcctttccaagtggagggaatgat

SEQ ID NO: 169479 - DNA, 457 bp, Glycine max
agcttcagaccaaagcaacacataatctatgtatccaaaacccctcaatttaatggattttcaaggtttgagaagtgaaattgagaatggggtaaatttggagcaaactctcacctcacacaagtctataacatcaatttaaacttgctcaaactggatttacacctaaaattccaccgaatcaaaatttgactcctcaacaccaaattttaccctagaaatgtctctttgttcactttggtcatttgtttttctctcttgcacagcccaagcttcctcataagtcctaaatgacatttcaaactaggattaactcactttaacctccaaataccactaaatccagatttggccttccaactctaaaaaaaactcactcttttcccactcataacaccatattctcactttctaaccctaggttaactctacccttcatccctagcagttttccata

SEQ ID NO: 169480 - DNA, 409 bp, Glycine max
tctgtaccaaatctactcacaaaatcttcttatttatcttagcccggcgagtatgcattcactatattgattacctcacttgctccacaccattacccttgaatgtatagaaattgttttcctcccatccaatctataacttgcaagctacctagctcccaaaaacattggattccacctaatgcttccactgcgggtacttgtctccattcctcaaagacattaccccacattgctccatatatttcatcatccacactttgttactttgcttcttgcaagaagattacatttggctcttcttttgctattaacttcatgatagcgttccacttctagcagctaccaagacctctcaccttaaatgtaagtacctttatggacaacttgtcaccctatccaccttctt

SEQ ID NO: 169481 - DNA, 422 bp, Glycine max
  unsure (1)..(422): unsure at all n locations
atctgcaccggaactcttatgaacactgcgaatgacacaccctgaagcacgacatggtctgatgcactgtntgaacactcaggaacacaacactggtatctcgacatccactctatcaataagcaacaccccacgtcccctgaacatagaatgaaaattgcagaagcctttgctgccaaacgggctgatcctgtcagttctctttaaactcacctcacactttaaattgggcgatatattggtttactaccactaagtgcttcctaaagagttctgcataattgattattttaatactcacctttgtcccttccatgtattcactacaatgcgtggcattcttggtctcacaatatttagacatgtatgctcactgacctgcccgtattccactgtctgatacccacccaccattttttctt

SEQ ID NO: 169482 - DNA, 379 bp, Glycine max
agcaccgaactattgggagttgcaagccatcttctcaatcgaattcctagccttagcaggagacccatatcacccaaggcctcaccactggcagtatccaacatactcctctccatgttgctaagcccctcatagaaatattgaagaacgagttgctcagaaatctgggggtgaaggcaacttgcacacaactttttgaatcttcaccatgactcatgcaagctctctccactaaattgtctgatgcctgaaatgtctcttctgatggcagcggtcctaatcgcagggaaaaatttctccaagaccacccttttaaggacgtcccaactgaaaatggtcctgagagcaacgcactataatccaatcttttgcactccct

SEQ ID NO: 169483 - DNA, 379 bp, Glycine max
actctcgtcatgcctactttatataccccttcttgaggggcttaagccattctaccttaactcatctctccgcttaacttaaaaaaaaaaccaacttccacccaactgttgaattgtatatatcgttaacttcggttaaaataaattcttaccgttcgggcgtgcccaaccacgttggaaattaaaaaaagaggcaaaaaaataatatattactcgccagacattctctagcaaaataacgcggaaaataatcggacgttttcttttcgggatttctcattattaatccgcattgactaatacactaaagtgaacctatgggctaaaacaacttgcctactcaagctcgccataaaaaaggctattgaagttcgcattt

SEQ ID NO: 169484 - DNA, 441 bp, Glycine max
tgcaagcttgtagcacggctggacatgatatatgtatgtgttggtttagttaaaggataaaaatggaatgtcccacattatttccatgacacaaatgcgacaatgatgatttggaaattttatgcaaaactagtcatgcatgcacctatgtcgacattcaagtgtcaaacttttatggtcatgtgatgtcagggctcaggattcatttcctctattttagtcaacccagtgtttccaaaatatgttcttttatcaatttgtgcattcatccaaatctattttgggtgttcaaaaaactttcacggcatttacccttcaggcgtacacattttttttcaaaaactggttatgatcagtgaattctttcaaagaaaagttggaagttatctttttctacaagcatgttgttttttagctagacaactttctatctttattatt

SEQ ID NO: 169485 - DNA, 285 bp, Glycine max
gatccagacaaatatatgatgatgctgctttgcatacaaatctcacatgaatgcggcattcatcattctcgcgattaagccaccatgccttctgagaaggcatgatgccgtgtgacgattgggcgtccaagaatcattccaccataatggactattctaccacacactatagtgggataacggacaaccgcctatcctgtagtatgcctaaaatcaaccatgtgtcgtcttgctgacaccctatctctccaaaaaacctgtattattcactattgatagtccgaa

SEQ ID NO: 169486 - DNA, 451 bp, Glycine max
gctgcagcttgctttacacctttaatgggctttaattgttgctggtgctcctcactccagaacctgtgtctatcaaagtccacatctgcctgtggggccgcactaaaaccctctttagcaacatccttcctggatctcttggctgggagctttttcggagccatttcctgcaaggacacatttgtaaagttagtttacaagaaattccaatttatcacaacaaaggccaatcaaactaaaatggtgtacacttctttttaacaaacgcaaatgtcaatgtgtaattaggaaaatacttacacatcgatgcatgggttattttataatacatatctatatacatgcatttacacgtatttttttttatgaaaacctgtgatatatatccacatatatacacatacctttgaagagaatttctttatgctacatatacaacatatattcacac

SEQ ID NO: 169487 - DNA, 427 bp, Glycine max
  unsure (1)..(427): unsure at all n locations
agctntgcttctacagaggccacaattattctgtgccagttggagatgtatattccccctgctttctttgacatcatgattcacttgattgcgcatctagtcagagaaataaaatgttgtggtcttgtntatctaccgtggatgtacccggttgagcgatacatgaagatcttaaaagggtgtacaaagaatctttatcatccacaagcatctattgttgagaggtacattgcagaagaagccattgaattttgtttagaatacattgagaaggctaaacctgttggccttcttgagtctcatcatgatgacagagtgggtggtaatggatcaaaaggactgtatgtgatcactccaagtgtagaacatttgttacaagctcacttgtatgtcttgaacaacagttatgaagtttttccatacatac

SEQ ID NO: 169488 - DNA, 412 bp, Glycine max
  unsure (1)..(412): unsure at all n locations
agcttgagatgaggaagtagtgaatggtgaaacttcctgctnttattgttgaccacagagtggtacctggagatatgtcgtgggggtcaagagaccttggggacgtcaggtggggtgctattgcccaaaaccaagcttgaccaatcccgacccaacccgggcatattcggtcagtgagaacctgtgatgtacctaagcaggcgagctcctggcagtcaacagataaaaggaacaaagaccaaaaagcaaggaggcttgtggtggctggccaactgtgaaactcgattgatatgtgagatatggtctctggtaatcgattaccaagggtgggtaatcgattacaaggcttaaaaatgaaaacaagaggcanagatggtctcttgtaatccataccaccgggtgtaatctatta

SEQ ID NO: 169489 - DNA, 293 bp, Glycine max
ttcctcacattaacatccatcaacttaaaaagcgaggttgaatgccaaaacggcttggtacaaaaagcgagcaatttgccggtgcaccttcagaacttcattcttttccgtggactctgttatgttaaatcgtctcaatatctttcttcagactggttcatttgctgattcttgcacacactgccattgggcctttttaggggcattcgttctctttgcagcacaagcatcagcagtgtcacagctttaaatctatcctaccatgaatcatattaacttggataaccgaactc

SEQ ID NO: 169490 - DNA, 308 bp, Glycine max
ttacatgtgctcgcgctgcaatgaccatccgtcctgatatcaatacatctcctagtacataaattgattgatgcataatcgaaagaactagcacatatcctttaatttccatacattcatgcttcctggagccatgttttctttcctataaccactagaaataaattgtcacttctctttatcaatatcaaagtcttcacttaggaagttttccaataattcatatgttttgtaaaagcgctatattaatgtcctgcatcgacccaaacttattacaagttatttccacattagattttaacacactc

SEQ ID NO: 169491 - DNA, 297 bp, Glycine max
  unsure (1)..(297): unsure at all n locations
ctcaggacccattcgctaacatacagttgtgaaattcgtaccacttcttgataacatccgntctgggtgggaataatcttgttggacctattcctaaggaaattgcgaacctcagatctttgtggcgtctgttctttacaaatacaagttgattggaaccatttccgcggaaatcggaaatctttctaaatgttatgcattgatttctcagagaactctttattaccgcatatccctttttagtttggcagaataccggaggtaagttagctctttctctgtgataaccatctatcc

SEQ ID NO: 169492 - DNA, 449 bp, Glycine max
agcttattgcagcaaaaagcatgtgtgattacaaaatctgaagatcctaatgagtggtgaatttgatatgaaagatctaggggctgcaaagaaaatcttaggaatggagatctatagggatagaactcagaaaaggctatttttgtctcaaaaggattacattcagaagatacttgtgaggtttggaatggctaactctaaacctatcagcactcccctttcaaaaaaagagaagttgtctgttatgataaagattcaagctcaggctgatcaggattatatgtcaaaggttcatactcaagtgttgttggcagtctcatgtatgccatggtctgcacaagacctgaccttgcttatgctgttagcatggtcagtagattcttaaaccaacctcagaaggaacattggaaggctgtgaagagaattttcagatatcttaaagggactgc

SEQ ID NO: 169493 - DNA, 294 bp, Glycine max
ttaaagaccgagagttgttttcttctttcctataaaaaaacgattatttttctactgacaactattcgtatttttgtttctgctaaagagggttctgaaccacgacttttttttaccttccttctaattaacagccacttttatttccacattaataattctatttaatgtttctgatcgatgtcatgttatgaagccccaattcatagctcgggtactcaatatacactattctgaatatacgaaaaacgatgatgccgatgatgaattgacgatttggaacttcctcgtgta

SEQ ID NO: 169494 - DNA, 392 bp, Glycine max
tcaataccctcgcactgcactctataattacttctcacctcacttatgcttacacatatctttggttgccaacattgtcctgcgtggcagtttgaactaacgaaacaatcatctccctgttgaagctgagggtgattctcctcaatctgcaggggtcgagctttagagagggagtgtttttgtctagtatagactttggaatacttggctggagttccttattgggtgggctaagataataatccttctattacaccccttagtttcaagcgggcgtatgtttgcttgtgtacccctttttagacgggtgtgttgccatcctataggctacaggaagcacctgctactacaccctctgatggtgttgggcccattgcaattgcccacacctt

SEQ ID NO: 169495 - DNA, 418 bp, Glycine max
  unsure (1)..(418): unsure at all n locations
agcttcatgatgttgaatcaagattgatttnttgtgtcttgatgattacaaagatgatgacacaccgccccacagaacgagttctagattgaatcacaaacacttcaacaatcatgaggaaattctgatttaagattcacgaatcaagtttcaagatttatgtttcatgaatcaagaatcaacaatatatcagtcgaagattcaagaatcaagaaaagactccatcaagataagtactataaagttgttcacaacattgagtagctcatgaatcttttacaaaaccttctctaaagtggtttactctcttgtatcgattactatttattgtgtcgattccaatagcaaagattgctttaaaacgcttccactgaattacaacgtttaattgatttaaatggcgtatcaatacatgatt

SEQ ID NO: 169496 - DNA, 419 bp, Glycine max
agcttgagatgaggaagtgttgaagggttatacttcctgcttttattttgacacacagagtggtacctggagatatgtcgcgggggtcaggagaccttggggacgtcaggtggggtgctattgcccaaaaccaagcttgaccaatcccgacccaacccgggcatattcggtcagtgagaacctgtgatgtacctaagcaggcgagctcctggcagtcaacagataaaaggaaaacaagaccacaaagcaaggaggcttgtggtggctggccagctgtgaattttgtgtaatatgtggattgggcctctggtaatcgataccaagggtgggaatctattcaaggctcaaaattgagacaggaggctaagatggtctctggtaatcgattaccaggggtgaatcgataccaggcttaaaac

SEQ ID NO: 169497 - DNA, 313 bp, Glycine max
caaattttcattgggtgtccattgaatgtcccacaaccgactttgtatgaatttttgccatttatatgattcatggatatgatatacgcattctttttttttacattttaaaccaccggccacaaagtctttccaatgtatattattttaccatttgcacgccctttgagccaaacactttatattttgttggaacactaacccaggataaaaagttcctaccttaccttaggtcaagaaagcaaaggcgctgtgtaaggatttctataattggcggctatgcgaaaaaatactctgcttttaaattgggcat

SEQ ID NO: 169498 - DNA, 415 bp, Glycine max
ggatccttaatcacctgcggcatgcaagctttcttggtttggagtcgcataaaaattgtacaatgtacgtcggctatggctttttgtgcgagcccaaccgacgtttgtgttcagccaaaactggcatgtttccatttattcggccacaaaaacattagcccatcttcggaaaaaaatatctttcaccgatattgattgaaaaagatgccaatctacgtccgccaagaaagataaccgatcgaggtctaaaaaagaagcatcaccgcatgacgccgatcgaacatttccttaccgacattataaatatttcattaagggattgagtagaaaactcaatagccgacatcggtcgtgaaggagccccactgatatttcttagttgacattgcgcaatttttttttaaaacgctcactg

SEQ ID NO: 169499 - DNA, 406 bp, Glycine max
cccatccagggtcaagacacatccttctatgaataatctcgggctaccatcagagaggcaccagactaacgtggttgtaccataggagactccacataagcattattcacgatctctaacgcttgaaatgaccgctctagcgacacctccacaactctaacattaggcatagaagaaagacaactcactagtatgttctccttgaccgacactataaccagctgactctccacacacaatattaatatttggtgcaatggtgatgggaccaccccaacagagtggatccaaggcgtgactatcaagcaactgaagccgggtttatgtccatcaattggaagtcatctggacgtgtgggcccaaactgaacatgagaaaatctctctttcacgtacacgacaccatc

SEQ ID NO: 169500 - DNA, 346 bp, Glycine max
attttgatgatgtcaaaagaagaatcaaacaaggctcattttgcttcaagccttgcctcacaatgaaaggtttcaagtcattcaaggcacatgtaatcgattaccaatacatgttatcgattaccaatggtttgaaagtgtgtaatcgattacacatcatatgtaatggattaccagagactctgaacgttgggaattcaaattttaaatgaagggtcacaactgttcaagaaaaacaactgtgtaatcgattactagaaaggattttcaaggaatatcgccaacagtcacatcttttcattagatctgtgaatgaccatcaaaggcctataataggtgacttggg

SEQ ID NO: 169501 - DNA, 419 bp, Glycine max
  unsure (1)..(419): unsure at all n locations
agcnnttggataaagaggagattatcttttncacatgacaacaaagtgagagcgagggcttgctttccttaaaccacgagtaggactaaaattatcaatcctagaaccattccataccattgagagaggaagaatttatgcaccatataaggagatccattgtgtgaggaggaaaattaaactccttaaaggactctttcaagaaaatcccatctcaatctatcataagcttttntaaggtcaatattgaaggccaccaccccattttcagctttggagtggtgcataaatatataactttgagcacaataacattatcagtagttcccttttcaggattgaagctacctcgaagaggaatgataatattcttcaaaaagggtgaatcctctaaagcaaaacctnganaataaatttat

SEQ ID NO: 169502 - DNA, 424 bp, Glycine max
  unsure (1)..(424): unsure at all n locations
agctntttggagtagaaacatgggaccatctcattttatttcacaaaggaagtcgtatctagtcaaggtcttagagaccatacaagtttcctaacgatttctaattatgtgggccattaagtctattatatgctgacaatagccgagaagcccatgaatctcttcgggggcggagtaagtgtctgccatcgccttggccttggctaacaatcggggaagttcttgactcccgttcaaggtaagagcaaaccgatccatccacatggttgcctcttggtgtaaagagtcgatcacccttcctctagcctctttttccgcgtatacttgggcatattcgtccgcaatcctatgctcgtgggccgcggctagacctaactcttcttggtacttggcgatgatagctagcatgttggtctccgtctcg

SEQ ID NO: 169503 - DNA, 394 bp, Glycine max
tcttaagagaccgcggctgcagctataataaagccacttcttttattaacatatatatatcatattggtccttattctatcaataaatatgcttttgatctttatcgctcgaattatttttttcttttaatttctataatttaaataaaatatctcattttagtttcaatagttacaatgtttaactctttcgttccttcctatgtcatagctacatccaagcgttcggcacacattattctttgatccggaagtctcttacggatcaacgtatgaatcaacttaattcataaacggaaaaacaaacaaggataattttgtcatttttttagaatgctgggtgcaccaccaataatgctgggtgcacctaacaacactctaaatctatattttc

SEQ ID NO: 169504 - DNA, 448 bp, Glycine max
aactgctgcatgcaacttaggaaaaccttatactgagttttcctaatcaaaatcactgaagaaggcctgccactgttcacgattgaaaaacccttattgtaaccttacaaagttcgagagaaggctccaccaataattacggaacttagaaaaactaatcacttcattgaggcgtacgtgacaatcataggcgaattactatacaaccattggcagtttacttaaggacaatccatatacttcccaagcctcgaaaaatactttcaaaatggcaacaagaagtcccctcaaggtaataaatgtattaatgaagattgtgaccaaaactcagataaccacagtgagatataatctgcgtccgaagagaatataacttcgattaaatcctaccactggaaaacaccctccaaatatattatcaacgtccgactgcccctgaccttctatt

SEQ ID NO: 169505 - DNA, 262 bp, Glycine max
  unsure (1)..(262): unsure at all n locations
gggacttcttgaactcactcggaggtgggcaacacgggatggtgggttataccggattgtggacgtaaagaatcattctgcacctccacccagaccgggtcctagtatcacatgggaagggtatcccataatctgacaagcttcgacatgaggaagtgtcaaagggagagacttcctgctcttattngcagacaacataaggggcaccttgtagatctttcctcgggggataggagatcttgtggaccacacggtggggtgc

SEQ ID NO: 169506 - DNA, 444 bp, Glycine max
gcttctttgcctcatatttggtggactgtctatcaaggcaattgaccacaaaagtagcaacatcatcgcgaaggttgggccaataaaaattctcaaaaacacgagcaatggtcttggcgacaccggagtggcccccagtgggggtagcatgaaattcagtgaggagagtgggaataattggggcatcttttggcaaccacatgcggtggtggtgtagaatgagattgttaacaacgaagaacccagggtgtttggtgggataagtgacaatgtcattgcggcaatgaacatagtctgaatggtgatcaagctgaattcaaagttcatccatgaaggccaggcatggcactgaaagcatgagagcgatggaagaatcaagctctggaacgcaagaaagggcatcaactgcttgattattggctctgaatgatatgtatctcgaat

SEQ ID NO: 169507 - DNA, 445 bp, Glycine max
  unsure (1)..(445): unsure at all n locations
agcttcaccttctggaccttctcatagttgttgtatgagaaaacatgctctattttcgcctcccactccaagtaggcctccggatcattcttctctttaaatggaggaatgttgagtttaataccatcaattcggttttgtctaggaacaccatcattccctcttctcctcctttcttcttcattatgatctctattctccatttgatccaacctttcatggagtgcatcatctcgttgtttcattaacctctccaaatgttgcatcaaaacttgcatttggaattgcgaaagccncactccatcattaggattagtacctgacatcttaaacaaacaaatcaaacgtgataagacaattatagttgttgtttgatacctccccactcaagtgtatcacacaatatggcttttctctatagaaacactcttgccctttaccactc

SEQ ID NO: 169508 - DNA, 374 bp, Glycine max
actactttccttaccccccttcatgttccatatgttggatctgccctgaatattctcctttgaaaactattttatctggaaaactcttcccaagacaccattgaaccactgttggaggctatggaggaaaattattcagatggtaataacactaatgaatccaggtagtttattgaaggagtattggatcctgaatagagaatcctttgactagatgcatcgacttacaaaataaatataacaattttggattgttgaacacatattagcttataaaccaaatctttaccattcgtaatatgttgtcttattctgatccagcctataaaatgactgaatgtcacaaaaccaactcaactgacttgttgattacc

SEQ ID NO: 169509 - DNA, 436 bp, Glycine max
cttggagagaatgcttcaatggaggattatatatagggagagaaagagagaggggggagcacgaaattgaaggaataaaagaggtagataattggaactttgaagtatgtctcacaagactctcattcatcaaagttacaacaagtgttacacatgcttctatttatagactaggtagcttccttgagaagctttcttgagaaaacttccttgagaagcttcttagagaaaacttccttgagaagctagagcttagctacatacacccctctcataactaagctcacctccttgagaagcttccttaagaagattcctaaggaagctagagcttagctacacatacctctctaatagctaagctcaccttcttgagatgagaagctagaacttagctacacaccccctattatagatgagctcacccgcatgacaa

SEQ ID NO: 169510 - DNA, 321 bp, Glycine max
aaaaccatgatattaccatatccttaaggaattttggagctttggaattgttttgggaataagtgcggggggtttttgtttcattggacaacttgttttgttggctatgcttcatgatgtattttgggccatacttgatgtacattgtatattggttaaatgttggacatgctgaatgaaatgttgtttcttacaggctaaagagtcaaaaaaaaaaaaatcgaaaaaaaaaatcgaaaaaagaaaaagaaaagcaataaagttgagtgaataagatcttatatgcgccaagaatgatgaaactcttggttctactcttca

SEQ ID NO: 169511 - DNA, 462 bp, Glycine max
atcttaagcgactgcggcatgcagcttccacaagtaaaagatgcatttatcatctaatgaagaagtttatcaaatctcacaaagtccattaagaaaaaaggaaaataaacaaagtgtcataagtccaaagctataactatccaagaagtcaaaagatgcatcttcatcatcaaaaggaaaaggaagttcattaaagaaaaatgtgaaaaaacaatttgtcataagtaaaagctcaaagctacaagcatccaataagtcaaagcatcttcatcatcaaattaagtttattcaatctcagaaagtccattaaggcgaataaacaaactattctgacgtcctcttatgaagagtcaatcttactccaatgttcaaaaaggagcacacaacaaaaaaacaaaattcaacaacaggtcaccagcaaaaggaaataaataccaaaagtctacttaaatgaatcatttt

SEQ ID NO: 169512 - DNA, 364 bp, Glycine max
aagtagattccaacctcaccacttcgtctatagtcaacttttctgaagtgttgacatttagcgcccatttctcacacaccttcatctcaacctcaagatttaagacacgccctttcaaattttaactgacttcagccaaagcgatattggcatgaagagttgagtcaagggagctcttggccttctctaagtcgaccttcaacttattagaatttgaaaagtgttacgcaattctcattgccctcaattgaaagtcctagagaattgctcagttggccccatcattgttcttgtttaacacgtggcggcaatgatcctaaatgaggcttggatcaacaatatgcgttagagaaaactccttgac

SEQ ID NO: 169513 - DNA, 399 bp, Glycine max
  unsure (1)..(399): unsure at all n locations
agctngactttggtttagacatgattgattcatgatttttgacttgcaggatttgatttgagcaagattggatgaggggaagtgtggttttccaaatctgcactttatgcacaattttgctgtgaaattgtgcagcagaattttgcataagtgcagaaaaaaatgctatgtatttgctggttgtggaaagagtgatgcacaatgagttctgggtgtctactagtagatcccaacggccaaaatgtaggtttttgtactagagacttccagtgaaatttttgagtcgatccaacggttaacgaactaaaacgaaggaattgttactggggtctttaagtgagaaaagctgtgactctggtcggtgtttttcgcacagctttctgcctttgcccttgtttc

SEQ ID NO: 169514 - DNA, 422 bp, Glycine max
  unsure (1)..(422): unsure at all n locations
ctcaagcttgccctaacctttggaatgagctatagaaatagccacaacaactttctttatttcagttgaaagaaagaaagatacccacatataaaacatatcctcctaagaaagcaccacagtaataatgaaataacctaccatagcgaagggaaccatgaaatgattttaccagccttgggtgcatgaatattgatgttaaaagctttgatgacctgaaactcactcaaagaggatctcatacagcttgaagtaagataacccgcccacaagcaaaatatgagcaaacataaggatcattgcttgctgctatgagacaaanagattatgaaagcacgcttgattgcggcaacttaagattgcccaaaccacaaagataaaactagcaagaacaacatctttagcttgcatgtgaacaacta

SEQ ID NO: 169515 - DNA, 371 bp, Glycine max
acctgaggcatgcaaggctttaacaagggagaacactcctgatcatttgttttatagctcgaactaaatttaagaaagggaaactataaacaaagttcttatataaactagggtaaggtaaaacgcataaagcatggtaacacaatgaaagcatatgaaagcatatatggccacaaagaatagaaatgcttctgtttttagaacagcgatgtatttctctcactaaccgatatttctatacctttggacgtttccctacccctcctaatcttaagtatcttattactagtgctgatgaaattcctgcattttgtatctgtattaaatattgccgctcaattttgccaaagaatacaaagtacccacttttt

SEQ ID NO: 169516 - DNA, 396 bp, Glycine max
tccgaattgataactaaccggccaaagatcgacgaacgatgtttatcattagcagaattgatcgcaaaaatgtcacggaagcattaaaagcgttatagaagcgcctcggctatgattttctccttctttcttcttctcctcattaattgcaagtgaaatctgattgccaaaggggctgaaccccttcccctcaaccttctccaccattttatagccaaaatacgggagaaggttaccgcccagctcgcccaggcgagctaatggcttcaactagaagcaaccttgctcacccacgtgagctgttgcttcctccacaagattcctgatgggcccagcgctgacgaacaccccctatattgatcagttcacccccattctgagtgtttttggcttatt

SEQ ID NO: 169517 - DNA, 315 bp, Glycine max
  unsure (1)..(315): unsure at all n locations
aaaaccaacnatcttcaaccctcgcttaaacaatttttttatttgcccccagcatacctgatctacaataacttaaaacactaaaatgcgacctttgacttaacaatctcttaagcgatattatccgtgaaaactttgtcaccgatgtcaaattgactgtgtccttgtaaaactaaattctgacatcttcacacttggaaacttcactatgctgctacacccattaacttgagggataatgataccatggtacttgccacaggtaaccccatacgaactttaaaacatgtctcaaacatcccctctgacactatt

SEQ ID NO: 169518 - DNA, 135 bp, Glycine max
  unsure (1)..(135): unsure at all n locations
tatcaaccccctccccccccgccgggtggctcagccccccaaaaccccccganacccacgcggaaagggaatcacgccgccaaaagcggcgggaagcacggccccgcacaacgaccgaaaaagggacgaacacac

SEQ ID NO: 169519 - DNA, 198 bp, Glycine max
tcgtatgaagaccgcaccagtggaggtttcaatctccttccccgccctctgacttttgggaattctatcgcgagagcccgatgaataattgaaagacattttgggaaccgctagagatgttgttatccctggctgaaaacacccgagcccgcttataggtaacggatgagtttatcgccattggggacttaaatgaac

SEQ ID NO: 169520 - DNA, 416 bp, Glycine max
  unsure (1)..(416): unsure at all n locations
ttacctcaccggttcgttggtaaactaactcctgatgctttatttgttgtgangcncatttataactattaaaattatcttatttaatgtaaatattctattggatgttttattattaaattatttcttaattcttaatttttttaaacttatattaacttctctttatttttatattattaactntcttaatttgtcattcttttattaattatatttaacttctatttttttactatttaaaaaatttaaagaggcaccgcccctagttttaataaaataaacaactttttattttcttaatatgtttgtttaaattattctttcttaaaaaatatttttttttattttaagaagtaaattatatctaaattctgtctgttcttgtaaaaaaaaactgttatcttaaaattgta

SEQ ID NO: 169521 - DNA, 361 bp, Glycine max
agcttgcttgtgaagattctatggaggctgtatctttgagctccaatgaggtccttcaatggtgatttttcaccatggagatccagcggaaggcaaaggagaagaggagaggggaggcaccatccactagggaataagccaaggaagaaggagcttcaccaccaagaattgccttggataagaagcttgaagaggatgctttaatggaggaaaaaaaagagagaaggggggagcacgaaattgaaggaataaaagagggaaagaagtggaactttgaagtgtatctcataagactttcattcatcaaagttacaacaagtgttacacaatgcttctaattatagactaggtcgcttccttg

SEQ ID NO: 169522 - DNA, 429 bp, Glycine max
  unsure (1)..(429): unsure at all n locations
actataaaactaagcttgatgaatggtcttaccgacaaatgccaaagtttttcttttagaggcaaatctgatcattatgctttgatacatgccaaaaaaaacaacggcaaatgaagagggtcagaatgagggagaagcccatgctgtgactgccattcctatacaaccaagtttcccaccaacccaacaatgtcattactcagccaataacaaaccttctccttacccaccccccagttatccataaaggcaatccctaaatcaaccacaaagtctgtctaccgcacttccaatgacgaacaccacctttagcataaaccaaaaacaccaaccaagaaatgaatnttgcaccgagaaagcctgtataattcacccccattccagtgtcctatgctgacttgctccatatctactcgataatcaatgtta

SEQ ID NO: 169523 - DNA, 244 bp, Glycine max
ctgacacttcacgagagtgctgcacgggctccatcttcaccaatcgttaaacaactgctaaccacgtgtgaacccacccttcgcggagggcaagcggactcgcgggatagcggttccccaaacgaatcgcgcggagtcccactatgttcattaaggaaacttcgaaaaccgaaataaccatctcaactttaatgtaggctcggagctgatcacccggggaagtattacaccccacttcgtccta

SEQ ID NO: 169524 - DNA, 424 bp, Glycine max
  unsure (1)..(424): unsure at all n locations
agcttgtaaacccaagttattctttttgagtcctataggcttatatgccacgtatccagggcgtgccactccacgagtgacacgtatgcaagagcacgacactacgtctccagtacgtgccactccatgagtgacacgtatgcaagagcacaccacaacgtctctagcgtgtttcactccatgaagtgacatgtatgcaagagcatgccacatctctagtacatgccactccacgagtgacacgtatgcaagagcacaccacaacatctntagtatgtgccactccatgaagtgacacatttgccagagctcaacaccatgtcttcagtacgtgccactccatgggtgacatgtatgcaagagcaccccactatgtctccagtatgggccacctcatgggtgacacgtatgcaagagcacacca

SEQ ID NO: 169525 - DNA, 192 bp, Glycine max
ctaagctttagccaaaggcttaccttgaattattttttgattcccctctgagcctattttcccatttctttgttttgaagctcattacaagccttaagtgaaaaaccatgatatcaccttacccttaacgaattctggagctctggaattgttttgggaataagctgggaataagtgtgtgggggggggggg

SEQ ID NO: 169526 - DNA, 271 bp, Glycine max
catgcaagctggcatgagcagaagatggttattctttaaccacacgagaggcacagattccagagcacaccatcgtgcctatttcgggaaaagagctctggaggcagcaagagaagccactttcgcacagatacctaggttttgtaagcttatctattgttagggtttattctataatggctggctaaacaccctagctagggatttcaaatgaacagatgatgtaaagacctactctctaatcgatgatgtttaatatgtacaatgcttc

SEQ ID NO: 169527 - DNA, 388 bp, Glycine max
  unsure (1)..(388): unsure at all n locations
ctatgatcaaactctnnctctctctttctctcatatgttcttcattctncttcctctcttcacttatgttcttcttttctcttgcacaaatttcataaattttccattgctgatgatcatggaaggctaaacacttaatcaatccaaggatccattccaagcaaggctaaatttgagttttggtttaatatttctaatctttgtgaatgatcatctttttcttcaatactattttcaatcttcatgattatgattatgcttacgattgaaaacgaattacgttatgaattcatttcttaattntgaaatttaatcacagattatttgaatgattttccaacctaatctgtgatctccaataatttaagattgatttgattgaactatc

SEQ ID NO: 169528 - DNA, 431 bp, Glycine max
  unsure (1)..(431): unsure at all n locations
acaaccatgacaaccatgatangtgctttatgcttcacgacggcaaccaacttatagagacgcttaagggcgtgaggtaatgtgggctacggtacgtaaagtgcgagtatgcgagaaataaaaagatgaaaatttacttcagattcaaagacggtgtttatgaaacccatctttggagaatgcagttcaacaacggtgtccactgtggcgtccccaaaataatgactggtttaatagtaatgatttaaataacaaaaaccatgggcaattttttttcttcttattctttatcatctctttctctttttcacaataattaagttcagaaggaaaattatcactatagagtcctgaatggccagttcacaactctattcggagtcatttctttctggtcactcataacctctaaaatatgttgctctttcaaa

SEQ ID NO: 169529 - DNA, 441 bp, Glycine max
acctgcggctgcaagctaggagaagaaggtggattcacccctgtttatttgggtcagctggctctggattgacctgcacaggtgtgggcttaggcgaagcagcctcgttgggtctcaccaaaggaagttgagcttcaggccaggctacttgctcaagaaaatgctccatagatatgattggcctattgtgagccaactcttgtaggctgtgcatgataataaactgtccatggaatcagctttgtagcatagggactaaagttagtgagctttggacatcctatcttacggttactgatggaggagctggaggggatgatgaagggatgtcctctgttctagctctttttctcgatgccatttgtaactaaaaagaactcaaaattccttagaccaaaattgttcaagtaaacaacaaaaataaaggttgaaattaacaat

SEQ ID NO: 169530 - DNA, 428 bp, Glycine max
agctttagatacacaactcaactcttatattcttaagaagagaactctccttctatcaatgttaatgtagttcatgccatctctagaccattattatcctcagaatgtccttattcttgctcacttaaatttgttatttgtgtttatatctatcatagggaaaataaggcatcacttgttgtcctacctgtagatgcaattggctttgatgttttgatgatgatcatgatgatgtgttgcaactgatgcaaatgggcttttcaagattaaaaattcaagacaatacttcaagattacaagtcacaacatcaagatgatcactagaatattaggaagggaattccttattgaatagcaaagcgttggcccagcgatttaaataaaaatgttgttcaagggtttactcttggtgatcattacccaggatg

SEQ ID NO: 169531 - DNA, 403 bp, Glycine max
  unsure (1)..(403): unsure at all n locations
ctataaaactaagcttncaattaatgaggcgaatgacaacctgctcgaattcatttcaattaatatgccgatgcaccttcaatacttcattcttatccattgactctctaatgttcatttgcctcaacatctccatttttctccgattgattgtatttcctgaattcttacaaaatctattcattcggtcctttttatttccacactttgtctttgcacttgccgcaccattacaagagtccacaaactcatcttcttcacttccatcacatccaattggttcaccaaatccaaaatctcttatatttaccatattaccactgccagaagtactgtaagcggccccacttttcttggtagccatatattccttcaactcttcgactacatttggcggcgtttt

SEQ ID NO: 169532 - DNA, 360 bp, Glycine max
  unsure (1)..(360): unsure at all n locations
ccttacattctttttacttttatcggtaaaatgaaccttttaaaagtttaaagtcaaccctacgcgtaactttcttgctctaaagaactatgtaggtctgagttcctcatcgcgattgaggatatgtaggagcaagagccatgctcttgtcgtccccaaaaagataaaaaaaaacataaaaagggaaataaaataaatattgaagtcatgattttgcacatttgattaaaggctgtcgtcccttatgacgaacgcgtggggtgctaataccttccccacatgtaaacaactcccgaaccttnttattcttaaaatttgtagacccctcttggttctttctaatgtcttccttaaataaac

SEQ ID NO: 169533 - DNA, 451 bp, Glycine max
  unsure (1)..(451): unsure at all n locations
tctagctaagttgcccagtattatcctatgagatgtgttgattattggcgatcacaattgccattccttggattatagggttgaaccaagctcatgcttttacaaaaaggttcatcaagtcaagttgaaatatggaagtaaccgtctcgcaaaattggggccaaagatgaatcgagtcacatcactgcttcgtctactgccaaacatatttaggattattgatgtccttgttacttccagcttcaccttgacaaagatatcatggaccatgttgaaaatctaaattgattcaaccccatatcttgcgtaaaaattcgccatacttcaactgtacatcattcgcatgcattcatggctttcattggttgcattgctccgtgcattctttccttgaaaaataacataaaatgaacttaatcattggtataanaaagaaacggacacgctttac

SEQ ID NO: 169534 - DNA, 398 bp, Glycine max
caccgcggctgcagctgaccttggtgagacagttgtactttatccgggacttgcacgattagatttgtgctagatcggatgaggggaaccgtggttctcgaaatctgcattatgagcagatttttgctgtgaaattgtgcatcaggattttgcacaagcgcagaaaaatactacgcatttgctggccgtggaaagagcgctgcacaatgagttctggatgcttgctagtacatcccaacggctaaaatgtaggctcatgtattacagacttcccctaaaaattcggagtccatccaacggttaacgaattggaacaaaggaattcgcactggggtctttgagtggcaaaagctgtgattattggttggagttctcggacacttctctgcctctgctct

SEQ ID NO: 169535 - DNA, 429 bp, Glycine max
  unsure (1)..(429): unsure at all n locations
tctaaaccaaagtcccaaagagaatttaataaaatccattatataattgattgcgcgaaaaacatgtcaaagttatataaacctattaaattgaaaggttgcaaatgaatcaatgctcttcttgtgggctcttcagtgtgctcattctccccttgattccttttcagtgtgctctttttgagcacttgaacgtggccgcttcccaactccacccaaatagtggggccatggtgagagcctttaaaattttgtgccctttcttcaatatccggccttgtatgtcggtcttcgtatttttcttccagatgaagttgattggcaaaattggctgggtctccttgaaaaacatgttcaagaagttgtttgagtttgattcanatgtctcttgccacttcaaggaccgttcatcaaatcctaactaccgatgtc

SEQ ID NO: 169536 - DNA, 377 bp, Glycine max
tctagctgtaaatccttgtaacatctgaacaaatcatcacaatccaacctggtgcacaacaacttggccaacacaccaccaactttggaagacagctgaaagttcaaccttacgacctcaacaaaggcgatggtggtgctagccaccttaggacactccactcttcaaacagtgtgagcagtacccctccatttggcgatctctgactccatggacaccaccttgtgcaaaccctctaggtgctactgaccgttctcctatagaatttccaaacttctttggagaaagacttttggagagtccgtacatcttgtacccctaccaaccgaatcaaattttttgcataggttgacacaaagccatatgggtcttctgct

SEQ ID NO: 169537 - DNA, 367 bp, Glycine max
  unsure (1)..(367): unsure at all n locations
gatcatctcactcttgcgacgtttaccaatcttgatttatttatcagaaaatcctactggtcctaattgggactacgtatatccactcaatctacttattgagtatgccatacctggtcaaggaaaaaaatatcaaataaagcaaagtcctaattattatttccacatattgagaatgaccaatcggatatctcgcacttctctntaattagtagagtctcacatcataagagctagagctagcacaatgaatcgcgcctattggactagcccgtcggcttttagctcacgcaaactgaattgtaaactaatgtggaaacacaatcaacctatttgatcagttgtgagtcattcacaaagtagacaa

SEQ ID NO: 169538 - DNA, 362 bp, Glycine max
agcttacccccactattacgcacaacttcttattaaacttatcaatgttaagaaaatgacatcggcataaatgcagttgagaagagaaaggggcctatgctttacttgtgatgacaagttttcccctagccatcgttgtcctaataagcaatattttgttccacagtgggaagaagaggatgaacctgcattacaaccagatccaccagacgaggttgagacagctggtgaccctagtttgcaagatcatcatttgtcttattatgctttaaaaggctcatcaagtcctggaacaatgaagtttcaaggatcaataaatggattgggagtgcagatattactatataatggaagttagataa

SEQ ID NO: 169539 - DNA, 434 bp, Glycine max
  unsure (1)..(434): unsure at all n locations
actcagctttacatgctgtgccaccatttactaacttatatttttgatgcaatctatctgattgacaagataatttatactactcttataatgtagtgtacaacttaaaaaaataatataatagaaaatagtgcttaagccattcaagtcaagtcattttgaatctcatcattagtatcatacatctatatgcgtcaaagagaacgagaaacatgcatggtaatgcataacacaccaaaacattataacaaaacatgctttctaaacccaaccaaggtaaaaatgttcttatatttcatgaaatagcatggcttcctatggtggaacaatgatattaatttnntcancaantctttatactgcattcatgaatgcttccttaatctaaaacacccccgtaaacacaaatcgtctccgaaggaatcatttctatc

SEQ ID NO: 169540 - DNA, 407 bp, Glycine max
  unsure (1)..(407): unsure at all n locations
gaccntaagtcacctgcggctgcaacttaaccttggccatatttctgcctaattctcaaaaggagggcattttcggggtcgtgaagtgcgtggctacaagtgggacttcaaaaatccaggtttgggtggacttctttctcctttgattttcgcgggaatagggtttggggagatatgatgggtactcttgctaggtttctgctgtgtgatgattatttgcgaagacttttgttgaaagctcgttgaaattgccatgtttgggtgagttagacatacccattctgttttacggttntgtgatgatgtttgtgatgtttgtatgctgaaattgcccatggaaaactgttagagatgaaatatagagctaacctagggttggaaagtgagaatgtggtgtatgagtggaa

SEQ ID NO: 169541 - DNA, 369 bp, Glycine max
  unsure (1)..(369): unsure at all n locations
ggccgccacggagttntccgactatgctcttgtgtggttttatttttacaaaaggagagagcaagaaatgaagagccaatggttgatacatggacggagatgaaaaagatcatgaggaagcggtatgttccggctagttactcaagggacttgaaattcaagctccaaaaactaacccaaggcaacaagggggttgaggagtatttcaaggaaatggatgtgctcatgattcaagcaaatattgaagaagatgaggaggtaactatggctcgatttcttaatggtttgactaatgatatccgcgatattgttgagctgcacgagtntgttgaaatggatgatttgcttcacaaagcaatccaagtggag

SEQ ID NO: 169542 - DNA, 243 bp, Glycine max
  unsure (1)..(243): unsure at all n locations
cggcgccnnacgcgccggacgagcaacaaaagcgacgaggccgacacagagccaacgagaatcctacggagccgagaagctgaaagccgacgatgccactccaattccttatgatgccgcaaaccacgccaaaggaggctaataggctttatatgctcttcctgctcgctctcatacttattctatcctttaatcggaagagccactacatcacttatgcacaaaatcagacccgcaagctaa

SEQ ID NO: 169543 - DNA, 325 bp, Glycine max
attctagggaaagaagcctaagcaaaaatctatgtgggagaaatcttccattgttggttcaacccctctaaaagatagagacccactcttcaattggttgtaaactaatatagaccatacatagggtgaacttgtaatttcctaagtggaaatcccttttgtaagaagaaatttgtctatgcatacacataaaccctcttgttgtaaagtccaacaagtggctgccaaagtgtgatactaatggtgttgctactctagcagcgggctacgtgtgaagtttaatgggattgctcataagttggtgaaatctggaacacactcaaaa

SEQ ID NO: 169544 - DNA, 410 bp, Glycine max
  unsure (1)..(410): unsure at all n locations
nntttgccagtcatttcagnggggnnttcatatctataatattttgtngggactaacgggagtgggtctgtatgatgattatggactttcttcctccacccagcatatttttttaaaactaaaaataactttacatatagtctatacggattatcaatcatcaatttaaaattaatggttcatataagtcttgaacataaactatcgcattattagtatgatgctctaaataactaaattaataggtcaattatgttaaaaaataattaatattgttacatataatactaaaatttctaatgtatatttaatatgcatataagtttacataacacattaatttgatctaataatattctttttaacatatataaattttacattccgtaaggcccatatggatttacaat

SEQ ID NO: 169545 - DNA, 381 bp, Glycine max
ctgaacaccctagccttgctacaagtcctacggaagtagacacggagatggacaataaaatccgcggcattgtgagtagcattctgaaagatgcttctgtgcctgatgctgagaaagatgttccaacatcttccaccccagatgtttctgtgcctgatgtcaataaaaatgttccaacatcctccgctccaaatgctgaagccctcccttcacccagtgaagaggaatcaacggaagaagaggatcaagccgcagaggagacccctgcaccaagggcaccagaacctgctccaggtgacctcattgacctgcaagaagtctaatctgatgaagaacccattgccaacatgttggcacctggcatagcggaaagacttcaaa

SEQ ID NO: 169546 - DNA, 118 bp, Glycine max
cgaaataccattccacatgattttcaaccgcctatagttattgggagcggctctattttttcaccactccatgttccttcagctttataccgagggtatgcaccaatccatcttgtat

SEQ ID NO: 169547 - DNA, 411 bp, Glycine max
  unsure (1)..(411): unsure at all n locations
agcttntaaatatatatgcgcatatgtgtatatttactctttctttgccagcagctatagttgcatggacagattgacagtcgttgtttgcggatgtagcatcatcaagattcacatgcaaatgaaggtgggtgggactatgatgcaatccaagtgctctgccaatccatcggtctttttgatgtgagaatcttgatgatgctgcatcagccataaacggctgtaaaaagttgaacaagtactatttgaaccccccaataaaagagaggagataaaaaaaaagtgtgtgtaggtctacacacagctcagacttccagatactgtccatgagatcatgatgcataacaagacaggtgattctttgcgctgctatcctttctgttgttgtcacgtggcttttatatatctttt

SEQ ID NO: 169548 - DNA, 361 bp, Glycine max
  unsure (1)..(361): unsure at all n locations
gatatctncaacatatctcactataagaaaattctgcgcccactgaagaatatactaagctggaaaactgtttttgataattctgttttatcgataaattttatttgttcattgttaagaacccatgaccttttttttatttcttctttaaccaaccaactcatcttatatctttgtttcggcattttcgtacacgaaattatatactttctaaaaagcatctataagaagaaccaaataagaatgtcaaatcagtaaacttcgtacgggcgtaatgccacattctcaaacttcaacagttttctactgtgcctctcgcacacgaaagccacgtgcgtggctccatcacaacgagcaccta

SEQ ID NO: 169549 - DNA, 377 bp, Glycine max
  unsure (1)..(377): unsure at all n locations
tataaatatggagaggagggaagttattttcgttttatcctccnggcatctgaggatcacttgaaattagagaaaaaaatcattcccgtgaagaaaatccaagccgaggcgcttccgtaacacttccgaaacgtttccgtgaagattttccgccgtctttcgatcattcgtcgtcgttcttcggtcttcaatcggcaagttctcgatatcgaacttttcaattcattgtatgtacccttggcggtcctcacttgtttcgcgtacttttattttcatttcgtatactttccgtacccccttttgacgtgctctagtcatttatttaagtcattttctcgcctaatcaaaaaaattaaataacattccaccgatcattc

SEQ ID NO: 169550 - DNA, 81 bp, Glycine max
aagccaaaccacggcccacaaaccacacccacaaacaaagaaccccaccccgcagccgaaccaaaaacatcaccacagccg

SEQ ID NO: 169551 - DNA, 411 bp, Glycine max
  unsure (1)..(411): unsure at all n locations
agagncacctgaggcatgcaagcttgagcttanctacacatacctctgttatttctaatctcacctccttgagatgaaaagctagagcttatgtacacaccccctataatagctaagctcacccccatgacaaaaaaacatgaaaatactaaaaaattctttactacaaagactactcaaaatgccccgaaatacaaggcttaaaccctatactactagaatggccgaaatacaaggtccagacgaaggaaatacctattctaatatttacaaagataagcgggctcatacttagcccatggactcgaaatctaccctaaggctcatgagaaccctagggccttcccttggatctctagccaatctacttggagtgtctacccaatgcncttgtgggggaagattgcatca

SEQ ID NO: 169552 - DNA, 429 bp, Glycine max
  unsure (1)..(429): unsure at all n locations
ttgatgatatggtcttcgccggcaaaaggatcgaagtgtgtcttatatatgcacatctgatcatcttgctttgataaatgcaaaaaaaaaaaaaaaaaaaaagctggggcaaataaagagggtgaggatgaaggagaagcccgtgctgtgactgccattcctatacagccaagtttcccaccaacccaacaatgtcattactcagccaataaccaacccttttcttacccaccgcccagttatccacaaaggccatccctaaaacaaccacaaagtctgtctaccgcacttccaatgacgaacattgcctttatcacaatccaaaaacaccaaccaagaaatgaatnttgcagcgagaaagcctgtagaattcacccaaattccggtgccctatgctgacttgctcccctatctactcgataattcaat

SEQ ID NO: 169553 - DNA, 433 bp, Glycine max
  unsure (1)..(433): unsure at all n locations
agcttaaagtatgcccgagtcatttattttatgagatgttgttgaagtattggcgatcagaattgccattccttggattatagggttgaaccaagctcatgcttttacaaaaaggttcatcaagtcaagttgaaatatggaagtaaccgtcttgcaaaattggggcaaaagatgaatcgagtcacatcactgcttcatctactgccaaacatatttaggattgttgatgtccttgttacttccagtttcactttgacaaagatgtcatggaccatgttgaaaatctaaattgattcaaccccatatcctgcgtaaaaattcgcaatactttaatggtacaccattcgcatacatccatgcttttcattggttgcattgctcattgcattctttccttgaanaataaataaaataaaaatgaacttatcattgt

SEQ ID NO: 169554 - DNA, 457 bp, Glycine max
  unsure (1)..(457): unsure at all n locations
ctcagctttaacanaagtcttcacanataatcatcacacagtagtttttatcaagactacccatcatatctccccaaaccccatacccacgaaaatcaaaggtgaaagaagtccacccaaacctgaaatttcgaagtcccactcgtagccacgcacttcacgaccccgaaaatgctctcctttcacgatttggggcagaaatgagcaccacaggttgaagctttgttggggtttcaatggagaatggaggagaaggaaaagcaacgtgaggaagagggagagagagagctgttctgaaaaaaaaaagtgtgggggctgagtgaagagagagaaaagcttttggtcttaaataaaaggcgtttctctttntctatntatttattcaagctctgccacatgctcctatttgagtggagcaagaagggcccactntctcttttgactgtgacccattctt

SEQ ID NO: 169555 - DNA, 377 bp, Glycine max
agcttctaaactttatacaagaatgtttctctgataccacttgttagacaagtgacctcggatatcttaagaagggggagggggttgaattaagatatcaaagactattccccaattaaaattttaactctctttctaaattattaatgcactcttaatatgaattactaaaaacacaattcaaaataaaacttctttaaagcaaaagataaatgacaataaataaaagaattttaagggaagggagaatacaaactcaattttatactggtttggccacacccctgtgcctacgtccagtccccaagcaacccgcttgagagttccactatcttgtaaaatcccttttacaatgtctgaaccacacaaggacaacc

SEQ ID NO: 169556 - DNA, 404 bp, Glycine max
  unsure (1)..(404): unsure at all n locations
tgaagggtaactagatgccttggttaacttggtattccttctggccatgaatcanaatctacacctgtcgccagactctgtggtttatgctcctctgccgaccaccacacagacctttgcccttctgtgcaacaatctgaagcaattgaacagcctgaagcttatgctgcaaacatctacaatagacctcctcaacctcagcagcaaaatcagccacagcagaacaattatgacctctccagcaacaagtacaatcccgggtggaggaatcatcccaaccttagatggtcgaatccttcacaacagcagcaacaacaacagcaaccttattttcagaatgctgccggcctatgcaaaccatacgttccttcaccanaccagcagcaacaacaacaacaacccca

SEQ ID NO: 169557 - DNA, 369 bp, Glycine max
agagaatatcaaaaacaacacttaagatattatataatcttgggtccaaaaagaaaacatatatgtcatataagccggagttttaaggtaaaattcacgtgaatgtctggggaaaaataagcggagcctatccataaaagttggaataaatgaatgagcagaattgtattatatatagaactttatgcatgaaatggaagataaaatgaaggggtttccctgtcctacattataggggcgagctagagctatggtatcacactcttcatgacactatttgaaatgaaatgaagaaggcaaagtcgtatgcatgtatccataactagttgattgcatcagaagtagataaatggagaaatgtgtaccatt

SEQ ID NO: 169558 - DNA, 347 bp, Glycine max
ctccagcttgcacgatatatatggacgacggagtcttacatgtcttctttatatcttagaacgtgtcctgaagcctatgatttcttcaccggaattctcccctcctctcatagtattcatatcccacctctacctataacctagcgcaactaatacctctcacaaacatcatatgcttcctctatattcttggctcttatggctccttctctaccctatatacccctctcgcaccacctacactttctcttcaccctttcttttacatttcctccgagtttctttgctacacattctaagatatatatacacgcgaccaattcttgtaatgactggaagaataccta

SEQ ID NO: 169559 - DNA, 389 bp, Glycine max
agcttcagcatcattagacttttctttcatactttaataacattgaatggcattgtactaaatgaaattattggctaattacataaacaagaaatgaatgcaaaacaaaaagcaaaatttccagagtacacaaaggatggaatctttttataaaaaaaaatagcaattgatagttcttaaacgaagaattcagtttaataagaaaactgagggctcttgaataggttcgtcagcctgtagaccttccatcaaataggaaatgattttaccatccttgaaggatcaaatattttctttaagtgcattgagataaaaatagctaactatttaatgtgctggtgatgctacaagatctgtcctgaacgtaggtgcttacatccataatgact

SEQ ID NO: 169560 - DNA, 465 bp, Glycine max
  unsure (1)..(465): unsure at all n locations
nttgagttgaaagaaatgagtctgctctggtgttagattattcttggctggcaaaatcatttcttttgcagttttgttttgttttaatcaattacatggctctgtaattagttaaaattgagctacatggttggtttttcattttgggattgttttattgattataaaggtttgtaattgattaatgagtcttaaaggctattttatcgagtatggacatgttgtaatcaattatatcaaaaccaagtgttgtttttcttgattcaaattttttggaatttgttacattaacatttaatttgttacaacaaccaaaactcaattctttttaaaatgaaagttctgaaaagtggtagttgttaaatatttcacatgagaacttaagataatcctaaatgttttgaaagtacaatcaaatatttgttatggatgaatcctaanatgaacaagaatgtgacttaacac

SEQ ID NO: 169561 - DNA, 419 bp, Glycine max
  unsure (1)..(419): unsure at all n locations
agcttctccctcattntcctataaataggttgtataagngaagggaaaaaatgttcagccctcctggtaatttgagatcacttgaaattattgaaaaaaattgtttccgtgaagaatatcctagccgaggcgcttccgtaacgtttccgtgggtgatttcgcgaagattttcaaccgttctttgacgttcttcattcgttcttcatcgttcttcgatcttcaactggtaagtacccgaaatcaaacttttcaattcattctatgtacccttagtggtcctcatttggtttcacgtgcttttattttcatttcatttactttccgcacccccttttgacgtgcttagtcatttatttaagtcattttctcacctaattaaaagataaaagaaatttccaccgatcatttgaagtggatat

SEQ ID NO: 169562 - DNA, 492 bp, Glycine max
ggacctataaaactcagcttgaggattatggcgtacccatcacatgtggtactatgtgtgggtcgagcgatggtgcacaacaagttgtccacatccacaatgcgcgcataaacccaccatcccctgttgcccacctccaactgagctcacgtactcccacgtagcccatatcctcgtttctctcaacaccgggtccccatcaatcctcccaagcttccacaacatccaagcaaaacaacattcaaacagcacaactatcacaaccaagcaaaacagagcaaaggcagaaaactctgccaaaacaccaaccaaatcacagctgttctcacttaaagaccccagtaacaattccttcgatccaattcgttaaccatggcatttcaagctaagattaactcactttaacctgcatgtactacagaatccagaattaaccttgcaactctcaaagcctcactctttttccactcacaacaccacattctcactttc

SEQ ID NO: 169563 - DNA, 432 bp, Glycine max
  unsure (1)..(432): unsure at all n locations
agcttcatcttcttcaccacacaaccacttttttnatctacacctccaccacacttgccattattcttacctattcctatctttgaggagcctgaaatggcgggagaagaacatcctacaaggacacttggagactatattgcacatgttgtgcaaaggcacttcatattggaatgtgttattttggctattaaaggttgtagtgtcaatctataattaggattgctcccatcaattggtcttagcacatctctcaatttcatgtaaaaaaagttaatggaccggattgggtaatgctcaccagtacttactaatatattcacacaaaaaaaaaccactacttatntaatattgaaaatgtttaactatacattttcattcaatanttgtacttttaggtacactaattagattcagtaaaaaaaaatacac

SEQ ID NO: 169564 - DNA, 466 bp, Glycine max
  unsure (1)..(466): unsure at all n locations
ntacaacagatnttagtaatgacccactaacctataaaataacttaatgtccttaacctaggaaattaaaagaacttaatggctgagtgtaactgaaattgtggcaaccaaaagtcacccccaacaaccatcaagtcagccaccatttggtctcccaaaaggctgatgcctacgttgccaattgggcccttattacaacttgagctaaacctaactaaagcccttttagttggttaacccaaaacatattttcggtcagccaaatttacaaggattgggccattatttagacaaactaaacactctaaaattgagacaaagtggtgccatttaaatgcaaccacaccatggacctaaaggcttctccttccttttgaatcgtgactgtttacaaaccttctctcgatgctgatttcaaacagcaccccatagcaccctttgaaaccttcgtgcaggctcgacaccc

SEQ ID NO: 169565 - DNA, 384 bp, Glycine max
  unsure (1)..(384): unsure at all n locations
tctgtgtggtggtcaacagaggagcctaaaccacagagtctggtgacaggtgcatattttttattcatggccagttgggttaccaggttaaccaaggcatctagtttaccttcaagcttcttagtctcggctgatgaagataaatttgtggctacttcatgcactcctctaatgacaatagcatcatttctggcactaaattgctgggagttggaagccatcttctcaattaaatttctggcttcagcagatgtctccaagggctccaccactggcatcatctatcatacttctctccatgttactgagttcttcataaaaatattggagaagaaactgctcataaatattgtggtgagggcaactagcacatagntttttaaa

SEQ ID NO: 169566 - DNA, 402 bp, Glycine max
  unsure (1)..(402): unsure at all n locations
aggcatctcagagaggatcttttccgtgcatatntgcgcacaatctcttgaacgaggaagatgttgtccatcatctttctgttcttaatgaacgcagcttgagttctcccaataatacgtctaagcactgcggctatgcggccggcccgaattttagacacaatcttgtataatatattacaacaacatatgtgtctcaaatggctaacttgcgaggcctgatcatgcttaagaataagcgcaccaataccatggttgatctgctttaaaatttttccagttgtcaagaattcattcaccgcctccaagatatcatcaccaatgatattccacagcttcttgacaaataagcattgaaaccatctggccttcaagcttatcgttatccatcacacaaataac

SEQ ID NO: 169567 - DNA, 383 bp, Glycine max
cagcttgagccattaaacgtgagaacttttgtatttattgtcggattgagtcatttactaattcaaaacactcaaaattgaaaacagaagctctgagcaaattctaacgacattaagttattactagaaagtctgattcagtcatgtagtatatcgagacgaacgaaattgaaaatacaaacattttactcggatgtccgattgaaaacgaaagctctgagcacattcaaacgaaagtaacttttgacatggatgtccgattgagttatttaataattcgagacgctcataattgaaaataaaagctcttagcaaattcaaaggacaatacactttgactcgaatgtccaattgaggcctttaataattctacatgctcaaaa

SEQ ID NO: 169568 - DNA, 362 bp, Glycine max
  unsure (1)..(362): unsure at all n locations
ntngtattcacatttgagcgtctcgacatactaaatgactcattttgtatttccgagtcacaagctattgtcgcttgaatntgctcagagctcttgtttgaaattccagtgtttcgattcattacgggactctatcgatcatccgagttaaaagttattgtcttttgaatttgcttaaagctactcgtcttaatttctggcatccccatatactgcaggagtcactcaaactttcccctaaaaagctattgtcatttgaattttgtgagagcttctatattcaatcttcaccgctttgaattattatatgactcactcgcacatccgactctcaacgaccttttctttgaactcctaatagc

SEQ ID NO: 169569 - DNA, 420 bp, Glycine max
tctctttttctctcaattgtgcttcattcttctccctcttttcacttatgttcttccttttttcttgcacaaattttgtggctcttctactggtgatgatcatggaaggctaaacacaatcaatccaatgatccactccaagcaaggctgaatttaagttctagtttagtatttcaattttgtgtgaatgtttatctttttcttcaatcctatttccaattttcatgattatgaataggcttatgattgaaaactaattaggttatggattcatttcctaatttcaaaatttaatcacaagttgtttggatgacattccaactaatttgtgatctcaaagaatttatggattaattcgattgaactaactctaatgacatttgatgaactttcataacataatcatcctctgcagaacta

SEQ ID NO: 169570 - DNA, 467 bp, Glycine max
  unsure (1)..(467): unsure at all n locations
gctntgatgtgctctacaagctggttatggaattcaaagaatgtatgtaaaattctgaatgcttatgcgatactttatgaattgcttatatttctaaaacttataactcggtatttattattttataattattatttataggttctagatcaattgaagaatcaacttttactgatgagattgaatccgatgatgaaggtatattcacttttagctgctctaattttttcttaatatcattatacatatctaatttttcaattcttttaaaatataggtggatctttggtcagtaacattactcaatgtttgccagactacgagacattattcgtgatcgataaagtaataactatacttatttgctagtgtgatgtgtgattgtaagacttgaaacatctaaaatatgatgctctgatttataaatatcacggtgagcgctgaagaacaaatgctgatgacatctt

SEQ ID NO: 169571 - DNA, 426 bp, Glycine max
  unsure (1)..(426): unsure at all n locations
agcttttaagaaataggagaaaataatggttcatcaaaaccccccatacttagccttttgcacccctgggcaaaatgaaacaaagaacaaaatccaaggatatcaaagagagacaaacaagaacattcacatatttctcaatgaacatcaaggaatgaaaggaatgggtaacatctaacatctaacatgaagagatccaaaaagtcaagacattcatgaaaatcatccaagcaacccaatcatggaaagatagttaatcagctcaagaatgaaaagtgataaagcctcacaagatatacactctatctctcaagtgtctaggctactatttaccctcaaagcacccatgaaaaccaacaccacataaactnggcaagattctaaaattgacaatcaacccataaacacaagcacatgaggatcaaa

SEQ ID NO: 169572 - DNA, 478 bp, Glycine max
  unsure (1)..(478): unsure at all n locations
tcatgatgaatcaagattgattcaaggagttttgatgattacaaagatgatgccaaaaagctcaaaagtcaagaacacttcatgttaacaaagatgatgacttccagaatcaaagaatgagttcaagattgaatcaagaacacttcaaggttcaagaggaaatttgatttcaagaatcaagaatcaagtctcaagattcaagttccaagaattaagatcaagattcaagactcaagattcaagaatcaagagaagactcaatcaagataagtattaaaaagttttttcaaaaactgagtagcacatgaatntttctcaaaaaccttttaccaaagagtttttactctctggtaatcgattaccagattattgtaatcgattaccagtagcanaatggttttcaaaaagctttcaacttgaattacaacgttccaattgatttcaaatggtgaatcgatacaatgattcggtatcgata

SEQ ID NO: 169573 - DNA, 473 bp, Glycine max
  unsure (1)..(473): unsure at all n locations
tcttctggaccttgaacaggcaactaactcctctttcattatcatgctatgtgctcgcgactggtccctctcttcccttcgcagcttgagttcattgttgctaccctacagagctccgcgaaatttattccggccatactcttccttgcgagccctcttggtctcttgttcaagggctcgtgcggcggttgcattctcttcccgtaatccggcacactccttccggatgtgtgtagcggccaacttgaacttctcttgggcaagtttcgcctttcctaactcgctnttgagagctcggacttcttcgtcctcttccggtgcttcaaaactctcttcactgacgacttttaacttggcgagccaatctaaacctcgtatatgaactttcagccattcatggtatccaccaatgatgccattacgaatgcccctaagttcttgaatctttcttaacggcgcttcccatgccttat

SEQ ID NO: 169574 - DNA, 389 bp, Glycine max
  unsure (1)..(389): unsure at all n locations
tgactatcataaatgttacaattattttaaagccaaaatngaatcgattattgcagatacagaaatacttaaacaaacctgccaattaggagttttgtggctttttgcaaattccgcccatgtttttggatcaaggccatacttgattgcaggatcaaatatttgctgaccttcattgtcagcaaagacaaattttgaagtcaatgaacacttaaattgtctccatcttgctgcaactattgacatcacctttctttttgcattttcaccttcacggatatcaaatttgcgcctgacacaaaatgaggtatgtaacacgatgtaatgaatcctctaaattacttaccacaaatcctgaatcaagggttttagaatacttaccaaatatc

SEQ ID NO: 169575 - DNA, 360 bp, Glycine max
  unsure (1)..(360): unsure at all n locations
tgccacgctcaacaaagtactgtggacacctactgtgcgttgatttgaccaatgctgctattataatgttgcgaccatcctttaacaccctatcgatacattctgagaggttggttgtcatgtggccatatcgacgtccttctcaatcattagccatcttccattttcttctttaaatgcaancaatccatgttgctatggctggactcacgtgactaaatttcttaaatcttgaccaacaatgtgcttgccacgagtgtccgctgcatataatgagctatcaataacaatttctagtatatatgatagttaaatcaacgtgcacatctaatatgagactctacgccatttcttaacatt

SEQ ID NO: 169576 - DNA, 429 bp, Glycine max
gatcttagacgaccgcggctgcagctactcaaaggcaaatttttattatttaaatacgtctgcgaatgtaaacatgaaagttcgtgtggatttaccagttgaccctaaactttaatatccatgcataaagagatttaaaatgttcagtcccttaaatttgaataacttttgtttttaatctctcaacattaaatttactttatttaggccttcaaatataaaaaaagttttttttagtctcacttattgcattttgacagtttagatgcataatttgttacaatttttttttttactataggagggactaaaaatattattttttataatcaagggacttaataaaattaatgctacattgagggaccacaaataataatgtcctaattttacgagcttaaaacatatactaaatcttttttgtctgac

SEQ ID NO: 169577 - DNA, 475 bp, Glycine max
  unsure (1)..(475): unsure at all n locations
tctggattggaagggaatgcgatgggtcccttgttaactttaccgatatcgcgacgcatgccgcactttaagcatatgccaattatctacaatctactgtctcttcaaaaacggccacacacatgcacatttagtacagtatagctgctatatgctagcacgaaatctacaacagaccacaaccaaatcataacttactctcatgatcatggttgaaaacaaaggattaataaagttctctgcacgaggaaacgtgtgaggtaaagaaacaaaatgtttttatcattactttaaaataaaaaaaatttgtaggtcttaaagatacaaatatctctcaatcactgtcattatcggtgttacatccttataatttacaagaattctacataaaacagaatccaacatacatctttttataaattaatcgctgttcacacgaaggatgcacggtntacagcactgcattatctcgcga

SEQ ID NO: 169578 - DNA, 427 bp, Glycine max
agcttcaatctatacctgaatattattattatatagctgcacaaaagaggaagctttctgatcagggagctaacaaaaatttccatgtaggtgggccttcttctagtaactctgacttgcagcagcctcctatccctcttccatttccacatagagcaattcccaacaaaaaaatggaaaaagtggaaaaggagatcttggagaccttcaggaaagtagaggtgaacatacctctgctagattccatcaagcagattccaagatatgccaaggttctaaaagagatgcgcacccacaaatggaagcttaaaggcaatgaaagtattagcatgggcagaaatgtgtcagcattgataggtaaatctgctcctcacatttctgagaaatgtaaggacccacgtacttctatatacctcgcattattggg

SEQ ID NO: 169579 - DNA, 452 bp, Glycine max
  unsure (1)..(452): unsure at all n locations
gtgatctaccaccaccaccgccaccatcagcttatatttttattatgnncaacactattagcacttcgatttctagtcatgtatttggctatattattatgacatttgaacatttaggacttcttttactatttgcttagtatgactaaatttgtatgaattatgttatatgactatgtggtttatatattcatttgggttattcatgtttttgcttcatgattggtttagatttttcaataaatgtcttgtgtatgattagtcatttatgtatgttttataattgttacccactttggctttttgttgatgccaaagggggagagaaaatacgaattaaatcaagaactcacataattaaataacttaatttcaagtgaagcttatactcaaaatagggagaatatggagaattaagtgagtgatcgactacgaaaaagaatgtgtatgtg

SEQ ID NO: 169580 - DNA, 393 bp, Glycine max
  unsure (1)..(393): unsure at all n locations
gcggcgggcgatggggcacaacaagttttccacatccacaaatcgcgcataaacccaccatcccctgttgcccacctccaactgagctcacgtactcccacgtagcccatatcctcgtttctctcaacaccgggtccccatcaatcctctcaagcttccccagcatccaagtaaaacaacattcaaacagcacaaactatcacagccaagaaaacagagcaaaggcagaaaactctgccaaaacacctaccaaaatcacaacttttctcacttaaagaccccagtaacaattcctttgttccaattcgttaaccgntagatcgactccacacatttactggaagtctctagtacataagcctactatttgaccgtgggatctactacaaacat

SEQ ID NO: 169581 - DNA, 405 bp, Glycine max
  unsure (1)..(405): unsure at all n locations
tactcacgctcgctcatcccacgttgaattcgctaacaatagagctgtttatattatctctaatcgntctccttttgaaggtgttcatggttctaacccactaactcctcttgatcttttgcctatgcctaatcgttctgtttctaagcatcaagaacgtcaacccaaggcggactatgtgaagaagcttcatgagagagtcaaagatcacattgagaggaaacataaaagctatgcctaaaaagccaacaacaggagaaagaaggctgtcttctaactccgagattgggtttgggtgcacatgagaaaagaaaggtcttcccaacaaaggaaatctcagcttccaccacagggagatggaccatctcaagtgctcgaaagaatcaatgacaatgctcacaaagt

SEQ ID NO: 169582 - DNA, 382 bp, Glycine max
  unsure (1)..(382): unsure at all n locations
aaagggtcaaggaaattaataataagacccaattcgcttgctttcaaaagtagctggactaaattgattggctcaaaaaaaaatcttaaatactaaaattacatacgatttaaatcaaagaattaaaagtacaattaaacattttactaaaaattctacctaattaatacaaatataatgcataataatattttatggtatgaaactaacaagagtgtagtatatttgatagatagttagattctttacgtacgttaataagggtttagtttttgggttataaagaatactttaataggggaagtaaaactcacattgataattntcatgcatcgaaatttaatcttataattntcgactttgcgaatacctcgtttttagt

SEQ ID NO: 169583 - DNA, 480 bp, Glycine max
  unsure (1)..(480): unsure at all n locations
aaaactaagcttctcgcgccatcctgcgaagcaacattggaaagttatttaaagacaataacaatcattacaaaaagggccaaacacacttctcatggcccgagtgtcaacatgcactttataaaataatcatattggggtcgtgctattttatgacacatacgtatttgcacacataaaaattttgtgttgaagcatttacgacacctatccatgtacatattttttgacaaaccttttcatgctacatcctatatatatacacacacatttttttggaaggcttcttttgttacctactcacaaatacacatattttgaaaaacacttttacgctacccatccaacactttgtaaggcacttcatgctatatattttcacattatgcaaggcattntattcaactctctgcaacgcattctattcaacattntgcaaggcattttcatgctatatatatctacatatatacatacccg

SEQ ID NO: 169584 - DNA, 415 bp, Glycine max
  unsure (1)..(415): unsure at all n locations
gcaagatctgcaaatatttatcattcttcagcgtgaaaaacacaatttttcactcttcctctctctaaacgcccacccaaaccctaacaccttcttcttcaccacccacgaccactagtgcccaccacgagccaccattgcttgccgctcaaccaccatacaaaaaggaacattttaatcggagcggaatccttagaatccacctcaaggatttgatggaaaacaagccctcaatcctttcgttcatagcttctctgaggtaacttgacttctaatcctttcttctagttagtttgagtttctcttaatgtctctcgtgttctacgcacaaatagggtgtttttacacttcctttgaaaaaccttgaaaatgagatngtgtaaaagttatctttttataaaaatgatgttatttt

SEQ ID NO: 169585 - DNA, 414 bp, Glycine max
ctcacgcttcttgtgctgaagtgttaaggaactcttatagcgagttatttactacatttatgtgcaacttgcgatccactaatgttttgatggctgagctctggggtttgcatctatcctccagattgcataggacgttagtatttacaaactaatgatagaaagcgattttggagtggcaattcaatttgtaaaagatgaagttagtcagaaccatcccttctagtctatggtgactgctattagtcaatagtagttgagaactgagagctgcataatccccatgtgtatcgcacggcaaatgctattacaaattgtttggcaaacaaagctcatctacaggatattattgtcattcctgttattaataatccttctagtgcgtgcatctttcttttgcttcgcgattgtaca

SEQ ID NO: 169586 - DNA, 409 bp, Glycine max
agcttaataaagacctgttatatactccttatctgtattgttcattggctatgacctactttaattttcatttatcttgcctcataccaaaattaatagttcctatttggatgaaacctcaaagagcatggaaatttaatctcatgacgagcatatttcagatgtcgtcatttattttctttctttttccccctaatatttattctaataaaatattttttttaactatttataggatgagtcatatcttaggtagacttatattattcaatatgcatccttccttgaaaagaattcgggggcatgtcatatggcatcctttcactggtttctcttttattaaaagaaacataataatgggtatatttattatttattaatatgttacaacttgaaaaagtggtgtttt

SEQ ID NO: 169587 - DNA, 390 bp, Glycine max
gctttatacaaggggagcaagaagatacaagtattttttttaggtaagctatttggtcaaaagagcttgtgtatgtacaattatggccttcatcatgtcctcatttatacatttcattctaaaattcagagattcatgcaaacatcattactcatagttagtcgttcactcacagtttaagttcacactctcaccggttttggtttaagcttttctttcacaatcaatttgtttactgactaacaattctacatgcaaggtcacattcttgttctttctttgtctaacatacacacttgctcatactcatgataagaaacacaaactccatcacaatcatgcttttcatttaaaataaaagcataccaccattttcacaaaacgataaaa

SEQ ID NO: 169588 - DNA, 311 bp, Glycine max
cgaagacaactctccttctccctgcgctggctcgtccagcatacctattatttttcctctcaattcgatcttcgactctctcatgaagctttttcacatagtacaccttagcctgaccttctttatgcttaacaacagaaacattacgcatatgccaaacattaagacgagttactgggttaaaaccatcaacaacttccaaacgagaacaattagcactgctatgaacagctctattgtaagccactcaacatggggtcaaacagctctcccagtctttaagctcttccctaaactatcctcagcaaagt

SEQ ID NO: 169589 - DNA, 401 bp, Glycine max
agcttatcgtaatcgattacagagttgtttttgagacaatgactaatttattcaagagtctctattttaatcgattaccatgtgatataatcgatcacttctctttctataagtagttaagaagtgaacaagaacactttaattaattactttgagtatctaatcgattacaatgttcttgagttgtttctaggtgtttggaagagcactttaatcgattaaaaagataactaaacgattactttattgaattaatcgattattggcagttataactgttttctctataaataatcagcttgtgttctcttctaaacaatctcaatatctcgaaaataacacaataagcctctgaatgagctaagatcatgtgctgctattagttaaagaaagaagagaat

SEQ ID NO: 169590 - DNA, 441 bp, Glycine max
  unsure (1)..(441): unsure at all n locations
ntgngttaaagtgtggtgtcaagttcacttatgtgatttctcatggtctattaatgtaaatctccttagggttaacccccttagttgcacaacaggtttcactatgctttaatctatctgaaacttttcacatttgtttggcaacttagaaatgaattagttcgtttagattgtatcgtgtgattttgctttcactatgcttgaatcgattcaaatttgttgaaaaacttagaaatgatttttcaaatttgtatgcctaaatctatagttttaaacatatatattgtttttcatcattgtatcacaagtggttctcgtagtgtagtggtaaacatctttgtagatgaccatacagaccccagttggattcctagtacgggcatccttttcatttttattattggagcaggcaacaacaacatatggcatgatggacaacat

SEQ ID NO: 169591 - DNA, 429 bp, Glycine max
  unsure (1)..(429): unsure at all n locations
agcttgctagatngaaaacccgaatttttatctataaaaattagagcagaaaaataaagaaggttcgttaaattgaaattgttttcatccactaagtcaaaaactcgacatagaaaaaattgttggggtaaatggtgtgtttgtcatctcgagttagggcaaactgtgtaattgttgagaagaagaatggggcaaatgatctatataagtgtattctcctttgaagcttattgacgagtaatcaaagtagttgacctgtggtactagcgatatcatctagaaagcatcgctcttgcaacaaaagtcctctacttatgtttccattgtttcagctaagtttattgtacaattgtccttgtaaatttatccatattatcttgaatataaatttcttcttcccttcatagttaccaattcattttgcatttt

SEQ ID NO: 169592 - DNA, 471 bp, Glycine max
tctatataagctgaaccatcttatcaataaacacaagttgagttttattcagaaaattagagtttatctcttttatcttagtgagagtgattctcctaaattcttgagtgattcaagaacaccctggctgtatcaaaggactttcacaacctttgtgtgttgccctcgctggaaagagtgattctttccttcctttcatcttcacccttgttctttcaaaccacaatttcagaaaatccacctctgcccagaattatctcgtggccataactcccattttacgcactcaaattaagtgattcttgagcctaaattgactttcaaaacgagacctttcacctcctcttggaatcacctcatttggagccctgtagcttcagttattggcatttctacatttctgtccagccaccacttaacctacatattaccatcccattcatccattttatgccaagaaccaccttatta

SEQ ID NO: 169593 - DNA, 407 bp, Glycine max
  unsure (1)..(407): unsure at all n locations
agctntaaaatatgaattaaataacttttttttatcgattaccatatatgtgtaatcgattacacagcgcaaatttttgaattcacaatttaatagctgttgtaaatcagttttggccactggtaatcgattacatcctctagtaatcgattaccagagagtaaatttcttgtaaaagactttttaacttaaatttcttggccaaaccttttgctacttcaattggaatacccttcctatttaatataccctttctaagattctagagactgtcttgatcatccatcttgaatatcttcgatttctttgtcttgaataaagctttgtgaaacatgtaaccctttggcatcatcaaaacatcagcttgatcctttgtctacaatcttcccctttttgatgatgacgat

SEQ ID NO: 169594 - DNA, 352 bp, Glycine max
tagaaaccccaagctttagctccaatgcaaggaatcatatttatggctaagaatctaaatcttggttttgaaagtggaaaggcatgaaaattacgacatgctcgtgagggttttactccaatatggctgccccatgaggggcactttgcacctacgtagcatggaaaataccttctaatggaatgtatatatgtgcgtgaatatatgcagcatggaaaacacctttcaatatatgtgaatatatggcattaaatgtcttgcaaagtgtgaatgagtagcaaaaatgccttttaacatgtgcgtatttgacgataggtaccattaggagcctcttagacaatgtacccatgtc

SEQ ID NO: 169595 - DNA, 338 bp, Glycine max
  unsure (1)..(338): unsure at all n locations
agatgagaatgaagtacgcattaatatggttcaatttgccctgaaaaaataatcatcttttagttgctgctccaaacatgcacgtattctataattcagcaatactattttatcagatacactgatattcgccttttcatttgcccatcacgatatacaaactatcagtggcggactcacgatntaatgacggggatcaaatatgaaaaacataattcatctcaaaaatatactgattagcattatttacataggggaacgtcttatggttttcaaaacctgagttaccttatattaacagaaggactatacaggggtatattatatatatatatatg

SEQ ID NO: 169596 - DNA, 316 bp, Glycine max
gcagcttgccacactcggtgctgcaaatattattattaaaaccggcctcaacaacaccggaaggcgatctccacccgaacgctgatagagggtgacaaacagcaccaagtaatgcaccatccctagcgaaaacaagcaaaccgttctctttttccaacccatattcgcgcgaacttgtgccccgaccaagttccctataaccgacatctggctcgtcgggtttgctaccgtcgataaaaagcctcttcactttcgtgaaccacctgcccggagaatttaacgttcagcaccaccaccggcgccgggaacacccacc

SEQ ID NO: 169597 - DNA, 345 bp, Glycine max
cctaattttattgtgttttcttccatctcctctgcattaaataagcaagtgatggtactttctagctctcatagcggattaaaacattcaaaacaagctttcaagattatctattccttacttttcttttctctaagaatacttaccagaagaattacgctgaacgcatttcactagctttaacaaactaatatgtttcccctccccgcctgattaattcacatatctcttctcaatctaaatataataacattattctaactaaaatacgtcagactctctctttatatctaaaaaaagcaacttgagaacatactggtaacattctcttcacatgaaaatgac

SEQ ID NO: 169598 - DNA, 389 bp, Glycine max
  unsure (1)..(389): unsure at all n locations
gatcttaagcgccgctgctgcagcttgatgcaaaccatatttggtttctttattgggtatcctgacaattctaaaggttgtagattatattgtcctagccatactacacgaatattacagcctcataatgctacgttcattgacaataattagttcagtgggagtcagaaatcatgaaaggcggatattgtataaactcatggtaaatcctcttcacctatatattctcatgaagatgttgatcctttggttatgttatagtcaaacaacacccagagacatagtgataacatttataacccacacgatgaacacataggtaacgaacttttagacaatgtgcaagtcacaaatgaacangtgatagaagacgcgtaagaaataacacc

SEQ ID NO: 169599 - DNA, 432 bp, Glycine max
  unsure (1)..(432): unsure at all n locations
taacatagaccaattcacatcattntactactcattgtttttgtcacttgtccccaaggatttaatcacaaatcacattccataatttcacattaaccacatgttcagaataacatatctttagtgcaacacaacatctcacactcatataattcattacccaccatcatgtaacaagtcacaatgatcattacataaacgttatgcaacagatacactaagactcaatcctatatgtaatgtggtaccatgtcagtgaaaaacaacactaggatgcctaggagtacataacaagacacaccacccaatgggtatgtcaggtcactctcactaagtgaaatcataagggaaataataagggtcactttggtttgctagaatgctctaaccatatgggatcaacatacgcttaatggagcactcanatcgagt

SEQ ID NO: 169600 - DNA, 293 bp, Glycine max
ctttcctaatttcttgaccttcctcctacgagaaaccaacttcaactcaatatggtcctgtgaataattataattaattagataaattaaaattgtttataaaatttaaatatgttataattaaagaaataactacctctcttgcccacactttggctaccacatgattaacatatgatgtcaacactaatgtatcttggggcccacctggaaaaccctatgaatcaacacctacatcctttgtaattggatcatgagggtcctcatgagtctcatcagcagcatcatcgata

SEQ ID NO: 169601 - DNA, 454 bp, Glycine max
  unsure (1)..(454): unsure at all n locations
tttgggctgaggacctatataacagcaccaaggttntatgtttatggagttttttagttcttctggagaggagaataattctaggattttagaatttcagtttttactgttcatgcgcactgttcacgtagaataaaatttgttttctgtaatttcgtttctgcttcaatctacaatttcattttctgctgattaatggaaggctaagtctctagcgttgttttctcttgaggatcaagcacagctctctttgagattttgttattactattgaatactgatcagtttttcctcttcaccaattactctgtatttgttgctattaatccatgcatgcttagtgcttgattaattgtctctgcgcttaatttacgttcatgcttaatgatcagtttcgttcatgattaattggtgtaggtgttgcttaatcacataatgacagccttatgttaat

SEQ ID NO: 169602 - DNA, 337 bp, Glycine max
tatttgacattcttttgtttttttttgttcggctctgtaattgtaaacgtcaatttttcttatatgtttttttaagtcgtagaatcatttacaactttaatttttttcgaaacctacatttttttaaaattgtaaataatctcttaatataattatttacaaaatttaactatttttacatttttgggtttcattgaattttttcaatatatttatttttcatagtgttttatctaaaattgcgtccatttttttgcaatttttaatttaaaaatttgctggctttttttaatctaatttatattgcatgatatattctttttttattttttctatg

SEQ ID NO: 169603 - DNA, 383 bp, Glycine max
ccctcaaagctagtatcatctactttttaaattgttatttttagggtttaaataaataagggtatactattttctttagttactaaacgttttagtaattccttctttacttcctgaaatttttttgactaattttagtctcttaattttttgtggcccttacttttagtctctatttaaacactaaaagtaagaatgaaaaaagttgagataattaactagtaaaaaaaaaattagggactaaaagaaatagtaattctatgatataattgtaaatttttttatacaaatatgtagttattgtaatttttcaaagttaacaataatttttattaaaatcaaacaatcataatctattaagaaaatttaagtgtggttaaatc

SEQ ID NO: 169604 - DNA, 317 bp, Glycine max
aagccaagaaacacgaagtgaattataagtctcagttttggaaacttacccgctgaagaaccaagaacagacgatcaacggtggataacggaggaaaaccttcacgaatttgcttacggaaacatctcggaagcgttacagaagcaacctcgctcggattttctttccggaaacaattttttcaccccaaacagcggttgaagaccgaagaaaacgaagaacgaacgatgaatgtcgaagaacggctgaaaatcttcgcgtaattacccacagaaacgttagggaagcgcctcggcttggattctcttcacggaaac

SEQ ID NO: 169605 - DNA, 411 bp, Glycine max
gcaagcttgtgcctctttacgtctggaatatttttttcatatagatccaaagacccttaggtgctttgctgataacttcttcccgttccaagcttcaattggagtcttgtcttttacagacttaattggacatctgttgagtatgtaaatagcagtgtagactgcttcagcccagaatgtgttaagtagtcccttttccttgagcatcgatctagccatctccataactgtgcgattctttctctcggacactccattttgttgaggagaatatgcgactgtaagttgtctctcaatgccttcatccttacaaaatctttcaaactcgcgagaggtgactctttgccgctatcacttcttagtacttttatccattttccactttgattttcagcaagggccttgaacttt

SEQ ID NO: 169606 - DNA, 472 bp, Glycine max
taggttaaattagtctaaacttacgagggatcaaaggttatttctttattcttcaacatagaacacacgaacatgattaattagagaaatatcctcatatgcatcaacttgtttgctagaaagacccaacactttttacctattgctgtcaacttttacttacttgcatttactatttttaccatagaagtagtttatttctatttttaatcatcgattatcaatgttgttccaacaatgccttacttttgaataaaactctatctaataagcaagttccctgagttcgatactcggatcactccattttaattctaaatacttgatgacccggtgcgctttccggtgtttcatttcccttggatatatgtgttgaaaattggagaaaaaggaaccatatgggaaaatgaagaatgggttacgccatagtcaaagcagttacttgatgcttctcgttgggaaatattaattg

SEQ ID NO: 169607 - DNA, 210 bp, Glycine max
gcgcatcgccaaagcctctgaatacatatataaaacacacattataaccctagaattactttcaaaactcccctccatctacaaagtacttgcttacaccactcaccaataccgacctaatctattatccatcagtcgtcaagtaccccgagtggccacaagcaacggccgagtaggccactgcacttgaatccaatcatacattgaaca

SEQ ID NO: 169608 - DNA, 436 bp, Glycine max
  unsure (1)..(436): unsure at all n locations
agctttanaaaaaataaggaaattaagttattattatatacgacaagttagtattatatatatatatgaccttaatagccaaaaaagaaaaagcaaattaaccacttattttttggagcaagtgtgctacaaatccaagctgaaattgcttgcatcaatgccaaatggaatcaaaagtatatgctaattccaatgggagttacttgacattcaattaagcaataaaagtatatgcttataagttccaaatgagtttttctaacttttgtgttcttatcaagttcaaatagggttacttttataatttgtaaaaagaaaaaatatttaaagttggagctaattatttgaaaatggtatatctatattctttacactataggtcctaataaaattagttattatattggacatagtaatactttatatcaatactata

SEQ ID NO: 169609 - DNA, 399 bp, Glycine max
  unsure (1)..(399): unsure at all n locations
tgtcatcgtgagacatcagaggctagtattttaataaatgtgtttttaaaaattcaccaaattgatagagaaaaatctaaaatcatacatcttaggcaaataaggcatgctatcccccaacattattgcattttgattccatctttggacattcaaattgttgnttatttttcctgttatcttttcctttgccttagtctaaatttcaaacttacaattcggcatctctttcttcttttgtttctcctcatttcttaataattggatttgcatcacttaagtacaaccaaagtccctctggattcaacagttgaacttcaatttcaatctttactacttgtgataaaattaggacacttgtcaatctattaacacagttttggcactgttgatggggac

SEQ ID NO: 169610 - DNA, 427 bp, Glycine max
  unsure (1)..(427): unsure at all n locations
agctngccacccagctcgcccaggctactttgttgcttcctccagaagcaacagccttctggagggcccaagtgggcctggttgctatttgcacccccatttttactaaatacaccccctgctttttttggtgattctttttcgtaaagttacagaaacttacgaatttcgtaacgatacttgttttctttccgtaatgttacggaaccttgcggattacataatcatcccctttttgacttacggaatgttacggaacctcactatttgtgcaacgatgcttccttttgatttctggtgtgtcacggaaccttacggattgtgcatcaatattttcttttgattccggcacgtcacggaatttcacaaattgcctaatgatgggtgccaagcacctaaaatgaccaaacacaagttgcatgccacc

SEQ ID NO: 169611 - DNA, 426 bp, Glycine max
  unsure (1)..(426): unsure at all n locations
agctncgttcccgagagcatctgttatttttcttttcagcctttgctttcgtgtagcttaggaaaaatgtcatttcttcttctttctttcttccaaagccatttctaaagttccaagaactttatccatcacccacagccaccattagcaaccacaaaccatcattgttctccattgaaaactcacaccgagaggaacccttcaaccgaagcggaatcttccaacttgccttgcatttttggtagagaacgaaaaccctaatctgacctttcgttttctttcgaggtaaccatggttctatgcttgtttcttggtagttacatcttctctttgcatcttttctgcctctggaaccgccattgcatgtcttatgctttcttctaaaaaccatagagaaagagactttgtaaacgttatcctttcatg

SEQ ID NO: 169612 - DNA, 376 bp, Glycine max
acaaaacatattcccataacatgaaacaccgaaaatgacataaattttcaaattaaaataagtctgtatgaatctaaaatacatataaagtgttgatttatggaaagctaatcgtctatgcttctgcaacatatctaaatggaggatacttcataaacaagaaagacgaagaacaaataacttcctcataacttaagatcaacgcacaagatgaaagaaaatggatgctctagacacttagaactcaagacactactctttgagcaagcccaagtcaacatcaagagaagctcttccttcttcctttttacacctcatcataagagtagagaacatgggtgtctcttcctctaaaccccacgacacacacccacac

SEQ ID NO: 169613 - DNA, 375 bp, Glycine max
gaccttaagcaccgcagctgcagcttttttatggtgagccgtttttttttctaaaaaggctttataaaaagcttgagcttgacctttatagtaaacaagtcgagccgagccttacataagccgaaccaaaggccctcgacaagctgctcaactcatttccacccctattcataggtcccggatgttcaatcaaatacactataagtacaacaataacaaagtcttatctcggtaagtaaaattgactatatcaatcatgagatgttattatgcataaggataataaaatatgatttcttgggcgtcatcaatgaccctgcaacagatttagtgcggccttgattacatttttatggcatatatttttgaatgcat

SEQ ID NO: 169614 - DNA, 381 bp, Glycine max
  unsure (1)..(381): unsure at all n locations
tgcctccacagtgtcggttcgtaagggagaaccctcttttatgtttcttgncgcctcggtgccttggcctggtttgattcgatttcaaaagagtaaagctcattccagtgtggctcgtagatacgattcagctcactttcagtgtgtgagtggcttgtagctgtacatgagaggtcaccgacttggcttttatccttttagtacgcaccctctattggtaacggctctttcccgttcatgggttatccacgtgctgaacaggaaaaaatatgtctggaattaagactatatatccagtgcgttgcgttgataacatttctcgtccgattatcgttttgatcaagagttacattaacataaaaattctgattctcatctact

SEQ ID NO: 169615 - DNA, 332 bp, Glycine max
agcttattaaggtcccattttgatacatacttatagcagaaaaaaaaaatcaaaatttgaaacaacttagttcaactcaaccaaagatgttaaacaagtagtactcacattgacagtcttgaaaatcattggcttaaaatacttgaagaaccctttggcattctcacacgtatgcagaacttgatgtcttcaatctcctgtgtcttactagtacccttgacatttttggccccttgacattcttccagctactccatgtatgtctgtaccacctaacaacatacacaattcccttactagtacacaggactcacaaactcccaaatttcaag

SEQ ID NO: 169616 - DNA, 411 bp, Glycine max
  unsure (1)..(411): unsure at all n locations
ntgcgcgattggtcttcgctggcgaaatgattgtattgtgttatttaaggcaaatctgatcaccatgctctgataaatgcaaactggggcaagtaaagagggtgagaatgacggagaaacccatactgtgactgccattcctatacagcccagttttccaccaacccaacaatgtcgttactcagccaataataaaccttctcctttcccaccacccaattattcacaaaggccatccctaaatcaaccacaaagcctgtctaccacacaaccaatgctaaacaccacctttagcacgaaccaaaacaccaaccaagaaatgaattctacagcgaaaagcctatagaattcacccccatttcagtgtcctatgctgacttgctcccatatctacttgataatcaatggtag

SEQ ID NO: 169617 - DNA, 418 bp, Glycine max
agcttgatggtgactttatgggaatttgtgtttctatgtttgagaaacaattaaattaattaaaataatcatgtgtcaattgatgcatgcgtttgatggtgacttttaagaaaatttgagataagatgatgtatgtttgaggaatggttaaaatggaataatcatacattagttgatccatgtattttatggtgactttaatctaatgtttggattaagaatttcaaaattttaagaaatttgaaatgtttagaatttgaattgctttgattttaatttctttcatttttcaaatgctttgtttggataaatcaattcaaatttcttccattttaaatcctttgtttggatagggcaattcgatttccttcatatgcaaaatttcaattttatattttaaatagatgaaatttaatat

SEQ ID NO: 169618 - DNA, 478 bp, Glycine max
  unsure (1)..(478): unsure at all n locations
ntntgagcatctcatcatttgcaagatcacgcgaatgtttatttctattcagcctctccctatactggacaatctttcttttcttctccatctttgcatctcttgagaacgttgaacaagccttctctcagaaagtcaattcatgaacataggcatcaactacttgaaggatttctattcttttgctatatctaccacaacagattaaacaagattagcccctcatgtttgctaataattctcatcatgccagattaacaaaaacacaacatagtgcatgtgtttaataggccagaacccacaaaaggtttctctctattatccaaagcaacaaaatttctttctaaatccacccctatatgtagctntttgatgaatcatataaaacaccacaagccaaaagtccaaacagtcaacacacattcatttgacacacatggaaactttaaatttcagaatcacaccgaaacaaaattct

SEQ ID NO: 169619 - DNA, 346 bp, Glycine max
agcttagctaagcaagggcggtatatttatttttcattctgcaaatatggcggctgaagataataagaaaattagctaacaacacaactcaagcttttaagacaatcaagaagaagaataggtcggggcatacagtagttcaactcactttttggttctcagaagcaacatctgcaaacctcctgaagcaataacaacactcaattaatttcatttcaacataggctaaaaatattaaaattcacaatataaagtccttaccttagaaaggtgtttaccgttggatttcccatctcatactttagggtcgtgagcatgtcagcttccatctttacaacctatatat

SEQ ID NO: 169620 - DNA, 356 bp, Glycine max
  unsure (1)..(356): unsure at all n locations
cacacagacngagggatcggcggcagcagcaggtaacttcacaagccaacgttaaacacatggctaagactagtgcacccgcacaatggagagtatctggccggaaaagaaagcgcggtcatcccagaatcatggaagctcaacacacatgctaaagagcacatgagacggccattctctctggaatccccactcttctctgaaatactggccacttaaagatgcactcgcatgctgcctttctgtagatgaattttccctctcggctctcttccaccaacggaccattatagatcgggaatacaaacccaatcaactctcttagcggaactaagccaattaatcatcccatacct

SEQ ID NO: 169621 - DNA, 311 bp, Glycine max
  unsure (1)..(311): unsure at all n locations
agcnttttacacttgatgaatttatatgttttaatatttctttcttgcaaattagataaaaataattgttctaatccttacaaaatatagttgtttcagtcctaaatggcttcgaatagtaaaaaaattatttaaacaatgaaaaaatcattatctataaagtattttaagaaaaacaaatattatttataaagattaaaacagattttttttcaagaatcaaaaataaaaaaatactaaattacataaacaaattatatttaaaccttaattaaaatactattttaagagacacaaacattgttaattaa

SEQ ID NO: 169622 - DNA, 414 bp, Glycine max
  unsure (1)..(414): unsure at all n locations
nttttcttatatgagaattccaataattcttcacttcattatctgtacgtccaggcaatctcccagctattagtgaccacctgtacgaatcaattntaatcaatgatgttttttcctttataagcacaatttatacaaccaaacaatgaattatgttagaaaacccttttagcaatgtacgttgaaaaaagttaacttaaatttccatttatattatttagtggtgataatatggttgctcagtacacatatctaccttataatcaaaattcttttcattcttttacacgcacaaatacacacatgtataggtcatcaaaagcacaacaaaaaagtgggtttatgttatgtctcgaattaaaaattcgcaccggttgcctagcacggcatgaagcttgatgatgagatcttctt

SEQ ID NO: 169623 - DNA, 250 bp, Glycine max
gctacttatatccttctgaatatttggcgatagagccggaaaatggtttcttgggaaggtgaactacctgctccaacttctgccttaccaaataaacctggtggtctcccctgatgcgatatcttcctgagtacccctatgtcttacctttgaatgacctgcccgagtgataagaaccatctcccttgaggactagtgatcatcttctcatctatgggatgaactcttactgatggcgacccttgaatcc

SEQ ID NO: 169624 - DNA, 419 bp, Glycine max
gattgaatatgattttcatagttgaccttgaccctcatagttgaccttgactctcatgaattgactatgaccgtggtaattgtgctgattatcacgactgtggtaaatgtaccatggcaatgaccaagtccagagtcttcaaagcttcacaaaatcgtgaaaatttccaactctttcactcaattgagcgattgtacttctgcaatacaaaactagtgtccaaatttgagttctgtcaagaaattgcatgcaaaatgacacaaaaactcacaaaatatcactcaaaaagtggtttatcaatgttagagatagggggagcaacatgagcaacatgaagacttatccttgaagcttgaggaagagcttgaagaagttttgtcttttacatgcccaactctcttaagtggcaattttattaa

SEQ ID NO: 169625 - DNA, 364 bp, Glycine max
acttcaaactaagctgtagctggatttttataaggagccttgctttttaatattattggcagcggaatggacaacgaagagagagatgatcagagacgccacttcaagaagaagatgagtcaagaagaagctcaccactataggaagccatggataagagcttgaaggtagaacaagatgagtggagggggagggagaaaacgagcacgacattttgtgcctcaaatgacgtatgaactttgaagtgtatttctcaaatgatcaaagttgaaaaaatgcacacgcatgacctctatctatagcctacttgtcacacacaattggagggaaatttgaatctctattcaaatcttacttgaatttg

SEQ ID NO: 169626 - DNA, 435 bp, Glycine max
agcttcagccaactccgtgctcgaatttatcttttttaattgccattccaaggttcttctctgcagctccggttactggaagctgaatcacctttctggaacacttgtccgtgtcataagtgctcaactgaaggctcttgctcctgcaaatattcgcttgatccccctttgtctgcccggtagcgaggccacagtcttgaagtccaattgccaaagagcaaatttgagatacaagattgcaaggacaactgtcaaccaccaacctattttcacttgaaatatagttctcagtagatgctggcaaacttttggatatggtcgcggtttccagttcacaaccatcttctgtcagatgactacggctttgttgagaaggctctgcagtgacaaacactgtattctcatcgccatcgctaccatcatttccattttcac

SEQ ID NO: 169627 - DNA, 414 bp, Glycine max
  unsure (1)..(414): unsure at all n locations
agctgttcgcacatcgtttgcgtgtattatatccactcgacaaggtttgaagtagaggagagcttcaatcctataacacaacgtggcggacaaaagtgggcagttaacttgaatgaccattattgtcaatgcggaaggtattctgtgcttcactatccatgttcacacattattgcagcttgtggttacgtgagcatgtactactaccaatatatagatgttgtttacacgaatgagcacatcttaaaagcatactccgcacagtggtggcctcttgggaatgaagcgacaattcctccttttgatgatgcatggacacttatccctgacccaactacaattcatgcgaaaggtcagccaaatcaacaaggataagtgtcataccctaatttcatctgaggaccatngtttgat

SEQ ID NO: 169628 - DNA, 78 bp, Glycine max
  unsure (1)..(78): unsure at all n locations
actcagctgtgacttgagatattgctcgaattagttaacaaaagaagactttcttntaaaagggtaaattactcattt

SEQ ID NO: 169629 - DNA, 413 bp, Glycine max
  unsure (1)..(413): unsure at all n locations
gcttaattcaagatattgcctattgtttatcttaatnnccttnnnccgggggaagaagtgagatgttgctctatttcaaaatcaaaacacgtaataaccctatataaggtttacaacgatagcttgcaccatgacttaccaacaaaggaccatcaacaagattggaatcaaaaccttgcaatcgatacaattcaatatcagttgggtcattcatcattggcataataaccctgtaactaagacaaggtctaaaactcctttctaagaccattatttgattttcttttaaatcaatcaacagaaaacagcaacatcccacagaaacaagcattctattatttcacagtaacaactagtgaagatatactaatcgaataaattctccaggctcgccaatttttacacattggttc

SEQ ID NO: 169630 - DNA, 330 bp, Glycine max
  unsure (1)..(330): unsure at all n locations
cgacactatnaaaactccagctcgagtcgtttgcgacgattctcccatgcaactctttattattcgaaatatctacaatctgaatcgttctgatcttaatttttttttccaccgctctatttggataaattaattcaatttctttacaatttacattctctatttggataaaccaattcaatctttctcgtatgcaaacatttaattttatattttaaatacgcgaaattttaatattaaattctatagaacacaaacacactctaatattgaaatattaattaaaaaatatctctcaatttttaataatctaaaaatataacatatcca

SEQ ID NO: 169631 - DNA, 350 bp, Glycine max
ttaatattctcattatatgtgacaaaaaaaaatgaccaatctcaagaataataatggggggactgttttggttttaccagtttgggcccttggagatattctatttgtgtgaatttaggttaattttcctgtctactattttatagatttatcaagctagctatgttccctcaagtgagaaattttaagcagttgcatgcacatgctttaaaaacttttgaggcttgttgactctcttcactgtcaggctcttaagaacaggtgaggaacagataatctagcaagcttaacacactacacacatatcagggtaaaaagtgttatgcagcctacactgcaacatggcattt

SEQ ID NO: 169632 - DNA, 496 bp, Glycine max
  unsure (1)..(496): unsure at all n locations
gacctataaaactaagctgttgtngactgacttattttttaaaaattttttattatttaaatcataatatatatatatatatatatatatatatatatgcaatacatattactttttaaaaattttgtacaataagttataaatacttgttaatattaattggggtgacatgacttcactcgatcacgttagatctttaataaattagattttaaataaaaaagaattatgttagttaacataactctaattctgagttattataatcattcagtttaattttggcttattataataacatattaaatcagcattaaataaaaattggtaaaattgtatttgtaccctattttcttagatgggaagtcttgtgtaaaagctgtatgtgcttatttgatatggatcgtagtactattattctttagtgaaatcatatctataagagatagaaccattattagataatatggtaaccccacattaacgtttaagtcta

SEQ ID NO: 169633 - DNA, 377 bp, Glycine max
  unsure (1)..(377): unsure at all n locations
actttgttctttcatattctgacggtttcaaccctcacaaaatgaccgtcacaataaaatgaacacgtgacatttattgaagttgtcacatctttatttaactaaacatgaaggaactaaaaacgttaatgaataaaaacatcaaaaactaaaattggtcaattttgtgttattagagacttaaagtaaaaaattttaaaaaattaagaataaaaatatgtttaaccattttcttaattaagatcagaaactatatctttctagaatactcctaagaagacaagtgagtacattacactcacttatttgctcagagagaatatttaaataataagncgctacttaattttctctcttccctttcttttataatatta

SEQ ID NO: 169634 - DNA, 471 bp, Glycine max
gaccttagaaactcagcttggaacatgttagggaattgtgactctgattaattcaagaagcaactttcgctcttattttcatgtgacttgtaacaagttacaagtcagtaatataacctataacttactcttcatcatctgcttcttctttcgatcataatatctgctaagtgatctttcatagagagagagagagagagatggagaggtgtgacaaggtgatgaaccaacgcaacatgcatgattgtcctaaaacaggtcctggctatccttcacccctggcagccatgtctggtcccaaagagactctcctttatgtcactgctatctactcaggtaccaaacacaactcgttgtgtctctatatgtctgaaaaggccaattcagcttcatcggaggaatagataggcattacgcagagagatcacgatagggttctcaagttgtgttccaaacatttatatgacatga

SEQ ID NO: 169635 - DNA, 376 bp, Glycine max
ggacacaaaaactcagcttttatgcactcgaactaagacacttttttttctgagtctgggaaaaaatggtattgccaatccctttcatgacttaacccaattgttattgatggtgaccattgaggacactgctgacgactacaaattgatttctctgacatgatgcccccagtggttgcaccaccatccgaatgaccggagccttcttgcggtcattggctttgaagccgcatcttcactattaattggcgtatctgcttcatgatctccaccttgcccaggttctgagaaatccgtatatggggcttcatacagcgtcattgatggccactagcagaatccatgctacgcatgcataaagctcattgctatccca

SEQ ID NO: 169636 - DNA, 390 bp, Glycine max
agctggcttatataatctccctctttttgatgatgacaacttctgaaatcaagaaacacacacacacattttttcctagtcgatcactcacataaatttccattctccccctttgtttttgaatttatgattcacttaaaattaagtttattactcatgtgagttcttgatttaatccctatttctctccccctttggaatcaacaaaaagccaaagtgcgtaacaagtatgaaacatgcaaatacaactaatcattcacacaacaatcatggaaaaatacaaaccaatcatgaagcaagaaacatgactagatcaaatatatagaaaagtcacatagtcatataacataattcataatttttcaaacacaccatgcacataaagaaata

SEQ ID NO: 169637 - DNA, 466 bp, Glycine max
  unsure (1)..(466): unsure at all n locations
tataagaacaacatcgccttaatcatntccaaatatgcatgtgaattangacgcatcaacaagaatcaagccaaggctattgggcaagcaatcaatggggcaaaacacaccaaatgattataatgatggatggctcaaattctcacaaaggtaaaatcatcactttcaaattgagctttcaaaactatcatgacatgtagagaagaatcaaggatttcaagtcacaaaatgtcaagaacttttattttcaaaacaattacccatttcttgaacatatcctgtaattcaaagaaaaacatgcaaagtcgtacgtgcacatgaaattgacccanaatattaaactgaaaatccgacgaaactaacaacattaacaaattaacacaactaacaaattaacaaaaccaaccaaactagcaaaaccaaagaacactttcccccatacttaaacaacacattgtnctcaatg

SEQ ID NO: 169638 - DNA, 430 bp, Glycine max
cagcttcattcctttttcactcatgtgtccaaatctttgatgccatagggttgaattattgacagcctcaataactactaccatatcctcatctgcaatcatgtaaagagatactcgcttctttccacaagccacaatgagattgccttttgttaccttccaagctccatctccaaaagtggtgtaaagcccctcatcatccaattgccctatagatattaaatttctctttaaggcaggaatatgtctgacattgtgcaatgtccataatgatccactggaggtcttgatgtcaatatcacctcttccaacaatggtcagagaatttccatttgcagggaaacctttccaaaccttctataaatatagttagaccgataatatttacagggagtggtgtggaatgatgcacctgagtccataacccatg

SEQ ID NO: 169639 - DNA, 244 bp, Glycine max
  unsure (1)..(244): unsure at all n locations
tgctngagaagcttctatgaaggttggatatctgagctttaataaagtccttcaatggtgattctcatctatagagttgcagcggaagataaaggataagaggtgagagatgacgccatccactacagaataagccatggaaggagaagcttccccaccaagagaatgtcttggataagaagcttagagaggaagcttcaatggaggaagagaatgagagagaggggggggggggcatgcaaat

SEQ ID NO: 169640 - DNA, 429 bp, Glycine max
gctttgagccaaaatcctgactcaccatattctcttgacctcaggtgagaatgtcaattcttaccctcggaagcaaaaaaaaaaaaagggggggagagggaaaatttccaatcaaagaggaagcaaaaaaggagagaaggaaaatttccaatcaaaggaaaagaagagaggaaagggagttcccaatcaaagagtgggagaaagcaaaaagaaaagaaagaaaattcccaatcaaagaatgggagaaagaaaaaggagaaggagaagaaggaaagaaagctcctgatcaaggatcgaaagaaaacagaagaaatgtgcagagaggtctctggaccagacaatatctgaacaaatacaaaattgtcaccaaatgaacaaaagaaagaaaaggaaaccataacctataagtggtcttctccctctgattac

SEQ ID NO: 169641 - DNA, 357 bp, Glycine max
  unsure (1)..(357): unsure at all n locations
taactgtccgagatcttcgctcacctatgggaggcgtcatttctttttgtgcaacnggagggcacatctacttgggttgctggccgataacaacacagggtacatctcttgttgatcagttctagcggagggtacatcctctatgcttaaagagaacaagggagggtacatcccttgtggatctttgcttgttaaacgatttttacaacgttgaaagcaaatctcacgaccgcatgtcacttgtggactacatctangcacgggttgttgccgaaccagtataaaaactctagctgcgcattctaatttccgctaccactttcgggtaagcctcctttctactccctattctcttaa

SEQ ID NO: 169642 - DNA, 381 bp, Glycine max
gaagtgacaacttgcataactattttgaggaacctttctgatgagtattctgaagtatcatcataatagtcattctgatggttgttgagaaagaatccatacttgatagattctattaatgaagttcaaactaattcacaacttcatcaaattttacacttcttcacaactccaagcattttgaagtagattgtttcataaacattaagtgaaggtttagttaatggtgtgttagtgttttgtccaaggttagattgtgtagtatcttcaattttttattcttatgcttctcatggatagattcatctttcaacaagtttgtatcttcttatgcaattagccttcactatttgatgcaccctcaatgtgtctgacaacatg

SEQ ID NO: 169643 - DNA, 424 bp, Glycine max
gctttgaggtgttgaccattagaggattgctctgaccctgctgggttgtggtcactcctcgggttgagagcaaatgacccatgtactcaatctacgattgggaaaatgaacacttggactttttaaggaaaattaaccctcctccagagcacgaaatgtctgctccaagtgatgaagatgatccgcaaaagttttattgtagatcagaatgtcgtcaaaaaacacaatgacaaattcttggaggaaaggccaaaaggttttattcattgttgcttggaaggaggacgaagcattgcacagtccaaagggccttacgcgaaattcgtcatgcctgtgatgagtgcaaaatgttgttttactgatgttagtttccttcatcaaaacttggtgataaccttgaagccagttgagcttcaagaaccat

SEQ ID NO: 169644 - DNA, 402 bp, Glycine max
  unsure (1)..(402): unsure at all n locations
atttcaaatttcgatatcaatcatcataattgactccaaccaattntcaagattcaagtataccacaaagtgatagtgaagaaatactatcaaacaagcatgtagtaaaacacaattatgtcagaacatattttcacattaaaaggaagacaaaagcattacaaaaatcttaaaactatgagcaagctatttggttgtcaagtcatttcttatacatattttaagaaagagaaattgtatcatatacactttcaaaagaattatcatcactattgggaaattggtggaaataattcaagtcccacatcggataaaagtaatctcatattaaactttataagtgaggggcaaccctcaccccttgaactagcntttgggggtgagttaagtctcttacattat

SEQ ID NO: 169645 - DNA, 432 bp, Glycine max
  unsure (1)..(432): unsure at all n locations
tgctattaggaagcattctgagttatatttcttatgtttataatttctaaaagactcatcaatgctagtttaataacaaaacttacagaaaatgtgaatacatatgaggtcttcagtttcacccatgctatgaagagaactcactagattgtaaactcacgatcttatgagactgtgagatgtcaactttcacacttatattggttattccaaaattatattatgaacattttcatatctgtcatgcattataggtggattttgaagtgaagctaagtttgtcttcattaatcttaaatggcactttgagtgtcccaaatttgaaatagaattctacataatgtcttctagtaacgatgaagactatcagatgaagaagaagacatctacctacaacattggctangaacctctcatttaacttaagagttg

SEQ ID NO: 169646 - DNA, 385 bp, Glycine max
ataaaggattgtataagattgattggaaaagtatattgaaaagcaaatcaaagccttgcttttatagactctttatctctggccaagaggaccatttagaagagttataacttttagaaaaacttataaccaatttgaacaagtcaaaaaccttttgtagagttacatgttttgatttattcaaaaacaatcactggtaatcgattaacaaatcagtgtaatcgattacacaaggcttttatgtgaaaggatgtgactcttcacatttgaattttgaatttcaacgttcataggcactggtaatcgattaccaaaacatttgtatccgttacagctttttgaacttaattggaacattgtaaatcaagttgaaactctttgaaat

SEQ ID NO: 169647 - DNA, 395 bp, Glycine max
  unsure (1)..(395): unsure at all n locations
cttctacacttatntcacgcttagataggtggccttgttcgtgctcgcgcgcttagtgcacttatggaccgcttaacgcacattagtgaatttcagcttagcgcgtgcctttctcgcttagcggatgaactgaagcggtgcgcttagtgagatgaagcggtgcccttagcgaacctgtacagctcatcttcttccagaggcttcctcacacttagcctatgagtgttgcgcttagtggatgctcgctaagccaacatattggcttagcgagaaggtgaaaaacaacactttcgaaagcttgcctcagtaacctcgaaattgagagaatctgattattaagcacacaaaatggaagtactaagtatctattacctatacttaatataaaatactta

SEQ ID NO: 169648 - DNA, 418 bp, Glycine max
agcttgaagacaagactatactatgtatctttcttgggtatagcaatatctctaaggggtaccgtgtctacaacttgcaaactaagaaactcatcatcagtcgagatgttgaagttgatgaatatgcttcatggaattgggatgaagaaaaaggggagaagaacgttcttatacccgctcaactacctcaagaagaagatgaggaagaagacccaggtgaaccaccttctccttcatcacaacaacaagatcaagaactatcatcaccagagtctactccaagatgagtaagatctttggtggacatatatgaaacctgtaacttggccatacttgaacctggaaggcttgaagaagcgtcaaagcacgaagtatgggtcaaggcaatggaagaagagatacagatgatcgagaaaag

SEQ ID NO: 169649 - DNA, 450 bp, Glycine max
taagcctattacccttcacgagcctattttatgttttatttggccttcgtctaagtctattacgcccgttaactcattaaaacaaaaccaaagtcttttaaccaaaagagaaggcatgtttcatattaataagtggagaaaatattattttttaaacaaaaccaaaaattttcatcacaacaataagacaaatttaaaccacaagatataggcaaaacttacctacaaatattatatgtgacatgctaccaaagtcttttaactctcaccaaaagagaagagatcatattcttgttttccatgtatgcttatacgaattaacctatttcaaacattaattaaaattattcacatcatcaaactactacaataattctgtacttaaatgaaataattataatataaatctatcatattgataataatacttttattataaatattattact

SEQ ID NO: 169650 - DNA, 413 bp, Glycine max
  unsure (1)..(413): unsure at all n locations
agctttgtattttattttggatgaaatttttttgataagtttgggtaaattgcactttgggagcatatttgagtccttggtatcttattccattttaacattaccataagttgaaagcaaaagaattctatattaattgtatatttgtacattcatgaatctcctttttatagggtaaatggcatcctaaatatctctaacatttatagtattccctctcaagttaataaatgactatcaatctttctcaaatttccaataagatctttggaatcttgcattaagaagttcctttgtgaagacatttactatttgagaccatgtaggtatatgtctggtaactataaggccaccatccaacttctttntgataaagtggttatcaatctctatgtgnttcattctggcatgct

SEQ ID NO: 169651 - DNA, 442 bp, Glycine max
  unsure (1)..(442): unsure at all n locations
tgtagaacggctggacatgacatatgtcaaggcgtgggtttggccagcggtttctggataaaaggggatgtcccacattntttccatgacacaaatgcaataatgatgattaggaaattttatgcaaaacaagtcatgcatgcacctatggggacactcaagtgtcgaaatttttttggtcatgtgatgctagggctcatgattcattttctttactttagtcaacccagtgtttccaaaatatgttcttttatcaatttgtgcattcatccgagtttatttttgggcgttcgggaaaactttcacatcattcacccttcaagtgtatacacatttttttcaaaaactggttatgatcaatgaattttttcaaagaaaagttggaagctatcntctttcacaagcatgttcgtttctagctagacaactctntattttcttt

SEQ ID NO: 169652 - DNA, 387 bp, Glycine max
atgcaacaattgttagccgtggctatacgagacatcttgccaaacaaagtcaggttcacgataactcgcctgtgctttttcttccatgctatatgtagcaaagtgattgatctactaatgtttgatgagttggaaaatgaggccgcaattatactgtgccagttggagatgtattttccccctgctttctttgacatcatgattcacttgattgtgcatatggtcagagaaatcaaatgctgtggtcctgtttatctacggtggatgtacccggttgagcgatacatgaagatcttaaaagggtatacaaagaatctatatcgtccggaagcatctattgttgagaggtacattgcacatgaagccattgaattttggtcagaatac

SEQ ID NO: 169653 - DNA, 403 bp, Glycine max
  unsure (1)..(403): unsure at all n locations
taatacccacaatcacatctacaggaccaaggtccttcatatcataatntctagataagaaagacttcgcatcatttatgaattacatattattatcaaatatcaatatgtcatccacatacaaacataaaatgacacattcattatcatcaaattgtttcacatacacacatttatcagtattattgatttgaaaaccatacgaaagaataacttgatcaaatttttctgtcaatgctttgaagcttgtttcaaacaatgcaaagatttaacaaattattttttaaggaaaaatattttcaaagaaagtgacatctctagatcgcataataataacattagaaatttcaatcacttgtgaattaacaactaagaatctataagtagtattactgtaaaaata

SEQ ID NO: 169654 - DNA, 249 bp, Glycine max
agctagaagctggggtgatcgactgtttgtttattgcgcaaagcctgcgacgcaagacatacgaaccatatgacacaatggattgaatgtggacagataatggacgagctgagagagagagagagatcattagcctaccatgttttgtgtcggggagaaagaacgagcgatcggcgaataaagtgatatgtattaccagagattggacagaaatgccgccaccggtctatataagctcctgtttgtttc

SEQ ID NO: 169655 - DNA, 388 bp, Glycine max
  unsure (1)..(388): unsure at all n locations
ntgacagaggggaatgatagagctcctgccattgtatctttctataacgcctcgaacatatgcgttgctgcttcgtcttttcacgcaaattaaacaactctttcataccatcaaacatgtctccacgtacatccttatggatgatctcgtcacatatcaagacgaaataaccatgactctcacatgcctttctcactctcttgctcatatctcttcattcctcactcccttcttttaatgccaccccacccttgcaaaaatcaaagcatgtgatcatcattatctcactctcactttccatctaattacctctctcactccagctgcggatattgttcttacaaaaagtggcgctatatacagagagttggtcatacaacagtatagc

SEQ ID NO: 169656 - DNA, 445 bp, Glycine max
  unsure (1)..(445): unsure at all n locations
ttaagtcaccgcggctgcagctctccctatttgctataatgtgtgtgattatgtgaagaagaaaagggttcagccccttaggcacttctctctctttcgaatttgcttaggaaaattgtttccgtgaagaaaatccaagccgaggcgcttccgtaacgtttccgtgagaaattacgcgaagattctcgaccgttcttcaagattcatcgttcgttcttcgctttcttccgtcttcaacgggtaagtacctcaaaccaagcttttcaattcattatatgtacccgtggtgcgccacattntgtttcatgtattttcattctcgttttcatttactttttatacccccttttgacgtgcttaagccatttatttaagtcatttctcgcttaatctaaaataaaattaattccaccgatcgttgaattgtatcatcgttctttcgttg

SEQ ID NO: 169657 - DNA, 420 bp, Glycine max
  unsure (1)..(420): unsure at all n locations
tctatcttaacactacgagaataagagaactttttttggataagcgtagaataaacacgactcactcccaaggagaggtgagcaaaaaacggcttgcgtaaaaaaccagaccgaaccggttaaatcggtttggtttttaaatccaaatatgaaaactgatttggtaaaacggtttgaaattgaactaattttaaaaaattgattctaaaccggtttttaacttcattgattttgaattacttttaaaatgatcttaagaatcgaactgtttttcaaactgatttttttaaaagaaaagacaaactgattctcataatccgattattttactaagcatgaaaatcacattntaaagtccaaatcaatggttntcaacaaatcattgactctgtccctttgacacttgaatgacttgtatat

SEQ ID NO: 169658 - DNA, 369 bp, Glycine max
agcctcatgcctaactatggatggcaaaacttcattactatggggcaagacatacaagtgagcttgtaacaaatcttttacacttggagtgatcacatgcagacctcttgaacccttaccacccactctgtcatcatgccgacactcaagaagcccaacaggtttagccttttctaaatattctgaacaaaatttaatggcttcttctacaatgtacctctcaacaatagatgcttccagactatatagattctttgtataccctcttaagatcttcatgtatcgctcaaccgggtacatccaccgtagataaacaggaccacaacatttgatttttctgaccagatgcacaatcaagtgaatcatgat

SEQ ID NO: 169659 - DNA, 451 bp, Glycine max
ttaacttacaaagagtagttaaagcttagctgcttatgtgctctatgcgcacttccaagagttcaaaaaccgtaagagattggcgcttaacgccttctggccagctaagcccaacttaaaaactcaagttatacaatggatctggggcttagcgtaagatagcacgcttagtgctgctacaatgaaatgtttacagagaagaagtggcgcttaacgcatcatccacgctaaggccacatgttaaagttcaattaccgtgaagatatggggcttatcgcagtgatgtgcgcttagctgaactattcagccaaccaatcacgggtctgtgcgcttagcacgagcaagcttggcttaacgcatgaagactgagcgcttatcacaaagtctgtgcttatcggatagacaattgccaaaaaaatctctaagtccttttctgtctatatcttcacac

SEQ ID NO: 169660 - DNA, 319 bp, Glycine max
acactagaattgcgctgctcttcaagaatataactcgaattatttctggcctacaataacataacctcgcatgatattacttggacaatcaaacaattagctttgacaaagtgtgctaatttgcaaaaaagaagattgccgccgaagcaccatttcagaaggataagcttacatcacctgcacattttaacgcaaggatcttattccttagctccttagtaataataaacaaatacgtcgatggcaatgcatgtataaagaagaacggatggtagagagaccttgactacgtcatggactcatggatgaacaatgttga

SEQ ID NO: 169661 - DNA, 426 bp, Glycine max
  unsure (1)..(426): unsure at all n locations
cttagattctatntgaatatacatctcagtctatactctttgtatatagctcngatatgacttataaaagtacacaaacttggtataaactagtatgtctacccccgtgcatgcacgggctactttttataaaataattatgtataataacaaatataatgaaagtatgactacttatataattaatgtgttgtggtgaaatccacttagcgtttattaagaaataaaactaatatgtattaacataattaattgtacgttttgtgtcgatgcacggactgtgtataaataacgattctgtgattgaataacattacatgcattatttattcttaaacttcagttaattgttgttgcaagttgtaaactcaaacgattcgtgtttcttgcattatgaacgataagaacggtgcctaatgagatctc

SEQ ID NO: 169662 - DNA, 334 bp, Glycine max
gcttcacaagcaagcttccataagtggttatcagagcacaaaagcttcaagtaggtgttccttaaacctccattaattttcagctttaccttctcctccattgttgtttcttcatttttctccatgtatctcctcacatgtcttgtgctaaatgttgttaacatgattctttagagtttccaccgattaaacttgctatagaagctagatttgattttctatggttcaaatttcttgttcttgttcttgaaacatgaattgtgttaagtttacgttcatttgagttttgtcttgttattttttgtggctgaaacctaaaccataaaattcttac

SEQ ID NO: 169663 - DNA, 426 bp, Glycine max
  unsure (1)..(426): unsure at all n locations
ntgtngatttagttttcgccggccaaaggatcgaagtgggtttgaaaagaggcaaatttgatcatcctactttgatagataagaagcttggggaaaatggagagaataagaacgagggaggaacccatgttgtaactatcgttcctacatggccaaatttctcactagctcaacaatgtcaatactcagccaatatcatcccttctcattacccaccaccctatcagccaagaacacctaatcatccacaaaggccacccctaaattagccacaaagctcacctgccacataattgatactagacaccacccttatcatgaaccacaaaccaaccacggaagggaatttccagcaaagaagactatagaattcgccccaatttggtgttgatgctaactactaccatatctacttaataatgcaat

SEQ ID NO: 169664 - DNA, 421 bp, Glycine max
  unsure (1)..(421): unsure at all n locations
cttcggcattatatttatactcgatccattgncgataagcacctttgcgacaacatggtccatacactttaccgatacatgaagagccttgttgtgtcctctcccctctacggggatcttttcttccgcaaacgcgatataattgttggtggatatatgattaacgatgccttcaaaaccctccactgagatatcgtgggctacatgggcatcattgaggacttttatcaacagcgtgcgatgaggctcggagtttatgagcagttcaagcaacgagatcctcgctggaaatttattcagttgctcgactaccttaaactcactttgttgaatgaggcgaaggaactcatgggcctcttccaaatcaccgttttccttgaaacctttttctttcacccctctaccatgaggatctgttttt

SEQ ID NO: 169665 - DNA, 260 bp, Glycine max
  unsure (1)..(260): unsure at all n locations
tactatatgttgacttgaccagcgctgttattggatgctgcgacaatctttcaacaccttattcacacattctgagaggttggttgtcatgtgaccatatcttcgtccagatgtattgtaagccatgctccattnttcctttgaaatgcgatcaatccatgttgctatggctggagtcaattgatgaattttttctaagttntgatcaaacacatgcttgcaaggcgtgtacgctgcatcaaaattgttaccatcaaaag

SEQ ID NO: 169666 - DNA, 452 bp, Glycine max
  unsure (1)..(452): unsure at all n locations
gcttgaacttgccactgatggaatgaattccttttggcaattaagcattaaccacagntcgtgacctgttttgctagtgaattataacttgcctccttgattgtgcatgaagtgaaaatacataatgttgtctatgatgatttcggggccaagacagccaaaaaatgacattgatgttcatttaagtcccttgattgaagacttgaaaaagttgtgggatgaagggggttgtcatgtttgatggtaatcgaaatgagatattcaagttgcatacaatgatattttgtaccattaatgaatttccaacatatgggaatttgagtggatattgtgttaagggccatcatgcatgccctatctgtgaagaagacacaagctacgtacaactgaaacatggaagaaaaacagtgtaccctcggcatcgacattttctcaaaccttatcacccttat

SEQ ID NO: 169667 - DNA, 418 bp, Glycine max
  unsure (1)..(418): unsure at all n locations
caactggagaagagtcttggggcaagacatgagaagcaatcaagtataatgttacttccttcactaaagcggtgatccatctccacacatatttttcaatagcaacataaaaaatctttgcacggtaatgatgaagattagtgatagtcctcccttctgctcttgaacgaccccgaaccggtatttcatcatccatatttggtaccggaatacttttagctacacaaaatccttggacatcnggcaaaaaattattccagccactctctctcattgtgcccaaccgagctttgacaacatcaactaattccatggcattcacaatattaaaatctttctttgaatacatttaaagctcgttgtgataccaacactttaacataacctcaaaataaagcaaattaaagctctccatttt

SEQ ID NO: 169668 - DNA, 178 bp, Glycine max
tcctgggtgagccctggaattcatggagattctaagctcccatgtagtaacccccctggaaaaatcttcttgggctatacactgccctggctcgtgtgctccaccgcagatgtgacatccccctaattgcatgatcacagaagtgagaggaacttatcgctcgtaattgttgagagag

SEQ ID NO: 169669 - DNA, 373 bp, Glycine max
gctttgatctaccaccaccacctcctctatcatcttagcttttctaatatttcgaatattactagcactgtgctttctagccacgtattttgctataatattatgacattcgaacaattcactatttcttttatatgcatgggatgctcgaaaaatcatgaataatgctatatgactatgtggttcttatatattagatctatacatgtttcttgcttcatgagtggttttatattcctcaatgaatgtcttgtgaatgattaatagtgaatgtatgctttatacttgttatgcactctggctctttattgatgccacagggggagagaaaattggttaaactcacacctcccataagtaattaacttaattt

SEQ ID NO: 169670 - DNA, 282 bp, Glycine max
  unsure (1)..(282): unsure at all n locations
tataattgcccattatcgattaaatctacaaggttatcgacttattcatgaagcgattgattagaatatctttttaatcgatcaaagtattctttcccaaacttggagaaagctcatgaataatgtaatcgattaaatactccacagaattgatttaagagttcttgttcacttctgaaacacttatagaaagagaagtaatcgattatatcacatgataatcgattaaaggcgagatttcttaataaatcaatcattgtctncaaaacaactgtgtaatcg

SEQ ID NO: 169671 - DNA, 330 bp, Glycine max
atactcgacacttgaaaataagcttcataaaatttgctgtcagtttttgtgcactttcgggcccaattctctacttgtaatatctatattatataagcttcataacttcttcttttaaaagctcggttgaaggctgcttcgctgatatgtatcagggaaacatccaaaaccaagagtactgggatctgatacatatcaactacggatccttgaagcaaactaaagcacaggtgcttcatagagcaccaccaaacaagccactaaaataggaagaatcactaagacaaagcactcacagtatagagggttgagacttgagggagagatgct

SEQ ID NO: 169672 - DNA, 367 bp, Glycine max
  unsure (1)..(367): unsure at all n locations
atacatatacaagacttncgtgcctacagaacaattgatggctgacctcaagtgggccttaattcagcataagggagtaatgaaatggctgaaaacgaagctttcttattaactgcatcacatagtcttataaactcaatcaaaaatttggttttgaccccttcataaaggttcaatctaagcttttccaacttattcttgtgaacaacagattcttctttttttgacacagagcaattgaggaatagggatggatggacagagacccagccaacttgtgttcaaagctcagtgcaatctgagaacattcaatgctctctagagtttcttgctgacaaatgtctggctttaaaaccagcacacaatc

SEQ ID NO: 169673 - DNA, 420 bp, Glycine max
agcttaatgtccctatgcaagtacttcttcttctctaccctcaagtgaaaataagaatccgtagctactgcttgcaaaactctaattgtctctctccaacagattttgcaattcgcccttgaaagaagtcaactggataagtatggaacaaattgttcctgcatcaatcgttgaatgggagacgacaagtactaggcgacatacgagaatatcctttgtgtgatggaattaaaaagaattatatgacatggatatgacatggtgaaatgacagacaatccgagggaaactcaaattgagtcaatagatgtagaaatgggagatcgatttgatgatatgattagcgatcttggcaagaactttttcacaacccatgcccctatgatgatacattggaactgattcaacacccattgtatta

SEQ ID NO: 169674 - DNA, 425 bp, Glycine max
  unsure (1)..(425): unsure at all n locations
agcttcttgatatattatgnggcagaancttgacttctgtttgaaaagntatgaccatttgaatttctcgagagctttggttgttcaatttcgagtgtctcgatatattatgcacctgaatcggacttccgtgtgacaagttatgaccatttgaatttcacgagagcattcgttgttcaatttcgagcatctcgatatattatgcgcctgaatcggacttccgtgtgacaagttatgaccatttgagtttctcaagagcttccgttgttcaatttcaagcttctcgatatattatgcgcctgaatcggacttccgtgtgacaagttatgaccatttgaatttctcgacaccatacgttgttcaatttcgagcgtctcgatatattatgcgcctgaatacgatgttcgtgtgacaagttatgacca

SEQ ID NO: 169675 - DNA, 442 bp, Glycine max
actcagcttctcgatatattatgcgcctgaatcaaacttccgtttcattatttatgaccatatgaatttctccactgtattccgtgtgacaagttatgaccatttgaattctcgatagcattcgttgttcaatttcgagcgtctcgatatattatgcgcctgaatcggacttccgtgtgacaagttatgaccatttgaatttgtcgagagcataccgtgttagatttcgagcgtctcgatatattatgcgcctgaattagacatccgtgtgacaagttatggccatatgaatttctcgagagcattcgttgttcaatttcgagcgtctcgatatagtctgcgcgttaatcggacttccgtgtgacaaggtatgaccatttgaatttctcgacggcttccgttgttcaatttcaagcctctcgatatattatgcgcctgaatc

SEQ ID NO: 169676 - DNA, 285 bp, Glycine max
tttgatctctgcactcctacagtaggcacttctctttgttttggtacattgtgcgttaagcttattgccatcttggaaactgaaagaattattcttaatcagctgttggtgaaaggggctgagggaggcttagcttagtggtctgaaaaatagctgccattgcctattctgattttggctaactgcgccacaaggtcggaaagctcatgcattggctggttggattctttttgacgactggctttggtgcattcgattaggaccctgagacttatatgcctatgc

SEQ ID NO: 169677 - DNA, 263 bp, Glycine max
ctacttgaaaaatgagggcccaccatttaaaattcaaactaaataaacaagagcccttctcgctcaatctgagcataatcctaaaaccacttcgaattgagctcaactcgaaaaaaccgggtattcttttcttatacatcaaaccctctttagagttgaatttcatttcagatagtcaaaaataaatccagactctcataacttataataataactccgtataattcataacccgcactggatcgaataatccatcttgatag

SEQ ID NO: 169678 - DNA, 451 bp, Glycine max
tataccttacttaaccaaaaccatgtcatcccttattggttgtgcagccactgcctccaatttcttccatgttaactccctattctctttcaacttctagccctggcttgcttctctaagtactgtttttgacactcttcaaacaattcggcatccatctccagaaacatcttcctcacattggctgttagcccaagcactgctcggttccaatggctcttcaagttattttccagagcttcaaagattactggcaatataacatttcgattctgggatactatacttataatctgctcatttttccacaagtaaagtgctcgttcagcaacctgccatggataaaacaattgtcagatagagcaatcaagatagaataaagagacattttcctttactaccaccaaaggacgggatgtatcatttatcaaagattgatactatataatat

SEQ ID NO: 169679 - DNA, 410 bp, Glycine max
tgtagcaacaaaatgcaaaacatttctaaatcaagctggtttaaaaggtgaattctgcagccatgggaaggaagattaaagataagcattctgaatcatattggctcaacatcaaacagagtgcaagaggactctttttagtattattaagtatcatcccctattgtgtcatttctttgaaagactcgcatacaacaggggtggtgatgaaagaaatgttacaggttagtgcattttcctcatctctgtacaagttttcctctttgccattttactaatcattaattgatgtagtagtacctagaatgaaatttgtgctctacgttaattgctaagagaagaaattttatatctaactaatttatatatggaaattgttcgagcacaatgaaattttctgaagctttgat

SEQ ID NO: 169680 - DNA, 368 bp, Glycine max
  unsure (1)..(368): unsure at all n locations
tctctgatgcatcatcatatgaagctactgcccctcctgatacaccagctgaagaaacagctgacccccctgcttccccagttggagaaattgctaatctttctgattcgtcatctggagaagttgttgctctcactgattccctagtgtagacactgttgacaangttgattcttgatgatngcttttggtttctttttggtttattattattattattataataattatggtttcagtacaatatctcttttatgttgatatacactgttagttttatgtataagtagttggtttgctcatcttgaagcatatggaacagtttgacttgactttgatgatattgcagtgaaacactcttatctttt

SEQ ID NO: 169681 - DNA, 342 bp, Glycine max
  unsure (1)..(342): unsure at all n locations
acttcttattcccagaatgtaattctatatataggcctcctatttttaatggagagggttaccactactggaaaacccgaatgcaaatttcattgaggcaataaacttaaatatttgggaagccatagaagcttatgtacccaccatggtggctggaaatacaacaatagagaaacctatagaagagtggtctgaagaagaaagaagattagtgcagtacaatttagaggctaaaaaaatcattacttctgccttangaatggatgnaatatttanggcttcaaattgtaagagtgctaaggatatgtgggacactctacaagtacacatgaggaacaacta

SEQ ID NO: 169682 - DNA, 424 bp, Glycine max
  unsure (1)..(424): unsure at all n locations
gacaagtttgaatatgatgtagaagaaaatgaatgtgagcctcttttccctttgaaagacttgtttaaaaaaaaatgttctaaaaatactcttaattaatatttgaatttttttattccttattagtatatatgcgaggggtagagggtgtcacactaaacacccattattgggagctcaaaaatcaaatactcttgatataatgattctaactctctatttaatgttattttgattntatcgcctcttttatgtgtttatcatcatgtttatggtttgatcactcatgctcatgtggttttataggcgttacgcattggaaaatatttatttcctaaaaacttgaaaagaacatctacgtaatccatctctanggatataatggtattatntagccccaaatatgcatctctactcataatgc

SEQ ID NO: 169683 - DNA, 373 bp, Glycine max
gatatgctagctgatggtgaggtactcgttaatgctagttatttgacattaactaatgtgaaaaccatgtattctattcatacttatttgtctgcatgggttgtgttatcttcaatgtatgtcttattcaaacatcttcaaaaatgaatatcccaatttctgattccaatcattctgcccaacatgaatctgtgagttttgatcactgctcttattttttaatatgaactttcttgcaactctttcattttgacacttcatgactttcaacttagcattcaacttattcattgctatttgttttatccagcaatccgtgtctgtgacagtaaaccatcatccactgcttggactcccttgacacctacaaagc

SEQ ID NO: 169684 - DNA, 293 bp, Glycine max
  unsure (1)..(293): unsure at all n locations
ttcaaccatatttagaagatatcactttatcatagtaagttggatgaacactccttatgttatttaatactaaaaaaaagtgaaaaaaatataaatatgatctaatttatgatatgataaaaaaaggagagataaaanaacgattgatagaatatataaaataaaaataatttatgcatcacttcttatcaaaaggtgtgcaaaaagaaagaaacaatgaacaagacaaattgcatgatcgatcaaaggtgagaatgtcccttgctttgaaaagaagacatatgcttacttac

SEQ ID NO: 169685 - DNA, 440 bp, Glycine max
  unsure (1)..(440): unsure at all n locations
agctntanaagcttgtagcatttgatttanttgctgccttgtaactgatctgattatgtacacaaggtggttgtggtggtgatggtgggagcaaaggctgaagagttgattgagcaaaggtgtttgtttctcttcaatttttgctcatttttgcattatggtgtcttgtcattgagcattttttttttcctttctgaaaaatgttaatatgggggtagagttcattttggttggagggttggaagtcggtaagttcatcacgtgggggtacaaattgtatatagagaaaataaagacttatttctttctatgtcttcctctaatgtactagtactactctggaaaaccaaaagtgtaaaacgcttatttaaatatgatggtgtacaagttgctcactttttaatcaaacatttgttgtttggttgatgattgtaccttga

SEQ ID NO: 169686 - DNA, 452 bp, Glycine max
  unsure (1)..(452): unsure at all n locations
ctcacatcatgatactactaagaaatatatacctatcttntgtgtaatgacactaggctcattatcacccaattggttaatcatgttttagaagcaaaagtatctttagcatcaacattcgagaaaagattttcattctcaaattattattattgatcccatttgatcataaaattctatttcattttcaatataaacaatttttagtagtgatctattttgtaatgacaataaataaaagtcaagaataatctctcaaacatgttggaatttatttttcaagacattgaagattcttatatacaaagatgatggacattcaatatgacttcaaatgttgttattgataataagtctttcacactcttaaacatgtattggtattactcatattttctatcactatctcctatataccttttaatacttattagcctattacttccttattt

SEQ ID NO: 169687 - DNA, 433 bp, Glycine max
agctttctttgagcaaagcaaattccttctcttgtttttcaccccaggtaaatgccgcattcttcttcaccagctcattgaaaggtgaggaaattgtagagaaattaggaacaaaccttctatataagcttgctaacccatggaagctcctaatatctcccacactttttgaggtgggtcattcttggatggccttgattttctcatggtccacttggaccccatttctaccaactacaaaccctaataaaactatattatctacacaaaaggtacacttctctatatttgcatagcgggtttctttcctaaggactgaaagaacttgcctaagatgtcctaagtgatcatctaggctcctactgtacactaaaatatcatcaaaataaacaactacaaatttacctatgaaataccttataacatgatgcat

SEQ ID NO: 169688 - DNA, 290 bp, Glycine max
tttattagcagtcttgttcttatggtgttagcatcaattaatctgattatcttattctcatgattcctcatgctgggttgggcgttacatgatcaaaaataccgataatctaattcactgtctgctttaaggtcaattatgattacctgatcatgtttggtcatttagtcatcttttattatatatctggtaacctaactaatttttcaaaatgtttaaaacaccaaataaggaatatatctgtgctaagatgtagctgaatgccatatgcaagttgtgatttgtatgta

SEQ ID NO: 169689 - DNA, 440 bp, Glycine max
  unsure (1)..(440): unsure at all n locations
cccggatccttaagtgaccgcggctgcagcttggagatgatgggacttggttttatataaacgaggatatgggctacgtgggagtacgagagctcatttggaggtgggcaacaggggatggtgggtttatgcgcgcattgtggatgtggaaaaactngttgtgcacctattcccgaccgccacctattaccacatgtgatgggtaccccatattcctacaatcttgagatgaggaagtgttgaagggtgaaactccctgctattattgatgaccacacagtggtacctggagatatgtcgcgggggtcaagataccttggggacgtctggtggggtgctattgctcaaaaccaagcttgaccattcccgacccaacccgtgcatagtcgttagtgagaacctgtgatgtacctatacaggcgagctccttgtcatcaaca

SEQ ID NO: 169690 - DNA, 354 bp, Glycine max
ttctcaacgaagtattcttaaagaagcttctcaaggaagttttctcaaaaagcttcttcaggaagctacctagtctataaatagaagcatgtgtaacacttgttggaactttgatgaatgagagtcttgtgagacatacttcaaagatccacttctcttcctcttttattcctttaatttcgtgctcccccctatctctttctctccctctttcttttcctccattgaagcatccttccaagcttcttatccaaggctcatcttggtggtgaagctccttcttccatggcttattccctagtggatggcacctcctctcaccgcatctcctttgtcttccgctgcatcttcatg

SEQ ID NO: 169691 - DNA, 435 bp, Glycine max
  unsure (1)..(435): unsure at all n locations
ttaagtcacctgcggcatgcaagcttcagaaaactatataagattatgcttctgcgaccgcttccaatacagctagggcagcagaaccggtgctacaacctgcaataaacttgggccgagacagaaacacgacggttnttggtcggaggtatagtcctcaagcctacccttatggtttgcctccggacttcactccccgtaccgctccagactatttgagcgaagcccctaccttcgaggggaaactccctccttatgccgactatcctctgcaagaagatgatgaaggagatgcccatctaggccctctatttcccctcaaagatccggcctcccatgaattgccccaaccaaacatagtccaccatagtctgtcttcacccgcacccgttaagaattcattccctttgcaaatataagggaaagattgattac

SEQ ID NO: 169692 - DNA, 414 bp, Glycine max
  unsure (1)..(414): unsure at all n locations
tctcagggaagtntctcaagaaagcttctcaatgaagctacctagtctataaatagaagcatgtgtaacacttgttgtaactttgatgaatgagagcttgtgagacacaactcaaagttcaacttctctccctttttcttccttcaatttcgagctcccccctctctctttctctccctctttcttttcctccattgtagcatcctctctaagcttcttatccaaggctcatcttggtggtgaagctccttcttccatggcttattccctagtggatggcgcctcctctcacctcttctcctttgtcttgcgctgcatctccatggtggaaaatcaccattaaaggacctcattgaagctcagagagtcagcctccatagaagccccacatgcaagctttcatcacactcgatc

SEQ ID NO: 169693 - DNA, 308 bp, Glycine max
  unsure (1)..(308): unsure at all n locations
accctgactggnctccctatgattttacctagggagagagacccgacttactagtgtggggggtgtcttgacatgtactcctaggtgcccgacgtgatttttcactgacatggtaccacatcgcatataggattgagtcttagtgtatttgctgcataacgcttgtgtattgatcgatatggatcgatcgactcggtgatattgtgttttgatccttgagtacgcgaatgttgtgaaaatgaatgagatgtgttgtgctgtgatgtgatgctggacaacaaaatgatgaaacgacgcgagctatgtct

SEQ ID NO: 169694 - DNA, 418 bp, Glycine max
  unsure (1)..(418): unsure at all n locations
cctgttgtacatcgttcgcgtgtatgatatccactcgacaatgtttgaagtagaggagaccttcaatcctataacgcaacgtggcggacaaaaatggccgttaacttgaatggcattattgcaatgcggaaggtatttcgcgcttcactatccatgttcacacattattgcagcttgtggttacgtgagcatgaactactaccaatatatagatgttgtttacaccaatgaacacatcttaaaagcatacttcgcacaatggtggcctcttgggaatgaagcggcaattcctccttctgatgaggcatggacactaatccctgacccaactacaattcgtgcgaaagggtggccaaaatcaacaaggataaggaatgagatggatngngtcgaaccatctgaccaccgacaaaaatgt

SEQ ID NO: 169695 - DNA, 486 bp, Glycine max
  unsure (1)..(486): unsure at all n locations
ttaagtcacctgcggcatgcaagcttccatcataaggtgtgaagaatgattatctttgcaaaagaaatcaagagagttacttggattatgtaatgcagagtgtgaagaagcaagggatgcagaggggctgattancacatattataaacagaaatatgctcatagatgagagagtgcagaggtttgggtgccaaggtagcaacccaagtgcctctgcctctactttttaaaagttgaaatttgtatggtgcgcttagcgcgcagctgcgcttagcgtgccaacatgacatttgagtttaaaacactggcgcttagcctagcctcgcgctaagcccaactcgaagttgtaacttctagtaagcatttggggcttagcgtagcagcggggattatcactttctgcaacaccaaaattctttccgcaacatgtgcttagcctgagatgcgaggcttatcatacatcaagcttcaacttacagtgagtga

SEQ ID NO: 169696 - DNA, 351 bp, Glycine max
tttcactttgattattagtcaattcattcaaggaaacttccaaagaaaaacgtctgattgatttttttgattattttattcaagatattctgattattttattattattttgccttttttgtttaaccgtggttacagtgtgaacaatcggatagaatttgctttaacagtgactaaacgagattacaatcggatacattatcatttattaggcgagataatagcttcaatgatcggttaaagctcgttaaaaatcgaagaaaagaaaaccgaaagtgaacaaaataaagatgaaagccaaccaaacaagaaatgaatttgaaagttcggattcgaaaacttaccggttga

SEQ ID NO: 169697 - DNA, 362 bp, Glycine max
  unsure (1)..(362): unsure at all n locations
attgtggttcgcgcatttgtattctcgttttgtttactttttataccccctgttgacgtgcttaagccattttacttaagtcgtttttcgcttaacttaaaaataaaataaatttccaccgaacgtttgaattggattattcattaacttcggttaaaataaattccgaccgttcggtcatgccgtaaccacgttggaaatcataaagaggtaaanaataatataataatcaaaagacatcttttagtaaaataaagcggaaaatcaatcggaccgtttctctttgggatttctcattcttaatcgaattgataataactaaagtgaaactaaggctaaaatcaactcgcctagtcaagctc

SEQ ID NO: 169698 - DNA, 479 bp, Glycine max
  unsure (1)..(479): unsure at all n locations
taagctgtattattaattgatggaaagacttctatgcaagcttcaaccacttgtgtaatcaattacgattagcctatagtcgattaaaatagagagttttaacttcagagaaattttctaccggtagaaattttcttcttactcctacatgatgatgcacgatgcatatatganaagataaagactaagatgcaacacacaatacaacaatcaatagaaatgccacacaagagagttggacatgtaaaaataaaaaattcttcaagctcttcttcaagcttttaaggctaagtcttcatgttctcccnctatctttcacactttctaggttatttgagtgaagatgaatatgtctgcattcctacttttttntttctattacaaacaattttaaatttactatttgcccacaaatcacactctgcaccccactttntgtgtagtccagaattacttacagcactctaatactggtattt

SEQ ID NO: 169699 - DNA, 430 bp, Glycine max
  unsure (1)..(430): unsure at all n locations
agctntatagacaatagatgggggatatttatgttattaagtgttaactgagtttgtataattctaagtgtttgtaaaaaacaaaaaagaaaagaagttcctattaatcataatatttggagggccactggattatgtggattggaaagcaatgctttatttggcggtgcaagtgggtaggcagctattgtcatagttctaggaaatttgggatgtttacagtagcataaaaaataatatgcattaccctattaagtatttaaggataaaaatactacccctgctccctaacacaaaacccatgccaattttcatttggttaagttatcaatttaaatttgtgaacttattatacacatgaattgttctggtctctaactttgatctgcacaatattgttctcaacctcatctaactaactaatattcat

SEQ ID NO: 169700 - DNA, 365 bp, Glycine max
  unsure (1)..(365): unsure at all n locations
tggactcacacggtttctctggatctataccaacagcacaaatacacgttaaccctaaacccaaccatcatctgctgttcacccttcgtgcgtatatttctaagtgtaaagcaaataagccagctatacaaaaaagccaacccttaccaacttctttaacattcacgtaaggcctgtatcatcatatcaatcgatctcctttccttcacaaagagatcgaaacaatcataacgttaaacaattcaaacaagccctgggattcatctccattcacaataagagaattttcttccttttcctttcgcattaatccatgcccaagctctatgttttggcagatcccatgcggncacacaacacagctt

SEQ ID NO: 169701 - DNA, 348 bp, Glycine max
  unsure (1)..(348): unsure at all n locations
agctntgcaacatttgaaaacctagctttgtccatctaagattcaattatgggatctggagaaggcataccttgagcatgtgactggattacataatttgttacttgcagagatcaaaataataacaacatgaatattagtaaatcatatcataattaacatttaattaaacataatgtattacacacttctcgagatctatgaaggtgttgtttccatataagaggagcaactgtagcttccatggtttaggctttggtactaacgtcaagaagttaaagagggatatatgatagaatgagagacagtgagtttatgtgtgtatatgatggcattacatgcattgta

SEQ ID NO: 169702 - DNA, 226 bp, Glycine max
tttttccaaacatcagtcacttggaggatatttctagcgcaatcaatacggtcaaaagtcacaacaacaataatctctcaacccaaacattaagataaaacaataggataatgcataataattttaagataaaagcttctcataaactagatacttaagtcaagagtgggatcccgcatgcagtatgtagtaaatttcaactaacactaggtggattaataaacat

SEQ ID NO: 169703 - DNA, 81 bp, Glycine max
aaaaaaccaaaggcaggcagagaaggcccccaagaccgaggaagacagaacagcccacgggcggacaccaacaaggggaga

SEQ ID NO: 169704 - DNA, 431 bp, Glycine max
agcctctcggctcatactgggaatttctctatttcaacacccgtgcaacctaaggcacccacccagagggaagctcccctagttccaactccgaacacgactcgaccggccggttattccaacacgacaaggaacttccctccgaggccatttccagaattcaccccactcccaatgacgtacgaagatcttctgccatccctcatcgccaatcatttggccgtggtaactcccggaagggtcctcgaaccccctttcccgaagtggtatgaccctaacgcaacttgcaaataccatgggggtgtcccagggcattctgtcgaaaaatgcttggcccttatatacaaaggccaacatttaatggatgctggatggctgactttccaagaggatcggcccaatgtgagaaccaactcgctctccaatcatgg

SEQ ID NO: 169705 - DNA, 403 bp, Glycine max
  unsure (1)..(403): unsure at all n locations
tgtaatcgattacatcatntgtgtaattgattaccagacacaaaaattcaaatttcaagtctgaagagtcacaactcttcaaaaattaactgtgtaatcgataccacatttatgtaatcgatttccagtaaagaatttttgaaaataactcccaagagtcacaacttttcataaagtttttgaatggccatcaaaggcctataaataagtgacttgggatacgaaattccttagagtttttctgaacaacattgtcttatcctctcaaaaccaaattgtcttatcactctcaaaatattccttggccaaaatacttgcaaattcaataaggaatcctgatcgatcttcaattgtaatatccttctcttaaagagagaaaattcttcttcttcttattcaaaga

SEQ ID NO: 169706 - DNA, 462 bp, Glycine max
acctgcggcatgaagcttatgagtagctcttacatgttcatgtccttcattagctgggcctccaataaatgccattattcttgcagcagagccagggacacatgcccccaacaaactcgccgcaatactcagtgccgtgctggtgcaccgagcaacccgctgatctcgccggcaccgaccaaggatccttctgcagctccttcaatacctgccaaccaaaccacaaacaagccacacacaaattaacatgaaatacactcaaaattcatttcattccactacaagtgacactcaacacacaaattaacaccaatacagtccaaattcattccattccactacaagagacttctaacaaacattaccaaattgagagtggagacaaattaacacccaatacagttatacacttcagattcatttcatttcactacaagagactcaacaaacattcctgaattg

SEQ ID NO: 169707 - DNA, 381 bp, Glycine max
tgtttcttctgatgttcttttagaaacgaaatgcccatgtcttaaatctcatttttggtatgaaaaattctatctacattctttcattccccattagtcgcattattttttgaaaaaatgtgtgttcttcttatccgtttgggggtttgtttctttaccaagcgtgttcgcgttttagtgaaagatttcaagacttcaatgtcttatgtctttatatttcaagacttcaatgtcttttgtctttacatatcaagacttccatgtcttttgtttttacacccatcattgtggaatccgtaaagttccgagatgtttcgagaagaaaccggtcaaaaacacgaaaatgggagtgtattagcaaagtggtgtgtgtacataact

SEQ ID NO: 169708 - DNA, 296 bp, Glycine max
catgtacttagttcaaggccactcatataattgtgacaccaacgtaagtaaattagacaaatttaactatgacagcctttttgttgtttttgtactggttcaaagattggccactggcatgaacaatttttctgtggcatatataaaaaaaggttgcttgttataaaatactatgtgctttccttttctatcttttgtgactctctgctttagctttactacggaaattctttttctgcaacagctaacccttctgctgagttaaaaaatgtcgcgatttattgcgtttgtaccat

SEQ ID NO: 169709 - DNA, 238 bp, Glycine max
actctccttggatcacagccgcacttcctatcttatgctgagtcgctttagtctttccaatattgcagcaatatctgatattctgcagggagtcttgcagaactacctaatacaaatcccttcagtaccttaagccaaatcacgttttcaatcccctttggcattttgtccaacaagtagcattgagacaaattcaattgtacgagatttctcaatgatgaaatatcactaggtagcg

SEQ ID NO: 169710 - DNA, 169 bp, Glycine max
aactccttaacagtttcttttgcttttatcggttaaaatgaacctttccaaagtttaaaaccgaccctacgcttgattttcttgcttttaaaaagctacgtatgtctgaattccttctgcatttgaggatacgttcgagcaaggtcgtgctcttgtcgaccccctaaga

SEQ ID NO: 169711 - DNA, 372 bp, Glycine max
  unsure (1)..(372): unsure at all n locations
cttctacaacccgaagttgacttaccggtcggcgctaatcttcccgactcgaaattgcagntcatgaagaaatgaggttaagcttcttttaacctcctttaggttaagcttcgaagaaacccagtcaataaggttcgtgtgaggtcacaaagcttgtattactactaatgtatgctaatgttggtggcagggaagatgcaagtcacgaatgagttattggtgaacaatagctattgtgctgaaagagtaagcacggctgtgctttataatcatatcttctaattgttacggataactgcgtaagtgcatcctaccttgtgtgtgaatcgcanaaatgtatgccctggaaaggacatgtttgatattatattt

SEQ ID NO: 169712 - DNA, 286 bp, Glycine max
ttttatcaagtccatgcgaaaacatctctgtccattttggtattcaggaaagtacttcattattttcatcctcaagatacacattcttttcccttttcaaaaaaaaagaaaccctcttggtgggtattgatctacaaaatttccaaagagtactggtggttgttccttttaaaagcacgtatagtttagaaaaaaggtttgaatcctggacaaagttataatccacgactacaccataaaaaataaagtgcgcacgacaataaaaacaatccatgtgtaagttttt

SEQ ID NO: 169713 - DNA, 360 bp, Glycine max
  unsure (1)..(360): unsure at all n locations
actcagcttcacttgtagctacatcattatgggagttataattatttctttctttataacatanagacaaattgagtgaataatatgctgaaggtaccctagcttacatagagacatattacatcatttctttttatatctacgatacatctctacactctctcttcctctcaaatgcactatccattctgcctctcccaaaatccttttctgtctgtatacacccaaacaagtcctacgtaaactatgatcccgtgctctttaaccattggatcattgcgaaaatagaatattgggtttggaactcattttcacacatcttgacagttaggatttgtggaataatgtttgtggagtgag

SEQ ID NO: 169714 - DNA, 414 bp, Glycine max
agcttggatctataaactggttatcaatttactctctgttattaatatcattgcgggatatttagttacacgtaatttgtttgtttgtttaatgccagatacagggttatatttgtttcgtactgatagaggatgacatcaagtgcatggcatgttgaaaggaggcaaagctcaagaaatgagtcccttctatcaagggatctagaacatgcacctaaaactaggtcactctccattattgtgtttggggcttctggtgaccttgctaagaagaagacatttccagcacttttcaacctaaatcacactactagaaaaagctatgttttatgacgtcgtttctaaaggatcgtcttaaaaaagagcacagtggcatttttgtaattcggcgtacaaatattgcaatctacgtcg

SEQ ID NO: 169715 - DNA, 336 bp, Glycine max
  unsure (1)..(336): unsure at all n locations
atacttatatattagtgggttgatgtattantttggccaggatccctcaaatgtcaagatccatcctgagattggtaagctacaaaagcattgtgcataatttaatatgaaataatgatagcacacaagttagttgtgtgagcatgcaaggaatgtgacctgttgtattatatattaaaagatttggatcggttttagaagatcatatgttttaattttagtgtgattattgaccactaaaacgttatgagaaagattagtttggtcagttatcttccttgaattgtcatactatcctttactggttgatggnactagcgcactttcatactatcc

SEQ ID NO: 169716 - DNA, 380 bp, Glycine max
  unsure (1)..(380): unsure at all n locations
agatacacatttagtaccattggtctcctaatatatctactaagacaaatatattatggtaagataaactaaattttcccaataaattaaagttaagttatatatattttacttttcataaataaaatgatagatttttttaaaaatgatctcaaacaaaaaattgaataattctaatgttaagaatttctttaacaatatcaataattacaagcactggcaatataatattttaaaagtaatgcttgtattttaanaagaataaaatctcttaatgtagcttaaaactattattaaaatatgagtttcctttacttgtgcttcttgccatgcctttcattctaaacataaagtcaaggttttaacaataatacttacta

SEQ ID NO: 169717 - DNA, 378 bp, Glycine max
tttcgtatacttgctttcatagcgcttataaaacggacttctctattacctgggaagcacacattccaccttgctcataaagggaagctaaaaggtctaattcaagtaactctatgttcagttttttttcgctagcacttcccatcaactagtatatgaagtcatttcgttagtgaagttttgggtaggcattctgagtaattacaatttttcactctccagttacctacggaacggatgggcctattgcgcggtgaattggatagaaataataaaacaagtcgcttacgataggagtatgaaaaaatttcatatccatcgaccacatgaaacagaatcttatgctcgggatgatctgatgcaccacctgacagctat

SEQ ID NO: 169718 - DNA, 439 bp, Glycine max
atggcaaaggtctgtgtggtggtcggcagaggagcataaaccacaaagtctggcgacaggtgcagatttttgagtcatggccagttgggttaccaggttaaccaaggcatctagtttaccttcaagcttcttagtctcacctgatgaagatgaattcatggctacttcaagcactcctctaatgacaataacatcatttctggcactgaattgctgggagtttgaagccatcttctcaattaaatttctagcttcagcaggggtcatgtctccaagggctccaccactggcagcatctatcatacttctctccatgttgttgagtccttcataaaaatattggagaagaagctgctctgaaatttggtggtgagggcaactggcacataatttcttaaatctctcccaatattcatataggctctctccatgagttgct

SEQ ID NO: 169719 - DNA, 463 bp, Glycine max
  unsure (1)..(463): unsure at all n locations
atgatgagatatatcttanattaataaacataatttattaaaagttatctttgaaaattttntagatacaaaactacaggttatattattataatcaatttcattttacatttattcttcaatcctaaaccaaaaggtccaaactctttatatgttgnttatctttttatgtttcaataaaatattctatttttttagtaatattttttgtaaagatgattgtgtttttttataaaatatttgagtattatttattttttatttcaaatagtcttccttttataatatattattattattattttaaaagttaaaaataagtatagtttgtaatcaaatgattctattaatctttgacaatgggtcaaacttaaaaacactgtatacaagatttacaacttaaattttaaacacatcaataacacttcatctttttgcaccattctctatttctctctgtttt

SEQ ID NO: 169720 - DNA, 384 bp, Glycine max
tgaggcatgcaagcttatgttgagtgtcaatggatgtgttattatcagttttgataaatgataatcaccatcatcaaatgcgtgtcatagaaatgaattgggacattcccttattcctgagccacttgctaaacatatatcccaacatacatcatgtctcgccattcgtaggccctttgagccaaacatcaactttataaaccttgacctaggatggaaatatccaaccttaccctcggaagagagaacaaactaatcttccaaaagaagcttctcttaccttgggttacaagtatgagttcagagaagagacagaataagaacaaaatcctcaatcaaagattggggaaagcagagaaaagaaagaaaacactcatcgatcaa

SEQ ID NO: 169721 - DNA, 400 bp, Glycine max
atttgtatctgatgaaggattaattagatcaagtgaacctttccacaacttaagtcctcctatagaccaaagggaaccaaagttgcaactgatttattctcaacaagatgggaatgaatgaataaatagaaaatgtcctcaccttcatatttcccgagaactaaatcggagttggacaaaccaaaaacttgttaggtattcacccgcccctgagaattgttcataaaataatataaacattcaaatattgaaagaattccaagacaaagaaaggaacattacctttaacaaagtaactccatccaaatttacagagtccacgttgtgtttgatggatgaaggaacctacgtatgtaggactattaaaaatgacatacgtttgaagactcatgattcatga

SEQ ID NO: 169722 - DNA, 364 bp, Glycine max
tgcgtagcccaccaatctttttagtagagtatcgataatgggtctaccatcacgatcaatcgctccctttccatcattgggggtaccacctgggccgccagatccctccaccttttgggcgtgttctttgaaagatccgcccccctttttgtaaatgttcttgtagttgcatcctatccggaaccatatcaaaattgtactgatactgcctaacaaaggcaaccattatgtccttccaagaatggactccggaagattccaagttagtgtaccaggtaacagctaccccagtaagactttcttggaaggaatgtattagcaattcctcattttttgcgtattccccatcttctgcaatacatct

SEQ ID NO: 169723 - DNA, 434 bp, Glycine max
  unsure (1)..(434): unsure at all n locations
cgacctgaggcatgcaagcttncagataggtataccatgctacttctgctccggccaagctgtcttgaaagaaatgaaccaacaacttcttgtccgcagaatacgcccccatctttcggcaatacatccgaagatgccccttcggacatgttgtacctttgtacttatcaaagtccagtactttgaacttgggagggatgaccatgttgggcacgagacataaatccactaaatccgagaatgggtaattgccgaggccctcgactgctctcaacctctcttcaagcgcctcaatctttcccttatcgtctgcatagggaacagattctnttacgggtgtgggtgaggccggggtatgacggactactgtcggttggggtagttcatgcggggacggatcttngaggtggagcagggggccaagatgggtatct

SEQ ID NO: 169724 - DNA, 454 bp, Glycine max
  unsure (1)..(454): unsure at all n locations
cgtagtgactcatagtgaacgacatttatataccgtatgattcatctgacttttatagttgcactctacaccctccacactggatctttcttcccattccttctctctcaatactccaccggcaccggtttcttccatttttacttctgtctttgtattttagaacagcctttaaagcaatttaagtcagtgtacatggttcttgcaggaaaaatgtgtttntaacatttataaaaaaaatgtgaatatataaacaggaaaaatgtgacaagaaaaaaaaagtgagatctgctaattatatcgattgtatttttcacttatttacctatttatctcataaccaaacacatttattttcattacattttttattgcatggttttatntattttatctatctttatttatcctatttattctaattttnttccttaatcaaatagaatcatgaagt

SEQ ID NO: 169725 - DNA, 447 bp, Glycine max
  unsure (1)..(447): unsure at all n locations
acctgaggcatgcaagcttcggtcttgcagatcttcattctctaaatctctcaaaactgtatggaactnggacctttctctctctagaaaccctaaacatgcaaagctntgaatcccattccaaactccctctttaaaatctgatttcaggcttaaataggtgtccttgttcgtgctcgtgcgcttagcacacttatggaccgcttatcgcacattagtgaatnttggcttagcgcgtgtctttctcgcttagcggatgaactgaagcagtgcacttagtgagatgaagcggtgcacttagcgaacctgtacaactcatctttttctagagtcttcctcacgcttagcccatgagtgttgcgcttagcagacgctcgctaagccagcagattggcttagcgagaaggtgataaacaacactttccacagcttgccttattaacctaa

SEQ ID NO: 169726 - DNA, 421 bp, Glycine max
  unsure (1)..(421): unsure at all n locations
tcgatatccctcgtgatatgttgtgtaataaacttattttgcttgttgtgccaatatgaatgggtcatatgctttagatatcttttntattgccttacttcaacaatctcatactttttatctacttgtgtccctatattatgagtattattaaaccaatcacacttgaatagaactaacttcatcaaatgggatgccaatatactccaattgaataatatcatacaacattccataaaaatcaaattttagtttaccattcagtccccgtacataaacaccataattagaagaattcatgcctttattttgttagagatagggggagagacatgaagactaagtcttggagcttgaagagttntgtctttaaatgtcaactctctgagtggcattgattgatgggtgattgatgttgatc

SEQ ID NO: 169727 - DNA, 355 bp, Glycine max
tgggacattactcttaaagcaaaaatggcatataacctcctcccataaaacaaacaccaatggtaatttagagcaagcttatgcgcatatttccttacatacgttctcttgcacaagacatttaaccgaaaaagtgcacccatatacaatcaaggcagcttcggtacctagattatttacacgtactgccaaggtgtatttgttacttacatcacacacatctccttggctgaatttacatacatgcatactcaaagcattttggggtaccaaaaattgcacatgtgcacatcttggtatttctaatacctatatatacacaaacttcatgatgaatcttgactatctttacaaa

SEQ ID NO: 169728 - DNA, 273 bp, Glycine max
ctgagctgcagcttcatacaagcaaggatatgttatcttaaaagggcccgttaggatatctacttgctgacttgggttgtcttttccaacgtggacggtttgggggacctaaccgcaattgatgctttccttgcttatcaccatagcaaggagatcccggtggtagctatcttggcagacttattgatacatttgactgaaggtgcgagaaaaacaacgcaccgattgtccgctgcttacctagctctttgtgggtggatggtgtcgcaccta

SEQ ID NO: 169729 - DNA, 377 bp, Glycine max
  unsure (1)..(377): unsure at all n locations
tactaagcttgcttcacagtaaggagcagccattctctattattaatctcattattgctacgggttttctgtaatggctggctaaacacccttgttggggatttctaacaacaatcgatgtaattattttaatatctaattgattgtgtttcttgtgttcaatgcttcattcaatgcttaaattctatatgctcttggtctgatgacccatttgtgtgcatagttaggtgactttagcattgngaagtgtactgttgccctagaacttgaatgaagcacgattgcaacttactcttatatgatggatctgtggactaagtattggttttaaatatgctgttacaataatgctcgttggtctaagtctactccaacaa

SEQ ID NO: 169730 - DNA, 270 bp, Glycine max
gagctcgctatataaatagtttttttttttttgggaagcgcttctgagatttctcaaagagaatttgtggaagttgagtgctaatgtcttggctgttggctgcatgagaaaaaatgccaagaaagacctctcatctgctggcattacatgattcttgttgagtcattggccaggcccctttgtcaagtgttatgacacatcttgactctgtcatgtaatttagttttggtgactcttttgtccccctccttctaaaaaaaaaactttatt

SEQ ID NO: 169731 - DNA, 369 bp, Glycine max
  unsure (1)..(369): unsure at all n locations
cgcttgataccatgctagatagatatggattaggtgtatcttttgttctaacattagnctaaagaaaagagggtagctcaacttcactaacattatccttgttggcctctaataaatatgggtcatattaacgcgagtagtatacatacccactataggttcgatccttattaccgcttcgaaaaaaaaaaaagactaaattgtctatatggaatccattaatgccgactatacaaatacatattgctaccctaatacattacgcacaaagaattttaaatggttattcttagttgctttaacattttttaatcaaaatatcgcttcatactatcattttaaactcatattgttcaaatatatttaaat

SEQ ID NO: 169732 - DNA, 408 bp, Glycine max
  unsure (1)..(408): unsure at all n locations
tcttctgcgaccctccaaatgatcaactgtgatcccaatcgctctctcgcnctcgccaggtctttgattcttctttccttatttcatgccaccacacaatcctattctggtcttttccttcatatttcttattttcttttgctttctctgttattctacttgctcaatcctctgtgtgtctttaatttatgttttacaactttttcatgccattccccgtagacggtgaaaaccatgccattcgttacaacgattgaggaggatgtcaacctccaattggactgaagggactctaaccaaaccgtaatattccaaggtgataaagntctcattctatatattatatgtcattcttggtttataacttanataatagaacataatattattctcgtaattaaaagttac

SEQ ID NO: 169733 - DNA, 345 bp, Glycine max
tgagttttaaaaaaaaaataatcatctatcatctatcatctatctttcaatctatctttcaatatcctctttcatctctttctatagaactttctgagtcatttctcgtcatctttctaaaagtttttgataagaaaagttctttgtaaaaaactcgtgctattcatattttcattctcttctccctttgccaaaagaacaaaggactaactgcctgaattcttttatgtctctcttctcccttacaaaggattcaaagaactaaccgcctgagaattcttgtgatctttcccttcccttaacaaaagattcaaaggactaaccgctgagaatatctttgtttcc

SEQ ID NO: 169734 - DNA, 457 bp, Glycine max
  unsure (1)..(457): unsure at all n locations
caattattaactgactttatttttttatcccaaatttttatttnaaaagaaatcttaaaaaacacaaaacacagatcgactcagtttacgttacaaagaaaagtatgatatttagcacaaggattacgttgctaaaaaatatatatgataaggggatactcaccacgatttttattaatgaagtaagatcattctcaacaaattntagaggaagatgtgtacctcgatcttccaacatttgaaaaattactaaaattagaataaaaaaaataaaatacttactttcattgcatttagctcacacttataaaaagaaaantcaatatactaatttaatggtcgatgattaaaaatatcaacatagtattaatataaataaatagccgtaatagttttaaatttaaaacanatcatttttgttttaataatgccataatactaattaatatgttcaatt

SEQ ID NO: 169735 - DNA, 313 bp, Glycine max
ttaagtcacctgcggcatgcaagctttagcatggcctccgtgatagaagctcttttatcttttaagggcgataggtcggccttcatctgttcttgcactccctcttcattatccatttttctggatcgagtgttataggggtgcctctgcactttcttaattattgtgagttccctaaagaaacaaacaattgtgagtatgccacaaaaacatgaatatgcttatgaatgatcggagcacttggatccacctcaagatttttagataacgtgatgagttcagaacttctcttttataaaaaggaacaaacttt

SEQ ID NO: 169736 - DNA, 391 bp, Glycine max
agcaagataactacactctttcctgtcctagaaagaatagaaagagaaaagtcaccctcattatacagaatggatccaattaggaattataatcgatagttgaagtaataaaattttcagcaaataagagttcaatacatgagaaaacaaagagaaaagtatcaattgaataaacatctttatagaatacctgaatttcaagttcaagtgatgatattgtttccactagctgagagtacttgcaatggtacttcatggcaggatcaatgtccttactgttaagcaccagattaatgcgtaatggctcaatgtgtgcccatgcacaaccaatattttaattgaaatctatgatgtcacaatgaaaaattaaatataagtgagaacgctcata

SEQ ID NO: 169737 - DNA, 404 bp, Glycine max
ctcagcttatagatgatataagcacatggtcaaaccagacgcataacttaacctctttcatgagaaactcttcatccacgatgcaatcagctgctgcacaactataattatggctctttctatacttgtagttccagagaagcctgcctgtgttttacacaagcttcactagaaaaccaaaccgcaagaaaaacctggaaagaagccagaaattgtcagtgttttctcgattataaaggtacaaaacaaagcaagagatttggctccaccacaatgagagactcactttagaatcgttgatggaaaaataaaagtcgatatttcaatattatgtgcacataatatcaatctttgattttcttatcaacgaccaagaatacttactcttctctaaagtgaaatgc

SEQ ID NO: 169738 - DNA, 417 bp, Glycine max
  unsure (1)..(417): unsure at all n locations
agctngcttctacacctattacatcctatctttctcttaaccttcctatgggttttagaagaaaaaaatgctttgaaatgtctattacacatcttatgggtgtgtcatttgaaaaacctaatgtaatagagctttgatgtttagatcatgttgaaagttttgacttatctatgttttcatgtaatttgaaaactcttttgaaaaatggatcaaaatgtggtttatgtttttaaacttgttaaaaagtttaagttcaactttttttgtgttttcaaagctctctcttgaaaaatggatatgcatgcttgatgaacaaataagttctcatcttcgtgaagttgtttgattcatgttatggaaaagaagatatttgtggtaaataaatatcatggttntatgccaaatgttacacaatac

SEQ ID NO: 169739 - DNA, 276 bp, Glycine max
accttggatgcaactgtgatcggatcccccatcttagttagatcttgacgggtattccagccatcctttatcttgccttgaatgttaaagagcatcccaatcacactgtcacatacatttttctccacatgcataacatcaatacaatgtctaacgtctagatcagaccagtcctgaagatcaaagaaaatggacctcttcttccatatgcaagtcttacttgtcttcttcttttgggtctttccaaatatagtattcaggtgttgaacctgctgt

SEQ ID NO: 169740 - DNA, 69 bp, Glycine max
aagggcaaaaaccaaacgagacataacagaaaaacacacgcccacaatggaggcgaaaaagaaccaaag

SEQ ID NO: 169741 - DNA, 306 bp, Glycine max
  unsure (1)..(306): unsure at all n locations
cgagagcacngaaaggcaaagaactttttttttggcaaggaaaggaccacaatttcataccaagcaaatatatttggaattttgcaaacggcatgctccctatcgacccaggcaatttatgcatgatcaggctagatattcttattaaaaaccatgttcaaaagtctttataatggcatattcatccttggcgccggaattcagattaccttaggaacccttttttttcaaacgctgaaaaatttttaaaagtgatatttttaactgggttacaacaaattttttcccttctatgctctttttcac

SEQ ID NO: 169742 - DNA, 381 bp, Glycine max
  unsure (1)..(381): unsure at all n locations
tcttttctagacctcgatcagtcatgtttcctggccgatgtccactgtcattnttttcgatcaatatcggcgaataatatttcttttgccgagataatctaatgtcttcctgctgaataaatgggaacatgccactttccgcccaaactaaaggtcggtcgagctccaacaaaanaacctaatccacctacattgtaacatttttatgccacaccaaaacaagaaatttcctctaccgtaaaaaaaatattatccggcaacgagcgtttttaaaaaaaaattgctcaatgtcagctgaaaaatatcagtcggggctacttcacgaccgatgtcggctattgagttttcaatttaatccctgaacgaaatctgcatgatgtt

SEQ ID NO: 169743 - DNA, 174 bp, Glycine max
gtcagctttatatcaccgtctatggcatgaaagtagatctctgtctttgtattatcacacctcatgaagtcaggctttgatttaggtttatgagaatggtatggaaactgttactccttactgatatggatggtatggttgaatagctcgtgttatacggcagatgatattctg

SEQ ID NO: 169744 - DNA, 364 bp, Glycine max
caagcaaatgacacacctatgcaagtttcaaattttccaaattttgaagttaggacctatacacctagaaattaactctagaatgagatattaatgaaataatttggcaaaggttaaattaattaaattaggatgatgtgtcatttagaaaattaataattgcattttacgtccaaatttacaagaagaaaaaggattgtattgcaatttattaacaattggtagaaaatgacataaaatggatatttgcaatatggtccctattgggagccctataaaactcaaactaaggctccaaacttatgttttgtgtcaaccctagcttgaaagagaaggagaagtttttgtgttctaactataaaag

SEQ ID NO: 169745 - DNA, 455 bp, Glycine max
  unsure (1)..(455): unsure at all n locations
actcagcttcttatcaacgctcatcttggnggcgaagctccttctttcatggcttattccctagtggatggcgcctnctctcacctctatctctttgtcttccctgcatctccatggtggaaaatcaccattaaaggacctcattgaagctcaaagatccagcctncataaaagccccacaaacaaagcttcatcactaactcttcagtaaattaccagtttggttgacagacttgaaatccaatttcattttcaactcactcatttaactaatagttcacatggactgcaatttacctcaccttacaccacttaaaacacctcataaacacaactcaagtcactctcatcttnaatcacatggctgaatcacagaaaatatgcattacaaggctaaaccattcatcatttattatgataagcttgattattgaccacttactttgattattggc

SEQ ID NO: 169746 - DNA, 419 bp, Glycine max
  unsure (1)..(419): unsure at all n locations
tnttagctcgcaccgcgaactcctccaattcaatgcccgttctgcctaaagcaccctcccccatccagagggaggcccgccaagctccggcttcaacaccggctcgcccagccgacaattncaacgcaatgaggaactttccccccaagccaattgcagaattcaccccactcccaatgatgtacgatgacctcttgccgtccctcatcgccaaccagatggccataataactcccaggaagatctactaaccccctttccatcgaaaaatgcttggcccttaaatacaaggtccaacatttgatagacgctgggtggctgacatttcaagaggatcggcccaacgtgaaaaccaacccgctcgccaatcatggagggggagcggttaatgccattgagtcagataggttgcgcaagtc

SEQ ID NO: 169747 - DNA, 425 bp, Glycine max
ggctctatatatgctcggtggcaaagggttaaaaaataaggttatgggcaacgacaacaatcaaggaagtgggggccttgtagacagaggagtaagatttttgtactagtatggttagacgttcataaagggcatttgggcaaatgccgatgaatttctcctcagattgacgttcacaagaggtggatgggtcatgaggaagcattattttgttcgaatcgcaacaatagtgattgtaacaatggtagtgattatagttgaggttgagcaatgaatttataaatgatattgatggtgtatgtgtcgtgggtgatggtgtcgtcatgttacaccagaaggtgtgaaggcatattaattatagaaggatattttattctttttatattgtatcctatcatagaataaaatataatataaattaatta

SEQ ID NO: 169748 - DNA, 361 bp, Glycine max
agaaaagattttgggtgctctctactgtcacaaagcttttaagcgaattataccaaaactctcacatgatgcagatggtctcatatttcaggtgggtttaatttctttcattgtattaaacatgaagacaaagtttgattttctgatatgttgaataacttaattcgggctcaatgtcatgccaacaagtcgcctattttctgtcatgtggtttgtagccttttaggatttttccttttcccattgattccatctcataccagggtcaacatactactgcaacttattcaatataagaatgaatatgctcttggtttctgtagtgatcttaaaatgatgtccagtaaaagagacaatagac

SEQ ID NO: 169749 - DNA, 74 bp, Glycine max
ctaagagtcacctgcggcatgcaagctttaccaaattgatcaagaatcctttactttcatccttttccagttgg

SEQ ID NO: 169750 - DNA, 130 bp, Glycine max
gcaaccaaaaaaaccggtttattataatgcggggcaacaagccggtatcccctgaacaaaccagaggagacccaccaacgattaaaaagaacccagggagcacgaagaaaccagcccaagacaccccaga

SEQ ID NO: 169751 - DNA, 317 bp, Glycine max
gaactaacgatagtggagagagatataaagcaagttctgcgaagctgagcgcttcaactcgctttccccagctctcagccaggtgacaaacttgtgctcatccctataagcaccattaggctcatcatgaactcaattcatgatctccatcatttcaattattactgtcacgtaattctcaccctctcaaggcttatgatgagttttcagtcctaagtcttcaacaagccaaggccctcaggctttatcacacatttactaacctcatcactatattattcacactccacggtaattcactattcttcatagtgaac

SEQ ID NO: 169752 - DNA, 277 bp, Glycine max
acacacctcctacccccgcccttatcatcaagaccaacatggtgccaagaacctaaacttcaccccaaccaccaaatgaccacaaaatcacaaaaacccattataaaagtaactttcttccttcactcatacaccgccaaatttgcaggagttcttggtctaacgtcccttcattgcggctcgtgcccaactacaaccattatacccattgacaacaaaagctccaaggagcatctctcttgaccggtgaaccctacaaacaccccaataatgggga

SEQ ID NO: 169753 - DNA, 474 bp, Glycine max
  unsure (1)..(474): unsure at all n locations
agcttgtcagcaacctcctcacgtatcttttccctcttccctcggcaacctcactttgttaaaacaccttcaatttataaaaattatgtgaagtaaaaccgcacgagtatattttattaaaattcatcttaattattaattctaatctaagattattatttacttaaatttttattataaattaagggaatccattcccctatacctggttgaatgtccaggcgttgaaatataataaaatgtggacttgaacaagtgcgatgagtcatttttttttctttttatttcactttattttaagaaaaaatattttgaaattataaaatatttaatatcttagaccaagtgatgtgatccaaatcaaaccgttgtctaatttgattggattgggttgagtaataaanaagacataaatcaaactcaattcgtataantttgataagtttgaagaatgagtttcaccacatttgatcc

SEQ ID NO: 169754 - DNA, 257 bp, Glycine max
taataagtccatctatggattgaaacaagcttcctgcctatggtatttaacaattcatgaggtcatttcttcatctagctctgaagagaatgtcatggatcactcatataccacaaagtcagtgggagtaaaatttgtttccttgtattataccgtaatgatattctgcttgcgactaatgataagggtatgctatatgaagtgaaacaatttctctcacaaactttgatttaaggatatgggagaagcatcttatg

SEQ ID NO: 169755 - DNA, 462 bp, Glycine max
  unsure (1)..(462): unsure at all n locations
caagcttgggaaannatttattattacctttcatgtttaanggaccaagcccaattaactacggcaagggaggagatcatgactcatgaggctgttgaaatatggatctaattgaaggaagaagatttgctctaagggtacactataaggcatacatttgccacaacctcatttttggaggctctcatgcccaataatctgctaaaatcccaatttgtgttagcaaaagctcaacatcccatgtcccctcattttgtgtacctaaaacagagctctagaattccagcctactggacaaggttgaattttaagagggtgatgtttttgttaccacagaaagattttattaattaaacaaantaggagaaagaatactccttcaaggatttctactctacaaaacatttctcctttgtagagagtagtgttcacttacaagcataaacataataactttttcct

SEQ ID NO: 169756 - DNA, 406 bp, Glycine max
  unsure (1)..(406): unsure at all n locations
tacacctttatttacatgacaaggcaactagttgtgcatctgaatgtagtgtatgactaaaggcaatccatctgacttacaaacctttgatcctgagatagataggacatttcatagattatttaggcatcattttataccttttgatcatcctgagcattccattactggtgaatctgcgcattctgttattggtgattttgaacatcctgattttgagcattantaatttgagcattctgattctaaatattctgattgtgaacattctaagaacatggcacaacctccaccctgtaagaggactctaagggaaatggctgcacctgatttcacctacgaaagcttgtgcattcaataccctgatgaagatgtcccatatgttcttaaaactggactgggtcat

SEQ ID NO: 169757 - DNA, 376 bp, Glycine max
  unsure (1)..(376): unsure at all n locations
catgcaagcttcatgatgaatcattattgattctattatgnntcgcgataaccaagatgatgacaaaggtgatgaccaacaactcataggtcaactcaagaatgagttcatgatataatcaacaaacacttcaagattcaagagcgaaagttgaagaacccttctcagattctacaagaaagttgatttcatgaatccagaatcaagattcaaggatcaagcttccaaatgtgacaacctttctgaaccttgtgacatgcactcttcctgaaataaaacaacctctcttttcctctaaacttgtcattgaaaaataattatataggataagagcaaaccccaaattttagtccaattagtaatctggaatttcttt

SEQ ID NO: 169758 - DNA, 430 bp, Glycine max
cctataaaactcagcttagaatagggaaagcaacttataagctgctcatatcatgttcggaccaaatatgggttaccgtggccattcgcataatatacatggatgtctcttcattaccaacctgatggatggggaaaagaaaataaatgaccagaacgaatgtcaaaaattatatatgatgctaatgaatcaagaataacaaaatgtggacgaaggaattatatgctgatatagcgacaacactcaccctgaggctacttgctatgccctctaatctctgtgtcaatgtttaattcattcatattccacataacaaaaaatgataaattatcctatcacaaaagtataaatacatgacagactgttagaacttaaaatgttcatttttaacacacaagaagaatacctatgttgacatacccataaccta

SEQ ID NO: 169759 - DNA, 303 bp, Glycine max
tgttattttatttaagattaaaaaaattgttattttatttaagattggttatcaagaattttgccttaatttaattatgctataaatctagtttggtttcgttatcatttggattagttaatgggtctaacaatataaccttcaatgtaaacattcatagagctttagctattttgatatcgatatttccttttgttgaaatattttataatatcaatattatatcttagagtatcataaaaattatgtctttggattatttcttaattacatgtcttctaatatatattgcatttgtgtcat

SEQ ID NO: 169760 - DNA, 269 bp, Glycine max
tcccagtaccttggattttgtacgaccatgccctcctgattccacctggaaattggcgagtggaggaacgcccccgcatttacgcaacgaacataatgttaaacctttaccgatttaaaagctttatatttggggcctacgctttagagtttttcttttgtaagggcttcggtcttctgtctttgatttataatacaacgatctttccttatctgttcctggtctctacccattctcattcatttgcatttttactttcttttctgaaa

SEQ ID NO: 169761 - DNA, 316 bp, Glycine max
aatcatgagaaagattcacgagaaaggttcctccagaagattcaagagtccggaatattccagatcaagattcaagactcaaagattcaagaatcaagagaagacttactccagataagtattaaaaagttttcaaaacattgagcagcacaagaagttttccaaaatcattaccaaagagttttactctctggtaatcgactaccagattatagtaatccattaccacgcgggttacaacgttaagatcttcacaattcatactgaagagtcacatctgttgatgcgcgatgtgccattattttcttctatttct

SEQ ID NO: 169762 - DNA, 460 bp, Glycine max
  unsure (1)..(460): unsure at all n locations
tgaggcgtgcaacttatattcaggctcagctcggttgtttgtctcctcttccatggcctataccctagtggatggcgccgcctnttacctctattcctctgaatatcgctgcatctccatggcggaaaattaccattaaaggacctcattgaagctcaaagatccagcctcaatagaagcccccacagcaatcaattatgtattctctttacgtataacatcacttttttggcgcaagataattctccataagatatactttaatgtagcattgtgtaaagatggaataaaatgataacaactttcgaaatatatttttaatagacaacgctctttgacaaaactcttccttcattaacattttaagtgtataaacatgctgtaatcaaatgcataaatgcgtgtgtggcttctccccctccctcccaataaaatatattgtgattttatcactctaaat

SEQ ID NO: 169763 - DNA, 323 bp, Glycine max
tactaacttcataaggggatcacagcacagagcttcactatgttcttcttcaacctccatcaattctctttgctctaccttctcttccatagaaggtccttattttctttccatgtatctccctacatgccttgtgcctaaatgttttaacatgattctttacagcttccaccgataaaacttgctatataagctagacttgattttctatggttcaaatttcttgttttcgttcttgaaccatgaattgcgtcgagttcacgttcctttgagttctgttttgatattttttgtggcctgaacctaaaccctaaaattcatac

SEQ ID NO: 169764 - DNA, 190 bp, Glycine max
cataatatctcgctacacaaaaaggtgctatgcatcatagcagggagaacttataccgcatttgtccgtcatatgtcccaaatggacacacctgaggaggcggatggccatatccatgtggcttcttgaaggcgatatgtgcacctgacagacattatttttcccttatggaatacagtgtgaccaattt

SEQ ID NO: 169765 - DNA, 412 bp, Glycine max
  unsure (1)..(412): unsure at all n locations
ggaccttaagngccgcagctgcagcttagcagagacctatgttttgtccacggtgcccgagctaaggatactcactaaagctctccgataaaaaaatcattaaagatcatcatttatctctgaccactgatcattattaataggatattgaagcagcggccttgccagaagttttataaattctatccataaagaatgcaacgaccaacattctacaaatgatgtgcatttcatgcctcaatatagcactccacggaagctgaataactaggcgtatggtggatagctcatggatatgttaaaagtatattttataatcatcacatgcttaatacaccttgtgaattggccctaatattaatcagttggggtagatacaaaaatgtgatcacgctaaaaaatcatatgccga

SEQ ID NO: 169766 - DNA, 274 bp, Glycine max
gatacctacacatcctatatgtgaaagggcaaaaatttgggcaaacatcctcaattagaatgttctccataaggctagtttgaagacaactctctcagacttacacaagtttgtttttttttcaccaaatggaaaatcgttcatttgattttttcgcacacaataaatattaacatcctacacaatttaaggggtttggaagggttggacattatatactatgcaacttttatgcacaagatactctgggattaaggagtctaacatgtgattg

SEQ ID NO: 169767 - DNA, 432 bp, Glycine max
tcttctggaccttgaacaggcaactaactcctctttatttccatgctatgtgctcgcgactggtccctctcttcccttcgcagcttgagttcattgtgctaccctacagagctccgcgaaatttattcccgccatactcttccttgcgagccctcttggtttcttgttcaaaggctcgtgcggtggttgcattctcttcccgtaatccggcacactccttccggatgtgtgtagcggccaacttgaacttctcttgcgccagtctcgcctttcctaactcgcttttgagagctcggacttcttccgcctcttgcggtgctatacaactctctatactgacgactttaacctcgcgagccaatctaacctcgatatgaactttagccatcatggtatcaccaatgatgccttacgaatgcccctagttcttga

SEQ ID NO: 169768 - DNA, 315 bp, Glycine max
atttaagtggcagctaacggtgggaccaagcaacgaaatattgaagacgtgcacataatttacggcttgaacatggcttctttgaggcttaagcatgactttctatatatgttacgcttaagcatggatattatggggcttaagtcccatgcttcatagactcaaatattcagcaacataatggtgcttaagtatgataaaaccggtgcttaagtctcaactacacgtgacaatctttataccaacacaagccctaacctttttaaagcctaaggatggaaaatcacaacaaaatttggttgcggggagtcatct

SEQ ID NO: 169769 - DNA, 358 bp, Glycine max
ccttgcttcaacttggactcaccacattattgttgcttgttgaaacagctctaaacttggacacttggtaatagtattcttcttcaatgctcacagcctaggtggcctctttcttgattttggccatcacttggacctttgcctttatatctaattacaaccttagtatttcctttgttcttttgtccccacaaaaacaaccttcttgtcaatggtttctcgacttcgacagggaacatggcatttgtgtcgcatgtaaagcgaaaaaaggtccccttagtccgtttctacggtgaacaacgataaccccaagtattctggggagttctccttcacagacccttgacttgttaatctt

SEQ ID NO: 169770 - DNA, 479 bp, Glycine max
  unsure (1)..(479): unsure at all n locations
agcttgtatagttccccaatttatggttattttgtttgattttcgtaaataaatcttattntatggttaacactgtctctagaacatttctattggatttaatgatgaaatttgtgcattttcaggtgaaaaaaggctaagttttgaattgcaaaatgtagcagtttggctaagctcagtagttgggctaagcgcatatccaccactaagcgcagcttancgcaaaggagaatctggcagagcatcaacatcaaagttgtgcgttaagcgcgagatcaatgcgctaagcgcaacaggtgccttcagccagactaagcgtgaaattggcgctaagcccaatttcacttactcgcgctaagcgcgagggtggcgctaagcgcaacatcacaatttcagagcctatttatagcctgtcttgtgtagaattagggtacaacttttacaatagcttttataacagcttctacagaacgaccatg

SEQ ID NO: 169771 - DNA, 452 bp, Glycine max
  unsure (1)..(452): unsure at all n locations
tgatgccaagactcagtaagaatcagagtttatgcagtatcaagaatcaaagagtcgttcaatcaagattcaagattaaagtgaaattcaagatatacaagaacttcgagaaaatcataaagataagtatcaaaatatttttttcaaaagaaaagattgaataacacaatttgtccaaaataatttttcaaagaacaatcttttaccaagagttttactctctagtaatcgattactagaagacagtaatcgattaccaatagccaacattattttcaaactgattntcaaagcagtaatcgattaccatgagcatgtaattgattaccaatgtttttgaacattgagatttcaaatttcaagagtcacaacttgtgataaaacattttcacacttgtgtaatcaattacataatatatgtaatcgataccagtgttctaaatgtttaattt

SEQ ID NO: 169772 - DNA, 114 bp, Glycine max
acagcgaaagggcacgcaaaacgaggaaccccgaggacaccccaaaaggaggaaggaccgaccaccgacgaagcgagccgccaacgccaaaaagaccagaaaggccaaccaaaa

SEQ ID NO: 169773 - DNA, 306 bp, Glycine max
caagtgaaaataggccacattttttttttttagagggggggaacctcagccaatactttaagcttagaccaagctaaggttatacctaatataaataaatgcctacgggaactctctcactcttctagtaataacactttactttatgtgccctgacctacaaatgtggtatcccacagaacgacccattgttggctccccaaatcacataagggcaccacaacccttattccatgaaaaaaagttttaacctacaatatataaaatgttaaaaggcgcacctttttaaaaagtatcttattaaca

SEQ ID NO: 169774 - DNA, 415 bp, Glycine max
  unsure (1)..(415): unsure at all n locations
agcttccataaaagccaaactaattcatttttgtacctcgnatatttccctctgcctccggttgtcgtgcaatcccttctacagcttgccctgcagcagtgccttgaccaaccccaggtccaatagaagcaagccctacggccaacccagcagcaataacagaagcagcagaaataattggattcatgataatctcctcgtaacctaaatataaaataaagaaatagttaatgatataatcaaccaataaattatgacttaatttttcaattatcaagatttattcggtttaaagtaattaataagaattccgaattgaaaataataatagttattgaactctacgaattacttcgagattntatttttcgtctctacctacatacatagtttntntttgtgaatatgtagaacc

SEQ ID NO: 169775 - DNA, 384 bp, Glycine max
ctttattattatatcgcgaatcatccaaccaaaggggggtctattacagcatgttcaatggacaatggagatggatagccgcccgctggttaagacatcctgtctttagagataaaaaggggcatgaactttctgtacgtcgtatgcctacttcttttgaaacatccccggttgtcttggtacatggggatggaattgttacggccgatgttccttctcgaagggcagaatctaaatatagtgcggaacaagtacgggtaattgtcgagttctatggtggcgacgctaaatggaccacgtatagcgatcccgctactgtgatacaatatgctagacgtgctcaattgggtgaaacttttgaattatatcgtgctactttcgaat

SEQ ID NO: 169776 - DNA, 429 bp, Glycine max
  unsure (1)..(429): unsure at all n locations
gcttaaacgggcatcgnttcattctagtggctattgattacttcaccaagtgggtggaagcagcatcttatgcaaatgtgactaagcaagttgtggtccgctttatcaagaatcagatcatctgccgttacggtgtgcccaacagaatcattacagataatggaacgaacttgaacaacaagatgatgaaagatttgtgtgaagagttcaagattgagcatcacaattcttctccttacagacctcaaatgaatggcgcagttgaagctgcaaacaagaatatcaagaagatagtacagaagatggtggtcacatataaagactggcacgagatgttaccgtatgctttgcatgggtatcgcacttcagtgcgtacttcaacaggggcaacccccttctctttggtgtatggatggagcagtactccct

SEQ ID NO: 169777 - DNA, 398 bp, Glycine max
ttgagccaaaatcctaactcaccataaaccttgacccagtgtgagaatgtcaatccttaccctcggaagcaaaaaataagagaaggaaaatttccaatcaagaaaaaaaaaagagaaggaaaatttccaatccaagagaaagcaaaaaaaaaaaagagagaaggaaaatttccaatcaaaggaaaaaagagaggaaaggaaattcccaatcaaagagtgggagaaagcgaaaagaaaagaaagaaaattcccaaccaaagagtgggagaaagttaaaggaaggaaagaaagctcctgatcaaggattgaaagatatcagaagaaatgtgcagaaaggtctttggaccggacaatatctgtacaatacagaattgtcaccaaatgaacaaaacaaaaag

SEQ ID NO: 169778 - DNA, 323 bp, Glycine max
  unsure (1)..(323): unsure at all n locations
taaaagggaagggggaaagaaggaagaaggaatgtataaaaaagaaaaaagaagagggaggggggaaaaaaagaaaaacaaagaaggaaatactatgaaaaagaaaaaagaaaaggatgggggggggaaaaaaaaaaaaagatggaggggaaaaaaaaagaaagaaaggaaaggggggaaaaaaaaaacaaaaaaaaaagagggtgggnggaaaagaaaaaaaaagaagaaatgtgagaacaaatgaaaaaaagatggagaaaaagaaaaaacgtatgaaaaaaaaaattgggaaaaagtaccaaaaaaaaggggaaaacaaa

SEQ ID NO: 169779 - DNA, 191 bp, Glycine max
ataaaaccctactttctggaacgaattttttaaaaaacgcaaaatacgcttctagagaaactatttcgaattgcgcttgctgcttccgaaacgaattttctatcggtccaatgctgatttttgaaacccccttccatggaaatacactctgcgaaataatcgtttggatttacagacttgcttatacaata

SEQ ID NO: 169780 - DNA, 201 bp, Glycine max
tatgggggatgtggcggctgctgctgtcaccttaatggtatggcataccggcccggcccttaccctatgggtgcaagtttgcgacccacccaataaaggtggtgtcatgttgattgcgttcagtcaggggtcacacccttgcatacattaatgagtggccttcgaactttgtcataaacttctaactttgggtgctatagt

SEQ ID NO: 169781 - DNA, 317 bp, Glycine max
ccgccaccaaaaatggtataaacgatactgggatgactgctctagatacaaactcttgttagtggtaactataaaagctgcctatactgcactctctgataaattaaactctcaagactcaaccctctgactgctgagaatgggggtgctctgtcttgccctttgcataactcatcttatctggggcctggtggcgttgtcttttttaagacccaaaacgcacatctgctgatgcttgctaggggataatagggcagggactgcgggtattggacaggggcacatgttcaagtgcggtcccttccatcggttgttct

SEQ ID NO: 169782 - DNA, 368 bp, Glycine max
  unsure (1)..(368): unsure at all n locations
agcttgtgaaatntgatgtgttgatcggttcctatgaagggaaggtacccaagaagtggcatgcctagtggaactggaggcaaaggagatgaaaaggtggctctattgcttgaattcttgaaccatcttagcaagcatagcacactgatcagtgtgactagaatggttagaattggatgcaagttggtggaatcccaacaccacaaatatggccatgtgacacaaaatgaactcaacatcattttggattatgcagggtgaactaccttgtgtttcctagatatttctgcttagttaacctgtgattgagtgattgtagatctcattaatctaagctagaacattactagaaccaaagtcaacacagt

SEQ ID NO: 169783 - DNA, 435 bp, Glycine max
  unsure (1)..(435): unsure at all n locations
agctttatgaattaaaaatgataatttcattgttatattcattctatataaaataatgtaactaaagttataatatgcatatggataaaaagaaaggttataatatgcatattatactaacaaaatatntgtatataattcattaaatataaaataaaacacacacaataataggtaaactattaggaacacttacccacattctattaaacacatcccttcgatatattttatttaaattttttactataatagaataaagttaatttaaaaatcattatgttaaaaataacaatatttaatattcaattacttttccatttttaaaataaaaaacattggacaacagtacaacctaacatagatttcaattcctttgtgttttcattttatttaattattaaaatacatatttgaaattaaaaaaaatatatg

SEQ ID NO: 169784 - DNA, 387 bp, Glycine max
aacctcatcgtctctcacagtctttatatttgggagccaatccagtccttgtgttcggactctcagccacttatgatagccgccgatgatcccattactgcttcccctaagctctctgtcctttcttcacgccgcatcccatgccttgcgaactccttggagtaccctagcgttgtggtcactgaaacctcgtgcgatgaaaggcgtgatgctttcgtctgatggcactcctctcatgggacatccttcgcatcctgattcttccttccttctagcgagggaaccatttaacaaacgcccctccatgctagccaagagttggtcccaattcgtctttctttttcgacgcacgagcggtgaccttgtaacagatagacgggcctacct

SEQ ID NO: 169785 - DNA, 466 bp, Glycine max
tcaagaaaaagatggtctcagcaaattccttatgtccagataggtattctatcaatagacctccaatctttaatggagagggttaccactactggaaaacccgaatgcaaatttttatcgaggcaatatatctaaatatctgggaagccatagaaatagggccttatatacccaccacagtagaaagagtttcaatagatggtagttcatcaagtgaaagcataaccatagaaaaacctatagatagatggtctgaagaggatagaaaacgagtacaatacaacctataagccaaaaacataataacatctgccctaagaatggatgaatatttcacagtttcaaattgcaagagtgctaaggaaatgtgggacactcttcgattaacacatgaacgaactacagatgttaaaagatctaggataaatgcactaactcatgagtatgaattatttagaatgaatac

SEQ ID NO: 169786 - DNA, 440 bp, Glycine max
agctgggtcttgatttttccttagatctttaacaagctttaaacaatatacttgtccttcatataactgcctttgggcttggcggccacgctcaacaaagtactttcgacacctactgtacgttgatttgaccaatgttgttatgggaatgttgcgacaatcctttaaaaccttattgatacattctgagaagttggttgtcatgtggccatatcgacgtctgttagctctttggcaagtgtaccaaattgctcgtagtaataatttctcggtaagccgagtgttgtaccacagggattttgttgcacttatgtgaagtacttttcagtttgcaaattgtaaatatagtgtataaaattaaaggcaatttaaatctatgtagctacttctaaattaaagaaaactaaagcaataaataaagaataaagtctataaaatat

SEQ ID NO: 169787 - DNA, 328 bp, Glycine max
  unsure (1)..(328): unsure at all n locations
tgtaagttacanaatagagaaattctagagaaataaaatgctttcttttgtatttaatcattctattagattatgtaacaactaccaactaactttaattaagataagttttattctctttatatatcaaggttcggacgtgttggcatggcatcattaattggtgaaagaagattctctttctcttctctgctatatatatatgaaatatatggatcaagcttgcactatggtttataggcggacaaaataatgcgattaaatgaataactgcagtataatctcaaggatcaacctagcacaaagcttgaaaatcgactaaaagtag

SEQ ID NO: 169788 - DNA, 443 bp, Glycine max
  unsure (1)..(443): unsure at all n locations
agctntaccaatccctctgtgttgaatatctctctccactngncatccatcaaatcttaaaagggtctggtctgctgcacaaagctgtcatgcattcaatgaccccttccatcttgactcctccttaataccacttatttgtcaatgtatagtgacacaacacaagcacctcatccaattggagttagggtttcagacttttcactatttagtatttagtcacacctcaatcacttcaattcgttcttacatatgtacataacgttggaggaagaccccacttcaattctaatgagatagaatacaggataatatgcagaaactgcaaactaaataaccctttcagacttttactcacataaagtaaacttgtatatntattttatgacattaatcatcttatcttatactctctttgttatatatattcttattggctaata

SEQ ID NO: 169789 - DNA, 478 bp, Glycine max
actcaagcttgtgaaagttaaccccacaaccacaagtgtgaaatctcatttcattatttattcccacaccccactttcataaccatcatttttcatgcaacaatcactcctattagcccattatattccaagagtttcactgtatgctgaaatatataattaagaaggttaaaaatctatctattttcggctcattgatgagttcactcttgcttcaagttgatatcattgtctcctgatctggactcaactgttttgttgtgctatctgagaagaaagctaagagtgctatgaatcctcaagcacacatacaaatatagtcatgtaagttaccttagccagcttaaggagaaacacataaaaatttcaaaatctcaataagttttctgccttgaagtcttcttcactatcattgaggatagagtttggcatcaatcatcatcatattctcaacacaagaaggaagaatgggagatct

SEQ ID NO: 169790 - DNA, 399 bp, Glycine max
  unsure (1)..(399): unsure at all n locations
agctagaacgaatataagagacatcttctttttcttggngattcttgactccatctcattgaagcgcatgtccactcgtagttccaaagagacggactctttctccaacatatgcttgaagaccatcatacctgtccaaaatctttgaaagaagagatgaatcttctccatcatgtccttcttcgccaatatgtccagcaccctttttcatccaagagccatcatgctctttttgataaccaaaggatgcaatgactgaagcgcctataaggatctcttgattggaacatagggttcaaaatcaatatggatgttaaagtgttgaaggacaagggtgactatatgaggatatggcacaggagcattcaatcacaatgccttatgcatgtgatatctaac

SEQ ID NO: 169791 - DNA, 421 bp, Glycine max
tatgaatgaaaatctcatgctagcatgaatttgctttcgtcacacagcactttagaggagagaaggcacgggtactaattcccttttcttaaaatttttcatgtacatcatctaactatatacaaacaaggccctggacgcctacgtgtcgcgctgaggttaacccaatatcccgcccaaataagttaccttcatctacagtgcaccactacatttcccattctcagcctttgcaatacgtgttcaaacttgtccaatacgttactaaagcgattccaatacgttttccttctcccgatgtgcttgtgaaacgaaatgtaagcatctattgggcatgcgttttgcattgtcatatattgttgagacctttgcatctctcttctttagaaattccaagcgcatttttttaccatttcacttc

SEQ ID NO: 169792 - DNA, 427 bp, Glycine max
  unsure (1)..(427): unsure at all n locations
agcttgttattttgatttcaagagatatatcttgacagggagtacccacccggggtctctaagaatggtatgaggacactacagagnatgacagctagcttccttttgaatggggatgtactatacaaaagaaaccatgatatagtgttgctttggtgcgtggatgcaagcgaaactaagcagatactaagggaggaggtgcatgaaggctcctttggcacccatgccaatgggcaagccatggcccgaaagattctaagggctggatattattgtctcacgatggagaatgattgttgtattcatgtaaggaaatgttataagtgccaagcttttgcggataatgttaacgctctgccagtgttgttgaatatgttgtcggcaccatggttgttttcaatgtgggacatagatgtgattggggcta

SEQ ID NO: 169793 - DNA, 457 bp, Glycine max
  unsure (1)..(457): unsure at all n locations
tattatgtgtggatgattataacacacacaaattaggaattgatctcataagcttattatgtgctcgatttaatatatacaagttttgtgtcatgtagatgataactgctaaatatgagttatttttataataaaaatatattgaaaatatctttgaaaatatttatttagcagctatttttgtattaaataataagaattgatatttttttatttacggcttgcagatatggaaaggagagattagaagagaaaaagatcaagagaatatctaaaatatcaggaagtctcagaagatatgattaaaagcaaaacaaattcgaaagatataaaaaatatcaaaatagaagatttctagcatttggcccangtccactacaacaactatataagaagggagtcaagccaagcagaaaaacacaccacagaaccccttctcgtaggggtgtcatttact

SEQ ID NO: 169794 - DNA, 424 bp, Glycine max
  unsure (1)..(424): unsure at all n locations
agcttngcaatgatgtgtgtgagaggattgtgtttgatgtgnggatgggttgcttttcaaagattgctgcacaagctgtgatactcacttttcttcagtttgggaagacggccacggagagtaaaaacgaccctattaagcttttgaagttgttggatattttcgcgtcgttgaataagttgaggctggatttcaaccggctttttggtggtgcgccgtgtgttgagatacagaatttgacaagggatcttattaataacgttattgatggggctgcagagatttttcgcgagcttttggttcaggtggagtcgcacaggcctgatccaccctcaatggatggttatgtgcctgagattggtgagctttatcactgattactgtaacaagcttcttggggatgactataaaccaatactgactc

SEQ ID NO: 169795 - DNA, 419 bp, Glycine max
  unsure (1)..(419): unsure at all n locations
cacttctaccctatattgcgtataaaatttgtttaagtgaccaananaagggttcaacccccttacgcacttctctctctccctccaacttgctgaagaaaattatatccgcgaagaaaaccccagccgaggcgctttcgtaacgttctcgtcagtaattacgcgacaagtttctacacgtcttcaaaaatcatcgaccgttcttcattttcttcaatactcaacggctaattacttcaaaccaagctattccattcattctatgtacccgtggcggtcccaattacgcttcatgaattttcattcttgtttcaattactttatatacccccttatgacctgcttaagccatatatttaagtcatttctccttatatctaaaaataaaatacacttccaccaatcgtctgaactgtatc

SEQ ID NO: 169796 - DNA, 435 bp, Glycine max
agcttgcttctatagtccttccaagaactattctgggaaacttccaagttagtataccaggtgattgctgccccggccaaaatctcttggaaaaagtgcatcaagagtttctcatctcttgagtatgcccccattttctgacaatacatctttaagtggttctggggacaagtggtccctttgtacttgtcgaagtccggcaccttgaatttgggagggatgatgacgtcgggcactaagcatagctccgctatgttgacaaagggataatcgacgatcctctcaatggccctcagcctttcctctatgagatcaaaacttctctctttcttccatggccagaggtagtctccctactgagaaatgcaaaggttgcaacgagcggtgttaaggggctcctgctgcattaggctgaggcatgccaccaaacgctgg

SEQ ID NO: 169797 - DNA, 256 bp, Glycine max
agctctcgcatacaataacactcatcatgggcggcatgtactggagacatcttgccccgaatatgaaggactaacccaaggcggaccttgggttttgcaagccctttggaggattgactcgggaaatgtctaaactggggtttgggcgccatgctgttgcatacatgttacttaccatgggtggaacatactgcacacttattggcgtgctcttgcgtacatcgcactcattgggggtggcgtgtactatagacgt

SEQ ID NO: 169798 - DNA, 419 bp, Glycine max
  unsure (1)..(419): unsure at all n locations
agctntaacctcatcgtctctcacagtctttagatttatgagccaatccaatccttgtgtccggactctcagccacttatgatagccgtcgatgatcccattactgcttcccctaagctctctgtcctttcttcacaccgcatcacatgccttgcgaactccttggagtacctttgcattggggtcactgaaaccccatggtgaggacaggattataatttatacaaccccttgttcccattaagggaacatttggaaatccttcgcatgaagatagaatcctgattcttccttccttctagcgagggaaccaattaacagacgcccctctatgctagccaagagttggtcccaattcgtctttctttttttcgacgcacgagcggtgaccttgtagcggatagacgagcctaccttct

SEQ ID NO: 169799 - DNA, 466 bp, Glycine max
  unsure (1)..(466): unsure at all n locations
tgtgttcctacanatgctgaagaacaacccatttagtggtgctgctcatgaagatcctatacagcacctgagtgggactggttgtactcactacctgagaacaacattactacatggaaccagtgcataagtgccttcttaaggatatatttttctctcatgaagatggatcagtacatcaaggacattggaaacttcgtgcagaaggaacaagagactttacttgaagccttggaaaggctgcaagagataattagaagtttctcacatcatggcttttcacctcaaaggctagttcacattttctatggtggagtgtcctcacacaattggacaagtttggatgctacttgtgagggtaatctcattttaaaaccccttactaatgacctcaagtgtagaagcaaagactntgactttgatngtttgatgatgccatatgnatgtgatgttttgataccttatg

SEQ ID NO: 169800 - DNA, 396 bp, Glycine max
  unsure (1)..(396): unsure at all n locations
gcttgaatgaggaagtgttgaagggtgattacttcctgcttttattcgncgaccacagagtggtacctggagatatgtcgcgggggtcacgagaccttggggacgttaggtggggtgctattgcccacaaccaagcttgaccaatcccgacccaacccgggcatagtcagtcagtgagaacctgtgatgtacctaaacaggcgaggtcctggcagtcaacagataaaaggaacaaagaccacaaagcaaggaggcttgtgtggtggctggccagctgtgaactttgattgatatatgggatatggcctctgttaatcgattaccaagggtggtaatcgattacaaggcttaaaaatgaagacaggagactaagatggtctctggtaatcgattacc

SEQ ID NO: 169801 - DNA, 461 bp, Glycine max
  unsure (1)..(461): unsure at all n locations
ctacggattttggtctttgctggcaaaatgagtgaagcgttgtctttatagaggcaaacttgaccatcctgcttggacgaatgacacggcatatgaagagggagagaatgaatgagaaacccatgctgcgactatcattcctacatggtcaaactcccctaccatctcaacaacattattactcagcccataactacccttctccttacccaccaccctagtatccacataggtcatccctgaatcaaccacaaaacccacctaccacacaaccaatgctaaacaccacctttagcactgaaccaaaacaccaaccatgaaatgaattctgtagcaaaaaagcctaataaattcacccccattctggtgccctatgctgacttgctcccatatctatgagataattcaatggttaccataaccctagccaatgtttctcaacctnccatttttcgatgata

SEQ ID NO: 169802 - DNA, 441 bp, Glycine max
agcttgtccagacaattaactacattgattgttctatataattcaattcgaagaagaaaataggaaaaatcttagatacagtttcttggttcttgatgttttgttttccaataaaaaatggagtttcacttcagaaatcccgcataatatatagatttgcattaaaggatttcatggattattgaaattaaactccaattctaactgaaaaacagtaattgcacctaaagaactgtgtaagttttgtccaaagaaatataccttgaaaccgcgaaacaaccgcagacggcaagaagcaaacctcgttgaaggaatcatatccaaccaaaagacataccaagtaaatgattccacagacaaccaccactgcagaagtgagaaacggaatgctttcccaccattgactcatcctagtaggcaacccggcctgtgtcaattaag

SEQ ID NO: 169803 - DNA, 459 bp, Glycine max
  unsure (1)..(459): unsure at all n locations
tctatttacatataanaaatatatcgtaaaaagctatttgtttattgcaagatttatgatttcctttctctactcaaaaacctaaatcctaaatcctaatgttttttcgaatgccatgcattttttttttactcgatcactacagctctatactaaagctagatcacactaacgtggctaaaattcttcctcgttcgtatattatttagacacctgtcaatttgattttttttggaattaatcctatgtttagtaaaagacaaaatggaaagaaataaaataaataggaaaagaaacaaacaagcattttttattggttggggaaaaatacacaataattgactcataaaaacaaaagtttaatcttttttctaactcaaattttaaactatactcttctctcttattcttcatccttgtattatctttgaactcaaaattaaacctttctttcctctc

SEQ ID NO: 169804 - DNA, 428 bp, Glycine max
  unsure (1)..(428): unsure at all n locations
agcttgagatgaggaagtgttgaagggtggatctttctgctnttattgttgaccacagagtggtacctggagatatgtcgcgggggtcaggagaccttggggatgtcaggtggggtgctatttcccaaaaccaagcttgaccaatcccgacccagcccgggcatagtcggtcagtgagaacctgggatgtacctaaacaggcgagttcctggcagtcaacagataaaaggaacaaagaccacaaagcacggaggcttgtggtggctggccagctgtgaattttgtgtgatatatgggttgtggcctctggtaatcgattaccaagggtgggtaatcgattacaaggcttaaaaatgaagacaggaggctaagatggtctctggtaatcgattaccacggggtgtaatcgattaccaggcttganaatg

SEQ ID NO: 169805 - DNA, 433 bp, Glycine max
gggcttgaggtacttacccgttgaagactgaagataacgtttatcgaacgatgaatcttgaagaacggtcgagaatcttcacgtaattactcacagaaacattacggaaacgttgcggcagcgcctcggcttagattttgttcacggaaataattttcctcagcaatttcgagagagagagagagaagtgcctaaggagctgaacccctttcttcttcacttctccccctatttatagcaaaataggggagaagcttgaagcccagctcgcccaggcgagcaaggttgttgcttctggaggaatcttctggagggcccaagtgggcctgcgtgctatttgcacccccctttttactaaatgcaccccccttctatttttttggaattatttttccgtaacgttacgaaactctgtgaatttcgtaacgatact

SEQ ID NO: 169806 - DNA, 437 bp, Glycine max
  unsure (1)..(437): unsure at all n locations
agcttaggttatggatcactctatggtttctttgaacctcagtgtatccacaatgcaaagaacaaacgtgaagatcatcaacattacattcaaacatgggtcaaggaatcacaatgagaagtgtacttgggaccttacctaaatcagtaagttgaattgatgttgtacaatatggatattatgtgaattattgttgcctaactaatgtttttcatcttcaaggcacattancaacttgttgttcggtgtccacgggacaatgttgttgtttggttttgttctctgcgtaagaagcctgatgttaacatcaagactgtagtgaacatgttagttttaacattaaaagtcaattgaaatattgcaattgtacggtaacaaaacaatgattatttgattatattcgctaacatcatttttaaaatagtgcaatgaaaaca

SEQ ID NO: 169807 - DNA, 411 bp, Glycine max
agcgagagccagtttctatacctatctaatagccaagctcagctccgtgagatgagaagccagagctcaactacacactccctatatagctaagctcacccctatgactcacaacatgacgatacaacctcaagaagtccttactacaaagactagtcaataggcctcgaatacaaggcgaacaccctatactactagaatggccagaaaacaaggcccagacaaaggaaataactattctaatatttacaaagataagcgggctcatacttaggccatgggctagagatctaccctaaggctcatgagaaccctagggcctttcctaggatctctagcccaatcaacctggagtttctacccaatgcccttacggcgtaggattacaccatcctccaccctcaaacttat

SEQ ID NO: 169808 - DNA, 443 bp, Glycine max
  unsure (1)..(443): unsure at all n locations
agcttagaaggagaagaagacaacgagattgttatnacaacgcgaaggagacgaaacatacctaggtatggtggcgaaggagaagaagcacagagttgtcacgatgctcgagtgcgacgaacacgatgctcgagcttagacaaaatgattctcagatggagaacaaacaacttcaaggtaaatggacaacaaagagagcaagaaagcttagatggagaagaagacagcgagaaggagacgaaacatacctaggtatggtggcgaaggagaagaagcagagacttgtgacgatgctcgagtgcgacgaacacgatgctcagatgtagaacagagaccttcaaggtagatggagattagaagaagaagaagagagcgtgaaagcttatatgaagaagaagacaacgcgagcttcatagggttcacgaatatttttaaaatataag

SEQ ID NO: 169809 - DNA, 462 bp, Glycine max
tcagcacaataacattatgactgagaaatgatagattctattatcaacacaaaaacatgattcaagagtagatttataaaatttgaaccatagaaatgcaaaaacaagtgtagatctaagatataatcggtttatattttagaatctactcttaacagcaccaaaccataggacaatggaggatatacatggagaataagatgaagaacaaggaattaaagtgattcgatcaaactaaaagatagaggaagcaaaagaacatcacctagacgaagatgctcttgataccacatgatgtagctccatgtggagcttgtaggtgttggatcttcttcatcaatggagtcctttgcttcttgaagatcttgacagcagaatggagaatgaagaaagatgatttatatgccacttcaacgagaagatgagttaagaagaagctcaccaccatatgaagccatggat

SEQ ID NO: 169810 - DNA, 431 bp, Glycine max
  unsure (1)..(431): unsure at all n locations
agcttaaggatactgtgtgagtgtataaacttttttaaatatgctcgtatgtatgtctttaacctcatttagtttggatgaatagagcacatattctttatgtaggttcaggacatttcacttctcttcccctcggttttaaattttaatctctattagctaattcattctttcttataactcgtatgatcttcaccagaatgatcctctcaagtgaattttacatggtagggtttgaagagagtggtaaacacaaagaaccttaataggactccacttccattggggccctataaaaaaattatggagccctattcagcgttnttcgttcacttgccttatcatgtgaaaaactgacatgagaacatctattttacatattaaatatgtgttgggntttagctttctttttccttcttttctctctctct

SEQ ID NO: 169811 - DNA, 429 bp, Glycine max
  unsure (1)..(429): unsure at all n locations
nggaatagtccgagactcccttgtatagacgctaggtcttgttgtatatgtcgacgacattgtgtcagctctgtacatcatttcacgtcttatatttccatatatctgaacttgcggcggttaaatggtcaggatccctgtgtgcaatattatcactccatctttatcttgtgaccctcctattttctggatacaacggatgggatcggctcctacaaattaaaatatgggaaacctaaatggaccattgtacaccaatagaacgtgagttgccatatctttcccttcatcagctattgagccaaagaagccttcttagaattatgaaccctatgatcctccaatagcacctgatataccccgggttgacattgcaccaaagtcactccctatctttacccaatcatggttgcctataaacccaccata

SEQ ID NO: 169812 - DNA, 442 bp, Glycine max
  unsure (1)..(442): unsure at all n locations
agctntaattgatgatgagatgtctaaaaatattgattaattattaagattttccatttcaatcatattttttaagatgctcaacccaccataaattaatacccaataaattaataacttcaaaaatatttttttctagacaaattaatatgattataattattttagtaagttatatatatatatatatatatatatataaagagatatcaaattatactattgtaattgtgataattattatattatttttataacttgatatataatgtgatttttattgatataatcattgaattatatttacatattatcaaaattatttgtgttaaattttgttaaaataactacaaaaaaataatcaaatgatccttagtatattttaaaatatttattacattagttttaatccatatgtaataaatgattgtaaaataatatg

SEQ ID NO: 169813 - DNA, 463 bp, Glycine max
  unsure (1)..(463): unsure at all n locations
ntcaaaagatgatgggcaaaacagagttgatgaaatattttatagaagccttgtcggttcgctaatctacttaaccaacttaaggccagacatcatacatgcagttagcatcgtgtctagattcatgagtaacccaagcaaagcacactttgcagcagccaagagaatcctaagatatgtcaaaggcacaaaggattttggcattttgtacgaggtagatagagactttaacttgacaggttatacaaatagcaactgggcaagaagcacagatgatagaaaaagcacaagtggatatgtgtttcttctaggcaacaaagcaatatcatgggcgtcaaagaagcagaatacatggntgcaacaagcgttgcgtgtgaagcgacatggctcacaaaaattctgcaagacgtacaacaagactccaagactccaacagttattcattgtgataatatgtcagcta

SEQ ID NO: 169814 - DNA, 441 bp, Glycine max
agcttgcatgggtaaaatgggatttggtttgttttccaaaagaaagtaggttctaggtgtgaagcatcttgaattgtttagcaaagcacttcttggtaagtgacggtggcgggtgttgaatgaaaaagggactctttgggtaagggtgcttaaggccaattatgggaaaattaaaactaatttgactatccagaagtgcaggattgggtcccactgggggaaggatatagtgaatatcactaaaggggggcaactaatacttggtttgagcaaaatgctagatgcaagattgaggacgagaaaaatgttattttttggagtgaggtgtggttgggggatgtttctttgaagaacaaatttatgaggttgcactctatttctcataggcaagattatgaaatgggggaatgagtgggatggtagttgggtttggaggatgca

SEQ ID NO: 169815 - DNA, 462 bp, Glycine max
  unsure (1)..(462): unsure at all n locations
cgctctaaatntacattgatgtttgtatttatgggaggagtgtttatgccattattgctttaagagtagtatcccactggtaaaattaactttccaaatgtttgccttcgcaggaatggccccgaggaagcttgcctcaaagaggtccaggaaggacaatgcggccgaaggaactagttccactccggagtacgacagtcaccgctttaggagcgctgtacaccagcagcgcttcgaagccatcaagggatggtcgtttctccgggagcgacgcgtccagctcaagacgttaaagaagcgctactaggaggcaacctagtaccttttaaatttctgcctgctattagatcactttttatagtaggacgcacctagttgctcatgatcctgnngaattaaataaaacaagcgcaagctcggaatgtagtcatacctcacacaatatatatatgtatgtttagg

SEQ ID NO: 169816 - DNA, 425 bp, Glycine max
tgcagcttggactcttggaatgggttaaatttttttcttaaaagttgagacttttagaagaatcttcagaaacaagtcacttgaagaaatgtgacttttagaaatgtatatttcaaaatcagtcactaataatcaattaccattaaggtgtaatcgattacacatcaacatatatgactctccattttgacatttgaaaattaaaacgtttagaagatctggtaatcgattacaagtattgtgtaatcgattacacaagtttaaaatactttaaaactgtttaaacataagttataactcttaaaattcgaaatcttaacattgtaaaacactggtaatcgattactaccttctagtaatcgattaccagagaataaaactttctggtaatgattctgtgaaaaattcttgcgctactcaatatt

SEQ ID NO: 169817 - DNA, 439 bp, Glycine max
agcttgtagagttatgtcttgtatctgctttatcttatacaacctttcttgaatcgattacacagttttttttagacaatgattgatttattcaagagtctctaatttaatcggttaccatgtgatatgattgattacttctctttctataagtagttcaaaagtgaaaaagaacactttaatcgattactttgaggatttaatcaattgcattgttcttgagttgtttccaagtgtttgaactacactttaatcgattaaaaagataatctaattgattagtttattgaagtaattgattactttatagatttaatcgattacaagaggttatattgttttctctataactaaccaacttgtgttctctttaatacacaatgaaaaatatagtgaaatgagctaagatcacgtgatgctattacgtaaagaatgttat

SEQ ID NO: 169818 - DNA, 442 bp, Glycine max
  unsure (1)..(442): unsure at all n locations
tgtgagtaacaactnttgtgtnttcattgttggaaaatgtgttgtttttatgtgtttgcttgcggacttgcaaaagttcaagtttgctacgagttttgataattgctttctatatcttattttgtgaccaaatatatttatttttcattacaataggattctagatttcttaatctgtaaatacaatattataataaatgaataaatgttgttttggattaatttccacatgaagggatgaagatttagacgagaaaagattgaagttgtacaagtgcatgatcagatctcaagccatgaattacgtacacaacttaagcaaggaaacgtccagcgaagataaccttcaagttcaagatcagaccttaagccatgagtcgcacaacgtaaactcatcaacttcctgagaagatacgtcatggagcttaagtggcgactacct

SEQ ID NO: 169819 - DNA, 440 bp, Glycine max
  unsure (1)..(440): unsure at all n locations
agctngaaggacacgaagatgcttcttctgttttattatggaaatccaaagtgtatcttcctgaccttggaaagggcttgggttgtgtaattcaaacaaaggatggaggctacttggcatctatgaacccttttgatatcgctgtggctagaaaagatgctccaaagctagctatgcagatatcaaggccttttgtgttggcaatggcatcacaccaatccttgacagggttcgagttgtttcagaaattggctgacattggctttgatgaactcagctccaaggttttgtccttaatgccaatagatgaaatggtaggcaaaactgcagaacaggttgctttcgaaggcattgccaatgccatcatacaaggtaggaacaaggaaggagcaagttccagtgctgctagactagtttcttactttgaaagcatgggaagt

SEQ ID NO: 169820 - DNA, 347 bp, Glycine max
tatctaaaactacgttagaatcatttcttgaatttaccgccatctccatggcttcttgttcaagtttcaacaaatctgaatcagcacccctatggaccaagactgcttcccatgttacatcatctgaggtctgtgttccctgcacatcttcatgataatgcattcgttgcagatgttggcctcggtctagattctttctagatattataaaccatctgagattttgttatctttactcagagcattgttactcagagaagcatggataaatctaccatatgagataagtcagtacggaatataaagaatgacattttactctctattcactcttattctgaattcat

SEQ ID NO: 169821 - DNA, 435 bp, Glycine max
  unsure (1)..(435): unsure at all n locations
agcttancaagcaacaaaatgctcatttcatttgtatcccaatcaaaacccagctgcagaaatctctgttaaaggccaagagaatgcttgatcaaaatcatgaatatctagtaatatatcaatatttaaaggaaacagcatagagtaatagacctaaagaaaattgaagggcgaagaatcaaactaccttagaagcaatggtaatagaagtaggaaaatcaaatataatcatttaggtagcatttggtgaggctgtacaaaaggttcatagattcattaattatgatcttttgaatgtttaatttgtaagtaaagctttagtggccacttgctcctatagatcacaaaagtagtggtagtagaagaggagagggcaacaaaagcagcagaagtaccacctcctagtgattgtagtggtggtgtaaaataacatga

SEQ ID NO: 169822 - DNA, 427 bp, Glycine max
  unsure (1)..(427): unsure at all n locations
tcgagctgcnttgtgtggcaagttatatactagcttatattgtcatgacaacgcacgtgatcactcaatggataggtaaatctttcatggacttcttaatatctactattggcatgcatttctaaatatctgntagataattgcagaaaagcaccattggaaatgatgtgtatgcacggcctaactatacagccagttgggccgatatgcatgtcaccttcatgtaatggacttacaatggcaaagaattattgcaacatttgcaaattctttgatgatgaaagggacatatcgattacttcttactgtattttgcatactcgcattctaatgtccatagtagttggtactttctttctgaagctagcacaatcgtaagttacagtaacccataatccttctcttgatcggacttaaattgattcat

SEQ ID NO: 169823 - DNA, 337 bp, Glycine max
caggactatcaagaataatgcatcattcttgcactgattgtgagagttggaagccatcttctaataaattcctagcctcacaggggtcatatcaccaaggctccaccactggcagcataatcatactcccttcatgtgctagtccctatcaaatattataaggagttctctaaatctggtgggaggacagctgcaccaatttcttgaatttttcccgtctcatcagcttttcactaagtgcctgatgcctgaaagttttttgaggtttggctcaatgaaggaaaattctcaaaacatctttaagtattccacaaaatggcctggagctagattcacc

SEQ ID NO: 169824 - DNA, 421 bp, Glycine max
agctttgcggatttggtcttcgctggtgtattgatcgaagtgggtctaaaaagaggcaaatctgataatcatgctttgataaaaaaaactggggcaaatgaagagggtgagagtgaaggagaaacccatgctgcgactaccattcctatacagccaagtttcccaccaacccaacaatgtcattactcagccaataacaacccttctccttacccaccacccaattatccacaaaggccatccctaaatcaaccacaaagcctgtctactacacaaccaatgctaaacaccacctttagcacgaaccaaaacaccaacaaagaaaggaattttgcagcgaaaaagcctatagaattcgccctaattccggtgtcctatgatgacttgcttccatatccactcaataattcaatggtagcca

SEQ ID NO: 169825 - DNA, 280 bp, Glycine max
ggaacacacacctgcgcgagccccgaggacagcgagaccaaaaatagactccgtgtactctgcaccaaaatgcgaacatgcgagagcaaagagacaaaacatccaacagagcagagcaacatatgcttatgggatgaaaacacaacgtcgcaaaaggggaacgacgggctgctgatgaaattgtctcataccggaaaagaaaatatggaagtaagcatccagggcgaaaagaccacacgaggaagcaccgggatcacaaaaatacaacaaaatcacgcaa

SEQ ID NO: 169826 - DNA, 441 bp, Glycine max
agcttcttaccgttgtagagaaaagaaaagattagaaaaaacactttttttatatgttagggaaaaaaatagacagcagaatgaaggacatgaatgccttaaaaaattgttcaacaaaaattatattgaaggcataagaaaatttaatctagactttgaattaatttgccataaaatatttgaaataagtacaattgcaccattcacttcatgaaacaaatataatttttattaaaattctaaatttctttgatcaaggcacatgattagagtaaatatatttggcagatgtttatcacaaattacaaagatgggtctccgattgggggtcacatttgcaggacagtgtatcaaattgcgttatttgtgaattctctctgatttttgaactaataatcatgttctagcatatgactttctcgaaactgattgatctacaaa

SEQ ID NO: 169827 - DNA, 430 bp, Glycine max
  unsure (1)..(430): unsure at all n locations
agctngngcgaatcaaatcactcctgcattttatctctagcatgcattctttctttctttacccactcctcatgtttggttttttaggaaaaacaccataactaaacgcaccacaaggcatccctatcgcaccagatccaaatctagaacgatgggtgatcaagaggagacacaggaacagatgaaagccgacatgtcggctctgaaagaacagatggcttccatgatggaggccatgttaagaatgaggcagctcatggagaaaaacgtggccaccgctgccactgtcagttcggctgccgaagcagacccaactctcttggctaccgcgagccatcctccctcaaacatagtaggacgaggaaggaacacgctggggcatgacggcaaccctcatctggaatacaaccgagcggcttacccttatgga

SEQ ID NO: 169828 - DNA, 463 bp, Glycine max
  unsure (1)..(463): unsure at all n locations
atgaatctaagctttccaaagatacggtaaaatctgggacttagccatggtataagtctttacatattgcctcccttgcccagtattatgatcagccgatgaggtgcttcacctttgggaacttccagctatcacccatggtagaagaatttgaagaggtcctacggtgtcctatatgggggaggaaaccatacctctttacaaggttctatccctcattagctagaatttccaagatagtccaaatcttggcacaggagttagaccacaggaagcaagtcgaaaatggggtggttggaataccgagaaaatatttggaggcaaaagcaagaatcttggcaggtaaaggcgagtgggccccgttcatagatattctcgcactgttgatattcggaggagtccttgttccgaatgtggatgggtnggtggacctggcacngatcgacgntnttctcacctatca

SEQ ID NO: 169829 - DNA, 434 bp, Glycine max
  unsure (1)..(434): unsure at all n locations
agcttcatgatgttgaatcaagattgattcatggagttttgatgataacaaagatgatgacaaaaagcctaagagaatgagttcaagattgaatcaagaacacttcaaaaatcaagaggaaatttgatttcaagattcaagaatcaagtttcaagaatcaagaatcaagaataatcaagttgaagattcaagaatcaagataagtactaaaaagtttttcaaaacattgagtagcacatgaatttttcacaaaaccttttaccaaagagtttttactctcttgtaatcaattaccagtttattgtaatcgattaccagtagcaaagattgttttcaaaaagctttcaactgaatntacacgttgaaattcaaatntaaatgtgaagagtcacatcctttcacanaaatgctttgtaatcgattacaatgatttg

SEQ ID NO: 169830 - DNA, 426 bp, Glycine max
  unsure (1)..(426): unsure at all n locations
tattctgattgtagggtcgtaagagaggataacaagctcatccaaacactnttaggaacttataatttaggattctgttgaacaatttttgataaggcacctcttgatcagaggatgatggaagacaattgataagatacacaacagaagtaacaacatggtcccaatactcaagagacataaaggcttgagataacatagtgagggcaatttcaactacatgtttgtgcttcctttccacaactccattctgatgatgagtgtggggacaaatcaatttgtgttgcacactaagttctacaagaaatttagtaaagggtatgtactcccccctcctagttagactcaatagctcttataggtaaattaaattgagttttaactaaagtgtgaaactgtttgaatagatcaagagtctcaaattta

SEQ ID NO: 169831 - DNA, 417 bp, Glycine max
  unsure (1)..(417): unsure at all n locations
agctngtattgattgcgaatttacgaatgtgggcagcttttatatatatatatatagagagagagagagagagctatgttattattacagtaagattggggcattatttttccttccattgattcacatgcaggctatattgttattattattttttttttgagaaagttatgttattactgggtaaagattggggagttatttttccttccattgtttcacatgcaggctatgtaatatggatatcatttcgcacgtgcagcaagtcatttgctttgctttccatgatagtaggttgctcatggaaacttgtcaagaagcaaaaaatttgcggaagattgtgactcttttctacctcgactgaacaattttatccatgtctatgcattatgtctccgcataagagtgggctggggg

SEQ ID NO: 169832 - DNA, 446 bp, Glycine max
cttaatttctctttcgatatatgcagctcagtttgcagtgcctctattggtcgcctggcctcattatcaacggtaagcgtattcaccatccgcagaactttcgtattagcaccagaaaaatcaccatgaccccactatataaggaaaaacagcgtgtagacaactgataaatgaaaaccaaaatctggacacctttggtaaatgagcagttcaacagtaacacatgacatacataataaatgaagaggatataatattataaacatgacttttctagtatgtaatagtgcactactgtgctttaagagagcaccaagccaccaacctttgcctctaataatgaaatctctgaccggagccggtcactctccctctacaatgacttcactcttcttgcttcactgtgcaactttatattaagtaaatcgatttcctctaattgacaa

SEQ ID NO: 169833 - DNA, 439 bp, Glycine max
  unsure (1)..(439): unsure at all n locations
agctaacaacttgatttaatattaagatatatatcttaattatcaatttaaattgctgccatgtgttacgattacacacacacacacacatatatacatatgtatgtatgtatgtccgtgtcatgtctggtgtcccctcaccttaagcccttagtaccagtgggtgctaagaattaatatgaaatggaggaaaattggagggagctgaatagaggagggaaaagaatgataaggaggagaaatggaaagggtgggggtgggggagcatggtcattgtgaataaaaagaaaggtgttacctctctacaaaaatataaaaaatcagctacccctgtttcttcaatatggtgtggcagattttagagttntcacgtcatatatacatgtttaagactactgacaatctacgtatttggtctctgaactatctctatggattg

SEQ ID NO: 169834 - DNA, 398 bp, Glycine max
gacacacaactcgctatggtggctggttacacagatgatgagctctgttgtgtggatgccactgactatataagagagctgattataactgtcaatgagctcaaactagtggtggataagaaaagatacgctaaagagaggtacaagaggccacaaactgaagaagatgctgctgagagctccaacataaaatatttttggtgatacacatgggggcataaggacctcatggctcctgaggaaatccaaacacaacgaggttgatgtccgggtcatggacgatgatgtcacaatcaaactctttcagaggaagaatattaactgcctgctgttagtgttcaaggctctggatgaacttcaaatggagcttcaccatgttgcaacgggacatgttggtg

SEQ ID NO: 169835 - DNA, 388 bp, Glycine max
  unsure (1)..(388): unsure at all n locations
tcatgaggctaacatnaacctcncatacttgcatgggatgtgtcattgtcaggctcacttatatcgcgaataaaggatagatcanatacttaaaacacagtctacttcaaaatcttatggatctcattcttatccaaagaaagaccaacgtctatgcatcttatgggcaacaccttctacgcccaaagatgataatggacagacaacttaaaaacaaccccctcatgctagtatgcaagaaaaaactatctctataaactgctttaaatgtcttataagaggacacattacttttcaatgccccaccacaaaaaccatgattttgaggggccaagaaatctatgtagccaagataaggctactacgtcaccttcctctagtgaaagtg

SEQ ID NO: 169836 - DNA, 466 bp, Glycine max
  unsure (1)..(466): unsure at all n locations
gggttatctccttcttcactacatcaagaatcaccgggtttagtcttctctgtggntgtcttactggtttagctccatcctctaaatttattcgatgcatacatgtggatgggctaataccaggaatgtcagctagggtccagcctatagccttcttatgcttcttgagaacagacaacaacttctcctcttgctcatcagcaagggaggcaggtataatcactagaaaactcttgctatcatccaagtaagcgtattttaaatttgatggcagaggcttcaattctggtgtggtcggctggatagtggtagaaggagatggtttctcagcctgtacctcatatagaaagtcagaggtatatgtacttcctgaaacatggttagtcctatctgactctatanaatcaatctcaagaggtaaacaccaccaccagacatgcaatcaatatcacgttcagattcactc

SEQ ID NO: 169837 - DNA, 442 bp, Glycine max
  unsure (1)..(442): unsure at all n locations
agcttccttaagaagattggtaaagaagctagagcttanctacacatacctctctaatagctaagctcacctccttgagatgagaagctagagcttagctacacaccccctataatagctaagctcacccccatgacaaaaaacatganaataacaaaaaaagtccttattacaaagacaactcaaaatgccccgaaatacaaggctaaaaccctatactactagaatggccaaaatacaaggcctagacgaaggaaaaacctattctaatatttacaaagataagcgggctcatacttagcccatgggctcaaaatctaccctaaggctcatgagaaccctagggcctttccttggatctctagcccaatctacttggagtcttctagccaatgcccttgcggggtaggattgcatcagacgctagagtggcaagggcatt

SEQ ID NO: 169838 - DNA, 448 bp, Glycine max
gctgtcgcagatagttgacaataaagtatacccattatttcttctgattaggacaactgattttttattcttttaaattctatctcgagctgcggaaaatatgtgattctttggcatgttaataggagagataatacattctgatatggataagagagagatatgtaactatgtcataatttatattaccattaaaatttatgttctttcaataatgaccatccttcaccaatgtacataaacaatttgtagaaaaaactccataatttttatcatataaaaaatagcttctccatatagcaacatctgtaaaatataaataaatgatataacgttgtgattatctaaatgaaaagataacaaagaaatctcatcacacaacatgagttaaacggtacactaaaggtcataccaactgttatagatatattactatcatagcatcatt

SEQ ID NO: 169839 - DNA, 442 bp, Glycine max
  unsure (1)..(442): unsure at all n locations
agcttataagaacaaaagtgcctcaatcatttccaaatatgaatgtgaattaggacgcatcaacaagaatcaagccaaggctattgtgcaagcaatcaatggggcaaaacacaccaaatgattatgatgatggatggctcaaattctcacaaaggtaaactcatcactttcaaattgagctttcaaaactatcatgacatgtagagaagaatcaaggatttcaagtcacaaaatgtcaagaacttttattttcaaaacaattacccatttcttgaacatatcctataattcaaagaaaaacatgcaaattcgagcgtgcacactaaattgacccaaaatattaaactaaaaatccgacgaaactaacaacattaacaaattaacacaactaacaaattaacaaaaccaacanaactagcaaaaccaaagaacactctccccc

SEQ ID NO: 169840 - DNA, 304 bp, Glycine max
acaatactcaacctcatctgactcaaacgaggctggatagacttctcgtatctgactctctagttcccatgtggcgtcttctcctaatgcacctccctagatcaacttgactaatggattctccttctctcttaggtgctttgtcgcatatcctcgatcctcaaaggcaaggttagatatgccaagtcttcctcactttgcatgtcatccaattgaccccatgagatggaccatggatttcctaccaagtaaaaacccacaaacaacttggggatatataaaagaaaacggggtaatgccaatt

SEQ ID NO: 169841 - DNA, 436 bp, Glycine max
  unsure (1)..(436): unsure at all n locations
agcttgaagaacagcatagccaaagagtgcttgattgagccaaatgcagtagtttcctgctattagtgaaatagcatggtcttgccccaaaagaataagcagtttatccatgaaaatccatatgatagatattgggacactacttaaaatgagagagagtattgcacagaagacatagtttccaagcttatgaaattgctctgctccaaatgattggccacattgagtttccaaagcaccagccattcccatctgcattacatttcatgttcaatcaactaataccaaggcagtattggagatggtctaacttgtctaagcatcccagttcataccanataccacagatcgtaagcaaacaaacacactcaagttccaatatgtgtgattgcagtattgcattgacagctagaaaatatgtcggatcaagatataa

SEQ ID NO: 169842 - DNA, 380 bp, Glycine max
  unsure (1)..(380): unsure at all n locations
nnttgactcctgatttcttggaacttgcttaactcttgtttcttnggcatcatcaaaataatcttggaagacattgcttccacattatccaaataacttggttatttttttataatttatttccagatgtttagaaaattcagtaaaaatttcagctcaaaattcgcattgaccaattcccagtaatttntacaagtacgtatgttcaagctgccagcaccagcgatttcaatctagaaatcaagagtagtatttatgttgcttaaggtttggataattacaatttgtgtttatgctaaaatgtcttgaataacacaattcaagagagtttaagacttattttgattaacaaattcatccacaactcatcaacacaactc

SEQ ID NO: 169843 - DNA, 438 bp, Glycine max
  unsure (1)..(438): unsure at all n locations
agcttccaaacataatacatttgaaactgttcaatcaaaacacctccctactaacgactttacactccccccttaaggtttcacgctaagcctcctaactactccttgtaactntcccaactactctataatgttaaacaactctataccagacatctcccaagaactacgattacaggtttgtatggctactacacctacaagattctcaatttggcacataggcggtaaactaagcacatcctcaaggaacacaagtatgacgctcacaaaatttgattttcatctgcaggtaaccaggatcatgcatacttaagtgtttcctctcgaaacaccttaacatgattggcaagggtgaaagtctctctctatntgtaatgaaagtaacaacatgattggttatcaagcaatttaacaagacatgattggaaaataatc

SEQ ID NO: 169844 - DNA, 386 bp, Glycine max
tctctgccttgagactcaagctatagccataggtgggttaccttgttgctccccctatcactaacaatctcccctattgtggctttgatgatgccatacatgacttcaacattgagtgcatttgatgagtcttgagattggattggagacttgatcacttactcttatcctcaaaaagtgttaacacttaggaagagattaattcatcatcattatcatatatgtcaatatatatatgtatatatatatcaattcatcatcatgtatatcaatcaagaattcacttgaatctctttttctcccactattggcattaataatggcatcaagattattgttcacacatctaaaacactcaagtataaggagacataactcctttttta

SEQ ID NO: 169845 - DNA, 409 bp, Glycine max
  unsure (1)..(409): unsure at all n locations
cactttgaggatacagaaattcatgatgtttttcancaccccaccgaccaagtggtctacagcttgatctctgctgtccttatctataataaatataaacgcaacatactgctttggcgcatctcaaactatcacacaaaaggaatagggcgtcttggtgaacacatttttatacccattttatccctacactacattcatacaattttcattttatccctataactacataaaccatcccccaactactatcatctctttttctattcaatagaaaaataactacacacaccgtgcttgcttcccctaaaattctaacaaaaacctaatacacgacactcacgtggcctgttcaccccacttaacttaacgcccttcccaccggatcgtataaaataacaaaacccta

SEQ ID NO: 169846 - DNA, 363 bp, Glycine max
actgatgccgagaaaatctggtcactttatttttactgtcattttaaatataaagcactctcagacaagttagagattgtcagcggcccgacttttttctacaaaattatattgctcctattagacatgcgatgtgttcataatgattataacaactttatgtagtggagataaaaaaagattataatttgacgacaacatgatcttgatgtctttacccatactccttcaattcccaaaatttcaatttaaccaaccatttgaactaacaaaaattatttttaaaaaaatacttattcacatgtatattttgtatttattgataaaataaaatatgtgcatgtcatgtaagttacattttta

SEQ ID NO: 169847 - DNA, 440 bp, Glycine max
  unsure (1)..(440): unsure at all n locations
agctnccttgagaagatggctaaagaagcttgatcttanccacacctacctctctaatagctaagcttacctccttgagatgagaagctagagcttanctacacaccccctataatagctacgctcaccccatgacaaataacatgaaaatacataaaaaaagtccttactacaaagactactcaatagaattgccaaaatacaaggcccagactaaggaaaaacctattctaatatttacaaagataatcgggctcatacttagcccataggctcgaaatctaccctaaagctcatgagaaccctcaggccttcccttggatctctatcccaatctacttggagtcttctacccaatgcccttgcagggtacgattgcatcanggaagaagaacacatacacatgatgtatacttggttgaccacaacccgtgcctaca

SEQ ID NO: 169848 - DNA, 463 bp, Glycine max
ctcatcctcggatccctcttattggactaggcccaatcgttacatccctcttaggtttagactaacttaaactgagtttcgtccacagatcccttttgtaagactagactcagctcaagaagcttatgaaagcttagcctaatttaacctaaacatcgtctgtagatccctcttgtaagactatgcctagactaaatagcattattgttacatcatatttaaaaccaaaacttaatccgcatatccctcttgtaagactaagttttgattatgcttcaatcaagctctaaggtaatagtacatttcccaatgctaaagtcagctaactatgcacacaaatggatgatcagaccaaaagcatacaaacattaagcattgaaggaagacttgaacacagacaacataatcaattagatattacgtatctacatcagtttgtcattataaatcaccaactatggag

SEQ ID NO: 169849 - DNA, 344 bp, Glycine max
  unsure (1)..(344): unsure at all n locations
agctngtataaggagcagaagggaaaacattatatatcgtactttgtttaaactaaacataaacgcatcacaaaagcggcatattcataacaaaattaatgttaataccgacatttctgaagaaaaaaaatattacacactaatgcgttttacgtcatgcatgcttccttattattacttaagacattatcaaaactaatagactctttgatcgaaacatctaacacttatactccaactatatagacgatgatgaggaccttcaggaggccaatacgagtcaggaaaggtgacatctgctttttaaacatcaaaagatccaaagctcttgtttcctactaaaa

SEQ ID NO: 169850 - DNA, 394 bp, Glycine max
ttaattttctcgctcaccctattctacacacagcggatatgtactcatgatacagaagacattcacaccaaaatagcctcctctactaagtaggactatacctattgttggctagaatgcttatattgaaataaatcgcagctattacctgctatgtatggccaaatcatggcatgctcccttattactggttgtgggtctctatcatgtcaatattaggctctgtaatctgaagctttaaataagcgcatcctttttggcatatcatcatgccttgttcttggtaacctgaagattttctttttttttaaacacctgcgggcaacaatccacatatacgtaactactaatatactaataccccaacacacatgaggctttctgatgtgtcact

SEQ ID NO: 169851 - DNA, 435 bp, Glycine max
  unsure (1)..(435): unsure at all n locations
agcttcctatgaatggaatcttgatctgtcatatctaanttgggaagtagaagaagcaaaagattttcttttctttgatgccatctggaaatataagatcgaacaacaagattgatcagggttattttcaacaaaacagataaataaaactaaaaattgaactgggcacttatcgtagcaggttgggcttagcgcgccttataaaattttacttatgggctaagcgcagtagactcgcgcttagcctaaagacacagaaaatattattttgcaaattaggcttagtgcagcatgctgggcttagcctaagtctacaattttcaaaacagaagagggtctgagcttagcgcaacatggcacacttagcttagcctcactaaaatgacactcaggcttagcgcacagggcgcgcttagcctaactattaaggcaaaa

SEQ ID NO: 169852 - DNA, 464 bp, Glycine max
  unsure (1)..(464): unsure at all n locations
attacggaccttagaaactcagctttaaactttatacaagagagaagctctgataccacttgttggacaagnggcctcagatatcttaagaaggggggttgaattaaaatattacaaattatttacccaattaaaaattctatttaactttctattcaagttataaattcccttaataatgaatttcttaaatacatgattcaaaaagaactaatttgaatatgattattaaacaataataaataaaggattttaagggaagagaaagtgcaaactcagatttatactggttcggccacacccttgtgcctacatccagtccccaagcaacctgcgctagaagtccactatcttgtacattcctttaacgaagtctaaacacacaaggacaatccctctttgtgtttagaattctttcacaccaagaaaccctccgtctcttaatctctcttcagaatgaagaa

SEQ ID NO: 169853 - DNA, 438 bp, Glycine max
agactggacactggcatgaggaatattctttttctcagacatcttcttccgcactgaattgaaaggctcaaccttaagtatcttatatgttccacgctgtgcttcaaaatcaccacctgaaagcaaaccaaattctaacaatgctgattctgttggtgttcccaatattgtcatttttccatctttgtccttaacaacttcggaagaagtattttgaaatatagaccgcaaaaggatgcttaaaacttcttcacatatctctgtctttagtttgtcaacactctcattacctttaatctcattgctctttccacatatccaaattttattaaccaccatatggttagtggtcaatgttcctgttttatctgtgcaaatgcaggtcgctgaacccatagtctcacaggcaaaaagatgtctcactagtgctttatcctt

SEQ ID NO: 169854 - DNA, 419 bp, Glycine max
tccaagaatcaagatcaagattcaagactcttgattcaataatcaagagaagacttaatccagataagtatgaaaaagttctttcaaaaactgagtagcacatggatgtttctcaaaactcgtttaccaaagagttcttactctctggtaatcgattactagattattgtaatcgattaccacctgcacaatggttttcaaaaagctctcaaatgaatttacagcgttccaattaatttcaaaatgttgcaatcgattacaagtatttggtaattgattaccactatgtttgaacgttgaaattcaaattaaattgtgaagagtcacattctttcacaaaaaagctttgtgtgatcgattacactgatctggtaatcgcataccagcaacagtttctgaaaaaatacaagatgaactct

SEQ ID NO: 169855 - DNA, 437 bp, Glycine max
agcttctagaaggagatcaactggatgttctatgcttcttgaaggtggaagtccatgaggaatctccttgggaaagacatctttaaattcctgcaataagggttgaacactaggagaaacataaatagttaactgattagaattatcactctctctctcttgtgtatcactcttttcctcgggtgtatcactcttctttttcatattcctttgtggtgcctcactattttctttctcttgttctctcttttctctcattctgatttggtcatcacacacttttctaggggatagaggtttaagagtaaacgaagaagatttggctattcgtctgtagggctcttctttgttacggttcaacaaacatttcatttgtgtagtccacgcgtccagaaataagcactgagattcgtccagttgatgatatacaccacaat

SEQ ID NO: 169856 - DNA, 456 bp, Glycine max
  unsure (1)..(456): unsure at all n locations
ntntattgtaatcttgaaattcaggacaacactgtgatttatgagggttttgggataaaaatggtcattgaccaatcccttttccatgacttaacctaattgtccagtgatggtgtaccatttgaaggtacactgaatggcgattggaagtttgatttctctgcacatgatgcccgccagttggtttgcaccaaccatgcggatatgaccggacgccttcttgccggttcattggcttttgaaagccgcatccttcattatcttattgtgcggattttacttccacgatcttccaaccttgcccaggtttctaaggaagatcttgttatcatgtgggcctttcatactgggcatcaacttgactgggcacacttattcagatatcgcatgcataaggcatngcaattaaatgctcctttgccatatacacatcttgttactctctatttcgccatt

SEQ ID NO: 169857 - DNA, 437 bp, Glycine max
  unsure (1)..(437): unsure at all n locations
agcttacttgtagagattgctttatgagaattattctttccagctgggttgatccattgcgatagtacagcggctattgcaaaaattgagaaccgttattacaatggtaagaaacgacagatacatcgtaagcacaacactgttagagaattactctcaacaggagctgttagagtggatcacgtacgcactgatgataatttagcagatcctttgatgaaaggattagctagagagaaagtccataacacttctaaaagaatgggactattgcccttactgtgatgatcattcatgatggtaacccgacctaaatgattggagatcccaagaactaggttcaatgggtaataacaagttatgaagtgatatgagatgaacatgctgntataagtgaaagcagcatgattcctgaagtaacaagagaatgagttatg

SEQ ID NO: 169858 - DNA, 367 bp, Glycine max
gagtctgatatatgagtattgctagaaagatattgtagccgggtttctggattgataatttttcctccttatttgtctcctataaatgcttgctgagaagtttatctaagctggacctaaattaataatctactatatggtgagtcaaaatactatcccagtagtcctatttgtagcatgtttttgtcagctgagttcaacttgcattttttctcttttcatgatttgactcaacatatcttttgttacaatctgaagtgctttgaacatctgatatttctcacgtggtatgatggattttttatattggggtattcttctcatgctaaagatctcgttcttcaagcttttgtgttcactattattt

SEQ ID NO: 169859 - DNA, 437 bp, Glycine max
  unsure (1)..(437): unsure at all n locations
agcttcngaactttacaggctagtcaactttatcttgtttaccctncattagttntatgacaatgacgtgcttcagaatttacaggctaagttcgtacggcccttgcagagcaggttgaggacgccttgtaacattagaattgaggaaactgatacattactttcttaaaagaaaaaataaataaataaataacttgagttagtctttttcctgtagtgggaaaaggatttttttatttattattattgtaactggtaaatcttgacaaagtaaatgtaaacatttgtgaccagtgggctacccattataatgtagtctaatgtaaaacatgttctgccctaggattttacaagctgggatatgtcggttttctggcaaatttatgtgcctatatcattgagtaatgtctattttatttcactttataatcatcttc

SEQ ID NO: 169860 - DNA, 463 bp, Glycine max
  unsure (1)..(463): unsure at all n locations
ctaagctacatagatgggctctngaagatcttcagcggatccatgtctttgaatagcttgctgttgaggaaggaggtggagttgaaatgcatgtccttgaagatgctggccactgggtatgtactataatgtcatacagttattattttatagcatgatctcctccaatacgtgtgtttcagcttaggacgtctatgctcatgatatctaaaatactttcaagttgcaaataatgcatgtagccatagtgtcctatattttatggaatagttttggctagtgatagctcagttacacttttgttccaaagtttcacaatgttgtgaatcttgtcctcaaaaagttatcttcacgaattttgccctcttatttacagaacatcgcatattgtgccaccaagtaaaaataaaaacgccagttaatgaataaactcccacaaaattgttcttgacataagccttac

SEQ ID NO: 169861 - DNA, 439 bp, Glycine max
  unsure (1)..(439): unsure at all n locations
agcttggttaaccttcctcgatacttgncactcttgctaaactatntctcttttgctatttaatgcacatgctcatatctctgaatgtattgcactctaatttggaaggttatttggttgatgcatgttcaatcatctctgttaatgtgattgatactaatcagacaagcaccattttgattgaccactgttattttcttttgcttggggacaagcaaaactgtaaatttgggggagtttgttaattgttattcatgagtattaaatgcattaaaaataggagaaaaggtagcaatgtacctctaatttatggtttcttttgcgagatttgtaaataatttattcttgtatgaatttatgtagtggaaactccatttttgatgactaatgttgaacttaattggaatttaggctaaagaagagaagattttgaaatgct

SEQ ID NO: 169862 - DNA, 464 bp, Glycine max
gaccttaatactaactgtccgtgcctcctagtgacagatccgagggtcttttctagccaatcacatggatcaagacgcatattacctaaaatgtaatattttgaaaattctcgatgttcggaagagaggagacacacttgggatacacttccatttgctacaattcagtctaaactcatgtggcaaatttgctcgtattatcaactcgactacttaatcacgtgagcatgtagggcttatgtgtcgaacaacctatgaacttagtttaggatcaaatggccaaagttctcgacatggctagagactacacatataacactctatcattcttaatgaatttggaacttgggggacttatgttttgtacaacctatgaactcgggatgactcgtattgtggtggccttctaccccccatgatcacacatatcacttagaggagtatttagttcacatgatttgttg

SEQ ID NO: 169863 - DNA, 437 bp, Glycine max
  unsure (1)..(437): unsure at all n locations
agcttcacgaaggagaaatgacaaggctcctttttatttggcactattattcgngaagtccacactatttcaaacaagggcatctcaacatttggtattatgtttgaccctacaatcgcagctgcaacaacatctccaaagattgcttgtcccatgaggctgtctacattaatatgacttaagccataaagagtaaaaatggtgatttttgagcacactattagcacatgagcacctgaaattacaaggttaacttaatactatagacaacatgataaggagaaagattgtggagtcgaatctcatccattaacaaaaattatcactccctctgatattaaatataaaacagacatatatttctgatatcaaatataagacaatcttaactaactttatcttatttaaaatatcattcatttaattgagatattaat

SEQ ID NO: 169864 - DNA, 327 bp, Glycine max
aaaatctggacctatcgcagggtttgtgggttgtgctcctctgctgaccaccatacagacctttgccctttcataacagcaacctggagcaaattgagccacactgaaagcttaatggctgcaatatatattacatatagacacttctctactctcagcagcaaaaataaccacagcgagagcagatattgacctttccagagacagatactaccctggatggaggaatcaccctaaccttagatggtccagcccctcagaacaacaacagcagcctgcttcttccttcaaaatgctgctggcccaaacagaccatacatttcttca

SEQ ID NO: 169865 - DNA, 403 bp, Glycine max
gcttgctgaaaagtgttgggggttattttttgcgcttcaataaggtccttcaatattgattttcagacatggagttgcagcggaagataaaggataagaggtgagaggaggcaccatccactagagaataagccatggaaggagaagcttcaccaccaagagagtgccttggataagaagcttagatgggaagctccaatggaggaagagaatgagagatagagagagagagagagaaagaggggggcatgggaattaaaggagattagggagaaaaggtaaactttgatgtgtgtctcacaagtttcacattcatcaatgttatgacaagtgttacaaatgtctctatttataactaagcacatgggaagcttccttgagaagcacggaaggtagattcctt

SEQ ID NO: 169866 - DNA, 442 bp, Glycine max
  unsure (1)..(442): unsure at all n locations
ggctgcagcttgtgagagataacaaacatactttcttcttcagcccaaaaatactttggtagctntgtttcatttacaaaagttctaactcattcttcaagagatttgtttnttccctccacaacaccattttcttgaggtgttcttggggcagaaaaattgtggtgaattccattttcttcacaaaacttttcaaaaatactcattttgaaattcacctccatgatcacttgtaattgaaacaatattaaggcctttctcattttgaataactttggcaagttttcgaaaagcatcaaaaacatcatttttggttttcaaaaacaaagtccaagtaaacctagaacaataatcataaagtactaagccatagtagttgccacctaaactcatggttcttgatggtccaaataaatccatatgaagtagttcaaggggtttc

SEQ ID NO: 169867 - DNA, 454 bp, Glycine max
  unsure (1)..(454): unsure at all n locations
ggcttcacgccatctcagtacgaggatgccatcgataccttgnttaaactcacccaaagcggtatggttcaacaatgttaccttcctcgccaaaatcgcctcccatacctatcaaaaggttgtcaccggaagagatagccattcttcgtgattgagggccatgctttaatcgtgaagagaagataagttgagggcataaatgtccctccaagttcttactcctcatcgccgatacagatgactaactataaggtgatctctcttccgatatgctggtttcaatggaaccgcaacaggctcatataagcatacatgccctgtctggtcatttggcgcctgagaccttacgattgttgggacgtatcgcggactataacatggtgagtctaattgatggaggagatacacataattttatgcacgaccatgtggtgcgctcctaagtctctctgca

SEQ ID NO: 169868 - DNA, 430 bp, Glycine max
  unsure (1)..(430): unsure at all n locations
agcttgcaagagaaaagacagaagatgattgatttctanctcnagacttttatctttcaggcaggggagttatcctaggacccatgtcaaccctataacatggcaactaataaatatgagttacctaaggatacggtattcaagtcttttttctaattgaatccagctagtatcactttccgacagtatccttcttatcacgtgaatgctaagtgatgaataaattaaaaggtctttgttctcttacaagggtgattaaatcgaatgagtttataacaaactaaatatcattattttaactttcgtttgtgagtagtacttaatatatgcaacttaacttctatcatcaaaaatagataaatcgtatttattaaatacagcatatgtattactctaacaataataatacggttaaataaataattttcga

SEQ ID NO: 169869 - DNA, 434 bp, Glycine max
agcttcagcttttgagatgagggttgctattcatatactacaaaatcctgcataaccactcacatgctttatagtaagtcaaattttagagaaggtagagtgggtttgatactttattcatgcttcggcgaatcaacccatagcactttagccttggtcaatctaacaatttaagctttcttgatagttagttcccttattatttagataaaagaacaaacccatcatttttagaattgccccaaattgtttacattagctaccaaaatccaaacaatgagagaaggggggaaaacatcttcaatatacgtccaagaccagttatgttaagtcaagaacaaaatccacaactaatgcctataaaatataagaccagtcctgatattcgattcataccaaatatatagaaaatagaaaagatagggagtgagaga

SEQ ID NO: 169870 - DNA, 318 bp, Glycine max
agaaactatgtgccagttgccctcaccatctgattttggagcaacttcttctccaatatatttatgaaggactcagtattatggagagaagaatgatagatgctgccagtggtggagcccttggagacatgactcctgctgaagccaggaattaattgataagatggctgtcaactcccaacagaatttgatcgaggccgtgcccgattcaaattaacatgaatatgccgtactacgaagtgtcctatgtcgttgtccaacgagcagtgcacaccaaatggcataatatcctgctggatagtaacgatcggggagggg

SEQ ID NO: 169871 - DNA, 431 bp, Glycine max
  unsure (1)..(431): unsure at all n locations
catgaagcttcgcaggtggtgaaattattttttattacnnngcgattcaaactctatattatacgatcctgtcccattttatcttcacagctttcaataatggaacttcttggagtttaacaccttatctcaatgatgagagttctttccggtttccctcactctgttactctatctcaacaaacataaattatattatttaacatttttattctagaatctattatagatgttatgaataatgaactgatattttggtagctgtttcttacgctaattaggtgtatgtgcacaccatgtacagaattgaccaacccatcatattgtaatcaaccaaaataaatgtaaccattaatgaactcttttatgcttatttaatcctcccagaggaaagggaacatgatttttatcaataatatcaaatgacttga

SEQ ID NO: 169872 - DNA, 291 bp, Glycine max
tcgcaacattctgaaggacaaaccaattatttatattccttggaaaagaactccgctaagaaggtggatgtgaccatggtgatctcaccgctggatggtagtcttggagccagaggagcgcaagccaacatttaccattgcaatcaacccttgccactgtcttacgtgcctcttccgacgatgcatgtgagtaaattctgaacggagattataaaggttcaaaatgcataactgactcaaagggacaagaattttgtctttgctattgaattgaagatgctttcaactcgt

SEQ ID NO: 169873 - DNA, 387 bp, Glycine max
  unsure (1)..(387): unsure at all n locations
agctntacgctgaagagaggtncattatcttattancccgaatcttcttttcgaaagctattaattattctcatccaccacaggggaaaaaccttgcaatctgctcaaaataaacatgaacaacatcgtatcaccaacgatatatactgtttgacacctctctaaaacgaatacctctttgtgaacacatctgaaaagacaacaatataataattactgcgctcaaaaatataaccacttaacataaatataaaaaatacgagcgtctacgaattacaattatattatgaactataacttcttatgtgattatgtgacaagcacatattattgcttctgtttcatacattcataacggtgacactctcttttatttttctaccctaa

SEQ ID NO: 169874 - DNA, 380 bp, Glycine max
  unsure (1)..(380): unsure at all n locations
ctaagctcgagctcaccctaactatacctgtggaatcttttattaaantttatgaatagttctggatgttagtctcatgctattcacaatgcaattatgacagctacgttgaaattggtcgcgtaatatcaatacttcacattagaataagaattttatatatgattgactacgtaggcttagaataacttttggggtcacttacattctaaaaatgtctgataactaaccaattctatctcaaagctggatcaaggtatgagaaaactgtcaacaggacttgattgcatcattgtagttattttagaaaatgggaaattaaattcgagcaaaaaactaatgagaagcaatattcagcattatgctcagcagagaaacaa

SEQ ID NO: 169875 - DNA, 439 bp, Glycine max
agcttaacgtgtgcatgctatattgctaatttcttatatcctagagaaataaataccttcatacaaaaggcacaacccttaacagttttttacaagagtgtgcatgagttttaaatgtcatcttgagcatgaatagatattatatcatgtcatattatatcaccatgttaccacatcattttatgccattatatataaatgtttggaggtaaggcagtttacctggcacacctatatttggaactgattttgccatgtgaacatgccatgagcaacattacaacttgtatggggcatagttaacttgtcatttaaacactcacatgttgaggatttggcttgtcatatataagaaaaaaattattactattatatataattcaatttgatgagcatgttatatgtaccattgatgccatcccgcatatattgagaacat

SEQ ID NO: 169876 - DNA, 454 bp, Glycine max
  unsure (1)..(454): unsure at all n locations
tctttatatatagncttcatctttaagtattcgatgtctctcttcagttggattcttcactttgctcttcatttgaacttttgagcatgttggagcatttaatgtttgcattaaatgcacatccctttttcatgcatagtcatgttgataagctagcatgttttgtacttcagcaaggaagttacttctttcaccatacaaagtgcgccttttgatgaagatcaatatcttctagaccgtggacttcatttattcttcatagaactttcacagatcttaggataatgttttctgcatgaaaaaatttcaaacacaaagtactaaatgaaggtcttaaatgtactatataatgtcttatcagatattcttatggatgcatcgtctgaaaatacatatccacatatacatatcatgatttgaagcatatagacataacttttgccttttgtattat

SEQ ID NO: 169877 - DNA, 409 bp, Glycine max
  unsure (1)..(409): unsure at all n locations
agcttgccctaaatttacattgatgggatgttgtttttcgcctctctgcttaagagcaatgtctcactggtaagactaactttccaaatgtttgccttcgcaggaatggccccgacgaaacttgcctcatagaggtccaagacagacaacgcggccaaaggaactaattccacccctgagtacgacagtcaccgctttaagagcgttgtacaccaacagcgcttcgaagccatcaatggatggttcgttctccgggagcgacgcgtccaactcaaggacgacgagtatactgatttccaggaagaaatacggccccnagctgtgcgcaccactgattactcccatggccaagtttgatccggaaataaaccttgagttttatgccaatgcttggccaacagatgagggc

SEQ ID NO: 169878 - DNA, 456 bp, Glycine max
  unsure (1)..(456): unsure at all n locations
ngtggcagctgaagatgaagatgttgttagctttaacgattctactgttaaaaagaacaatgaggttacagatgcaatgagtcaaaggagggaaaaacaaataatggtcgaagagaaagaaataaaagaccaagaaaaagaaatagaggtaagaatagacaatgaaatagaataaaacgataaatttgaaaaaaatcaagataaagaaaagagtatgagtgaaaaaagaaagagaaaaaaggaaataaaaagcttcagataagggtatggaagtgccatatcccatggtaccttccaagaaagataaggactgccatctggcgagattcctagacattttcaggaaactggaaataactatgccttttggaaaagctntgcagcagatgccactctactcgaagttattgaaagatatgttgacgaggaagcacacatacattcgccaggagaata

SEQ ID NO: 169879 - DNA, 335 bp, Glycine max
tccacaatgggggccaccatcacgatcatcgtctccctttccatcattgggggtaccacctgggccgccagatccctccaccttgtgggcgcgttctatgaaagatccgcccccctttttgcaaatgatctgtaattgcatcctatccggaaccatatcaaaattgtactgatactgcctaacaaaggcaaccattaggtccttccaagaatggactcgagaagataccaagttagtgtaccacgtaacagctatcccagtgagactttcttggaaggaatgtatcagcaaatcctcatcttgtgcgtattcccccatcttctgacaatacatct

SEQ ID NO: 169880 - DNA, 438 bp, Glycine max
agcttgtcgaccttgctctaggctctggaattattttgaaggagaaggcttcaagtacataaaggaatgttttgaaaatggcacattgcatctcattgggctactgagtgatggtggagttcactccaaacttgatcagttgcaggtgattatttggggttggagctgtttttccttcatgtgtattcagtttattctttctaactaactacttttgtacagttgttgcttaaaggagttagcgagcgaggtgttaaaagagtccgtgtccatattcttacaaatggccgcgatgttttggatggctcaagtgtggcgtttgtggaaacccttgacaatgatcttgctaacttgcgcgcaaaaggtgtcaatgctaagatagcatcaggtggaggtcgtatgaatgtcacaatggatcgttatgacgtatattgacct

SEQ ID NO: 169881 - DNA, 457 bp, Glycine max
  unsure (1)..(457): unsure at all n locations
ttgcttaagagaacaaattcagagagcaaggagcagtaggaggaggtttatttggacactgatacaataaaaaatatttatgttaataagtagtaacaaataaaaacagaaaaatataataagtgataagagtgttaccaaattatagaacaagtgtatgaactgaatgataatggactgaaaatgaactggtgaggatggaaatggaaaccgaaaatttttctaagtttcaaaaacacaacactgagcatgaggataaacacgcggtttggctatatagtgtaaaaaaacccacggaataactcacggaatgcccctcgcaaaacaacagagtcaaaggctaacctcctagcttaactatatgagcagaacggtgtagctaggaaagcanggatttctttttgcagcggctgaagccatttccgaggggaacacccctgtcacgtcttggccgaca

SEQ ID NO: 169882 - DNA, 351 bp, Glycine max
aatggggtaaactaggagaaaaacctcacctcacacaagtctataacatcaattcaaactcgcgcaactggatttacacctaaaataccaccgaatcacaatttgactcctcaacacccaagttcatcctagaaaacgctctttgctcacagaggacatatgatattctctcttgcacagcccaaactctctcataagtcctaaatgacgattcaaactaagaaaaactccctttaacctccacaaaccactaaatccagattggaccttccaactctcaaagtctcactctatctccactcacaacaccatattctcaccttctaaccctaggataactctacccttcat

SEQ ID NO: 169883 - DNA, 435 bp, Glycine max
  unsure (1)..(435): unsure at all n locations
agcttattattcaaataggtatcttttttattgtagctngancagnatttattttctcgttatttgctagttgttgcttaatagagctctcattaatttgtattttatcctcaatttttatgattgtacttttttaatcctttgtaacatacctgtgaaaacatctttttactttttttatgtttgcgtgtgttggagaaggggataaagtatagggtttgagggaagagaatatgaacttcatttattgacgatcttaacagttctgagaatcctttacaggcatattggcttgtggctcccatgcaacgaatatatatctttgtntttatgaattcactaagtatataaaacatcctgttatttgcagaaagtcggtcaaattgttaatggaagggagagttcacaataattactcctctcaacaacaatttt

SEQ ID NO: 169884 - DNA, 411 bp, Glycine max
  unsure (1)..(411): unsure at all n locations
caagcttaggatcagaggagatagaaaaatttctttattncacaancaactacaattacaataatgccacataatgttttatgaaccacgacgttagaagttggtgttcgccaaatacttaattaaattattgagaactagtaacccagtctttcatatacactctcttattggttaaaatatattaaaaactataaaatcaagtaagagaattatcaaaaattatgtgagatcctcttaattctataatttctaataaattttaaccaacaaaaaaccgcgatacacctttcataacaattttgaatgaatttattctaaaagtattggcgtataaatttcgatctacaagaatatatcaaataattaaggtctacttattatttgaagcgtttaaatatgacgtcaaaa

SEQ ID NO: 169885 - DNA, 86 bp, Glycine max
  unsure (1)..(86): unsure at all n locations
agcttctaaactatatacatacaatgaagtctcttatatccacttgnnggacaagtggccctcatatatcttaacacatggggggc

SEQ ID NO: 169886 - DNA, 439 bp, Glycine max
  unsure (1)..(439): unsure at all n locations
agctntaacttcaagaccccgaacaaattgtatttctatgcgatagttcatcgaaatagatgttagtaattttttaatttgttcaatttacatgttatgttggaatgaaattatttgcaaagaagcattgggctgtaaacaaggttgcatttcagtttgcagtatatttgtttgtactgacccatgatgttatgactgctctttcatcttgcttagcagtaaacgatacataatatagcatgacttaaaaagaaaggcacaaataaggagatttgatgtttgcttgcagaatgcagattgatttatgcttgaaggctgacaccttgccattttatctcctttattgtattttaacatgatattttaatgtttattgaatcgcatcatcttggacgtgccactggtagtgggctagtgacaaggtctttgggtagtttgc

SEQ ID NO: 169887 - DNA, 367 bp, Glycine max
  unsure (1)..(367): unsure at all n locations
cggcaatcaggttgcactcggataatcacttggatgaaccacaatatcgttatgggctagcatttctgcttacgtatatatcatacatatatatccggcaatgctcacatggattgacatttataaaacatttttgcacatatgcaagaattgcaacatatatattaaaagcggctttttcaccaaataanatattgctaaacaaatcatcacgaaaataatattgaaaaaaatacaaataaatttgtgtggctttgcttttttatgcatgcggttagaataaaggtgtaatcactactagaaatgagctatttaacgacgcacatctatcagggattgtttaaaatgtgtctgcgtggtaatttgt

SEQ ID NO: 169888 - DNA, 434 bp, Glycine max
  unsure (1)..(434): unsure at all n locations
agcttgtaaataatgtgtcattgtttataataaatgattggcactcaaacacttccacagtcttacattttatcttttaagcataaaagtgtcaaagataagatccttagcatgtataacttatctttgtggacctttgggataagtcctcaagatgtccagctataatgggtcctattaaaattggcaagatgaaatttgagtcacaaagaggcttatagctacactaatgagatggaggccacttgggacatgttatttcaaatgttggggttttgttctatttttggtcagaaatgtgaggaaagaaagttccaggcttggggggaggcctactntgacttactatctgttgtgtcttttaaagaacagcgatggaaaaacgtacgtgatatgtgtagcttaagatgtgactaactgagactacacacgac

SEQ ID NO: 169889 - DNA, 421 bp, Glycine max
agcttaaaacaataaacttggccttctctttattggctttgggcttggcgaccacgatcaacaaagtactttcggcacctactatatgttgacttgaccaacgctggtattggaatgctgcgacaatctttcaacaccttattgacacattctgataggttggttgtcatgtgaccatatcgtcgtccagatgtatcgtaagccatgctccatttttcctttgaaatgcgatcaatccattctgctatggctggactcagttgacgaaatctttctaagttttgatcaaacacatgcttgcaaggagtgtacgctgcatcaaattcgttatcatcaaaagttgtacctatacatcaaactcaaattaaattaatgtataaaatcaaccttacccaatttctggaacatctctttttgtttc

SEQ ID NO: 169890 - DNA, 421 bp, Glycine max
aatactcactgatgggactcacaaagcgggacatacaaatcttattaagggattttctcacggggaatggagacattaccttatctttctttgccacttttctgaataaaaaataatacattattgttacattttcactagaaaaaaacaatacatgtggctactaattataaatgtagatcgatctgtcacattctaagaccgtttatgaccaatctttgataaaccgtctgaaaaagtctattcttctaagactgatcttacaaaaaaccggcttatagatgtatcattctaagatgaatttcaactaagaacttccttaaaatgaatctttttctaaacgatttgtcttattaccgcatataagcgaatgcttctgacgtgcttacataaaattattaccgctgtaaagattttttac

SEQ ID NO: 169891 - DNA, 466 bp, Glycine max
  unsure (1)..(466): unsure at all n locations
ggatcttaagcaccgcggctgcagcttgtacacataacctgggtgttgtggtattaataattacactagcctatataactcaaacaacaaaggcactaaaagtagagcattacatacccctccccccccaactttatgacttgtcccactagaattccatattctcatggttttatctgcagaactgctacatattgtttccccttaaggtaaaaagcaaaaagaaattgaagaatgtaaatacatgacataaatagtaacaactacaaaaaaatacatcaatgtgaaagagaatatactaccatcaagagtaaaatcaccataagtcacactgccatgatgactaacgaagcaagtaggggggtaattcaatcagttgtcttccacatccaaacattgaaatccccaaaaccagctaagagtgtgtgttgttgataacaaatatcanattgttcaaaaacaaatt

SEQ ID NO: 169892 - DNA, 455 bp, Glycine max
  unsure (1)..(455): unsure at all n locations
ttctatcaaagactatatttataggagaaaaattatcaaatttttctagttaaaagaaactattcaaggttaagatatatcatacctttgataacttaatcttatgatttgtgcaaaacctttgcaatcccgaattaaatatgaggggtattcattatttaaatcttaagcctccacacagagataagaaaggagataataatatgattagaatatccgaatgtaattgcaacttatagacaaagaagacttacctccccaacattgaatgtaatctttgattatctaagaaaaacataacaaaaggtgaagtatattgagtatccattgtagtccccaatatttgaaggaaaaaaatctataatcagaaaaaataagtgctttgtgtaacaactcacataaagcanggaacaaaattatatacccgaacatatgagatggtatgaattgtgctc

SEQ ID NO: 169893 - DNA, 356 bp, Glycine max
  unsure (1)..(356): unsure at all n locations
gcatgcaagcttgcttatgttgccgtaggataagagtattatctcatgactgncaagagcaattcttcaattgagaaaaactacgagctccttgacagaccagttatcaccattggagctgacagatttcgttgccccgaagttcttttccagccttctatgattggaatggaagcctgtggaattcatgataccacctacaactcgatcatgaagtgtgatgtggatattgctagtcgatgaatacgactacactttgtgtataaaatatgctgaaattcgatcaaatctcctccaatttatggttgtcttgtaattactttctgttaaagatagggtataaatacttaatattt

SEQ ID NO: 169894 - DNA, 446 bp, Glycine max
  unsure (1)..(446): unsure at all n locations
agcttggagatgcctgcccaatagagctggtattgtaattgtagttagttaggataatataatatctaattatctattcatatgttctgagtttgcaagtgggaggagggagttagctaagtcaagtttagaaaatgtaggttgattttaagaaagaaaaagaaacaaacaacttacaaggagccagtcaatacagcaaatattatggtcacgacctcgcctcctgtatatcctttctctattaccatttttgcaccaaaccatacagccagaccataactgcacattaaaacaaagtagagcacgccaaatcccaaaccagaagctagtgcctcttgcactccagtcttgtatgccttggttaaggactgatngtatttagctatagctggcctctccccagtgaatgatgcaacctgcattggagggataaagtcatttatata

SEQ ID NO: 169895 - DNA, 433 bp, Glycine max
tacaatactcaagcttagatgctgaatgggtgcatcagctcgaccaatcaaaccatgacatctagcatgtaccagagacttcccttctggtgcacagagcaacctggaaatcatacgcaagagatcaacatctgggccaatcccaacaaataaaaattagaactcggatcctccctatatccaaatcgtatgcagaaaatgaataactaaatccagtgcacagtatttagcatgtgaagccacctttctttcaaaattccacccaattatattcaaaggtgctaacatcctgggaaaaagataaacgttattgctttgcctttttctaatccctacttatgacattgtatatccagtgtcatgatatactagaacctgtcatataacaattttaagtttactagacgtaagagaccaccttgtgctaatggaa

SEQ ID NO: 169896 - DNA, 438 bp, Glycine max
  unsure (1)..(438): unsure at all n locations
agcttcttgaacatgatcagtatattcattgtctcggaataaaggatgaagacgtggtttgtgatatcttttggtgtcgccctgatgtagtgaagctagtcaacgcatgtaatttggtgtttttgatagacaacacctacaaaacaaaccggtacagactcccactgctcaattntgttggggtgacaccgattgggatgacattctctgccgatttttcatatgtggagtgtgaacacgttaataatttggtctggaatttacaacgcttccgaggccttttttttaaagcgtgatgccctccttggagttattgtcactggcagagaccaagcattgatgaatgcagtgaaggctgtattccctgattgtacaaatttgttgtgcaactttcacataaacaagaatgtgaacgccaaatataaatcactaattggg

SEQ ID NO: 169897 - DNA, 390 bp, Glycine max
aatcattctatgtacccaggagaggacacattgtgtttcttgtataaatattcttgggcgatcgactatttatacccccttaagacgtgcttaagccatcttactaaagtcatttctcgcttaaactaaaaataaaataaatttccatcgaacgtctgaattgtaattatcccgaaactccacgacaaaaagaaataccgaacgtacggtcgcgctgtaaccttgtcggaaataaaaaaaagacgcaaaataataatataataataaaaaaaacgtctttgagtaaaataaagcggaaaagtaatcggacagcctctctttgggatttctcattcttaaatgaatcgactaataactaaagcgaaactaaagccaaaatcaactcgccta

SEQ ID NO: 169898 - DNA, 431 bp, Glycine max
agcttgtagattatagtgttatgacccttcttaatacttagaaaccatatatatatatatatatatatatatatatattctgccttggcgcagcggtaaagtagtgccttggtgacttgttggtcatgggttcgaatccggaaacagcctctttgcatatgcaagggtaaggctgcgtacaatatccctcccccataccttcgcatagcgaagagcctctgggtaatggggtacgaatttttttttatatatacattctgccaagcctgacaattattttcatcatcagaaacttatctcagaaatgaaaatggaaatattctgcacaactagagctttctttttcatatataaactagaaggctagaactttatttaagacataaaaaaggtcagtgagacattcataggaccgcattgaaattctgact

SEQ ID NO: 169899 - DNA, 272 bp, Glycine max
ttacatacacaatctctcctctataccccatttccaactctaaaaccctatcacactaatcactctctcttcacctaaaaatcacctcttccattatcacaaatcccacacattatgggtgatcatcactaccaaccacaataccaatatcccctactcgcttaccataccgagacacaccaacaaacccgcatctcctcccaccatgtcgacaatgacgacaccgacgtcacaactggcggctccatcatgaatctcgcactattatcctc

SEQ ID NO: 169900 - DNA, 443 bp, Glycine max
  unsure (1)..(443): unsure at all n locations
agctntagaggtaaagtgatgcaganacttgttttaaaaagcctcgaagaagaagttgaagtcagaacatctcgcttaacgcgcaagacaggtctagcacaacttctcaagcacgtgatcaccgtcatactcgctaagtccagatgtcgtgcttagcgtgagttagcgtgcattttaagctaactaaggcctataaaagaagtaggaagcaaaggagaaagacacacagaaactcagagctctctactaaatacaccttgagtatctcaaataggggaaactctctttttagagtcatcctccccttctcctcctttatccttattcttcttcttctattcttattaacccctagagtgtaaagcctctcatgacaatgagagactaaacccttcattgttgggaatctagcagtcaaactcttgtgatgtaattctctctta

SEQ ID NO: 169901 - DNA, 416 bp, Glycine max
ctgcaactgagataggaagtgttgaaggttttcttctgctttattgtgaccacagagtggacttggagatatgtcggggggtcaagagaccttggggacgtcaggtggggtgctattgcccaaaaccaagcttgaccaatcccgacccaacccgggcatagtcggtcagtgagaacctgtgatgtacctaaacaggcgagctcctggcagtcaacagataaaaggaacaaagaccacaaagcaaggaggcttgtggtggctggccagctgtgaattttgtgtaatatgtggattatggcctctggtaatcgattaccaagggtgggtaatcgattacaaggcttataattgaagacaggaggctaagatggtctctggtaatcgattaccaaggggtgtaatcgattaccaggctt

SEQ ID NO: 169902 - DNA, 445 bp, Glycine max
tataaactagaataaattcattaacatgagtaatgttatatatcatctacactatcgctcgtcatataagcttgcataggagaaatggtcctacaggcacgccaatgcaactactccccatgggtacttatggcatgcagttaggttattgaagtattggagataggtgacatgaatatgattcaagatcttgccaacaatattatattgtcaagagataagtcatggctgcccaaacataaaagcctgacttaacatatctcttatatagatctgcttgacatgtcaacctcacactagcacctgcatttgctaccattgattatgttggaatgttgaggtgagtcatcaacaaaaccttcacgtgtctctattaaaggtcaatgggacatgaccaatgaacctgctgtcatacgcatgtgcaacagacaagacacatcatcca

SEQ ID NO: 169903 - DNA, 437 bp, Glycine max
  unsure (1)..(437): unsure at all n locations
agactaagagacgagatatgtctgtttatttacagcntatacctgattgaatgaggcctatttatactataagctttgaagacatgaagcatgactttgaagcactcattatttcattcttcgagtaaaaaagctctttaagttaattcttgtaaagtttagaaaaactcaaaatactttgttcatcttgagagaaaagactaagtgttgaaattatttatccgtctgtaagacaatagtatgtctgtcattgtgtaatcaaaccaacaaatcttattatttgtgttagagccaacaatgacttggtaaattaagcaataccggttgtaacaagcttaatgtaaagcttgagttaaagagttagaagtgacagtgataaatacttgttgacattaatgaatttggtggtttgccaagatctaaacatagtctcgtag

SEQ ID NO: 169904 - DNA, 437 bp, Glycine max
  unsure (1)..(437): unsure at all n locations
agctngctacatatatcatgaacatataatttcttgagggattttgtgagcatgtctgccaattggtctttggagctaacaaactcagtggtgatttctcctaagagtaccttctcacacataaagtgacaatcaatcttgatgtctttagttcgctcatgaaagaccaagtttgaagcaatgtgcagaacaacttcattgttgcatgattattcggtatattgaatgtctccaaattttctctgttagagaagtttcctaagccatgtgatcttgcatgtagttattgccaaggcataatactcagcttcgggattggacctagcaacaattttctacttctttcatctccatgagatcaagttccctccaataaagacacgatattcaaaagtggacctcctgtatgatagtgatcctacctaatcagcatcaag

SEQ ID NO: 169905 - DNA, 412 bp, Glycine max
aactgctttatttgaaaaagccccagacctgatgggctaaatttcaaatttactaaacacttcagggagttgttcaagcccgaatacagccggttcatagctgaatgtcatgccaatggggtagtttcgaggggcaccaatgcattcttcattgctttgatcacaaacgagaaggatacacctcatcttaatgaatacagacctatctccattatatgcttgttttacaagattgtggctaaaccgttagcacacaaattgaagaaagcgtcgtccacattatcgataaaggccattagcctttatacatgaaaacagctgttgcacacagttctgatagcaaccatagcgggggcgaagcataatgtggaatagcctgcctcagctttaagtcgatacgaaaacactatac

SEQ ID NO: 169906 - DNA, 433 bp, Glycine max
agctgaagcttggagaagagcttgatgatgtcttgccttttacattcctaactcccttgagtggcatttgtaatggctgctatattggatgttgcatctttaccacatatcatatcttttatgcatcatgcatcatcatgagtaagtgaaaagaagagtttctaagttagaaaagtttcttcaggaggaaaaactctctattttaatcgattacaattctatcgtaattgattacacaagttgtctgaagcttgcagagctatgtctcgtatctatttaatcgattacaaccttatcgtaatcgattacacaattgttttcaaggcaatgactaatttattcaggtgtctctgctttaatcgactaccatgtgatataatcaattatttctctttctctaagtaattcagatgtggacaaaaacactttactc

SEQ ID NO: 169907 - DNA, 435 bp, Glycine max
  unsure (1)..(435): unsure at all n locations
gcttctcttaaagttgaaaggcttctatgcattcctcatcaagcttgaagactgcatccttgtttagaaagttgctcaatggtctanctatcttcgagaagtccttgatgaaccttcgatagaaacctacatgtccaagaaaacttctgatacccttggcatttactggtggtggtaacttctcgatgacatcaatttttgctttatccacctcaatgcctcgggctaaaattttgtggcccaacactatctcttcttgaaccatgaagtgacacttctcccaatttagcaccagattggtctcaacacatcttcgctgcactagctctagattcatcaagcaagaatcaaaggaaggtttgaagactaagaaatcatccatgaagacttctatgcacttctataccatgtcagcaaagatggctagcatgcacc

SEQ ID NO: 169908 - DNA, 465 bp, Glycine max
tctagaggctgggcttatctaccccatttatgatagagcttgtgtaatcccaatccaggtggtaccaaagaatgggggcatgatagtcattctaaatgaaaagaatgacctaatccaaacagggactgtcactggctggagaatatgcatctattaccgcaagctcaataaagccacaaggaaaaaccactttcctttgcctttcatggaccatatgttggagaggcttgctagacaaacttattactgcttcttggatggatattctggatacaatcagattgcggtggaccccatggatcaagagaagaccaccttcacatgcccttttggtgtctgttcctatacaaggttgccatttgggttatgtaatgaacctgccacatatcataggagcatgttggccatatttgcagatttggtggagaaaagttttgaggggttcatggatgacttcttatcatt

SEQ ID NO: 169909 - DNA, 393 bp, Glycine max
cactagcctatataactcaaacaacaaaggcactataagtagagcattacatacccctccccccccaactctatgacttgtcccactagaattccatattctcatggttttatctgcagaactgctacatattgtttccccttaaggtaaaaagcaaaaagaaattgaagaatgtaaatacatgacataaatagtaacaactacaaaaaaatacatcaatgtgaaagagaatatactaccatcaagagtaaaatcaccataagtcacactgccatgatgactaacgaagcaagtaggggggtaattcaatcagttgtcttccacatccaaacattgaaatccccaaaaccagctaagagtgtgtgttgttgataacaaatatcaaattgttca

SEQ ID NO: 169910 - DNA, 460 bp, Glycine max
  unsure (1)..(460): unsure at all n locations
agcttcttcnagacttattataggataataagtatctgttttttcaatgttaaagagactattcaaggttaagatatattataccttcgataacttaatcttatgatttgcgcaaaacctttgcaatcccgaattacatatgaggggtattcattatttaaatcttaagcctccacacagagatgataaagtcgataataatatgattagaatatccgaatgtaattgcaacttagagacaaagaagacttacctcctcaacattgaatgctatctttgattatcgaagaaaaacataacaaaaggtgaagcgtattgagtttccattctagtccccagattttgaaggacacaaatttattattagaataaataagtgctttgtgtaacaactcacattaagcacggaacaatattatgttccctaccatatgagatggtatgaattgagctcagcttg

SEQ ID NO: 169911 - DNA, 357 bp, Glycine max
  unsure (1)..(357): unsure at all n locations
taaatcttttagcccatttggaatattgactttcaatggcccgtgactggtgttgagggcgtaatttgaccaaaaactgaattcctacttcaaaatggacattgcgtctttgcttatccccgctctccttcattcattggtgggccttgattattttctttggcaaactggatagcaaggcatcatgctcaatcaaccatttgttggatcaagtggcctcggaataattaaaaagggtgggttgaattaattatgaacgtgtcttgactaattaaaaatttattcttcttaatgttactagattcaattaggctttactaccaagntattagaaagttaagaacagaaattatatct

SEQ ID NO: 169912 - DNA, 390 bp, Glycine max
ataagtatgactgataattacctatgatcaagaaccttgtctttttgggcaatttattaaaaaaacaaaaatgatcttgattatatacaaaaaaatgaccaaacacgaagagatcgtctctgtctgcaaatcacatgaaactttgttaatgaacctttgccctaatataatcataatggcctccaaggaccaacttcactagcattgtgacctcaaccacatactccaccaatgcatccacctaaccaccatcattcactaggagcgactatcttgctctttgtggactcactcattaatgcaaacacataataacttgcatccacctcctggctcatgaacaaccttaagcctcctgcgacttacatgttaactagagttagattctct

SEQ ID NO: 169913 - DNA, 396 bp, Glycine max
  unsure (1)..(396): unsure at all n locations
catgtatnttcattctcgtgttcatttacttattatacccccttttgacgtgcttaagccatttattgaaggcattcctcgcttaatctaaaaaaaaaataaatgttcaccgatcggttgaattgtatcatccgttaattttggataaaatgaattccgaccattcggtcgtgccgtatccacgtgtggaaataaataaggaggtaaaataataatataataatcaaagaatgtcttttagtaaaataaagcgaaaaatctgtcggatgttttctctttgggatatctcattcttaattgaatagactaataactaaagtgatattaaggctaaaatcaactcgcctagtcaagctcgtccacaaaaataaggttttgaaagttttatcatctcag

SEQ ID NO: 169914 - DNA, 443 bp, Glycine max
  unsure (1)..(443): unsure at all n locations
tagacgaccttgtttgagccgagatgactctattatttatttgtacaagttngaatatgatgtagaagaaagtgaatgtgagccttttacccctttgaaaggtttgtatttaaaaatatttaaaaaatacttttaattaatatttaaatttttattcctttattagtatatatgtgaggggtagagggtgtcacaatgaaggatcacctatttatccatatttatcgcttgagaatgtatgacttatttattccacaacttattcatatttacttattgactcggtggtttattacaacacatgtttactaatgagaaaattacgtatgttttgaaaaagaataacgagtttgagaagtnatataaaaagtatttattttctgcaaaatatgcttcacttcttttattcttacgaagtattatgaatggcattggaataagtc

SEQ ID NO: 169915 - DNA, 438 bp, Glycine max
  unsure (1)..(438): unsure at all n locations
agctntaaaatttgaattaaaacgtttataaactgctggtaatcgattaccatatatgtgtaatcaattacacagtgcaaattntgaattcaaattntaatagctgttgtaaatcagttttggccactggtaatcgattacatcctctggtaatcgattaccagagagtaaatttgttgaaaaagagtttttaacttaaatttcttggccaaaccttttgctacttcaattggaattcccctcctatttaatataccctttctaagactagaaacttgtcttgatcatccatcttgaatatctttaatttctttgtcttgaataaagctttgagacgcatgcgaaactttggcatcatcaaaacattcagcttgatcctttgtctacaatctccccctttttgatgatgacaatccctgaaatcaagacaaactatat

SEQ ID NO: 169916 - DNA, 197 bp, Glycine max
  unsure (1)..(197): unsure at all n locations
taggggtgtngggggagggtttaggggatgatactgagtatcaatatggctgtcttacgctgctggactcantcatatccaatcaaataagtgatatgatcgtaatgatcaacttataaatccatcctctaccattcctaaggatgagtgaagaaagcatcagttcgtgatttcattaccttcccatcttttttttc

SEQ ID NO: 169917 - DNA, 421 bp, Glycine max
agcttaagacttattgtgatgtacaaatctcttccaactcagcaccacaactcaatttcttcataggcatcatataagaaacttagaaaacaaaacaaagttcaacaacaagactacttttaggaattgatttagaacatgttatgaactaaataacatgcatgaattagactcaaaattcaaaagataagataagaatgactagaatacatgaaaaaatgtatctagaattcaatcaacaaaatcaaaattcaacacaaacttataacataatgtgacaattattatgattaaacatgactctaagacaacatggattaagtgatttacacttagattttgtgttttttttctctaatcaatatcttggaagagaattcacatctaaaggttcagcacaagaagaatttgactgaaaaat

SEQ ID NO: 169918 - DNA, 435 bp, Glycine max
gtaacctcatcgtctctcacagactgtagatgtggtttctcttccagaccttgagttcggactctcagccacttatgatagccgccgatgatcccattactgcttccgctaagctctctgtcctttcttcacgccgcatcccatgccttgcgaactccttggagtaccctcgcgttgtggtcactgaaacctcgtgcgatgaaaggcgtgatgctttcgtctgatggcactcctctcatgggacatccttcgcatgaagatagaatcctgattcttccttccttctagcgagggaaccatttaatagacgcccctccatgctagccaagagttggtgcacaacaaacaaatcttgcgccgctcttatcacattcccggtcgaacgtgtcatacatggccataatggcgacgaccggtctttccttgccatgatga

SEQ ID NO: 169919 - DNA, 441 bp, Glycine max
  unsure (1)..(441): unsure at all n locations
agcttgtagaattatggggtacccatcacatgtggtactaggtggcggtcgggcgatggtgcacaacaagctttccacatccacaatgcgcgcataaacccaccatcccctgttgcccacctccaactgagctcacgtactcccacgtagcccatatcctcgtttctctcaacaccgggtccccatcaatcctctcaagcttccacaacatccaagcaaaacaacattcaaacagcacaagctatcacagccaagcaaaacagagcaaaggcagaaaactctgctcaacacatcaaccaaaatcacagcttttctcacgtaaagaccacagtaacaattccttcgatccaattcgttacccgttggatcgactccaaaattttactggaagtctatagtgtataagcctacattntgaccgttgggatctactagcaaaca

SEQ ID NO: 169920 - DNA, 441 bp, Glycine max
agcttaaatagtcccttaaatagttttaattaggactcttattcttaccaattgccaatgatttaatgttaaggccattttgccacagtggattagatggcaaccaaatcaatccatccctgacacatctgcgccaatccccatgaaacactgacatgattgtgtttcttaaacaagaaatggattaatttggccaccctctagttcacatttggcacaccaacatcacttgggcaaatgcctgatagttggcaattgtgttaggaaccatatagaaatttttcaattataggattaattaaaaaacatggtgaaattatagggatcaaaacaatggccatagaaaaaaatgccatctagaggtaaaattgaataaaatcacacaactaaccaaggagcagcattaataagtccagctcgatcagtgcggcatgatatctg

SEQ ID NO: 169921 - DNA, 435 bp, Glycine max
agcttccatcagtcccaagcactagtagagctcttatgtcgatgaatgctacccactctccttggctggccagagcttccgccttccgccttctcctacaagcacttccttggtatccctgccaccccattcctattatgcttcacttggtctagctcttattccgagatcttgaccacttttgctattcatgccatagaaggatagaacctggaaaaaaggtatggcttacttccccctagcgggcatcctaagatcccttcgaactcctctatgggtggtgctaactgaaagcccccaaagtgaagcatttgagtgattgatcgtactattgagtgagagacgtgatggtttcaactgacacttctataatcgccaaatcccaaatcttccatatgccttgctgaaacttgacgtgatcttgtgcatccctac

SEQ ID NO: 169922 - DNA, 441 bp, Glycine max
  unsure (1)..(441): unsure at all n locations
agcttatcttaaagaagagggtagaccaattttcgtatctttagaagattgaaattgactaattaaaaacaagtggagtggttcaaaatttcaggtaaagttattttattgttttgaatagaattttttaataggtttatacttataatataaaatcatttatactttgatgtaggaaagaagcttgacaaacaaagctaatcaaagcaagcaagaaataaaatcaattattggcacataatcaattgtgcaaaaggcatttgaaatggtaacatcttttaatattttatattcatcttcttataacgtaaataataataactcatttnttattttgtgattctttttatatgatatacgaatgtgtggtgaaatctcatatgaggcatcatacattagaatatattatgtctatattatttaattcttcttttactatat

SEQ ID NO: 169923 - DNA, 446 bp, Glycine max
  unsure (1)..(446): unsure at all n locations
cgcagcccaccatctgttcatagtggagttttttaatgcgtctaccatcacgattatcgtctccctttccattattaggggtaccacctgngccgccagatccctccaccttttgggcatgttctttgaaagatccgtccccctttntgcacatgttctgtagttgcatcctatccggaaccatatataaattgtactgatactgcctaacaaaggcaaccattaggtccttccaagaatggactcgggaaggttccaagttagtgtaccacgtaacagctaccccagtaaaactntcttggaaggaatgtatcagccattcctcatcttttgcgtattctcccatcttctgacaatacatctttagatgggtcttgagacaagtagtccccttgtacttgtcaaagtccagcaccttgaacttgggaatgacatgtttgggtatt

SEQ ID NO: 169924 - DNA, 386 bp, Glycine max
ctgacacactttattttattaagactgcgatgtcctgcacactaagacacactttgatctctggcattttcgtatgggtcatcctccatatgataggacgcactttgtaaaacaaacttatcctatgttgacctgtgatcaaacctttgtctgtgacacttgccatatactaaaacatagcaaacttccatttcctaataaggactcctatgcttctagacctttctctatgaaacatgtagatattccgggcccctgagccacaactactctgaatggacataagtatattcttacaactgtggatgatcactccacacatgtttggatttctataatggctccaaaatctgacacccaaactcattatcagcctttggtatcta

SEQ ID NO: 169925 - DNA, 437 bp, Glycine max
agcttcattgcctaacaagccaacttactatagtaagccccaagagactcagcataaggatgcacaggtcaaagttgagtatgtgacaagattgtatgaccaagtgaaggtgcaaattgcaaagaagaatgaaagttatactaagcaagccaacaagaaaaggaaggaagtggtacttgaacctggtgataatcttggacatttgaggacaaatgttttccaagaaggagggaatgatgagaatcatgaaactggccaaatacaggctaaaggcccaagtggagaaggacgaaagcctaagtggagaaggacaaagcccccgagtggagaaggatgaaggcccaagtggagaaggatgaaggcccagaggcagagacactatcaagacaattaattgttgtaaaggcccaactaatttgaggcccagtttatatgtt

SEQ ID NO: 169926 - DNA, 391 bp, Glycine max
  unsure (1)..(391): unsure at all n locations
ctttgcgtctttgtgaatatttgatgcgaccaaacaccacaacgttatgttagtaaatcagatttatttccgtttacttttagtgtaaaaaattatatatatatatatatgataattgagaattggataataatgtaaaaatcctttattgcatatatatacactattttctcttagtttaatctatatatttcgccttaatttatttaatgccttttctgcttgaaactatgcaagctaaaatctcattagaatcggtctagttgtggaaagtngaggcaatttgtacaaggtcctagctagaattaaagcttgttgctgttagaaaaaaaacaaatgctgctaaatgaatactaagtaaatgtgtgtcctgaaccacgaggatgatcat

SEQ ID NO: 169927 - DNA, 419 bp, Glycine max
tccttgcattagccacaaaggacttgttttgtagttattttctatcatggcactacttttgctgctatcttaatatatgacgttccttttgcttattaaacaaaagctggagtatgtatctcaaaagctacataaatgtcacaaaaaaaaaactaattaaaataattattgttcataaattttaatttgaccaaataaattacaaaacttacaattaaaacacaaaattacgaaatagtcagatcaaatatatcataacagagggaacaaattacaaaaatttaagatatttatctataattctatcaaaattatatgaaacattcacacatcctcaacatatatatatatatatatatatatatatatatatatatatatatatatatatctctcacgcgctcaccacatactcggat

SEQ ID NO: 169928 - DNA, 444 bp, Glycine max
agctctcttaagaagatttctaaagaagttttagcttatttacacatacctctctaatagctaagctcacctccttgagatgagaactagagctgagctacacaccccctataatagctaagctcacccccatgacaaataacatgaaaatacaaaaaaaaagtccttactacaaagactactcaaaatgcctcgaaatacaaggctaaaaccctatactactagaatggccaaaatacaatgcccagacgaaggaaatacctattctaatatttacaaagataagcgggctcatacttagcccatgggctcgaaatctaccctaaggctcatgagaaccctagggccttcccttggatctctagccaatctacttggagtcttctacccaatgcccttgcggggtaggattgcgtcattccctccaccttggaaagtatttga

SEQ ID NO: 169929 - DNA, 465 bp, Glycine max
  unsure (1)..(465): unsure at all n locations
cgaactgagagaggggganccaacagcgcacgccactcttgaagatatttctttccaactcggaaaagaaccatcttagtgcaccacactatgatgccatatgagtacaacgtacacaaattcatactcaagtactgaccatgaatgttgacctccttgcatggttagcctcaaacatgccaagaatagattccgagctctactatcactggctagctatttgcctgaaggctagaccaattatgcaaataaagaggaaagccgaccctaaaacaagaatgctctggatgaagaaacaaagaaactcctgaatgcatgattcatcatagaggtaatacaccacatggctagctacacatacctagacanatcctaccctaaatacttatacttgctttcgagtatagatcgcctacgtcatggagcatctggatttcccatcctccggttnttaaatgcatattc

SEQ ID NO: 169930 - DNA, 316 bp, Glycine max
agcttgcttcaacgtcacacaagcttgatgttttatctttataaggtttgctgagtagaaaagcgaaccctaatttttacgtccgcgcttggatttgagaaaatctggcatctgctattgcaggaaccacaaaaatatgccaagggacaagagccaagatggatccatccactgcttgttcctgaatgcctattacatctcaaaacatcctgtctaagagagtgtcaaggattggaaactgagctggattttgtagggcatattatgcaaaatgcccgagcgttagagacaatgaccatctacatatcaagttcct

SEQ ID NO: 169931 - DNA, 396 bp, Glycine max
  unsure (1)..(396): unsure at all n locations
agcttgttatcccgcggaagctactaacttcttcttcacttnttgcggcgggccatatccggatggccttgaatttttcacgttcacttgggccccatctctacctacttcataacttattaaaactatattatctacaccataggtacatttctctatattcgcatagagggtgttcttcctatggactgaaccaccttttctacaatactctaacacaacatatatgctcctactgcttacttaattatcgtcaaaataaaaaactacaaatctacctactcggttccttaaaaaatgatgcctgaacctaaaacggtgctgacggcagagtggcccaaatgcatctctgccattgttccacctcccttgacctgaggcagataacgccatccc

SEQ ID NO: 169932 - DNA, 444 bp, Glycine max
agcttagtgacacatactgccagcctgaatctctatttatgttcatagttacaggtaaatgaatattttatagttttggacttggtaaataagttgtaaaatttgtgtaattgttttatgaagcttttacatgtttttggattgtgagtagtcagtttttgttccctagggcataaatgatgtcattgttaattgaactgttttatgaaagttgtcatataaatttttttactattgtaaaatggagggctttataatttttatttcatgttggcagatagttgactgtaggagggtgctgaaattgacatatccatatgggtactatttatattgcaattactttactatgctattgaacaagaatgatgcatgggtaaagggtttgtgactcgtgacaatgaaggtcatattatgtttcttctttggtatagagatcctttt

SEQ ID NO: 169933 - DNA, 464 bp, Glycine max
  unsure (1)..(464): unsure at all n locations
ggcatgtccaagtttcttgtgccatacatagtgatttcctttgatggataatatacttggtacattntgatctgatagttcactaagattaatcttataaagattaccattcctcttagcagtcaaaagttgggtcccatttttatgttgggcgacacacccatctttgctaaaggaaacatcaagtctgctatcacataattgacttatgataagcaaatcatgtttaagcccttcaacaaacaatacattatgaatgggaggataaggatcaatacttatatttcctatccctgctatctttccctttcgatttcctttgaaagtgattgttccaccatgcatgggagtcaagagcattggaacatatatttttctcctgtcatgtgacataagcaaccactgtcaagtaccatgattgttggttcttgttgtgggtgaaatatttgaatatgaaatatttc

SEQ ID NO: 169934 - DNA, 297 bp, Glycine max
ctctcttgttcctgacgaacacacacgcaaagtttgtgtcttctcattaaaaaaacttcttccttcttttgaacttattaacaaagactttgctgtgcaggataaatgagaatgatctattcaagcatgactggaggagcacaccaccagttcaagtgtggcagaatatatacatgaaacgcgaactagcataccgcgttggacttctcactggtattatagccactctcatcaatcttgcagtcgagaatatagctgggtataagcttctggctgtgcttaaatacatgcacaaag

SEQ ID NO: 169935 - DNA, 429 bp, Glycine max
  unsure (1)..(429): unsure at all n locations
tgagggagaactcgatgcctcggtcaacctagtaactcatcttggcatgaattagaaatctgcacctgttgaaagagtctgtggtctatgatcttatgcagatcaccatacagatctatgtccttcttttcagcaatttggagtcaatgagaaacctgaagctcatgctgcaaatatttataataagaccttctcaacagcaaaaccaacaacagccgaataataatgatcttttaagcagtagatacaatccaagttggaggaatcattcaaatctgagatgggcaagtcctctacacaacaacagcctgtgcctcccttctagaatgctgctgcgtcaagcaagcnctatgttcctcctccaatgcagcaacagcagcaatcacaacaaagacaacaagcagctgaggccccttctcaacttcctta

SEQ ID NO: 169936 - DNA, 431 bp, Glycine max
  unsure (1)..(431): unsure at all n locations
agcttctgttctaaatttcgagcatctcgttattctatgggacacaatcagacatccgagtaaaaagttattgtcgtttgatttgctcagagcttttgttctaaatttcgagcgcctcgatatactgtgggacacaatcggacatccgagtaaaaagttattgtcgtttgattttgctcagagcttctgttctgaatttcgggcgtctcgatatactacgggacacaatcggacatcagagtaaaaagttattgttgtttgattttgctcagagcttctgttctaaattttgagcgtctcgacatactacgggacacaatcggacatccgagtaaaaagttattgtcgtttgattttgctcagagcttctgttctgaatttcgagcatttcgatatactgcgtgacacaatcagacatccgagntaaaagt

SEQ ID NO: 169937 - DNA, 461 bp, Glycine max
acctataaatactaagctttgtttccttgctccggaaacctttcttttcttatgtgcactccaacccaatctccgggttcgaagacaaccttctttctccctctgttggcttgcttagcatagcttttatttttcctctcaatttgatctttgactctctcatgaagcttcttcacatagtccgcctttgcttgaccttctttatgcttaaaaacagaaacattacgcataggcaaaagatcaagaggagttagtgggttaaaaccataaacaacttcaaaaggagaacaattagtggtgctatgaacagctctattgtaagcaaattcaacatggggtaaacaagcttcccaagtttttaagttcttcctcaaaactgtcctaagcaaagttcccaaagttctattaacacacttccgttgcccatcggtttgtgggtgacaagtggttgaaaataacaa

SEQ ID NO: 169938 - DNA, 433 bp, Glycine max
  unsure (1)..(433): unsure at all n locations
ggatccttaagtcacctgcggcatgcagctngcaccacttctcattatgtttatttttctagtgcggattttaattttatgtttagtaacaagactaaactcatgataatatgaaagataaattttttatttaatactctgtagtatatattgaaaagaaaactgttgaaattactaatttttgattatttttgcaacatataagaaaagtgttatgtgtgctttctttagtgatacgatgttacgagttttaatagactaataatgtaatgtaacattgaaacatcaaattataaatattttgcatcaaaactaatggtatatctttgccggatgtatttattcaccacaaaaatctattggatgtgctttatcttttgtgattggccctccctgtcttctcagtctaagttgccctcgcaagacatcatta

SEQ ID NO: 169939 - DNA, 363 bp, Glycine max
  unsure (1)..(363): unsure at all n locations
ttaactatttgnccttcaaatcttactgtttctttntnctaatatnnnnnnttnnnnctataaggctatggcttatggacatggtcttttttacccctaaggacaaaatcagattttactgtcaaaacaaaagttgaaaggaaagatattgagctggtagaccaggaagaagcacagattggtgctgatcattctagtgcaacctctaataaagctgagatttataacgaggaagcacgaaatgcaacacagaagcataagccaaagagggtggagagtgtcaatgctgatgcagaagcctttggtgatcactgganaattctgattgctttatgcattctgaagctgaagcactagaacata

SEQ ID NO: 169940 - DNA, 420 bp, Glycine max
  unsure (1)..(420): unsure at all n locations
agcttgttaacccgtggaagctacttatatctcccacactttntggggagggccatacttggatggccttgattttctcaggaacacttggaccccatttctacctactacaaaacttaagaaaactatattatctacacaaaaggtacatttctctatatttgcatacagggtgtatttcctaaggactgaaagaactttcctaagatgtcctaagtgatcatctaggctcctactgtgtactaaaatatcatctaaataaacaacgacgaatctacctatgaaatcccttaagacatgatgcataaacctcataaaggtgcttggtgcattagtgagcccaaaaggcatcactagccattcatacagaccaaactttgtgttgaaagcggttttcactcataacccttttaatcctga

SEQ ID NO: 169941 - DNA, 467 bp, Glycine max
  unsure (1)..(467): unsure at all n locations
tgtgcgaatcanatcactcctgcattgtatctctagcatgcattctttctttctttacccactcctcacgtttggttttttggggaaaaacaccataactaaacgcgccacaaggcatccctatcgcaccagatccaaatctagaacgatgggtgatcaagaggagacacaggaacagatgacagccgacatgtccactctgaaagaacagatggcctccatgatggagaccatgttaggaatgaggcagctcatggagaaaaacgcggccaccgctgccgctgtcagttcggctgccgaagcagacccaactctcttggcaactgcgcaccatcctccctcaaacatagtaggacggggaagggacacattgnggcacgatggcaaccctcacctgggatacaaccgagcggcttacccttatggattggccgccaactactcaccacccgtcttgaagacgatgc

SEQ ID NO: 169942 - DNA, 404 bp, Glycine max
agcttctacttatgtggcatgtggggtcttcttcactttcttgcctcaaccgcgagctatgaccactgctctttctttcgcgatgctcctctttatatccgcctgagtgggtttatagcctaaaccatacttcccacgatttcctttggcatttatcaagctagttatgccgccgttgtctttgcctaaacccattccgggttcgtaaccgtttcccaacataactcgggccatcattactgctgcatcgggtaggcaaggctgcccacagaaggagtccacggaggaaatgctgaccaactcaaaagactggagagcgggttctaacgattcttctgcggcttccacataaggcatagaggatgggcagctcaccaagatgttttcctcgctggacacgatga

SEQ ID NO: 169943 - DNA, 456 bp, Glycine max
  unsure (1)..(456): unsure at all n locations
tggattgattcagtctaactagggattgaggtttatttatttaggctacaacatagaacacaaaagcatgattgattacagaaacatctttatatgcatcagctggtctgttagaaagacccaacacttctacctactactgccaattntacttgcattttttactatttttagcctataccttagttaatcctattctaaatcatcaattatcaatgtttctttcaacaatgccttatttctgaatttaaccctatcttagactagttccctgagttcgatactcggattcatccattttaattttaaatacttgacaatccggcgcgcttctcggcaaaccggagttttcttgaacatatttgtataaagaaaaagtggatgaaaaagtaactgcatgggaaatctaacacagtatctatggcgccgctgccgagaactagatttaagaagagc

SEQ ID NO: 169944 - DNA, 358 bp, Glycine max
agcctttagcaatgttgtacatctagaattctaactgaaaactataaactattgattaagtaaaattaactccgattcatcgactcgcataaaattaaatacttttatatgagtatcttttgtattgagatgattttatttcaggaattattatgtttggtttcaggatttggttagacactttatcacttaaaaaggaatatacactaaataaaatatttgttatgaggatcgaaatagaaaatatataattagaatgttttaataatgtccagtttgtttatattatcaaataacatattttcatatagataaagttattaatttttataatgaatatcttaacacgatttttatt

SEQ ID NO: 169945 - DNA, 427 bp, Glycine max
  unsure (1)..(427): unsure at all n locations
tgtgcatgggaaaatagttgcttgtgaaagacgtataaatggtanaactgagacaggagaggaagttaaagtggctggtggagcaagaatgatactactcaacaatgaatatcaaggagaagagctttttgctgaccctcatattttgccagccactttcttaggggcctcagcaagtaaaactattagaagctacagtcaatctgttaaaaaaccaacagcttcaatttcctttatggggacaacgtttggtgaccctgcaccagtgatggcagcattttcttctagaggaccaagcctagtgcgaccagatgtaattaagcctgatgtgactgcacctggtgtgaacatcctggctgcttgccaacccaaattagcccaagctttctcatgagtgacaaaagaaaagtactatttaacatacttt

SEQ ID NO: 169946 - DNA, 400 bp, Glycine max
  unsure (1)..(400): unsure at all n locations
agctnntgagcaaatcaaacgacaataaccttttactctgatgtctgattgagtcctcgaatttatcgacacgctcgaaattgaatttgaagctctgagcaaattcaaacgacaataaatttttattcggatgtctgatattggcccgtaatataacgagacgctcgaagttgaatgctgaagctctgagcaaattcaaacgacaataacattttactcggatgtcggattgagtcccgtaatatatcgacatgctcgaaattgaatgttgaagctctgagcaaattcaaacgacaataactctttactcggatgtctgattgagtcccgtaacatatcgagaggctcgaaatgaatgttgagctctgagccaattaaacgacataactttttactcgga

SEQ ID NO: 169947 - DNA, 464 bp, Glycine max
tcaacattcaatttcgagcatctcgatatgttacgggactgaatcatacatccgagtaaaaagctattgtcgtttgaatttgctcagagcatcaacattcaatttcaagcatctcgatacgtgatgggactgaatcacacatccgagtaaaaagatattgtcgtttgaatttgctcagagcatgaacattcaatttcgagcgtctcgatatattacgggactcaatcagacatccgagtaaaaagatattgtcgtttgaatttgcttagagcatcaacattcaatttcgagcgcctcgatatgtgacgggactgaatcagacatccgagtaaaaagttattgtcgtttgaattggctcagagcttcaacattcaatttcgagcgtctcgatatgtgacgggactcgatcagacatccgagtaaaaagatattgtcgttcgaatttgctcagagcttctacattc

SEQ ID NO: 169948 - DNA, 443 bp, Glycine max
  unsure (1)..(443): unsure at all n locations
agctttactttaagattagagagaggctcatacctttcatggcggtggttataattacacacatcagcaactgtaaaagatcttgccagccacagaaaagaaaatgcttgatgcacatctgataaactcactcaaggtctatgtattaatagtggaaaagagagactgaatagtaaatgataaaaatataaaataattgttttgtattggcagagtacacatatatatgcccaaatgtagattcaaagttcaaacattttgggcctatagctagaccatccctcctagtcatagccatctgaattggatcgaccccaccncaaggtttgtgttggatcacttgcatgcatacacccaccacaggtggtgttatatgtttctcgtgattcttggattggaaaatactatggacaaatataattgatacagtcataattaattat

SEQ ID NO: 169949 - DNA, 474 bp, Glycine max
  unsure (1)..(474): unsure at all n locations
tntctgcctttgatgagtgttaaattgactcaatatcattgttgtatttataaacaattgcacttcattataaagagtttttatctgccatttaagtaacacgtttaatcataaagtaatagtatatacgtactccgcacaatggtggaaacaagactaacaatgatcgacagggtagttatcggactaatttaacagtatgaataacacaacaattgatgttgggggaaataaaataaagtgaaatagtctttaaataattgctgcataacacatgtgaataacacacaaattgattcttagggaaataatattttttatatagatcttttaattgaaatagtctttaaattagactatatctctataattgaaataattgctgcataacgcatgtgaattatntattatgaaattggtgagtattatcacgtcttgattcaagcgtgtgattcatgtgtaatgtcgattatg

SEQ ID NO: 169950 - DNA, 429 bp, Glycine max
  unsure (1)..(429): unsure at all n locations
agcttggacttcctgtgtnttgggaacctctttcttctcatgtgtacccaaacccaatcacctggttcaagcacgactttcttctgcttttgttggcttgccttgcataacttgcatttttcttttcaatttgaaccttcacttgctcatgcaacttcttcacatactcagctttagcctgtgcatccttatgcttaaacatagcaatgttagacataggcaacaaatcaagaggagtcaaaggattaaatccatacactatctcaaatggtgaacaattagttgtgctatggacagcccgattataagcaaactcaacatgaggcaaacaggcttcccaagatttaagatttttctttaaaacagtcctaagcagtgtgcctaaagtccgattgactacctcagtttgaccatcagtttgtgggtgac

SEQ ID NO: 169951 - DNA, 440 bp, Glycine max
  unsure (1)..(440): unsure at all n locations
ntgagccaattcaaacgacaataactntntactcgaatgtctgattgagtcccataatatatcgagacggtcgaaattgaatgttgaatctctgagcaaattcaaacgacaatagctctttactcggacgtctgattgagtcccgtcacataacgagacgctcgaaattgaatgttgaacctctgagacaattcaaacgacaataactttttacgcggatgtctgattgagtctcgcatatatcgagacgctcaaaattgaatgttgaagccctgagccaattcaaacgacaataactttttactcggatgttagattgagtcccgcaatatatcgagacgctccgaaattgaatgtcgaacctctgagccaattaaaacgacaataactttctactcggatgtctgattgagtctcgtcatatatcgagacgcttcaaa

SEQ ID NO: 169952 - DNA, 435 bp, Glycine max
  unsure (1)..(435): unsure at all n locations
cttaagcaccgcagctgcagctttngcgtccttgcttatccatgatgatttttacagactcactgcttattaaagtttataatgcatgcactcnacggtatgtattatatcagcgaagcgtacatttaggtttgattattatgggagccttgactaatttgactttttcggcatatatccttgtgtttggcatatctaaaatgaaaaaaagaatcttatatgtaaataattgtcgtatgaaaatgtggcattagttgaattaaaattagacatgataaataaattcatatttatgggtattatcttgaattgactccgactttgacagagataccgctttgataggatataaatatagatattactcgaactatttaagtggggatgaggatatggatgaatatcacaatatggtctgacccctatcatattata

SEQ ID NO: 169953 - DNA, 262 bp, Glycine max
atcacagcaagctgtagagctactactaaattccctcacaagttctgagcatcatatagaacgcaaagcacctctggccatgatatgagggcataaaagttgacccaggagaatcccgacacaggaaagtcacaggggcaaagaggttatcaaaggctaaataatacatcaaaaacaatactttactccaatagacagaggaaggcgacacgaaactaacacagcccattctttctcaccgtttgaatcatacagcacatca

SEQ ID NO: 169954 - DNA, 394 bp, Glycine max
  unsure (1)..(394): unsure at all n locations
agcttctacttatgtggaagggcgggcttctcttatctttttgtcttcaacgcgagctctgaacactgatattgcttcgcccnanctaggctcatgaccgcctgagggggtttatagcctaaaccatacctcccacgattgccttgggtatttatcaagctaaatatgccgccagcgcgattgcctaaacccataccgggtgcataaccgatccccaacataactcgggccatcattaccgatgctatagacagacaaggctgcccagagagggagtccacggaggaaatgctgaccaccccaaaagactggaaagcagattctaacgattcttctgcggctcccacataaagcatggaggatgggcagcttaccaagatgacttcttccctga

SEQ ID NO: 169955 - DNA, 374 bp, Glycine max
  unsure (1)..(374): unsure at all n locations
aaccctattggcctttaattagattactgcacccgccgcaagaatctgtggcttatgctcctctgctgcccaccatataaacctttgccctttcatgccgcaacccagagcaattgagcagnctgaagcttatgctgcaaacatttacaatagacctcctcaacctcagcagccaaatcaatcacagcagaacaattatgacctctgcagcaacagatacaatcccggatggaggaatcaccctaatctcagatggtctagccctcaacaacaacaacaacagcctgctccttctcccaaaatgctgctggcccaagcagaccatacattcgttcaccaattcaacaacagcaacagcgccagaaacaacaaac

SEQ ID NO: 169956 - DNA, 154 bp, Glycine max
  unsure (1)..(154): unsure at all n locations
tagctntaagctgctcaattgcttcatattgtttccacaagggcaaaggtccgcgcggtggtcggcagaggagcataaaccgagagactaccgacaggcgcagaattttgattcatggccagttgggctaccgggttaaccacaggcactctag

SEQ ID NO: 169957 - DNA, 414 bp, Glycine max
  unsure (1)..(414): unsure at all n locations
tgtaggactatcgcgcacgcatcacatgctgtactatgtggttgtcccgcgatggtgcacaacaaggtttncacatccacaatgcgcgcataaactcaccatgccctgttgcccacctacatctgagcccacgtactcccacgtagcccatatactcgtgtctctcaacaccgggtgcccatcaatcctcccaagcttccacaacatccaagacgaacaacattcaaacagcacaagctatcacagccaagcaaaacagggcaaaggcagaaaactctgctcaacacaccaaccaaagatacagctcttctcacttatagagcccacgaacaattcctttcatccaattcgctaaccgctggatcaacttacacattttactagaagcgtatagtccaatagcctacaatttga

SEQ ID NO: 169958 - DNA, 439 bp, Glycine max
  unsure (1)..(439): unsure at all n locations
agctnttgttcctttttataaaaagagaagttctgaaactcatcacgatgtctaaaaaggccttgaggtggatccaagtgcctgatcattcattagcatattcatgttttggtggcatgttcaccactgtttgtgtttcttaagggaactcaccataactaaaaaagcgcaaagacacccctataacacccgatccaggagaaagatggataacgaagagggagtgcaagaacagatgaaggccgacctatcggccttaaaagatcagatggcttctatcacggaggccatgctaaagattaaaaaaactatagaagataatgctacggcggccgcttccaatacagctagggaagcggaaccggtgctacagcccgcaataaacttgggctgagacagaaacgcgacgggtttcaatcggaggtatagtcctcaagtc

SEQ ID NO: 169959 - DNA, 467 bp, Glycine max
ctacaagataaagaaagaaccaattatcattgtatgtgtctagaatcacgaatctaatgtacaacgatgtgatatctaatttagaggaacctgaatatcctctaactatgtgtaatcaatactacctgtctatataaacaatcatctgttgtgtactctgatacacagtatacacacaaatatccctccatatttttctcttattttacagtatgcttcctgctatacagaacttttacctaagttttgttaccaaaaccctatgatctagtatttgtttctatactataagcctaaatttcctaaatccaaataactcatttcattagtgccacttgcaatcacaattttgagttctctctagccctgagagactcaagtagaaatagcagttagtcttttgaacatttcatataactaccatcatttatcttattagtagtatcaagaacaatgattctaaaata

SEQ ID NO: 169960 - DNA, 398 bp, Glycine max
cagcgactacaacggccattttataatattatatgcggaacatgagacagacatggtagctagagccatggtaacgcaatctccacttgaaaaagcactgactaatactatggaacgcttgacaacggaggaggaaaaagaatgcacagttgtttagaggaattacaacgtgtacaaaaaaatcctctctcaagagcacgttttgaagaattgaagaaagacatttcagcagaacaagctaaaggggagttgaagaccctccccagacatctaaaatatgtgtctctaggagaaaatgaagccaatcccgtgatcatcaccgattccctaagaaaagaacaggaacctccaatggtgaaggtctgaagaaacataaccacctttggatacctatttct

SEQ ID NO: 169961 - DNA, 411 bp, Glycine max
  unsure (1)..(411): unsure at all n locations
agcttgcatacaagattctccttgcttctgttctttataaccttctggatgggtcatatagatgtcttcctctaanncccatgcgagaatgcaattttaacatctaaatactccaagtgaagattctctgcagctactatgctcaaaataactctgatggtagtcatctttacaactggagagaagatctctgtgaaaccaattccttgtttctgctgaaaccctttcaccacaagtcttgccttgtttcttcttttgccggcagattcttcctttagcctatagacccatctattctgtaacactttctttccttctggaaatttagttaaagaccacattttattcttctaaagggatgtcatctcatctatcatcgctagctcccactcaataggtgcatcgccctgt

SEQ ID NO: 169962 - DNA, 347 bp, Glycine max
  unsure (1)..(347): unsure at all n locations
tctacttatgtgacagggcgggcttacttcactttctatactctatcgggagctcagaccaacgctctttattgccgcgatgcttctctttatatccgctcgagtggatttatatcctaaaccatatttcccacgacttcctttggcatttatcaggctagttatgccaccattgtctttgcctaaacccattccgggtgtcgtaaccgatccccaacataactcgggccatcattactgctgtatcggacacgcacgcttgcccagataatgagtccaccgaggaaatgcttaccacctcaaaagactggagagcggnttctaatgactcctctgcgctttcacat

SEQ ID NO: 169963 - DNA, 413 bp, Glycine max
  unsure (1)..(413): unsure at all n locations
cagcaagcttggagatattcaaaagctttattttaacctacttataccagaaagaaacattttaaaaagtgtgtgcatgacattttgctaaataaactagggtaggccataccttaagtagaataagcattataccttaaatgaacaacctaacaacttaattatatttgaagccctagctcatacaagcatgattgtgtataaaggaattgaatccaatgtaatgattcgtatcttatgtgtgtgtacgtataaatagatggatagagaatggataatataatatgacaatgcttgtgaggagaaaaaaaaatngagattaaaagactcgcttgaaaattcacttaagtgatggtggtgatgaattattatcttcattaagtcactggtgtcactactattaacattacata

SEQ ID NO: 169964 - DNA, 469 bp, Glycine max
  unsure (1)..(469): unsure at all n locations
tgtggatagtttntcacttatatttcgaggcccataatataatatttctgccaggcaatttatgttatgcaccataaacatagtgatctttccatttatttggagggtctttgcaggtacagagatcaaaccaccttctaccatcttattttcaaacagagcaatgctaataatatactttttaacacattgttattgggttgatattcacgagttccacaaaatgatgtgggttctgctccttatttagcagtctccaatccatatttagtggactccacatgaattttacccaataataaagcatgttgaaaagactatgtcaagagtgtgttgctagcatttagataacaaatagcanagcttactccctctttccctcatggactccattgattaaaacccagcagattttatctctggttgcagccatcgagggaaatacaccaaagacaccctctctatgctg

SEQ ID NO: 169965 - DNA, 432 bp, Glycine max
  unsure (1)..(432): unsure at all n locations
agctttggaaagatttcgtgggttactaataaagacgcctactcatggattttcagaaccggtctagctcaatanttcttttagatgctcttgcaggggaaaaaataaaattgaagacccccgaagaagccatggaattgattgagaatatgactactaatgaccatgcaatcttgcattgttagcccaaaacaagttgctatccaagcaacttgaagcattaacagaaacattaagtaagttgccaacccaattacattatgtacaaccttcaccatcttctgttttgcaggttgcaggttctgatatatgtggcggagcacatgattctggctgctgcattcccacagaagatacaacacatgaagtgaactatatgaggaaccaaccaagaccaaactttaatgcaggtgggcattctggatntaacat

SEQ ID NO: 169966 - DNA, 447 bp, Glycine max
  unsure (1)..(447): unsure at all n locations
gcttctatagtagaacatacgcagcgtatctaccatgatcgtgatcatttctctctcactcatgggtaggatgactggggctgctangtttctccacctttgagcatattccttgatggactcatgttcccgtttgctcatgctctgaagttggttccgatcaagagccatatttgtgttgtattggtactgcctaatgaaggcagctgccaagtctttccatgaccaaacctgagaggcttccaaatttgtgtaccacgccactgctgctccggctaagctgtcttgaaagaagtgcattaacagctcttcatccatggaatatgcccncatccttcggcaatacatccgaagatgactctntgggcacgctcatcctttgtacttgtcaaaatctggtaccttacacttgcgaggaatgatgatgtatgttaccagacacagatc

SEQ ID NO: 169967 - DNA, 423 bp, Glycine max
  unsure (1)..(423): unsure at all n locations
agcttgtctcagcggntatgcgagactctatttcaacatgttagccattatcagcaaataccaagaagaattaatctagccacagcctacgagcacaaagtggcggatgaatatgcccgagtgtacacggaaaaggaggcaagaggaagggtgattgactcattacatcaagaggcaacgatgtggatggaccgatttgctattactttgaacgggagtcaagaacttccccgattgctggccaaggccaaagcaatggcggatgcctactccgcccccgaggaaatccacgaactcctcagctattgtcagcatatgataaacttaatggcccatataattaggaaccgctagggagattgtattgtcactcagatcttgactagttataactttctgaataaaatatagttatcccgcgtt

SEQ ID NO: 169968 - DNA, 421 bp, Glycine max
tgagatgaggaagtgttgaagggtgaaactttctgttttattgttgaccacagagtggtacctggagatatgtcgcgggggtcaagagaccttggggacgtcaggtggggtgctattgcccaaaaccaagcttgaccaatcccgacccaacccgggcatagtcggtcagtgagaacctgtgatgtacctaagcaggcgagctcctggcagtcaacagataaaaggaaaacaagaccacaaagcaaggaggcttgtggtggctggccagctatgaattttgtgtaatatgtggattgtggcctctggtaatcgattaccaagggtgggtaatcgattacaaggcttaaaattgaggacaggaggctaagatggtctctggtaatcgattaccaaggggtggaatcgattaccacgcttgaaa

SEQ ID NO: 169969 - DNA, 465 bp, Glycine max
  unsure (1)..(465): unsure at all n locations
tcgtcccggatcttaagncgacgcggctgcagctgcaataaggaaccccaaggacccttatatgtaagtttaaagttgatgaatcagcttcatcccttatttgttgaattacctggtcaggagaattacctatataagctcatcccattaaaccactgcaacaacatgagccttgtaactctggctttcttgctgcctgtgaactgagtttttgacattaatgccaagtgcaccaaaacagaaataatggtccctcaacttccttccaacagaagttctctataccaactntggtgattcatcatcatcaggtggtggtgatggttgacttgagcaagatggtccggcaatgtcattgtcaatgaaaatgccctcttgcttgtctattgatctaggggaagaaatcgacgactttgaaaaggaactagaccttgatctgccagaaacattngcatgtggcatgga

SEQ ID NO: 169970 - DNA, 428 bp, Glycine max
  unsure (1)..(428): unsure at all n locations
taccaagggcatgccttgnngctttgaagaatggctattaaaggtgtaccttgggttttctatgcttctacaaagatagaatttacgaatagaaaagcttatcaagggtagaccttgtataccttagatttccgcgacggcaaaacttggcaacggaggggctcaccaagggcagacattgggtttaatgagctttggaccatggattcgttcgtcctgggttttggcgaggctcaccaagggcgaaccttangtttgttgagcctttggggatgcaagactcactgagggatgaacttgggtttgacgagcctttggagaagcgagactcaccaaggactgactntggatttgacaagcctttcgagaagcgagacttaccaaggatggaccttgtgtttgataagccttcaagaaatgagactaac

SEQ ID NO: 169971 - DNA, 323 bp, Glycine max
tccagcttcctagatggcaagccaaaaattccatagcttgttagaagaaccagcccattgcgtgaattaattggtgcatatcgaaaacatcacaccacacagatcaaacaaaagaaatatggtggaggggtagggatcacaaaccatttattaggcttctgaagctttgccataaaagagttctatagacagagaaactgagaaaatctgcgaaaatacagctgagtattcctattctgatttcacaactctctggttcttattatacaggatttaagcttttccaacagcttctaatcaactgaatgttacagaaaactagc

SEQ ID NO: 169972 - DNA, 425 bp, Glycine max
  unsure (1)..(425): unsure at all n locations
gctgatggccgctaacctcacatctatgctaatcacatattgcagaaaatattgcgttgcagaaagcgttaagcgnncctgctgcgctaagccccaaatcctttcttgaatgtgaaatttcaagttgggctctgcgcgaggttaggctaaacgcttgggttttaaactcaagcgtcacgtgggcacgctaagtgcaattgtgcgctaagcacgccatacgaattatagtttttgaaagccaaaggctgaggtactttgggtgataccacaagttacctctacttctgttactgtgttctcttgcttccaaatcatacatttcatctgtgtgcctcatttccttgcacaaacataatccaagtaaggtttcttgcataggtccttcgcatttttatctctcaaaccttaagatagatgatttcttg

SEQ ID NO: 169973 - DNA, 447 bp, Glycine max
  unsure (1)..(447): unsure at all n locations
tctaaaggcttggattatctaccccattttcgatagtactcgtgttatccctatccacgtgggaccaacaaaagggggcatgacaatcattcacaatgaaaagaatgacctaatcccaacaaggactttcactgactggagaatatgcatcgaataccacaagcctaacgaagccccgacgaaagaccactttctttttcctttcatggaccaaatgttggataggcttgcgggacgggcttattactacttcttgtatggatactncggatataatcaaattacggtggaccccaacgatcaggagaagacgaccttcacatgtcctttggtgtctttgctttaaaggtgcatgtttgccatttttgcagatatggtggagaaaagtatcgacgtattcatggatgacttctcggtatttcgaccctctctttgatgctgcttgaa

SEQ ID NO: 169974 - DNA, 429 bp, Glycine max
  unsure (1)..(429): unsure at all n locations
agccttgacttgagtcatcaagagattattattatgtgaccatggcatgaattcgtaatcatctttttcaacatctctttcacgatcaagaaatctatctttcaatcttctttctcaacatcattcaactctttcaacagattttttctgattctttttctcttcatctttctaaaagtttttgttcaaaactttttcttccaagtaaagttctttgttcaaaaacttgtgctattcatctttttcattctcttctccctttgccaaaagaacaaaggactaactgcctgaattcttttgtgtctctgttctccctttgcaagagaattcaaaggaccccgcctgagaattcttttgattcttcccttccctntaaacaaaagatctcaaaggactaaccgcctgagatatcttttgttctccctttac

SEQ ID NO: 169975 - DNA, 445 bp, Glycine max
  unsure (1)..(445): unsure at all n locations
tcttttggaccttgaacaagcaactaacgtctctttcattaccatgctacgtgctcgcgactggttcctctcttcccttcgcagcttgagttcattgatgctaccccacagagctccgtgaaatttgttccggccatactcttccttgcgagccctcttggtctcttgttcaagggctcgtgcggtagttgcattctcttcccgtaatccggcacactccttccggatgtgtgtagcggccaacttgaacttctccttggcaagtttcgcctttcctaactcgcttttgagagcttggacttcttcgtcctcttccggtgcttcaaaactctcttcgctgacgacttttaacttggcgagccaatctaaacctcgtatatgaactttcagccattcatggtaaccaccaatgatgccattacgaatgcncctaagttcttgatct

SEQ ID NO: 169976 - DNA, 411 bp, Glycine max
agcttcggaagaaagtgatgaggtacaagccctatatgcagagcttgaaagagcccgggtagtcgaagagaagttcaagtccatagccacaaagtctgaaaagagtatgatgaactaaggaacgtcaatatggccaccgctgaggccttggaacgagaaaccaagatggcccgaaaggaagaacacgaccaaagcaaagttttgaggggctttatagggcagcaatagtgagctcaagctccaaagaggtgaaaggaatcatcacgggtcaaaagcatgatcttgaaggacgagctaaaggcttgccttatgtcgaaaagaaatttgtcccaaaagttaagcgagactgaagggaatatgtgggccatcatcgatgagtgcaaagagaagctaaatctagcggcgactcac

SEQ ID NO: 169977 - DNA, 441 bp, Glycine max
  unsure (1)..(441): unsure at all n locations
tataattacatgttagaattagcttatttctctagacatgctttctattttcatgttcacatttttcccctaaaaccccatggaattgataattctcatcattactttgtggctaagtttaattcgtcaaagtatgtaactaggttctctacatgacttaatttaacaaaatttgttggcataaagagattactaagttggatgtgcatatatctaatgcatcatttatcccattgttagtgtgttgtatgcatgaactaagtggttttgggggcattacaatgagtaagtaatgatatattttaggtgttttgttgactnttaattgcatctatctactttgttcatctgtcaactttggcaaccatgttgttggtaagaactctacttaatatccagattggtacagaattgacaatcatgctcatgtgtataaatcta

SEQ ID NO: 169978 - DNA, 352 bp, Glycine max
  unsure (1)..(352): unsure at all n locations
tgcaactttatggaaacgngngcttctattttattttagaagcttgaaatggctctgcctgagaatcgttttccagagccaactcggagcaatcggtcagcctgaaagtggatccatcgctgatgatttttgaactggaccattcaacttccttttgctacctagggctgcttatagggtaaccccaaaggaggtggtgtggaacctattatctttaaatccaggctctattgaacaaatggaggccataacatatgatgggggtacaataccctaacaaagtgtcttaacagtctgccttgattacagtcttttcagggcccttctgaggataaagactcctccattcaaa

SEQ ID NO: 169979 - DNA, 446 bp, Glycine max
ctggatcttcttccccttaaaggagtgcggtttagtatgttttatcatgcacaatgtgaagctacaaaatcacctactcccctaaagttgactggtctagtggaaatattttgcactggttaaattaaattggttggaattctttagtctaattatgttcaacctgaacaaaatgaatcgatcctctttgtgatttataaactcgccggttgagtctaattatttttttgtaatacttttttactatcatttagttgatgcaagtcaattacaacaaaatgttatctaatgacaattatgagtgaatctttgcccaaatcatatattttttcttttttttcaaaacaaaattttgcacatttacataataggagaacaaatccaaaccaataaaaattgattaatctgaatctcatgttctctcaaatccgattcaaaacttttga

SEQ ID NO: 169980 - DNA, 318 bp, Glycine max
  unsure (1)..(318): unsure at all n locations
agcttgccgccacggagttttcccactattctcttgtgttggggaagtgattatgcaagctgaagaggacgtttnnttgggaaatacaatgataaggtactttgtgatgttgttcctatggaggccagtcacttacttttggggagaccatggcaatttgataataaagccaatcatgacggttacaccaacaagatctttttcattacttttggtgttgcataaaaaatgtacaatggtcgacgggtaggtttttttgtgcgaactcaaacgacattatttttcgtgcgatagtcgcattttcccatttatcttggc

SEQ ID NO: 169981 - DNA, 449 bp, Glycine max
tctcgaccattccaatgggtatgacttctattacaatgtcccatcccgggacataactcatctagacgctccaaattgaacaacgcacgctctctacaaattccaatggtcataacttttcacaccgatgtccgattcggggacataactgatctagacgctcacaagtgaacaacggaagctctccagaaattccaatggccataatatttcactcggatgtgcgattcgaggacataatatatcgagatggtcaaaattgaacaacggaaactgtccacatattcgaatggtcataactttttacacagatgtccgattcggcgacataactcatctacatgctcgaaattgaacaagggatgctctcgagacaatcaaatggatctaaccttttcccaccgatgttcatctcagggacatattaatatattctagaccctccaaat

SEQ ID NO: 169982 - DNA, 357 bp, Glycine max
agcttgagatcgaagataccatcaaccatattgtatcgcgaaacatgctcttatcacacaaaaaggcatccatttaccaaccagaggaatccattcctaaatataaaaaatcatatatctaggagggactcatacttacttaaagactttttcacagctaaatctaataaattgcctactataaacttcttgggggctcacatactgcacatgaacacatcttggtatatgtggccactcaaaatcctccatgataaagataaatgatgactatcgtggcaattgagtgctacataaagtgcgctctataagtatcagacacctaaagccatatgccacaaaaagtatatcttccta

SEQ ID NO: 169983 - DNA, 292 bp, Glycine max
  unsure (1)..(292): unsure at all n locations
tcntctgtgctatatatatcacagtcgactatcttgtttgatcttaaganaagattgtgctctttattctacggcccacagagacaatgcttataaatggtgtacacggagatgtcctagtttccgatgatccaatgtgcgaagagaccatgattgtagcctcagtccgacaggtttagggtgtctacgaggatgcacaaaggtcaatgagagggacagttcttgcancggtgacattatcgttacattctaggcggtgaatgtgtggggaaataatgctcttacttttgtt

SEQ ID NO: 169984 - DNA, 386 bp, Glycine max
cccgaggcatgcatatgaccaaaatgttgtcttccatgatgagcatgggcagaacttacagcaatctactttcacatccgaatccaatcaccttccactaccaactagtattcgccaacatatatatcggtggagaaaaatgaccaactcctatcattatcattattcagcattcacataattaagaataatagataatatcatcaatgaaactactacaaaaaatcacaaatttatttaacataattcacactcttacttttatattcacacactcaatttcaatttatttaaccaatacattttaaattatcatctttacattcacaatctatatatctataccgcccctcttactatgacttatttctctcacctaagataat

SEQ ID NO: 169985 - DNA, 425 bp, Glycine max
  unsure (1)..(425): unsure at all n locations
agctttacagcagatgccactttatactattattttgaaagatatgctaactaagaagaacaagtacatctatagtacaccatatttgtggaaggaaattgtagtgctgttattcaacgtatccttccaccgaagcataaggatccaggcagtgtcactataccttgttttgtagtagaagtttcagtaggcaaggctcttattgatttaagagccaatattaatttgatgtcgctctccatgtgctggagacctggagagctggagataatgcctactcggatgactttagagttagctgatcgctccgtcaccaaaccctatggagtgattaaagacgtgttggtccaggtcaagcatctcatatctcctgttgatttngttggaatggacattgaggaagatgtggatattcttgtcatttt

SEQ ID NO: 169986 - DNA, 458 bp, Glycine max
  unsure (1)..(458): unsure at all n locations
tgagctcaattnttggtggcatctttgtgttgtctgaagaaattgctatatatgcttccactctagggataacacaaattcaagcacaccaaagatcatctttgttccaggagatgtggatttgaagacattattggctcttttggctttcatggtgtgctactcttggttttgctaatccttttccaaagattcctcctttttatattatctattctcactgagtcacctactgctatgtaaatgtgtattatttactgctaatttattccattctcctttacccgttacttttctacttttctccctttctttagtttggggctcttcctttacaatagtggagtaaaagaaaacatcttttcaggtgttggaaaacttggtggaaaattcattgccttatctcacgtatagctataaaaagtacagggttcggtaagccttttcatccccttgga

SEQ ID NO: 169987 - DNA, 408 bp, Glycine max
  unsure (1)..(408): unsure at all n locations
agcttcataaaagtttatatggctcgaaacatgcactgaggcagnggtacaagaagtttaatgagtttatgagaactcaggattcaacagatgttacatggaccattgctgctatgttaaaaaatatactaatagctatgttatccttgccgtgtatgttgatgacatgttgattgcaggatctactatagcagaaattaataggttgaagcagcagttggcataaaactttgaaataaaggatcttggtctagctaaacaaatccttggtatgagaattctttgaaacaaatcagaaggaattttgaagctgtctcaggagaaatatatacacaagttgcttgacagggtctaccttgaagaatctaagaccacgaatacccttttgggatctcatttgaatggttc

SEQ ID NO: 169988 - DNA, 450 bp, Glycine max
tcatagggagccatgctcatggtagagtgaaaactgttattataagtgaactctatcaatggaagaaaactctcccaacttcccttctgctctaagacacatgctcttaaaaggtcctccaacgaatgaatggtccgttcagtttggccattagtctgaggatggtaggctgaactcagtctaagcttggttcccaacgctctgttcaagctctcctaaaacctagagataaatcaaggatctctataagatactatgctagatggcacatcatgtaacctgacaacctcacttatatacaaggtggtcaacttctccaaggaaaatttgatattaatgggaatgaagtgagcagacttagtcaatctgtcaacaataacccagatagaatctaaatctctagggtttctaggtagtcctaccacacaatccatggagatattgtcccac

SEQ ID NO: 169989 - DNA, 421 bp, Glycine max
actttaccactggttatcgattacaggaaactggtaatcaattactagagagtaaaaaccctggtaacttgaaaattttgagaaaaacttttcttgtaaaacaaaattgtgctatgtttgatttttaaaaaatattttcaatacttcccttgtgaagccttcttgatttcttctcttgaatcttgaattcatcttctgttgaatcttgaatcttcttgatttcttctcatgaaacttgaaattaatcttgatcttgaacttgttgactcaatcttgaaatcattctcttgggctttttgtcatcatcaaaactacttgaatcaacttgattcatcatcatgaagcttgcttctacaatctcctcctttttgatgatgacaaccctgaaataagaagcacataacattatttttttctagtc

SEQ ID NO: 169990 - DNA, 329 bp, Glycine max
agctttctcaagaggcttctttgagaatcttcattcttatctatacacccctgtattaactcaacatacatccttatacataaatacggatgagaataacgcacccataatacaacatgacacattattaccaataatatatagatatatgtatcagggtgttacattggaggatttggagaataggctacgagcctggcttgttacatatactatcaactatgccatgagctggagtactcctgcgaagaagagtttgttaacactgaggtgaaaaactttgtttatggtcccttattatcaaacacactaatatttattactaagag

SEQ ID NO: 169991 - DNA, 434 bp, Glycine max
gtcacctgcggcatgcaagcttgtcccatttcctaacaggagcaacaatgtggtcccatggaggtacgcccctgaaaagccaaacgaaaagaaggacaaggcgtcgagggtggcctatgttatgctaaagttactaacatcaccggcgtaagcgatgtgacccgtagtgggcgtgtcttcgtggcacctgacccgtgtggcgtccctaaattaatgactggtttaatagtaataatttaaataacaaaaaccatggtaaattttttttcttctttttctttttcatttctttctcttttcaccataactaggtttagaaggaaaatcctcactacagagtcctgaatggccagttcacaactctattcggagtcatttctttcttaccgctcataatctctaaactattttgctgtttcaaaaggaagaatgta

SEQ ID NO: 169992 - DNA, 411 bp, Glycine max
  unsure (1)..(411): unsure at all n locations
tatccttatggcctgcctncggacttcacccctcgtgccaccccggaatagttaagcccagccctacttttgaggggcaactcccaccttatgaagactatcccggcaagacgatggggaaggagatacccatcttggtcccctgctccacctcaaagatccgtccccgcatgaactaccccaaccgaacatagtccgtcataccccggcctcacccacacccgcaaaagaatttgttccctttgcggaacataagggaaagattgaggcgcttgaagagaggttgagagtagtcgagggcctcagcaattacccattctcggatttagcagatttatgtctcgtgcccaacatcgtcatgcctcccaagttcaaagtaccgaactttgataagtacaaaggtacgacatg

SEQ ID NO: 169993 - DNA, 315 bp, Glycine max
agcttccatcttggacctaaagacctcttctttctttgttccacttcacaaagacaacttttgagtttgaataggtatggaacgtgaatccttttctatgcttaggttgttatggattgcgatgcaatcctaccccccaagggcattggatacaatactctaaaaagattgggccacagatgaagaagaacgacctatgattctcatgagccttatggtaaatttttggcccatgggatacgtatgagcccacttatctttgtaaatattacattagggtgtcattatttctggaccttgtctttagggcttcat

SEQ ID NO: 169994 - DNA, 405 bp, Glycine max
tgtatgttacagctacaacaattgggttggagatgaatatgatcggactagttccaccgaatctgcgcttctcatggagaatacaaccttcacttggatgtcaaaaaagtagccaataataactctttcaacttctaaggcagaatacatagctactacttcatgtgtttgccatgcaatcttgctcaagaatttgttaaaatagttaggcctgtcacaagaaaagccaaccaacatcttctgtggataataagccagccattattctaacacagaatacagtgttccatgatcaaagcaaacatattaatactcgttaccactacatagaggagtgcatagcaagaaaggatgtacattgcagaatatgtgaagtctgaagaccaagtacctgacatcttcact

SEQ ID NO: 169995 - DNA, 450 bp, Glycine max
  unsure (1)..(450): unsure at all n locations
atccttagagtcacccgcggcatgcaagctntttgaagttttctggttttccaaaccttgaaaacttgtgctattcatcttttcattctcttcttcctttgccaaaaagatttgccaaggactaaccgcctgaattctttttgtgtctctcttctcccttttccaaaagaacaaaggactaaccgcctgaattcttttgtgtctcccttctcccttgtcaaagaattcaaaacgacacagtatgagaattcttttgattcttccatttacctaatacaaaagtgttcaaaggactaaccgcctgagaattcttttgtatccccattcacaaagtatcaaaggtttaacagcctgagatctttgtctcaacacattggagggtacatcttttatggtacaagtagagggtacatctacttgggtttgactaagaacaagagagggtacatc

SEQ ID NO: 169996 - DNA, 455 bp, Glycine max
tgtaattggagagaaatgataacaatcaaattccataaatctaataacactaacaaaactggacaaaagaaacacatattccaatccaaattcagttgaaataacaagaacaaaaaatagaaagaaataaaaaatatataaatacgaaccaaaaatgaggataaaaggattggcatatccagcatcaccatgaacaaaaaatcgaccacctcgtcaccaccaccacaaatatcgcaccttcgccatctcagatttccaaagtcgtttcttaccccaaacctgtcttcaactccgatgattccatcttcgacttctttagaaatgtcattaccaaggtccaaaccttagaagttgtgaaggcgttgaagtcatcagagcctagtttagcccgcaaagaaaaataaccgttatcctctagtttattgtgtatttagagtagcatatttaaaagcaat

SEQ ID NO: 169997 - DNA, 442 bp, Glycine max
agcttgccacccagctcgcccaggcgagctatgttgcttcctccaaaagcaaccgccttctggaggaattttctggaaggcccaagtggcctgattgctatttgcacccccgtttttactaaatacacccccttgctatttttttggtgattatttccgtaacgttacaaaactttacgaatgtcgcaacgatgcttgttttctttctgtaatgttacaaaaccttacgaattacgtaatcatgcattttttgccttccggaacgttaccaaactttacggattgcgcactaacacttcctttaatttccggcatgtcacggaacttcacgggttgtgctacaatgctatcttttgacttccggcatgtcacggaacttcatgaattgtctatcgatgggtgcccaatacctcgaagtgggcaaacgagggtctcattcaac

SEQ ID NO: 169998 - DNA, 356 bp, Glycine max
tgtaatcgattacacacatactgtaatcgattaccagatgagattttcagattatattcttaacagtcacatcttttcatttggctcttaaatggctatcaaaggcctatatatatgtgacttgagacatgaatttgctaagagttttcagaacaaaaagatcttatcttcttaaaaagaaaaatcgctttatcctcttacaaattccttggccaaaacacttgtgattcaataagaaattatttgagtgcttaaattgttcaatctatctctttcaagagagatctcctcttctcttcttctttattctgaacaacgattaagagaccgacggtcctttgttcgcaagaaatctg

SEQ ID NO: 169999 - DNA, 366 bp, Glycine max
tagcttattatataaaaggaaagtgtattgttatatattgatgggaaaacgagacatgggagataagacaggaggaatatgagaatgaggaagcgaaaacaaaataatgggaaaaggaaaaaagtaaaagaaaaccacgaggcgaataagaaataaatatcaaacagcaaaaatcgtgaacactaattacacgtttgattggttatcgaaattagacgattaaaattgaaacacgagagtaactagaatagaaatcacgatcagcggaaacgacaagtcgcgtgggcatgaagagaaatgtcgtggcggatagaagcttccccagtaacgagtggctgggaatatctacaaactcagctcaacaat

SEQ ID NO: 170000 - DNA, 423 bp, Glycine max
ggaccttaaaactcagcttcttgcgcaaatggtgaagctgacattaacattgctgttcaggtcaagctggataggtctgaagttctaatctatccaaattacgcgtaacttagtgaagtattctgtcacagagagggctccttgctttaatgtcgatgcttcttgctgcaaatccgagattcttataagatctccctgcgagcatctcgacttcaggtctctccagatatctctcgctttgtccatccagagcacgctttgtcttatagaagcaccaactgagtgtactatccacgataccaccatattattgcattgccgctaagctccgtatgttctgtccgctttaagtggtttccgcgcgcttccgtcacaaactctagcttggtttggcactagtgcacggatcatggacgactcatg

SEQ ID NO: 170001 - DNA, 433 bp, Glycine max
agctttgttatacatcaccttcatttgttctataactagcttgatagttttctcatcaaaaccaaatccaaaatttgtcctgaatggacaacgtcatgaaaattttagaaggaaaacattagaaatttggaagcttatgtactaatcaagtaagttgaaccaacaaagcacaatattgactccacaacaaagaaaaaagcaacaaaattgtaaaccataaatttaagacatagtgatcaaatgttcaacacttaaaggaataaaaaaatgcataaaggagctattacaatgaaaagtgtgttctgcaagtgtttcattgggcatatattctaccacaagcaacctctcatctccttcacaataacaaccaagcaaaattgccaacctttggttatgaagctgaccactaatcttgcttcctctttagtatgaa

SEQ ID NO: 170002 - DNA, 394 bp, Glycine max
  unsure (1)..(394): unsure at all n locations
cgctttcgttgtcaatgccaagaatttcttattatcttgaaatgtgttctaaaattattccctttccaccctccccccccccctccaaaaaaaagggtgttgcccctataaaatctaaatatttttttaaatgaatgtcaaatacatacgaaaataaaaaagaatacattgatattcaatttactaccattgacaatgaaaaaatcaaagaacatttttaaagtataattctgcatattgttagatcaaaacatatttatgtcttaaagaagaatcaagattccaaattatttagattatatacaaacaaatacaaatgacaaaagttgtgttttatatgcatccgatcatgatctatatgtatgcatctgaagntttcacatgatgcactcct

SEQ ID NO: 170003 - DNA, 401 bp, Glycine max
aactattattcatagtaactccaatgttttttattttattacccaaaccaccttgcctcatgtcagaccatacctgcggaacactttgatgatgagatcatgatactcatctgcattcaaagtcagataacatgccaaaagatcatccatctgctttgaaacattctgatcattcagcagccttccttcttctccaagaccaatattatccttcacctttaacttcagtgtgccttctcctttaacttcatatgtattgaggcacctcttattaggttgcttatactttggccttgccttggtctttcagttgacattattggtataggttctgtaacagctttaaaatacaacacctgcacaattaccagagtagctgtccacattgggaaataaataac

SEQ ID NO: 170004 - DNA, 439 bp, Glycine max
  unsure (1)..(439): unsure at all n locations
tgtaaaatgaaagtcacggattgaatgtgttttactattctcaacggnacgggattctttctatataattttcagtcacattaatcataggtgacaacggtaacatcttcccttagattcgacgacgacagacgacaatgacatccccccggagatccggtgatgacaacaacataaccacggagatctagtgacaatgacaacttctatggcttaagcaactttaacatcacattgtttagccagagtttaagggtgaagtttgtgccatcgtggacgtgatagaggaagacgtggntgatattgtgtgtaacatcctgaaatgctcttcttaatttattttgttacactgtgcaaagtgacactatgatgagctagacaatgaaaatctgtattgtgaatttaatgctgtgccttgtgattaatcattcttatatat

SEQ ID NO: 170005 - DNA, 431 bp, Glycine max
  unsure (1)..(431): unsure at all n locations
agcttctntacaatcttaggcttgagcttctaaccttataaatttatgacataattgcctataaaactctgtgctatcaagctatcatctcttggatacttcttccttttgtatcttgctcaagtccattttttgcatctctatccatctttttagaatatattggctaggaagcaatttaatgtcatttctatcaaatactttaaaagcataacaacataatatgccaatggactcaaacattttacaactacatgaaaatgtgttatcaacataattcaataacacttttaactctttatcactttacaccataccaatngtatgttcaaaaacgggttcaacttcatttcaatgttttatatatgctattgaaaacaagtcatactatttttgaaacatgtccaaaatcacaagagtataaaccttac

SEQ ID NO: 170006 - DNA, 464 bp, Glycine max
  unsure (1)..(464): unsure at all n locations
tctaaagttagtcacatcataataccatttgctttgttgaacgttattgtaggaaccaaatcaaccaatggtgttcaagcaaaagaaaatgttagttgagcagattatatgcagcaggcacatcgcctcattttaccgcctactgaagacaataaaagtgttacaaggaggaatgaaagatggaagaagccattaccaaagccaaattaaaagcaaactttggcattggaaccattattaggaccattagggtgaatttttgacagcagcaacaaagtttatgccaaatcttatagtatcagagtggaagaatctctggccttaagatggtgtattgaagtcatgtaagaagggaccaacactgcattacacatattttgatggcattatcaaagattgcattctattggtgcactctttntcatcacctggtgttcaatgggtaagaagaaactgcaacatta

SEQ ID NO: 170007 - DNA, 399 bp, Glycine max
  unsure (1)..(399): unsure at all n locations
agctttaaagngaatgggggtcatatcaaaacaatctcttctaaacattaatcattagaagaccggctgatantttttaataggtttaattgatataatgctcctaattaattatgcattgcgatatttggttactttaatacttattgtacttggtagtcaatctcaatgttctctttttcttggtaatgcatcactgttctatcgcttacaaaatctctaattttttggcaacaaaatagaaacatcatctctcgctcctaagttgtacattttttttgctacataattagtacgatacaattcaataaaaaattaaaattgatttcttacatgattcaatgattaattcgcaattatcaatattgcaggtttgataacttgctgtctaccggcgtc

SEQ ID NO: 170008 - DNA, 407 bp, Glycine max
  unsure (1)..(407): unsure at all n locations
gcttcgaagggaagagagagaccacgtcttgagcacatatcatgggcttgaaagaggagttagctgcttgctcanagtccaaaagaaacttgtctaagcgttatgcgagatagagaccaacatgttagccatcgtccgcaagtaccaagaagaattaaatctagccacggcccatgagcacaaagtggcagacgagtatgcccgagtgtacgcggaacaagaggcaagaggaagggtgatcgacttgttacatcaagaggcaacaatgtggacggaccgattttctcttactttgaacgggagtcaagaacttccccgattgctagccaaggccaaagcaatggcggacacctactccgccccgaggagatccacggacttctaagctattggtagcctctgataga

SEQ ID NO: 170009 - DNA, 373 bp, Glycine max
agcttgctttctagattcatgcattctcctattcaagttcattttcgtgctgcaaagagagttttgaggtatatagaggtacaactgattatggtttgtattttttaaaaacttaaagtggagaacttcaaggatatgcaatagtgactgggcaagaagtgtagatgaagctaagagcacctctggttatgctttctcatttgggagtgctgcttttttcatggaattcaagcaagatattgtggcccaatcctcagtagaagctgagtatatttcaactgcagctgcagcaaatcaagctatttggctaaggaagattctgttagatgcgggtcaaattcaaaatggagctattgtcatttgggtggacaat

SEQ ID NO: 170010 - DNA, 450 bp, Glycine max
  unsure (1)..(450): unsure at all n locations
tagaagagtctttggaagcaagtgctttgctctgaaaaatggtaatgatgacttgggcacgtctcattctaaggccgataaagcaatatttttaggctattcctcatctatcaaagcattaaggtatttgtgccctgaggtgtgacaccctctaccccgacatatatataaataagcaaaatatataaaaatattggtaaccaaattcacacgggtaaaaggttcacattcacttcactattatcaattaaaacttaataaaacatatttggctcaaaataagaccatcaaaatttacatagatattttattaaatcagtgaaataaaataaaatagactaacatcatgcaactaatataaaaacttatgtcccactgtctcattctatcacaagtgtgngtctnnanntccttcagcataaagttccttaaaacaattcacctagtcgt

SEQ ID NO: 170011 - DNA, 434 bp, Glycine max
  unsure (1)..(434): unsure at all n locations
agcttggaaccaaatatttgaatattcggtccccttatagatattgtaaaaatgtctgctagttgatcattagaactaacnaatcagtaataacttccttaaaaaggactttctcccaaacaaaatgacaatctatctcaatatgtttaattctctcatggaatactggattagaagctaatgtagggctgcctgattatcacaacatagcttcattggttgaatatttccaaacttcaattcttgaagaagttgtttaatccaaatcagctcacatgtggctacagccatatctctatattcagcctttgaactagaccttgcaacaacattttgcttcttactctttcatgagacaagattttttccaatagacacactatatcctgaaatagaacgcctatcaataggcgatcctacccaatctgcatcgc

SEQ ID NO: 170012 - DNA, 337 bp, Glycine max
  unsure (1)..(337): unsure at all n locations
tttaattgggggtttgataatacctaatgaatatatttccttgaatcgagttttgaagacgccccctaatttatcttattgatattntattattcaatgatttgcagttgtcatgcctgttgatcgctgttgtattactgagtgtttttcatgtgtgttttaatggaacaagtgtgaactatgaattgaaattgtataagtgtcaaaaagttgccctcatagattgaaatcttgaagtattactgagtgtttttgccactctcataattcattttacggttgaatcgagacccaaaatttgtcttaatactttcattgacatgaacaatacaggaat

SEQ ID NO: 170013 - DNA, 420 bp, Glycine max
  unsure (1)..(420): unsure at all n locations
agcttaataaatctatatatggtttaaaacaagcctctcctcaatggtaccttaagtttcatggatagtttcttcatttggtttgatgaaaaccccatggattaatacatataccacaaggccagtgggagtaaaatatgttctcttgttttatatgtaggtgatattttacttgcagccaatgatcggggtttgctacatgaggtgaaacaatttccttctaagaattttgacatgaaagatatggatgatgcatcttatgtcattggcattaagattcatagagatagaccttgaggaatnttaggtctatcacaggaaacctatattaacaaaattttagagagatttggatgaaagattgtcaccaagtgtcactcctatcgtgaagggtgatatgtttaatttgtaccattgctc

SEQ ID NO: 170014 - DNA, 471 bp, Glycine max
  unsure (1)..(471): unsure at all n locations
aagcntttccncattgaacccgtcttcacaaaacanaaccatttaaatccttagctagcgagcgagaaaactcacaaatatggtttcgggatggagaaggacgtttcgcacatccaataccattccccaaaacacgcaagaaccagaaaattgtaattattgttacgacaacaacaacatcaattcaagtcccaaaatcacttccaccaatttctcatcatcaattcccacccttcattcccgaaccaattcaccactttccaaacacaataataataatgcaagaactccctctcccaccaaacgcaatacccgcgtgtcgtttcatcaatccactccctcttccccaaactcaccctcaaccttctctcttctcaaatccaccttacgcttatccaaagtaagttaacctaattaaccacactctacccttttaatttctttttatgtacttattcttaattttcttat

SEQ ID NO: 170015 - DNA, 425 bp, Glycine max
  unsure (1)..(425): unsure at all n locations
agcttacaaaacctaggtatctttgcaaatgttgctcctcttgctacctctagagcctgtttcccgaaataggcactgnggctctctagaatatgtgccaatcatttgcctaccctaatgctgcacaaagcaggctttaaataggctttgaattcatgacgttgtgcttagcaccaccctcgcaattagcgcgggaaagtggatttgggcttagcaccagtcatgcgttgagcctggctgaggacacctgttgtgcttagtacactgatctcgcgcttagcgcatgaccttgatattgatgccctgccagattcttctgtcgcgctgaagctgcgcttagcggtggatgcgcgcttagcccagctgctgagctaagctcaactgtcacttttggcacttcatgagttagcctctttttcacctga

SEQ ID NO: 170016 - DNA, 457 bp, Glycine max
  unsure (1)..(457): unsure at all n locations
tcaaatctgtntaaatccaagcccatacataaaatattatcttgatcagataagataagataagatctagatgaaataatatctagatgagatcaaatctaaataatatctagataagataaaatctagataagataaaatttggtagaataaaatagtctgctctcttcaagtccaagcccaattctggattcaagcccaattgtttataattctccttaaattaaattaaaaacacaaaattaatccagtaggcccaaatgataaaactgcataattaatttgacaattaatgctaatcagtaattaaaatggtgacaaacagggttaagacatatgaggaaatgatgacacatcacatatatatatgtatgtcttacttcaaaaagcaagggagagatatctgaagagaacttcattgccaaatgctctcttaacaacacttgggaaaacactt

SEQ ID NO: 170017 - DNA, 314 bp, Glycine max
actgcaggcgtgcaagctctgccaatagcttgcctctggagctttcttttttctgccctaactgggtaagactggcgatccctacgctgttgaatttgactgatagaacctcgctactaatgaatgcttttgacttcataccatgttttactagaacgaacaaaaatcggtgcgatttattactacgacatctatcttgggtggattggatgaatgcctgaagaaatgcatactgacacaaatgcaacttatgaataccggagcccgggaaattgactccttcctatatacaacgtcttggggcaacacagagc

SEQ ID NO: 170018 - DNA, 444 bp, Glycine max
  unsure (1)..(444): unsure at all n locations
taatttgtctggttaaatgcttgagtgtgcctgagacttctcctactttgtttcgtatanaagctacgaagaacactaaagctttgatctttatctcacacacgacaagcacaaatttttatgacaacatctcgatttttgggtgttcttgatccattctttaccttgatggagctctttttgtttccatccccgtttctgcatttccttccattacaatttgttgagctaatctaaataggtgctcaatctttcattctgtgttcttttactccgacacatattttgttgcttacttaaggctgttaatattttggtatatactaactgacattggtgcatttctatcaatctttcttctttagcttttaccttttctgtgcactatatctcggccggagctttcgtgcttcaaatatcaaaatgcttctacgcttcttgtgt

SEQ ID NO: 170019 - DNA, 189 bp, Glycine max
  unsure (1)..(189): unsure at all n locations
gccgcaataccagattttactatctcacgtancactaaaatttcgtctttctgcttcaatctgcaatatcggtttctaccgatcaatggaaggtataacccccaactgttgttctctcttgaggatcaagcacaaccctctttgaggtttagtactactatagaattctaatcaacatctcctctacac

SEQ ID NO: 170020 - DNA, 341 bp, Glycine max
  unsure (1)..(341): unsure at all n locations
ggggtcgaattaaaatatctccaaactacttccncaattaaaaatctatctcactttttattcaactcatgaattctcttaatgacaatcttcttaaatattaattcaaataaaacaatttgaatatgaatataaagcaataataaataaaggagattcagggaagagagaatgcaaactcacttctatactggttcagccacacccttgtgcctacgtctagtccccaagcaactcgcttgagagttccactatcttcgtaattgcttttacaagttctaaacacacaaggacaatccttcctttgtgttcagaattcctttacaacaagagactcacag

SEQ ID NO: 170021 - DNA, 205 bp, Glycine max
  unsure (1)..(205): unsure at all n locations
atataacagcttaattctcctagngnaatcaccacttgagggtcatagtcctctattctgcaagcccctccccttatcaaaggaacctccctaagctgacatgtgaagtccgaaaccccatatcagccacatccaacttgacgtggacgggtctagattccacaagaacatcatctgtgccaatatacaatgggctcaacttctc

SEQ ID NO: 170022 - DNA, 437 bp, Glycine max
  unsure (1)..(437): unsure at all n locations
agcttgttaacagccctctcaatgcatctcgggcttgtnttnttgtacgtattccccacatttggtgcttagcggtttacgattcagtgcacgtctgtcaaaacttgttttgtcgcactttcctgataaacattgaacagcaatattatgtctttttactatccctcttaatattttatgaaaacgacgttaaacgacatagtaacattaataatgtaatattttgacatctttaaaagctctcaatattttggctgtcgtctaataagtaagacagatttacaatcgtttaagaaaactctatccaattataaagagattaaatagaagtgaaagtataaacaaagtatatcattgctaataacaaaaggtactaatacaggactgcgactaaatcaagtntatacatacaacatcttaactattataattctaac

SEQ ID NO: 170023 - DNA, 252 bp, Glycine max
gctattgcccaaaaccaacattaccaatcccgacccaaccccggcataatcggccactgataacctgtgatgtacctaaacaggcgagctcctggcagtctactgattaaaggaacaaagaccacaaagctcggaggcttgtggtggttggccacctgtgaaacttgattgatatgtgaaatatggcctctggtaatcgaataccaagggggggttatccattacaaagcttataaatgaagacagggggct

SEQ ID NO: 170024 - DNA, 433 bp, Glycine max
  unsure (1)..(433): unsure at all n locations
cggagctcggcgtctctctgaagatcctcatctgacttgtattaaaatgagacatattcttccacccaagacttgatagcatcccatatctctagcccatcagaagcataaggatagtcctcgatcaaaagtctaactccatggggagcagatggatccttaacagcaactcctctgaattaaaagcacccaaataacattgattagcacaagagttatatcaagcctgaagccctttttcttcttatgtcattgatgactttctatatgatgcattcatgtgttcccncatcgtatgcactttgtgatttctctttgctttttaatttactgtcaaacacacaactagagctgaatctgaacaagacactatttccaacacaaaagactagagctgaatcanacacacaacaacaatcatggctagaaataa

SEQ ID NO: 170025 - DNA, 410 bp, Glycine max
  unsure (1)..(410): unsure at all n locations
agcttnctataaagatagtgggttgtttgttgtcttctacttaagggacttcattgtcaacttacaaaatgatatgtgactacacatacctgcatatgagttttgctaattgggtcgagttgttcctttatccagacagttgttgcttgtagcttttgcgaaagcaatgatatttatgatcgagacattcaaatttgctcattacgacccgaagtgatctttattctttgttctcatgtataattatgggcaagtaaaataaatatcttctcggccattcattcttattctaactccttccatgtgagtgatgcaatattgatgacatacacctctaaaacatatgatacacttgagaagagaccattcagtaacatgtaaccaacataaatattgtatagaagtatgac

SEQ ID NO: 170026 - DNA, 400 bp, Glycine max
tgtcaacttaagccttaaacctcatcatcatgtctgttttataaacaaattggagctctttcttctccattttgcacaagctcaaccaaaggagagatgagtctatttctttcttcttacaagcttcatacaagtgctcttgaggtttctttcataaaagctttggtaaggggctcttaatcttccttatcttcttttccttaccaaattcgtgcaagcttctcatttatggttgcaaaatttcattttcatatttagaagcttgagatatcaagaatttgatttccttgctcatctaagaaattttgtgtagcttcatcaacgtaaggggggtttctccaattcttgaaccctaatgttgttgcctgtggaatgaatgtagcttccatgttcaaaattt

SEQ ID NO: 170027 - DNA, 379 bp, Glycine max
  unsure (1)..(379): unsure at all n locations
agcttcatggagaatcaaaggtgattcatatgtgttttgatgacaacaatgatgataacaaaagatgatgacnaaagctcaaagatcgatcatagaacaactcaagtgaatcaaagatcaatcaaagaacaactcaagtaaatcaagaagaattccagacctcggaagagagtttagagtcaagaatcaagattcaaggttcacgatctcaagaatcaagattcaaggttcaagatctcaagaatcaagatcaagatgcaagaatcaagagaaggctcaatcaagataagtatgaaaagctcttctcaaaaattgaatagcacatgagttttctcaaaacatggttaccaaagagtctttactctctggtaatcgatta

SEQ ID NO: 170028 - DNA, 447 bp, Glycine max
  unsure (1)..(447): unsure at all n locations
tatncttatataagagaaagcattcttcccatcaaattcttaagttgacaaaaaaaaacaaagataaaacattgctcgttcaatagcaatatccttacacatatctctgcggataagctcctgaagcttaaacataatgcgttgacgagtggtgataggagtatctttccatgaaggaaaagcttgcttggctgcactaactgcagctttaaactcttcatatatagttaaatgaacttgagatacaacttcttgcgttgcctgagtaaagataaatattcaaattactttttacataaaccatcacaatgctcagaaaacttcaagcaaatatcattgaaaaacatatcaacttaccggatttataacatcaatgattacagaaccctgagaatctacacatctccccccaataaaatctgagaccttcagctacataccaataaa

SEQ ID NO: 170029 - DNA, 422 bp, Glycine max
  unsure (1)..(422): unsure at all n locations
naagcttgcttctacatgatcccatttgtaatatccctaattatcgacttctcgggggctcttacactacgacatgcactcaacatcattgtggataaaaaatctccataggtatccttttctaagacctcgataactagctttgacatcactcaactgctcttaagatcattgactatcctcacaaaccaacaccaaacattttagcatgctttgtcctaactcaaacactttctaggaaactttctaagaggtcacccatcccataactacttcaagtcgaacatgcttaattgtagatttcttaaattatagggtattgaaaaagaaatgcatcttgttggtatatgtagtaccaattaattcctttaagtcacctcaatgtataatctatacctatacaacctctggatctctttatt

SEQ ID NO: 170030 - DNA, 419 bp, Glycine max
  unsure (1)..(419): unsure at all n locations
aatctaactgccaacacgacactctctttttcatgtctttgactntagaatatatatcagctgcctaattagtagaatcttgggtgctttgtaaagctgcgaactctatgttttaaccatattcttttttaattcatcctacataaatacaccttataaattattaccctgcatcaatatgttcattacttcaatgtcaccaaacaaaactcatatcctcattagttactccccctcacaccataaccctctattagaaaattaagccaaacacaacatataacaaagaaaaagtattgaaataaaaattaaaattcttataattatagtagtcaccttttcagtaacaatgctctcatcctttcgagttccagtgtcaatataaatttctgtcgaagacagtgcactccttctacctt

SEQ ID NO: 170031 - DNA, 419 bp, Glycine max
  unsure (1)..(419): unsure at all n locations
tgacgggaaatcagcatgccattgcggtcagttcaaccaccgccggaatgcatatcacgctaatggcnttaaaattggcaagggcgatgaagtgattaccccttccctgacctgggtttcaacccttaatatgatttccttgttgggtgcaacgccggtaatgggggatgtcgaccgcgatacgctgatggtcacgcctgaagctatcgagtcagccattacgccacgcactaaagccatcattccggtgcattatgccggtgcgccagcagatattgacgccattcgcgccattggcgaacgttacggcatcgcagttatcgaagatgctgcccatgccgtcggtacgtattacaaagggcgacatattggcgcaaaaggtaccgctattttttcatttcatgcccattaaaatatta

SEQ ID NO: 170032 - DNA, 458 bp, Glycine max
  unsure (1)..(458): unsure at all n locations
tcaagctntagtcctcatgttggttatgttgctccctctatctctaacaaagataacattagccacaacatcattcttagccaaatcaaatcccgaggagaagctggtcatatacctcttggtctccaatgaaattgtgagtgcggccgtcgtttaggagcatggagaagttcaaaaaccaatttatttaataacttgagtccaacacgagactgagaccaaataccaactcatagagaaagttgtgctagctttggttcatgtggcaagacgactttagaaatatttccaaagtcgcttagtagttgttagaaccacatgttctatttcaaaggtgttaaggaagcttgagctactatgaagaatgatagcatgtgattgaggccgtacccgtatcaaataaacattnaaaatgcaatatctatgaagtgatcctatgtcgtctccaacgagtaatg

SEQ ID NO: 170033 - DNA, 373 bp, Glycine max
cagctctacaacagatgccactctatgctatattctttaatacatgctaactacaaagaacaactacatcactagtgactccaattcatggcaggaaactacagctctgttattcaatatatccttccacctaagcataaggatccacgcagtgtcactataccttgaactataggtgaactatcacgtgggcaacgctctgattgatttgggagccaccattaatttgatgccgctttccatgtgccacagacttggagagttggacataatgcctactcgaatgacgttaaagttagctaatcgcttctcaccaaaccctatggagtgaatgaaaacgctctcggtctagtaaggcatcttatctttcctg

SEQ ID NO: 170034 - DNA, 394 bp, Glycine max
tatgaaactaagcttcttagagatcctaagaagtagagctagctactacacatctctaatagctaagctcacctccttgagatgagaagctagagcttatctacacaccccctataatagctaagctcacccccatgacaaaaaaagatgaaaatacacaaaaaaaaagtgcttactacaaagactactcaaaatgccccaaaatacaaggctaaaaccctatactactagaatggccaaaatacaaggcccaaatgaaggaaaaacctattctaatatttacaaagataagcgggctcatacttagcccatgggctcaaaatataccctaaggcttatgagaaccctagggccttcccttggatctctagcccaatctacttggagtcttcta

SEQ ID NO: 170035 - DNA, 394 bp, Glycine max
  unsure (1)..(394): unsure at all n locations
ctgcagcttgaataaactttgcccaggtttttattctggacaccggtactcatactagagagtaaagactcccnnnactagaacactctgtgaaaacccttctgaaacaaaaaactgtgctttgttcgactttcgaaaaaacctttcactactccccttgtgaagtcttcttggtttcttctcttggaactcgaattcatcttttcttgaatctggacaacaaactttcctcgattcttgaatttgttcctgatttaaacctgaaaacatgttttgggctctctgccaacctctttgccattatcaagactctctggaacaactagattcatcatcaagaaacttgcttctacaatccttactaggagtggatcgcttgtgccccccttatatt

SEQ ID NO: 170036 - DNA, 457 bp, Glycine max
ttgccgatctggtcttccccagtgaaaggatcgatgtgtgtttctataagaggtcaaatttgatcactctactatgacgactgagaacactggggcacatgaagagggtgagaaagacggagaaacccatgctgtgactgccattccattacggccaagtttcccaccaacccaacaatgtcattacctcagccaataacaaacctcctccttacccaccacccagttatccacaaaggccatccctaaatcaaccacaaagcctgtctaccgcactttcaatgacgaagaccacctttagcacaaaccaaaaaaaaaacaaacaccaacaaaaaggaattttgccgcctaaagcctgtacggttcaccccaaattccgctgtcatatgctaaacttgaccccatatctacttgataatgtaatggtagccataaccctatccaggttcataacctc

SEQ ID NO: 170037 - DNA, 423 bp, Glycine max
gatcttaagtcactgcggctgcagcttttgacctgcttgaaagaaaaatatttgttatttatgaatacatgcccatcaaaagcttgagctactttgttttgggtggagcctatacaatttattctaaacttctttggccatgcttttatttcgtacctgtagtttatgaaattacagagtgtgtattttactagatgaaaccaaaaggagtctgtatttgaggttgagtcagctcatggcagattgaagaaaactatgagttgttctcctttcaaaattgaggtgcagttcatttgtcatattttgatggatactttgaactaagctttttctaaaggaatgtctgatatcataaatcaacttgaaaatcccaatcaatataaacacttttttacataataaataatgaaattagcctaatta

SEQ ID NO: 170038 - DNA, 432 bp, Glycine max
  unsure (1)..(432): unsure at all n locations
ctatgaaactaagcttgttatgtgttgattntacacttgggtgtgcttatctactttcaactcattaaaagatgacttgcanagtaaatgaccgattgaatctttatttcacattgataaaccgaggttatgacacaaacgatcgattgaaactttattttacaatgactaagtgagattacaacacacatgatcggttgaaattttattttatagtgattaagtgagattacggctcaaacaatcggctgaaattgctttacacaaagacatgagatcactgacggttgaagaatgagatgaagatatgagaagcaacaagagggacccctaagggtgcatagattgaattcaaagcttcaaaataaaatctaactgatcgacgaacgaagagcggacgaagaatggaagtatgaatcgatcacggaagcg

SEQ ID NO: 170039 - DNA, 354 bp, Glycine max
  unsure (1)..(354): unsure at all n locations
cgggaccttaagtcaactgaggcatgcgagcttggaagtatcatacctcacaaaatatatatattttgtttatgtagcgaaaataccttatatatgcatgtatgtgacacaaaagtgcttcacgagatatatttatgtatgtctaggcagaaagataccttggatatgcatgtatgtagcaaaaatacttcacaaaatatatacatgtatgcttaggaagcaatataccttggatatgcttgtatgtaacgaaaagatatctcacaatatatatatatatatatgtatgtttaggtagcaagagaccttggacacgcatgtgttttgctagatacctcacanatatatacctat

SEQ ID NO: 170040 - DNA, 377 bp, Glycine max
actcaagcttgttagagctatcatcacatgacgctctattggcatatattaagttgttttctacgaaacttgagattctaatagaaacacttggtaagttgccaactaaactgtctattggtcaacctatacattcttctgttttgcaggttacacgttgtacaatctgtggtaaggcttatgaaacatgccaatgtattcccattgaggaaaacactcaagaagttcactatatgggaaataaatagagacaaggatatactcaaggaggattctcacgctttcagtagggtccttttaaccaacaaggacagtggagatcacactctcgcaatcaattcaacaaggaccagcgtggactctccataggccaatta

SEQ ID NO: 170041 - DNA, 426 bp, Glycine max
  unsure (1)..(426): unsure at all n locations
agcttataaaaacacgaaatgaattgtatgtctcggattcgaaaacttacccgttgaaggatgaagaacgacnaanaacgtgaagaatttccacagaatcgcttacggaagcgttacagaagcacttcgactcgatttttcttcacgaaaacgtgttttttgcccaaaatagccgaaatgcatagccaaagggggcttgaacattttgaaacagctcccccctcccctatntatagaaaaaaaggaggtgcttgccgcccaaagacttaatgaagaagatttctaagcgcacccgaattactaagttcaccccccttttcgaattttacagaagagttacggaagccttacggaagtgttctcgaatttgaatttcatcttttttctcttccctttcaccaatgttaagtggaatatgcttaccca

SEQ ID NO: 170042 - DNA, 451 bp, Glycine max
tcttttggaccttgaacaggcaactaacttctctctcaataccatgctatgtgctcgcgactggtccctttccttccttcgcaacttgagttcattattgctaccccatagggctccacgaaatttgttccggccatactcttccttgcgagccctcttggtctctcgttcaagggctcttgtggtaattgcattctcttcccgtaacccggcacactccttccgaacgtgtgtagcagccaacttgaacttctccttggcgagttttgcctttcctaactcgcttttgagagcttggacttcctcgtcctcttgcggtgcttcaaaattctcttcgctgacgacttttaacttggcgagccaatctaaacctcgtatgcgaactctcaaccattcgtggtacccaccatgatgccattacgaatgcctctaagctctcgatctttcctaa

SEQ ID NO: 170043 - DNA, 413 bp, Glycine max
  unsure (1)..(413): unsure at all n locations
agcttggnttcccaattttcaattatacatgtgtgatccctaatatattctttattgtgcaatttcggttaagntgggagctattatcaattttttaacggaatttactagtgcaatatgttaatataatgtggcactaacatgtatcattaagaaactatacaattatgatactttgaagactaaacctacacacttaattttggcccttttattttagaatattattcgttctatctttttgcattcatttttataaaaaataaatattctttaaattgaactaatattcttaaataaactactaatgataaaaaggagaaacaaaatcatccacgcaaaaataactgcaccacatccccagcttaccaaatccggatccatctttatatcgaacaaggagcccaaaataa

SEQ ID NO: 170044 - DNA, 453 bp, Glycine max
  unsure (1)..(453): unsure at all n locations
ntagtatcctgatcctgactcagacaccggttaagaatgtgaacgccttaatctcatggtatactcttaatcctttaaagtgaaaaatggaactttgtgaatagaaatgtttacagtctgtaacaatgactagaggttttaaaacacgtggtcttacttttacatcatgagcaaaggaagaaattgaatatacatttgttctttaataattcttttgttctgcattacatttcttaaaacataataattttattcttatctttaataaattttattttagtttcaactaataacaaatgaaaatattttatcaaaaaattaaaattaaaattattaatttatcgatgattaaaaaatgtgtcagacattattattttattacacaacaatcataaaaatcaaatatttctctggaataaaaatatatctaaatcttattatacatattaacta

SEQ ID NO: 170045 - DNA, 342 bp, Glycine max
  unsure (1)..(342): unsure at all n locations
agcttgtgctcatgtacaagggggttatcttcactcttgttttgttgaaagtggcaatagtcccatacacattgnaccnaggctctcaactcatcctcaattctgaggctcaactagaagctggcttacactctcattcctctacatcattgtcgaacgttatcatcatcaccattgcagcttcctccaactttccccccaaaagcaataaccaccccaaaaccttctctgatcctaagcacacaaccaccaccatttcagacacttgcagccacccaactgagtctgataaccaacccaatgaacctaatgaagaacaaaaggaggttcaacaacaaccac

SEQ ID NO: 170046 - DNA, 458 bp, Glycine max
tgttgtgagatccccggcttgacactcacctctcatatttattacgcgggagatttgccggatttttctgggctcacttcctgtgtggagtaaaggcccctatgaaaacgtccgatcccatttgtctcactcatttaactggagagggattagattcggacacagagagagagactcatttgtcaggaaaaaacatttaccaaccattgacagagaaaggaacgggaaaatcattgtgatttttgtacacccaccggagagcgtgtttcaaactgcacttgcggattcgttcaccgctggatcgggctgatttttggatagccggatctacacgcgactcattcatactgtctggtcggattgtcaaaaccatatctattggagagggagatcagtgcctcgcatctgcgtttcatcttcttgtctctctattgtcagcattcgtcctttattttgat

SEQ ID NO: 170047 - DNA, 417 bp, Glycine max
  unsure (1)..(417): unsure at all n locations
agcttgcacttgaggagggaangttatttgttgttaatgaaaaacatcttactatttgccttcaatatacaatttnntttctgtgttgtaaacataaacaatatatggctatggcttattgacatggtcatttttacccctaacaatcttagaagtaaatatagaccatgtttttacgcgataccgttattgcacctactctttctgcaaaacctcattactgttggtcaagagatacaagtgagctcgtaacaaatcttctacacttggagagatcacctcgcagcctcttgaacccttaccaccgactctgctatcatgctgagacttaagaagcccaacaagtttatcctcctctaagtattttgaacagaaatcaatggcttcttcttcaatgtacctctcaacaatagatgc

SEQ ID NO: 170048 - DNA, 353 bp, Glycine max
  unsure (1)..(353): unsure at all n locations
caacctcantcaagctagcgctatacactaaacatatggagcgtccggatactgctaggctgttggtgctaacttcgacttctcaatccatccacactagagcgttccttagaggatgaaaccgatgacgcaaatggatgtcccacaataggctggcttgagaggtcaattgctaatccttgattatctacaagatattggcagcaatgatctacacgatgtccttggacatctaatatttcatcccatgggagatcgagtgagaaaaaacggtaccatacatgggatgacaaggagttgtgtcacaaaatttcacattctgacggccgcctaagggggattatggggagatc

SEQ ID NO: 170049 - DNA, 166 bp, Glycine max
gcaccgcagatgcagatttatctagaacgtttcttttgactacatacgcgcggccgggttaacagacagaataagaagcaaacacacaaacgttgggatgaaaaaatcctgaccgtcaaggaagctgctcacaacccaccgaaatgtcaaaagtatcccactccga

SEQ ID NO: 170050 - DNA, 232 bp, Glycine max
ggccacaaaatccctttctggactacagatatcactatgaaatacatctatcgtcaaagttgccaatcctctgtaaatcttatgaatcacacttgtgaggtgtatgtttcttgacgtctaaaagttttacccaggacacgtagacacttcctactaatgcctattgggccatctccacggtatacgggagagactaccagaatctatagtgttttctacaactaactttcac

SEQ ID NO: 170051 - DNA, 359 bp, Glycine max
agcttcttatccaaggctcatcttggtggtgaagctctctttcccatggcttattccttaatggatggcgcctccctcacctcttctcctttgtcttccgctgcatctccatggtgaaaaatcaccattgaaggacctcattgaagctcaaagatccagcctccatagaagctccacaagcaagcttccatcaaaatggctcgaagcggcttcctacaccaatgtcacgaggagtgtagtggtcagattcatcaagagggaactgatttgtcggtaccgactccctatgaagatcattaccgacaatggtaccaatctgaataacaagatgatgtaggaaatgtgcgcggatttaaaat

SEQ ID NO: 170052 - DNA, 448 bp, Glycine max
  unsure (1)..(448): unsure at all n locations
gtctcccaagtgctaaataacatttcaagctagtattaactcactttaacctccatttaccacagaagtcagacttagccttncaaccctcaaagcctcactctttttccactcacaacatcacattctcactttctaaccctaggttagttctacccttcatctctaatagttttccatcagcaatttttcagcatacaacatcacaaacatcatcacaaaaccctaaaacagaaatgggtatgtttaactcatccaaacatggcaatttcaacaagttttcagcaaatgccttcacaaataatcatcacacagcagaaacctagcaagactacccatcatatctccccaaaccccatacccacgaaaatcaaaggagaaagaagtccacccaaacctgaattttcgaagtcctactcgtagccacgcacttcacgactccgaaaat

SEQ ID NO: 170053 - DNA, 399 bp, Glycine max
  unsure (1)..(399): unsure at all n locations
agcttganttgtgagttgattttaaccttattttcactttggttattaatcaactcattcaaggaatcttctaaagaaaaatgccgatttgatttttttgattattctatttaaagatattttgattattttattattatcttttcaagatattttgattattttattattatttttacttttttttatttaactgagtttacagcgtgaacgatcggttggattttatttaaacagtgattaaatgagattacaacacaaatgatcggttgaaattaattttgtcatttattaggtgagataacgacttaaataaacggtaaaaagctcggtaaaagcggaagaaaagaaaatcaaaagtgaacgagatgaagataaaatcacacaaaacacgaaatg

SEQ ID NO: 170054 - DNA, 330 bp, Glycine max
gccgatttgagagcttgacacgagtttgtgagtgattgtgagatcctagaagtgaaggagacatcctcaccacttgtatttttgccatctttcatcttgttcttctctttgctgcaaagagggcttcctggtatggaaagctaaatcttctgttggatctttccttgtaggtacctgatgtaaatatatttctatctatttaatgatcgtttgcgtggtctctgtgctatctgctcttcactccagcatacctttaccttgatcatgtacatgcatgccttgttacggtcatccaacaatggaaactggtctgactctaaagtcttgata

SEQ ID NO: 170055 - DNA, 374 bp, Glycine max
  unsure (1)..(374): unsure at all n locations
agctttatattcaaacttggaaattcaagattatttttgatttccgaagtctatgggattaagacggtcataaaccagnnccgggctttgatctcactcaattatcaagtgacggtgtaccgtctgaaaattcactcgatgatgagttgaagcttgatttttctgtgcctgatgcccaccggctggtttgcaccaaccacacggatatgaccggaaggcttcttgtcggatcattggctcttgaaagccgcatccttcactatcttattgtgcgtattttacttccaagatcttcatacctcgcttacgtccctgaagaagatcttatagctatgtgggcttttcataccgcccgacaaatcgaccgggcacat

SEQ ID NO: 170056 - DNA, 351 bp, Glycine max
  unsure (1)..(351): unsure at all n locations
acctttttgttctctacgctcccaaatacntactggattaacgctatctcacaaagctctccattccgttgtccacattgctttcttccacttcatctgagaagaatttcacaacaatggcactttgggcttcaatacaggaaacggaaccatcctatctggcccatcctcaaactctcccaccaaagatgtccagtttttctacaagaatacataatatggccagtattttcctcatcctgatcacaaagacgacagttgtaagagggcagctccacatgtctcctccttaaattatccctagcacgtactctcgttctgaagattctcccagagaaagcacttgttatt

SEQ ID NO: 170057 - DNA, 369 bp, Glycine max
ctcttccacacacgcagacacgatccaaacacccacatgcaatccgacttgctcattccagctcagagaagcgaagcccattaacaattggtacagacggatcatgagaattcactgagttgggaacaagcactggataaacaaacctcacataagcagttcggcacatacaacacacgccatacatatacactactcctataacaataaacgtatattgatgtgctcctctgggtgatacaccaccacacaacatacaaccacgatgatgctcataaaatttccaacatcactcgaccatcaaatatgcaccacctagcagtatctatctcctttgggacataacgcaaactaacgataccacaaatc

SEQ ID NO: 170058 - DNA, 421 bp, Glycine max
  unsure (1)..(421): unsure at all n locations
agctntgtctctaccattcctgagttctgatcatctcccatattcgaaaattaagattctggcccacaactgatgttgattagagataaagcccagatccatctacccaacagagctgcattgaatttagaaagatccttaatcccaaggcccccatcatccttggggagacaaatcacatcccacttcacccaagggattttcttatgctcttgattacccccccccccccccacaaaaattcctttgcaaggacaccaattgggcaacaattctttgtgatatcttgaaaaaagataaaagatatattggtaggcagtcaagacagagtttatcagagtgaccttcccagataaaatattctgggtccatttagataatttagcttcaaattttctgatcaaaggtgtccacaccaaac

SEQ ID NO: 170059 - DNA, 331 bp, Glycine max
taccacgccctctaatgaattaagaagacagtattcttttgtcttaaaggtatatataattaaattaatcttaagtagactgtagatgtcatgttaaattcttgaacgtacttaacatgtgtgtgtaaatcaattttatattctttaacaaaaaaaataatctatatttaaaaatatgaaaaattggttttgtgaatttaagaaacaatggcgtttgatacggagatataatggccccaccaacgtgggtgagttttttttttctaaaatgtctctcatgacatcatgggtctcatcgataattatgcatcacacttataatgaaaatata

SEQ ID NO: 170060 - DNA, 420 bp, Glycine max
gacttatttctttgtgtgcgaacagggtttattttgcttttgccaatcatggcggctaaactgaattccttgcagcaacgtgagccgtcagcgatgccttatcaactaagtgcatgctcctctgtactgaagatgcatcattttagctaagccggcccagatcccgtcttagtgagagttgcagcttttttgatctgtagaccttgcttagtggacttacctccgcactaggccaaatctgtgtgctaaaaaaaacttgaattataaagttaggttgaagccatggtgccgctaaacgaccatcttctaaaaaccaaacttcactttgagaaagcaaaatggctcatcgaagtgtaatggcagtcacactcatacttgtaggaaactgctgaactgcctgcaccctttctctcgcactta

SEQ ID NO: 170061 - DNA, 464 bp, Glycine max
  unsure (1)..(464): unsure at all n locations
tgaaatgaggaagtgcacaagggtgaaacttcctgctnttantcgttgaccacatagcggtacctggagatatgtcgcgggggtcaggagaccttggggacgtcaggtggggtgctattgcccaaaaccaagcttgaccaatcccgacccaacccgggcatagtcagtcagtgagaacctgtgatgtacctaagcgggcgagctcctggcagtcaacagataaaaggaacaaagaccacaaagcaagaaggcttgtgtggtggctggccagctgtgaatcttgagtgatatatgggatatggcctctggtaatcgattaccaagagtgggtaatcaattacaaggcttataaaatgaagacaggagactaagatggtctctggtaatccgataccaacgggtggtatcgattaccacgcttacaaaccacaccccgaagctaagacggcttcttggtatccatt

SEQ ID NO: 170062 - DNA, 232 bp, Glycine max
  unsure (1)..(232): unsure at all n locations
actcactaccacttcttatacactgaggccattcaaaatcaaccacccatcaatggtgccctacacacatccatgctttcatgatgaacaatgcagtcactatatgtgtggtttataacaaaacatctattccactatcacgttcaaattcttccacactccatctgaaacgagcttggactaaattaaatttgtctaaaacgttacatgtgtatcatntaaataacaaacg

SEQ ID NO: 170063 - DNA, 417 bp, Glycine max
  unsure (1)..(417): unsure at all n locations
agcttgcatttggagaggttccatcaacctttctaattccttgatgctggtggaatctaggcttttaaccttgacttataaaacctcttgccggtttgatttgcccccatgcttactaaagtgagacaaaaagctggtgcaaatcaaaactccgatatctcatgggtggaatggatgaatgcatgaaggaatgcatataacacaaatgcaatctangaatgcgggggtccggggaatttatccccttcctagatacgacgtctaggggtagcaaaatgccccaacgtatcgttttaagaaggcgacacggacccttcgttggtttgtttacagaagggatcaagacagaaccctatgcgatgcctatgcataagacacaatgcgcgaatgtacacagcatgacaatatttactgaca

SEQ ID NO: 170064 - DNA, 303 bp, Glycine max
tgaagcgaggaagtgcggaagacagagtcttcctacttttattctgtgaccacagagtggtacttggagatatgttcctggggttaggagaccttgcggacgtcatgcggggtgctatttcccataaccaagcttgagcaatcccgacccaacccgcgcatagtcagtcagtgagaacctgtgacgtacctaaacaggcgagctcctggcagtcaacccgataaagaacaaagaccacaaagccaggaggcttgtgtgctggctggccagctatggatcttgagtgatatttggaatatggcc

SEQ ID NO: 170065 - DNA, 434 bp, Glycine max
  unsure (1)..(434): unsure at all n locations
gctttccaatcttaccactcgatatatcttattcttgttaacctgtctatcaaccgcgtcgaatctttgctgtngantcgcgctcgcctcaagactagacgctcctcaaggtgtcggctaaaaatgcttcatactaccctgcgctcaccttttcgccttgggaagcatgttttcccccactgaacgcgatttcaacgggtatacaaacaaacctcataccctttacaaaataccacctacacttaccttagctgtaacttgcatgacataacatgatattaaagaggctactacctgaaaaagcctaactgaaaatctaaattcacacattattttattctgacaagaggatgtgcccaaccaactgtgtttgaaagagagttgcgaagaacttcccagtttcttgcaataagacatataccaacctctattcc

SEQ ID NO: 170066 - DNA, 338 bp, Glycine max
aataacgcacggacaatcaacaaccactgccatatagtaaaccacataccatgcgattaacggtcagtacatgcgcgatctgccgctcgcacagctgcaaatgtccgttcatgcgtttcaaaatgatcacacactcaactaataactaccgtggttgattgaaaaacacatgcattaacgttgaacctaacattttctccaatacaccctatatatgtcaccgaacgattgctaatgatgatccaaatttacgattaaaagaaataactctggttatagctcccgggaaatcgagtatgaaattctgacccacatattaggacaaaaatcctatatag

SEQ ID NO: 170067 - DNA, 429 bp, Glycine max
agcttatgcgcatatttccttacgaacgttcttttgctcaagacattcttttaactaagaaaaatgcacccatatacaatagagcggcttcgttacctagattatttacatgtatttccaaggtgtatttgttacttacatcacacacatctacttggctaaatttacatacatgcatactcaaagcattttggggtaccaaaaattgcacatgtgcacatcttggtatttctaatacctatacatacacaaacttcatgatgaatattgactatctacacaataaagtgctacatttcatgctctttacaagattttgctacctaaagccgcatgcaaattcaagtatattttcctttgctgactaaaaattgattaaaagggatatatcctttatgaactgatttccttacatacatcaacatatta

SEQ ID NO: 170068 - DNA, 465 bp, Glycine max
tcgaagggaagagagagaccaatcacgagcacatggcttttgtctttaaagaggagttagctgcttgctcaaggtccaaaagaaacttgtctcaccgtttatgtgagacagagtccaacatgttagccatcgtcagcaaataccaagaagagctaaatctagccacggcccatgggcataaagtggcagacgagtatgcccaagtgtacaaggaaaaagaggctagaggaagggtgatcgactcgttacatcaagaggcagccatgtggatggaccgatttgctcttactttgaacgggagtcaagagcttccccgattgctagccaacgccaaagcaatggcggacacctactccgcccccgacgagatccacggatttctcatctattgttagcatatgatagacttactgggccatattattagaaatcgctaggaagtttgtaccgtgcatgagcctcgag

SEQ ID NO: 170069 - DNA, 426 bp, Glycine max
agcttgaggaatctgacgatatcactatatatttcgctctcactgacagaatgcacacatgaacccgcttataaataaagatgagattatcgcacttggagttagaataaacatgtgtaggaatccctatacgatcaaattgcggtttattcatagatgtgtattgcattgaaattctatctatatgaatatgtgaaattgtggaggggttttactccccggggattgagaaacatctttatataatttgttgggtttttttataggattaatgtgataaatacgtatattgggatcgcgatattatgatcgaaattgtgtgttagtgataaagtacatatgtgacgaaatgtgggataacatgtcgctatgacaatataatatctgttttgagattgagcatatgccgaaaggttaacacctgct

SEQ ID NO: 170070 - DNA, 463 bp, Glycine max
  unsure (1)..(463): unsure at all n locations
tctagccaaatgaacttaccttgaattaattcctttgtttttctctttgagccttgtttccctttccttgttttgaaactcactacaagccttaagtgaaaaaccatgatatcaccatatccttaaggaattttggagctttggaattgttttgggaataagtgtggggggtttttgtttcattggataactcgttttgttggctatgcttcatgatgtattttgggccatacttgatgtacactgtatattggttaaatgttggacatgctgaatgaaatgttgtttctcacaggctatagagtaaaaaaaataatttgaaaaaaaaagaaaaaaaagaaaaaagaacaagacaagcaataaagttgagtgaataagatcttaaatggcacaagaatgatgaaactcttggctctactctttatgtttaaaatttatctttacttctttcntattttcttat

SEQ ID NO: 170071 - DNA, 302 bp, Glycine max
ggacataatttcgttattaccactttactctcaaaaccctttctttttcccgcagcccacaaaaacttgtctcagaaaagacgacgatcctcaaaatctattcacccgttggagtcgtcctgagaatttgagtatcatgttcataacccaataccaaacattcttaccgtggggaattcaaaactatatttgagcttaaggaaaacccttccattgggcattttaatctccgcagaaatcaaaatgtctgttaaaactacatccgggtacgtaaccgtggaatttatgcaattggaattggg

SEQ ID NO: 170072 - DNA, 408 bp, Glycine max
ctgatgggacatgcacatctcgtagttctaacatcttctctatacaaatcgatcttgctacacgtatactcatgagtcctttcacaaccaattaacacacatgaactgcttcctctactatcactatttgtgtctaaccttatattctccgccccaatctgctttcatgagcaaccgatcgagcccgctgaaaaacatcatctccgcggtcaaacgcctacaaaacaatccacacaatctcaatcttctacaacacattcattttattaaatcactcacaatattgaacattattacctgagaagtattgaacgcattctcacaatcaacatgtggatcattataccacattcttcttcatttcgataactcataatcaactttttcagacattatatttgcatacac

SEQ ID NO: 170073 - DNA, 280 bp, Glycine max
ggtttttgaagtgagggggaagagttttgcgtcacacaatgttgcccctccacccctcttatattttcgtacaggggttgctcgcccagacgagctcagctcgcccaggcaagcttacctgtgcttttttttttgcgaaacattaaccatgcctcccccccttactggttagcatttgcttactcaaacctaccttaagtagaatcaggcgctgattactctatttaaaacaaaccatatgtactataatactgtgaattctatggatactgggctgcct

SEQ ID NO: 170074 - DNA, 433 bp, Glycine max
tatgctacaaacatttataacagacccgctcttctttttaccaacaacaacagaataattgtgatctttcaagcaatagatacaatccacgttggagaaatcatccaaatctgagatgggcaagttcttcacaactacaacatcctgcccctcctttccaaaatgttgttggtccaagcaagccatatgttcctcctccaatacagcaacaacaacaacagtagcagcagtcacaacaaagacaacaagcaacgaggctcctcctcaaccttccttataagagttagtgaggcaaatgaccatccagaatatgcaattttagcaagagacaagatcctccatccagagtctgaccaatcagatggggcagatggctactcagttgaaccaagctcagtcctaacattctgaccaattgccttcacagactatg

SEQ ID NO: 170075 - DNA, 412 bp, Glycine max
  unsure (1)..(412): unsure at all n locations
caagctggttatgttatgattatatatgntttaatgcttaacttaattaanactgattgataatattgatcttgcacanaattataaactgattggtctcaaacaaagtttgagacagcatatgaagataatctaccaatttgctttgtctgagggtagcatagtaattaacaagataggcttgattgttatgtgtgaccatgctggaactcaagcaggcagtacagcatacatatgtcacaggtcacaaggaaacaatgagcaggaagatattgagtgcgtttgactgagatttgatttttaactcttaaaattattttcttctttaaacaagtcttttattaatttgttttaaaataaaaaatggttaaaaaatattgaatgatcggtgcttgtttgttgtggatttttg

SEQ ID NO: 170076 - DNA, 441 bp, Glycine max
  unsure (1)..(441): unsure at all n locations
tagactatganatcgtgacactgcgcttagcgcctttctcgttcttatcttggctgaacgcacctgctgcgcttagcgcactgatctcgcgcttagcatgcgcgcttgatgctgatgctctaccagattctcctttgagttaagcgtgctgaagctacgcttagcgatggatatgcacttagcccaactgctgagcttagcccaattgctgctttttgcaattcaaaacttagcctctctttcacctgaaaatgaacagatctcatcattaaattcaatggaaatgttctagagacagcgttaaccataacacacgatatatttacaaaacttactccaaaatgagcataaattggcgaactatagaagctttggaaatgatttctatacacagtagtcgtataaagcgactaaaatacaatgccgctaggacctacatgc

SEQ ID NO: 170077 - DNA, 423 bp, Glycine max
  unsure (1)..(423): unsure at all n locations
caagcttgcggatntggtcttcaccactatatttattttttggatctgacaagaggcaaatttaatcatcctgcttggacnacgaaaaaactggggcaaataaagagggtgaggatgagggaaaaacccatgctgtgactaccattcctgtacggccaagtttcccaccaacccaacaatgtcattactcaacccttctcctaacctactgcccatttatccacaaaggccatccctataatcaaccacaaagtctacttaccgcacttccaatgacaaacaccacctttagcacaaaccaaaaacaccgaccaagaaatgatatttgcaacgaaaagcctgtaggattcaccccaaattccggtgtcatatgctaacttgctcccatatctacttgataatgcaatggtagccataacccct

SEQ ID NO: 170078 - DNA, 456 bp, Glycine max
aactaagcttatgaatgaataagatgcgcctaggataacgaggttcatgattatgtttcacgactgatccaacgcgctctgatgataacaaagatgatgaccaaaagctcaagagaatgacttcaagattgagtcacgaacaattcacgaatctagaatccagcttcaagtttcaagtttcaagaaccacgattcacgactcaagattcaagaaccaagattcaagactcatgattcaagaatcaagacaagactcaatcaagataagtactaacaagtttttcacaatattgagtagcatatcaagttttacaaaagcttttaccaaagagtttttactctcgggtaatcgattaccagtagcaaagtttgttttcacatgctttcaaactggatttacaacgttccaattaatttcaaaatggtgtaatcaattacaagatttctggtatcgat

SEQ ID NO: 170079 - DNA, 427 bp, Glycine max
  unsure (1)..(427): unsure at all n locations
agctntactatgcagagaatatccaaggattttactttttccgacttagcatcaaattgttctaaggtatcttttccattatccatgcagaacattgacaaccaaagatatgaagatgtgagatgtttggttctctgccattgaacaattcatatggagttgtatttaaaatgggtcttattaaagccctatttaaaatgtagcatgcagtgttaacggcttcagcccaaaaatattttggaagaggagtatcatttaataaagttctagcaatctcttccaaagatctatttgtcctttcaacaacaccattttgttaaggggttcttggtgcaganaagttatgctcaactccatacttattaacaaatagttcaaattctgttatttcaaactcacccccatgagcactcgtaatagatataat

SEQ ID NO: 170080 - DNA, 393 bp, Glycine max
  unsure (1)..(393): unsure at all n locations
agcttgagatgtggaagtgttgaagggcgaatctttctgctcttattggtgaccacagagtggtacctggagatatgtcacnggggcaggagaccttggggacgtcagatggggtgctattgcccaaaaccaagcttgaccaatcccgacccaacccgggcatagtcggtcagtgagaacctgtgatgtacctaagcaggcgagctcctggcagtcaacagataaaaggaaaacaagaccacaaagcaaggaggcttgtggtggctggccagctgtgaaacttgattgatatgtgagatatggtctctgggaatcgattaccaagggtgggtaatcgattacaaggcttaaaaatgaagacagggggctaagatggtctctggtaatctatta

SEQ ID NO: 170081 - DNA, 423 bp, Glycine max
  unsure (1)..(423): unsure at all n locations
tccatcaccgngcatgtcttgatacgaccacgcacagacatcttgattctcttcaagaagagttatcaagccttggcggataggcgccggtataccggttcctacctttacctctttcttttccttcggagtccccaagtttaccaattcggtttcttcttggtgaggcttcatttcacgttcttcctgagcgaccaacctctccaactctggtgacaggacgtcctctttctcttcctcttttatcgcttggcttatatcttgatcgaaatcgattgtcaaaccctcgttgctaggatcctcaaagaatcgaccctcatatctataccaaacaaggcaaaagaaacaaaaaacatgcnaaatgatatgagaaagggtggtactgcaagaacagatgaaacaagatctctttgtttatttaat

SEQ ID NO: 170082 - DNA, 387 bp, Glycine max
  unsure (1)..(387): unsure at all n locations
cgaggttattcctcacagaaaggttctgttggatgacgtgtttgtntccaagagcttaagtccttgtgctttgctggtgcccaaaatacgtatcatgaggcactaaatccctatgataagtggtatgatgaatgcgttgagtggtgcaaccctcttttgtaaaatcacccatgcatccaacatcatcatgattcacatacatagggactcattacgtaggtttttccttattcttagttccaattcaaacttaggcgcttatatgggacancttacgtttgtcgcactttctggtcggaataatcaacatgaaaataccagaaaagtatgtcctattgcattatctcgggccatgggcttagcatgaaccgacttatcttcgtcata

SEQ ID NO: 170083 - DNA, 312 bp, Glycine max
  unsure (1)..(312): unsure at all n locations
ctctataatacacgcccgaagaagatctctacagtctgagaggctcgttcaatttgaccatctgtttgaggatgataagctgaactaaggttcagctctgtccccaaggcttcctgtatgtagatgcaacggcctttgatgttttgatgacgatcatgatgatctgatgcaatntatgcgaatgggctgtctagaatatattcgagacaatctttaagactatctggccccacatcccgatgagtactacctattggaaggaattccaatcgaactccaaaggttggccaagtatttaatacaaaggtcttc

SEQ ID NO: 170084 - DNA, 366 bp, Glycine max
  unsure (1)..(366): unsure at all n locations
taacgacgggtctcgacaagcactctgcgatacancacgttcatatacggnctcataacaaccgcctgtatttgtaagcctattactaccgcttttcaaaaaacttctttgtctcattcgtagctatttttattaatcatttatgcttcactctctggaacgcacatgcgtttcttccatcttccttgcgcccttcacccttcaccctgccgtgacctctcatacatctcactctcgcccttcaccctgcactgacctccacaagctcgtcgtggacatttaccaacctgtgctccgtcccgtctccggcgaatggtagggtttttgtgaaaacaacaacacctaaccctaatattgctgccgctc

SEQ ID NO: 170085 - DNA, 410 bp, Glycine max
agcttccttggggccatttcctgctaaactttcatttgaagttagtttacaagataatgcttattttaccacaaagagacatgctaatccctccggtttagaacgaactcatgcgcacgtctaaagtaacacatttatgcacatgcgtacgtgtaaaaatatcctactatttatgtcaacatacaaaaacacccaacacattctaattgccatacatctatgtgcatcttgaaaagaacacacattctcatgctcaacgcgttgcgtcaaactttacacctaattatatcctaagattttgctatttactaactacttacacatatttgaaatatatatcataccaattttattggtcactcacatttatttatatgcatattgaaaacaaatcatattctgcacacaca

SEQ ID NO: 170086 - DNA, 385 bp, Glycine max
  unsure (1)..(385): unsure at all n locations
ttttccccacncttctatcaatagggggagaggtgaagtttaaattggttcagcnccttacgcacttctctctctctcgaaattgctgacgaaaattcgttccgtgaagaaaatccacgccgaggcgcttccgtaacgtttccgcgagtaattacgcgaagattcttaaccatttttcaagactcatcgttcgttcttcgttttcttcantcttcaacgggtaagtacctcaaactgagcttttcaattcattctatgtacccgtggcggtccacattttgcttcatgcattgtatattcttggcttcctttactgtttatacccccttttgatgtgcttaacgcatttacttaagtcatttctcgcttaatctacaaataaaat

SEQ ID NO: 170087 - DNA, 431 bp, Glycine max
  unsure (1)..(431): unsure at all n locations
agcttctttgagaaaactaacttgttatgtcttagcttaactacacacacccctgcgataactaagtgcacctcccngggacgccgcgcgagaagatacctcaagaagctagagcttagccactcacaccctcgataatagctaagctcacccccatgccaaaacacatgaaaagatataaaaaaaaggccctattacaaagactactcaaaatgccctgaaacacaaggctaaaaccctatactactagaatggccgaaatacaacgccccaaagaaggaaaaaccaattctaacatttacaaagaagaatggatcccaccctgacccatgtgctaaanaacctaccctaatgctcatgagaaccatagcgccttcttatgagctctaggcgaagcccgggagcctccatccaaacccgctggggggagg

SEQ ID NO: 170088 - DNA, 300 bp, Glycine max
  unsure (1)..(300): unsure at all n locations
tctcaaagcaccactctttntccactcataacaccacatccccactctctaaccccaggtcaactactaccccccatctctaacaggtctccataagccaattcagcccacacacatcacaagcatcatcataaaaaccctacaacagaatgggtaagcttgactcacaccaaacatgacaagcttaacatgctttcatcaaatctcctcacaaacaactatcataaagcacaaacgcagtcaaactacacatcatatctcccagctccatacccacgaaaatcatgcgagaaagaagtc

SEQ ID NO: 170089 - DNA, 317 bp, Glycine max
  unsure (1)..(317): unsure at all n locations
accttaagcaccgcagctgcacttctaggaacacctatctaatttttatctggtacactggtgaacttgatgaagataccttcnaacacaagctaagtgcagctgttctccctttttctcttccttcaatatcgcgctcccccctctctatatctctccctatatcttttccgtccattgaagcatccttcctagcgtcttatacaaggctcatcttggtggcgaagcctccttcttccacggcttataccctaatggatggcgcctcctctcccctcttcttctttgtcttccgctgcatccccatgggggaaaac

SEQ ID NO: 170090 - DNA, 359 bp, Glycine max
atcttgccttgacaatgccacacaacaaaccaaaaaacacctggggcaaataaacacggcgaggatgaaggagacacccccgctgtgactgccattcctatacagccaactctcccaccaacccaaccaatgtcattacttagtcaataaccaaccctctccttacccaccgcccatctatccacaaaggccatccctaaaacaaccaccaaatccgcctaccgcacttccaatgacaaccattgccttcagcacaatccaaacacaccaaccaagaaatgaactttgcagcgagaaagcctcgagaattcatccacactccggtgtcctatgccgacttgctcccatatctcatcgat

SEQ ID NO: 170091 - DNA, 432 bp, Glycine max
agctttatatattgcatctcatattcttaatataatgccttataaaatgttggaaaaaaccccttactagctatggacaaaagagaaccaaatctgaaatattataaagtatgggagtttctagcaaaggttaacatccccattaataaaaaaaggaaaattggaccaaaaattgtcggattgtattttttttggatattctttgcataatactacttatagatttgttgcagttaattcagaagcgtctgaaatatttaatagtactattatggaatctatagatgccactttctttgaaaatgtttttcctttaaaaaataaattgtctaaatactgttgagatacttcttgttctaatctatcatcttgtagtaatgttaataaagacattatgtctgaacgtaggaagagtaatagatctacaaaagt

SEQ ID NO: 170092 - DNA, 436 bp, Glycine max
  unsure (1)..(436): unsure at all n locations
tcctcttcttcttttctgcattcgtgtgaatgctntacatgggaggggggatttaatgaccattttgcaatgaagtcgctgttggggctggtgctctggcccaaccaaatcgccattcagcctgccgacaccctgctgcacctcctctgcgcgttgcagactgcaagcctcctgtgaaatgacctctgctggcctgcaccctcgaagtcccctaccctcaactcgccagtcaaactggcgagtccaagctcctgcaaggcgccaacagcactggcgacaccagtgccaagtgtcacgtcgccaagggaagcgccaatacgagctgcgatttgcatgtgctctacgtacaacagagcaccatgcaagaattactttagaaatagacccatttacggaaaatgtttctaaaagtaaccccatgcaggannattgccgc

SEQ ID NO: 170093 - DNA, 301 bp, Glycine max
  unsure (1)..(301): unsure at all n locations
aacttccatcgttctaaggtgtgtatgtcattcttaccgaattctcgctaaaaagtcgcacctgaatntntnaaatggcgcttcgaggctcatactagatgtccaactctaaaagttttatagaccaggccaccatccttcatgcgagcataagctttccgaaaacctgcttgatggacaccctatctcggctaccattagacgtggaactcgggcataatttgctaagtccaagcatagagtgctatttccaccttttatatcactccgtagtactccttggtgcccggagcatgccact

SEQ ID NO: 170094 - DNA, 378 bp, Glycine max
  unsure (1)..(378): unsure at all n locations
ccttgnncgtgtcaattgctgccacaaggagctgttcatttttgcgcgctgctaaggctgagcgttggagcctatgcttctcctaacctccccattncactaaccctgttggttccccaactctcatgcacaaacattactcggggcaaagtctctatatataatcttattgatctatcttaacactaatagtatgtaaacttaacaaatgcattgagtgattcattctatcttaaacctgtcatggtgaacctctcgagatcatttgggttcattctggcaaattacgtctgtgtgatctcccagtacttgaaatctaataactatgctcattgcggtatatatacgaccatataatatttttgttactaatgacaa

SEQ ID NO: 170095 - DNA, 353 bp, Glycine max
  unsure (1)..(353): unsure at all n locations
agcttcacacaatggntcatttttctgacataagctcaatatatattcgccttagctggacttctctttgcctctggaagaaataggctaaaaacttgccttcaatgtcactccaagtgggaagacagagatagacaagttttgagccacttcaaggcatcttctatgagagaaaaaccaaaaaccctcttatagagattctcctcttcagtctgggtcactcctattgtaccacatagagcatataatgtggccagatggttgaatgggtcctcattagctaagctagcacacgcatgttggccaaggagagtgattatgcttgacgagcctctgttggcggtggtgtcctt

SEQ ID NO: 170096 - DNA, 433 bp, Glycine max
tactaagcttgaagggtcaaccacatctcctagttctactgtctcttttgataaatcctttcttcctacacctatacttgtcactcctttcacagccaattaacacacacgtagtccttcctctactacctgtgcttgtgtccaacctctaaatcaccaccacacatccgttttcatgagcaccggatcgagcccaccgcataacattctctccgcactcaaacacctacacaacaattcacataatttaacgtttctaccagcatttattttattaaatctgtgacaaacattaacattataacctgagaagtattgaatgcatctgaacaattacacatgtggttcattcgcaccacatgcctctgcatttccataatcatatccgcttgttcacacattatttcatgcattcactcatcttctgtcattt

SEQ ID NO: 170097 - DNA, 274 bp, Glycine max
tgaaataccaaatatgaaggaactaatgttattgtattaatctcttcttatgctttttttctttgcctgccaatttcacaatccccactaatgactctgtttaaatagggcaaacagagggataacagactgaaaaactgtgtctgcaccaccacggatgctgtattatatagatgtcattacaataaattctaatagtgacaggatatttcgttttctcaaaatcagattctaccttcttacaaaacctacttttctactaataatacatgta

SEQ ID NO: 170098 - DNA, 381 bp, Glycine max
  unsure (1)..(381): unsure at all n locations
gttgtggtagtattattctcaacctcagttttgctattttcatctccttacttcttcaaaaacatgtaaaatgatactattgccctcccctgttttcctaacggccttcctcttcctcgcacaccacttttccttctcttgatatatatatttntatttaatttaattatgatatagtttatcattttaactataactgaattaactatgacacaaattatcatatgatgacacaagctatcctttcttaataataatcaaattaattattatacacattagcatcataataaagcaaatttgatagtaattaacttgattattttataaatgataactcctatcatcaataaatctaacttggtattcactactattaaa

SEQ ID NO: 170099 - DNA, 276 bp, Glycine max
  unsure (1)..(276): unsure at all n locations
catctgtcgtgaagtagcgaccgatatttttcagccgacattgcacaattctttntagaaaagctcgctggtcgataatggtctttttacggcagagtaagttctcttgttttggtgttgcataaaaaagttacaatgtacttcggctagggttttcgtgcgagttcaaccgacattttgtttccgccaggaaaacattagcccacctcctgcaaaaaaatatttgctaacccgccttcatgcatatttcattcaacgattgatagaanactcaat

SEQ ID NO: 170100 - DNA, 357 bp, Glycine max
agaaaaagtattgggcggtgaattgactgagagcttcaacattcaatttcgagcatctcgatatgtgacgggactgaatcagacatccgagtaaaaagatattcggcgtttgaatttgctcagagcatcaacattcaatctcgaccgtctcgatatatgacgggactcaatcaaacatccgagtaaaatgatattgtcgtttgaattttctcacagcttcaacattcaatttcgagcgtctcgatatgttaccggactcaatcagacatccgagtaaaaagacattgtcgttgaattcgcttaaagatcaacattcaatttcgagcatctagatatgtgacgggactgaatcacaca

SEQ ID NO: 170101 - DNA, 96 bp, Glycine max
caaaaggaggacatatgttatgagaatggacccgattagaaaaataccaactttataagttcagatcaaaaaaaacaaaatcgacattgctatcca

SEQ ID NO: 170102 - DNA, 326 bp, Glycine max
ctaagccaggcccagagaatgaaaatcgcctcatcctcactgtccctgcaaaattggcatgaccgtgtaacaacctgcacttgcctccgctcgaaactctgatttgtcggaagtctattactaactagtcttgcggcaagattgctatatacctcggaacctttatgctccataattagacaaaacatccctcctgtgttattgctattgctgctcccattattaccttatatgcattgtctgatgtatactgacctgtaaggtcacccttccattcccacccatcaggtccatgctgtcgatggccatatcctgaacctcactga

SEQ ID NO: 170103 - DNA, 314 bp, Glycine max
aagtcacctgcagctgcagctttttgtagacctcatcggcattttttctttttttgtcgaccgtcatttttttcgatccatttcggtgaataatatttttttgccgagatgggcaaaatgccagtttccgccgaataaatgggaaaatgccagtttcggccgaaacgaaaagttggttgggctcgcacaaaaaaacctacccgacctacattttaaatttgttatgcaccaccaaaacaagaaaacttcctgtgccgtaaaaaaaaaacattatatgacagcgagcgttttgtaaaacaaaaatgcgccacctc

SEQ ID NO: 170104 - DNA, 377 bp, Glycine max
ttaagtcacctgcggcatgcaagcttatcacggaaaagaggatttgcctctattagttttttcagttctatcaacataatgcttcgagcagttttggtgtcaccatacttggatagctgctcattctccctgttatgtgaaacaaaataccactcaattgtcaagcttaccacttaactaatctgagttgtgaatcaaaattcatgaagaattgagatatgaattagatgcacgatctcatccacctaacagtcaaagacactgacaagcaatgcattcaaggtattacctgaaattagtaagagttaataactgggttatttctttgtatagctcctcattgaaggtggagaacattttcaaatcacccactaata

SEQ ID NO: 170105 - DNA, 473 bp, Glycine max
  unsure (1)..(473): unsure at all n locations
tctttgagaaaacttccttgagaagctagagcttatctcacacacccatctaaaaactaagctcacctccttgacaaaatacatgaaaatacaaaaaagtccctactacaaagactactcaaaatgccttgaaatacaaggctaaaaccctatactactagaatggtcaaaatacaaggcctaaataaaggaaaaacctattctaaaatttacaaagaagagtggatccaaccttgacccatgggctcagaaatctaccctaaggttcatgagaaccctagggccttctttagtagctctagcccaagcctcttggagtcttctatccaatacccttgnggggtaggatngcatcatcncctccaccttggaatggatttgaacctcaaatctgaggttcttcatactctggtctcctttccttgacacctgtaaaaagaataaaaacatatgtattagtggtggtgggtatg

SEQ ID NO: 170106 - DNA, 315 bp, Glycine max
ataccaggtttcctgttggtgaaatcttacctgcaagattgtacaaaaggtgttgcattattgacaatgaaaatatttctattttcagtagttagtaaataaatgaaacagaatctttaaattagagagcaaaaagtaaggttctgagtagtctccaaaaactgaaagttctacactgaaatcagttatcccaatttcatttgagaactttcactggtgctgaagtcatatatttctggaaaatagaagcgagtaggattctatttactcaattgattagtttgtgaaaccaaattgaagcaaaaatcatagcct

SEQ ID NO: 170107 - DNA, 398 bp, Glycine max
tctcagcttgagttagattctacacataatatctgtatcgtttctttattccatgtggacttggttcaaggaagttcatatacgtgagggtccattatcaaagctagtttgttacatgataactgcgaaaattgggtttaaatgatagtcaattctggttaagaatgattaaaattcctttactttactgttgtttttaatgaaataataaagaatctaatatcatgtgaatttttaacatgcaggactcaaaagaaataaattagaagtgctttggaggaaaattgatgcaaaaaaattgaaggaaaagccttgaagaaaaagttaaaaaagggacagcttacttaacacacaagctatgctcaacgcaccttctcgcttagcaggcaagctcaagc

SEQ ID NO: 170108 - DNA, 198 bp, Glycine max
acattctttgtttctgttgatgggagatagagtcccgtaatatatcgagacgcgtcgaattgaaagctgatgctctgagcaaattcgaacgacaataactctttactcggatgtctgatacagtcccgccacatatatggatgctcaacattgaatgttgaagctcttggacccttaaaacgacaacaacattgtacg

SEQ ID NO: 170109 - DNA, 192 bp, Glycine max
aaaaggaaaaaaggggtatgaatcatgccgtgctaaccctgacccctcgatatatgaacaacacactcatatcctctcacagagtaatacatcaaccccgatatgcagaatatgcttactgattccgaagtattaaaaaaaaagaaagaaaaatgtcgtgaaatggtatgtgttgcggggctcttttttact

SEQ ID NO: 170110 - DNA, 335 bp, Glycine max
  unsure (1)..(335): unsure at all n locations
ggaatcaaatgcaaatgcaatgcagtagaagggggttaagacaatatattactacaattatctgaaattgagtaggtaatactaaaaatagaatattagtaccatgaccgaaaataaaatagccgctgtgtaaataacataacaattgtttcaaatacagggaaaaaaaatactccaacgccatcattaacccgtttgacttattgctgtctntaaaaaaaatgttgcccatttctttccaattgtggtgatgatgccgatgtccaacggtgtgtcatttacaaccactgcaagtatttataaattgtaagttatacttgcaaataaaaattcag

SEQ ID NO: 170111 - DNA, 387 bp, Glycine max
agctttctagcttttcattggtgtattttgatctccttttggcgctctaaattgtgggagtatgctcaaatatataaggcaattttggtttgttttcttgcttgattaggctgaattaagggtgtgtatgggatggccctaggcctataatgcatttttgaacaatgggacatgccacattgtccccgttctcttgctattgacgcctaaacgcgcgcccaccaagtgttcggtgaaatgcctcaatggcattagcgcgtgacttttgtaaagaaacaacccatggggcattttggtttgtacacattttccttttttggaatatgtattcattcctgaacaaggctagagtaattgccccgcatatatcctaggcctaggaactaa

SEQ ID NO: 170112 - DNA, 366 bp, Glycine max
  unsure (1)..(366): unsure at all n locations
tctcaactctgaaaaaaaacatggatgtttctatctgtgcataggtcaggcttaagcatgaccctggagctcaacattggactttgctatctatgcttaagccttccaatttttgacgagttaagcatgaccctagaaggcatgtgttatcgctcatgctcacgcttgcaaatntggtgcggcctaagcacactcgtaaagatttaaatgcccacttaaaaaaagcccaatggatataaaaggtgtgtcttactgaaaattacgggttcttgcggaattttgaaagataaaatactagagagcacattggagctaggcagtgtgtatccttaaggattcttcttcatcttcttggttcatcaagtt

SEQ ID NO: 170113 - DNA, 371 bp, Glycine max
acccgcacgcacgcaagccccaagaatgcatacaccgcctttttctttgttcattgtctctaaacagagggagtgtttcacttgagctcacctttgaagattgtgatcgatgaagaatcgaacgcctgcatcaaaagcaagaaccccttcatgctaaaaaacaacccccagagccctaatgtggatcatttcagcagaaaaccacttgctttgagtgaaactgggtttgtcagaagcagtgcacatcttttaatggtgggtggcaatattcatatcctgaactgtgtgggcctctctttcggctctatgcctccacttttttacgctatgtgcccaactggtcacacttaactaatacgcacgagctttgc

SEQ ID NO: 170114 - DNA, 447 bp, Glycine max
  unsure (1)..(447): unsure at all n locations
tactaagcttgccagtctcaaggtggcctatatttacactttgttttntgttatgactccttgctattcgctcaagctaccacctcccaaacacatatcataaagaaggtgttggatgaattctgcaaagcttcaaggctaaaaaattaatttccagaaatcaagattcattgtttccaagaacattaagcgaaagtcaagtatattggcagccattctgggatgctagcatacttagaagatggataaatatctggggttccccatgctttctggtagagtcaagaatgaagacttcccttatatctttgaatgatcgaacttgagattagcacgggtggaaaacaaaaactctgagtaggcctcgacgtgttactctcgttcagtcagtgtgaaacctcaatcccatatattccatgcaaaattactggattcctcacgggatat

SEQ ID NO: 170115 - DNA, 490 bp, Glycine max
  unsure (1)..(490): unsure at all n locations
tataagaacanaatggcctaaatcattttcaaatatacatgtgtattatgaagcatcaacaagaataaagccaaggctattgtgcaagaaatcaatggggcaaaacacatcaaaagattatgatgatggatggctcaaattctcacaaaggtaaacttatcactctcaaattgagctttcaaaactatcatgacatgtagaggaaaaacaaggatttcaaatcacaaaatgtcaagagacttttattttcagaataattacccattacttgaacatatcctataattcaaagacaaacatgcaaatctaacacaacacaactaacaaaattaaactagaacccaacaaaactaacaaaattaaactaatttagcacaactaacaaaactagcaaaaccaaagaacactccccccatacttaaacaacatattgtcctcaatgtagcacaagtaaaagaataaaagcaattaaaccatcacatagaatccg

SEQ ID NO: 170116 - DNA, 334 bp, Glycine max
agcttgtcccaattgaactagtttattcctcttgttgatgcaccttttgatcccccaccaaaataaattcagcctcattcaaatctcatcctctaaagtggttggaagcaagtggatactcatgcaatatgaagggactgcctaattagaacttccttattactagctttggtaagatactttctctaaaagtgattgatgcatttcaaaattcgatcctttagacaactgaaaattgctttatctcattggcctatgataaaagggagggctaattattttctagaccctatgattgtagaggcacccaaaagaacatgattgttgcatcaaa

SEQ ID NO: 170117 - DNA, 474 bp, Glycine max
tctacattccttatatgaaataatactctaacaaaacgtgtggttattctgctggtggattaagcaaatatatcatagatgaataataatctgctgccagagattaaacatactcccccacccacctgcacccccccaaaaaatagccgagcattttcaacatgtattattcataaaacaaactctgatgctcagtcttcacattccatcaattcccctgagaagtggtctatgtgccaaaggggtgtaaattaaatatttgatattggactattcatagcattattttaccctcattcttcttatttctggtaggctgttttttcttactgcagaaagagatgcaaactagtttcaaataaggctattcatagtttaagaaagaaaactgaacttaactaaaatgaactaacatatgggtctaaagaactaaactaaactggtttactcttgatgttgaactgaaactgaact

SEQ ID NO: 170118 - DNA, 303 bp, Glycine max
cggaccataagcaccgagctgcagcttagatgattaccctttttttttgtcatgcctaacagaggagttttccttgactaccttgagatggaccctgaaaattaatgttgcataaagccgtcctcttctgctaaaacaccccagacttaatgtgacatttacagaaacccttgtttgaagaaatgggttgcaaaacaccgccatttttatggagttgggaattatatttgactttttgcctcttttggcctatcctaactttttgcttatggctcaatgtcccctaactatacccgactttgg

SEQ ID NO: 170119 - DNA, 483 bp, Glycine max
actaagcttgaataggaagtgtgaaaggtaaactttctgtttttattgttgaccacagagtggtacctggagatatgtcgcggcggtcaggagaccttgcggacgtcaggtggggtgctattgcccaaaaccaagcttgaccaatcccgacccaacccgggcatagtcggtcagtgagaacctgtgatgtacctaagcaggcgagctcctggcagtcaacagataaaaggaacaaagaccacaaagcaaggaggcttgtggtggctggccagctgtgaaacttgattgatatgtgagatatggtctctggtaatcgattaccaagggtgggtaatcgattacaaggcttataaatgaagacagggggctaagatggtctttggtaatcgattactaggcttgacaacgaagtcaggaagctaagggagcctctggtaatcgattaccagcgtgtgtaatcgatacacacaaggatgggcactc

SEQ ID NO: 170120 - DNA, 448 bp, Glycine max
  unsure (1)..(448): unsure at all n locations
gatctaccaccaccactgccaccatcatcttatttttctattattattaatattattagtactttgatttctagccgtgtatctggctatattattatgacatttgaacaatgtagtatttcttttatttgcatggtatgattgaacaattatgaattatgttatatgactatgtggtttttatatatctgatctattcatgtttcttgcttcatgattgcgttatactctntaatgaatgtcttgtgtatgattattagtgtatgtatgttttttacttgttacgcactttggctctttgttgatgccaaagggggaaagaaatagggactaaatcaagaacttacatangtaattaacttaatttcaagtgaagcatagactcataaacacaacgggagaatatggagaatcaagtgagagatcgactangaagaagtgtgcgtat

SEQ ID NO: 170121 - DNA, 394 bp, Glycine max
agcttgtagggttaaagtctcacgattttcatgtgctcatgcaacaattgttagtcgtggctataccagacatcttgccaaacaaagtcaggttaacgataactcgcctgggctttttcttccattctatatgtagcaaagtcattgatccagtcatgtttgatgagttggaaaatgaggctgcaattatactgtgccagttcgagatgtattttccccctgctttctttgacatcatgattcacttgattgtgcatctggtcagagaaatcaaatgttgtggtcctgtttatctacggtggatgtacccggttgagtgatacatgaagatcttaaaagggtatacaaagaatctatatcgtccagaagcatctattgttgagaggtacattgc

SEQ ID NO: 170122 - DNA, 407 bp, Glycine max
  unsure (1)..(407): unsure at all n locations
gtgaagatgatgttccaagaactctggatttggtccgaccatgcccttctgatttccagctgggaaattggcgagtggaggaacgccccggcatttacgcaacgagcataatgtaaacctttacggttttaaaagctctatagttgggcctaggctttagagttttcattntgttaaggctttgtgtcttttgtctttgaatttataatacaaggatctttcttcatctgttcctggtctctacccattctcattcatttgcatgtttacttcttttctgaaacggcagattcgatgacgagtcccncgaaggtactaatacctgggacccgtctatcaacttcgagcaagaaatgaatcacacggaagatgaacgagatgaggatgtggaactctcttcggaacta

SEQ ID NO: 170123 - DNA, 342 bp, Glycine max
agctagactgtgggattggcaaatgctaccttgatgtggcatagggagttgaccactttattgggtacctaaagttcactgtgacatcctttttttacttcgaggaggcatcgtaattcataaagtactttatatggtgggtgcaacctacatcaccctactatcgtcatgccattcctagggagatcatagagatctcctctttgttgtcttcatcatcttctttgggcgcattggactatatgctagggccatctgatgtaagtgaggattttgagcatgcggtgtcagccatgctctctttaacacccattgcaaaggacgatgaaatcgatgaggacc

SEQ ID NO: 170124 - DNA, 466 bp, Glycine max
  unsure (1)..(466): unsure at all n locations
tatcttacctatctatctcccagatgtctctgcanagtttctatagataaaaaacatgaagttctaattcaagatgttttctttgttgcatgggcataatgcaatcactctatgtctagcaatgattttattaagatgtccctacctttgagttctactaaaaattatcctctctcgagcgactaatccctaaaactgatgcatataaaaccttcaatgtatttctactaaggattaccctctttcaagcgccaaactcctaaagatgatgcaaggatgaagcatataatacatttgttggcattttaggcctgccaagccctaactaaaggggtttagcctttcattgtcatgagagactcttacactctanggggttgatatgaatggaagaagatggatggatagaggaagaacagaggataatggacatatatagaaagacggttcccatgttgagatagta

SEQ ID NO: 170125 - DNA, 407 bp, Glycine max
cctgcatgcatgcaagcctgggttaaattagtctaaacttatgatgtgatcaagtttagtacattaggctttagcatagaacacaagaacatgactaattagagaaatatcttcatatgcatcaactcgtttgttaaaaagacccaacgctttttacctattactatcaactttttaattacttgcatttactgctttttaacataacatctagtttacttttgtttatattctaaaatatcaatgtttgttcccacaatgccctatttctaaataaaaatttgtctaataaacaagttccctgagttcgatactctgattactacattttaattttaaatgcttgacgacccggggcactttatatgggaaatcaacaaaggcaaggatacaaccaaggaggattc

SEQ ID NO: 170126 - DNA, 401 bp, Glycine max
  unsure (1)..(401): unsure at all n locations
attcttggttcatttactttntataccccttcttgacgtgcttaagccattntatttaagtcctttctcgcttaacctaaaaataaaataaatttccaccgatcgcttgaattgtattatccgctaacttcggttaaaatgaattccgaccgttcggtcgtgccgtaaccacgttggatatcaaaatagaggtcaaataataatataataatcaaacaacgtcatttagtaaaataaagcgaagaatcaatcggatgttttctctctgggatttctcattcttcattgaactgactaataactaaagtgaaactaaggctaaaatcaactcgcctagtcaagctcgtgcatcaagatacggtgttgaagctatcattcaatttctactaagaaaatggata

SEQ ID NO: 170127 - DNA, 398 bp, Glycine max
agcttgagttcacagatgctgccccataaattccctgggaacttgttttggccccattcttcttttcgagccctctttgtttctcattccaacgcttcagccatggccacgttgacatccctcaactcgtcacattcctttctaactctaatggttgttgtcttgaacttttccttgactacttgtgttcttttcagttccacttttaagggcttgcatcccttcgctctccacaaggacctcaacctcttcctcacttgaaacctttagcattgggtgccaagatatctcttgcgtccgagccttcagccacttgtgatagccgccgacgatctcattgtcgcttcctccaagctccttatcctttctttgcaccgcattccatgctttttggactc

SEQ ID NO: 170128 - DNA, 463 bp, Glycine max
  unsure (1)..(463): unsure at all n locations
actcagcttgaggattatggggtacccgtcacatgtggttctattttgctgtcgggtgatggtgcaagtcgactatccagatccacaaatcacacatgaatccaccattcccaattgcccaccttcaactgagctcacgtactcccacgtagcccttatcctcgttcctctcaacaccgggtccccatcaatccccccaagcttccacaacatccaagaaatttcaacatccaaacatcatgaactatcaaaaccaagcaaaatagggtagaggcagaaaactctgcccaaaacacaaaccaataccacaacttttcttactcanatacncgaataacattcccttcgttccaatttggttacccgtggatcgactcgaacnatttactggagggttctagtacataagtctacatttcgaccgctgggatctgctagtaaatntccagaacccaatatgtac

SEQ ID NO: 170129 - DNA, 392 bp, Glycine max
  unsure (1)..(392): unsure at all n locations
agctngaggagttcgagtgtcattatctttcataagactcttgggcttttggtggtgaggttggcttatatggtgaggttacaagaatccaagagttagattcttgttgtatgtgtccagagatgggtgtaggatgagattggggttgaagatgtttgatcttaatggtttctatttttggtggaggttgatatttaggttcggactgagaatctatagccttcctcttttgggctattctaggatatgaaggtttggggtaagatggaggtggtttcttgactgggtttgagggcttagggtcaaatgttggcgaaggtgggtcttttcttttggtggtaagttgggatctacgttggctacgttttggtttcatacgcaagtttgatttt

SEQ ID NO: 170130 - DNA, 471 bp, Glycine max
  unsure (1)..(471): unsure at all n locations
tcaagctgcatgtncaattccggttgatgaagcttatttgtggaaaggccaaagtggacctgagctaaaacagacaattcaacaacaattcagaaacatcacgtattacttcaaactagtggaagtggacctagctctgcctagctaaatattatccattaataacttgcagggctttgttgtggcttagtctcttttaagcatgcatcattcttccaacaaatatgtagaaaagacaattgattactaatgattcgtagtgatgcttacaaaaccatcttttgtggaaggaatcaaagtatatataggttggattctatctaaaatcccgtcattgatatttttagtcctgcagtatggttcttcttttcatcttatgtgcggtggaatcttagtctcatttgagttttccacatctaatctgaacataacttaagacaactaaatgacgcactctttcacttgctctca

SEQ ID NO: 170131 - DNA, 217 bp, Glycine max
tagctggcataacgccaatactatgtttactctaaagccgaattcgattatttaacagtgaatctgctgcaacgtggacaccatgggaatcacttcatatattaacgggggtgaaaaaactggcaggattattcatttgtaaatcaacaccaatcagatatctagaattttttataaatattaaatatatccatcttcaacatcattaacaattatt

SEQ ID NO: 170132 - DNA, 313 bp, Glycine max
  unsure (1)..(313): unsure at all n locations
ctaacacatgatagtagataagattcttatgctattctttaggacaaaaccatcagcatgttgaccgataggataaagcacgttagatcctatcctctctgcatgatgtcgcagtggagctatctttctcgtagtgatgttatctttttcgtagcagttactatctttcccatgcttttaaataccgttgctcatatcagaataaagtaagttcttgcacgcataatctctttctgtatgctcncttttattgtttaatatttctggctactcttatcacaaagaagacaacaattattatttctgtgtcaag

SEQ ID NO: 170133 - DNA, 337 bp, Glycine max
tagctctttccacactctagtgtagattgcatcatcaagatggattgcttctcttgcaccctacaaagccgagtgaacctattccccatcagttgtggctctattatcaagaatcatttgacaatcattgagccataatggtacactcttatttcttctcacgcctcaacgtctctaactagggatcatattcctcactctttttttttcacctatgcgactctagtttgtgaaacacttttctaatcctttgtctttatctatgtgacccttcccagtgccatcagaacattcgattaagccttccaatcacagttctgttatcataacaaaaaca

SEQ ID NO: 170134 - DNA, 393 bp, Glycine max
gcttctcaagtctcatctaataaaagcatacctgccagcatctttttgttcatctaactcacaagcatccaactgaaatctatctgcgttagtaacaggcatacacaaccgtttcacacatactaagccttctttggtgacgacagatttcgtgatctcgacgagaacctcattaccatcttcaagcacatattcaacctctttatagaatattctgatagtgccaaatagaagttagccaagcactctataggatacatcatcaatgtcttgcaaatcttgtctgggaaggaaaaatgaaatgacataatggaaaacaattcatatctccaaactttaaatgattcacagaagaataactcttaaataacatattctgtggtgctattggta

SEQ ID NO: 170135 - DNA, 375 bp, Glycine max
  unsure (1)..(375): unsure at all n locations
acttatttgtgtgggatgcccatcatgattctgtggcttgtgttgaattggttttctttttacaaagaggtatgccttgtagcatctcattattacaaacaggtttaataaccatgggctagaagactaccttgatgttgctcacaataggctagaagacttgttgtctcaatgttgaaatgttactaaataagtccctcaataaacaacttaatattattaacattattgaaaattataacttattattaaacagatcctttntcgaaatacaaactaactccatttctaaaacatcaaacaacatacaagagtcaaacaattaatataataattaagagacaagattcaatgagcaaaaatattaagataact

SEQ ID NO: 170136 - DNA, 366 bp, Glycine max
  unsure (1)..(366): unsure at all n locations
aatgcgatgtgactcatcatcatccatctaagacatactttgtcaaanattgattttatgtctaaaattgattttcaattgaatcaatttaagtattctttgcgttgaataaacaaatatgtatagtcgagttctataactaatttattttaaaataaaattaaattgccgattcctatataattcttactccgcaatattggtcttcctgattnttctcgcgggattgctcctcctatttttctaaaaattataatcttagctcaatgttcaactcttcatacatatatttctcttattttttatattccaacttaataacacatatctctatggtatcttaagctaatatatcacgtctagagt

SEQ ID NO: 170137 - DNA, 180 bp, Glycine max
  unsure (1)..(180): unsure at all n locations
tatatacaagatgatagcacgttcacacaacccttactccccctatcttttggcatgtatgcctaactttaaggattgattnttaatgatagatctctaattgaaatngatttctaacccaagttctcttcccctttgcaacatcaacaagaactaagcacaagaatcaatattcaaaca

SEQ ID NO: 170138 - DNA, 270 bp, Glycine max
agcttgtccatcccaatagcaaaggtgagtttttatttttctgttctcgcaacaccaaatgactccccttgcacactttgtttctccactttgaaccaacatacttgtacctttatgatgtcatctcccccatagaactgatattgaccacaacaaaggggacacatcttacatttgagaaggtttgaattgcacaactatgtgagttgatcctcacgctccctatgccttcaaacctcattttttcatcattttctcaccttagaagac

SEQ ID NO: 170139 - DNA, 346 bp, Glycine max
  unsure (1)..(346): unsure at all n locations
accatttccataatagaacactggtnacgtgtctactatcattatcattntttctccgtcattgaggtgccacttgagctgccaggtctctccacctttgggcgtattctttgaaagatctgtgcccctttttgcacatgttctgttgttgcatcctatccggaaccatatcaaatttgtactgatactcgctaatgaaggcaaccattacgtccttccaagagtggactcgagaaggttccaggttggtgtaccaggtaatagctaccccagtaagaatttctcggaaggaatgtatcagcaatttcctcatcttttgcgtatgcncccatctcccgataataca

SEQ ID NO: 170140 - DNA, 363 bp, Glycine max
tatcatcaatgacttacacattataaaaaaaagttgtggtttactggctttttagcctctaaactttttaagatttctatttgtaatacctgtactttttcttactagtcaatgttccttaattttttattagggactaaaataaaaaatactaaaaattttagtgattaaaaatataatatgtgcccattttgtcctattcgacgaaaacgttagaaaaaccaaaaagggggtctgtgaattttgaaaagaagggttcgggagttgtttttgcacggggaaggtatacacgcccctcacaatggacgacaacctttaatccagtgtgcataatgtaacttcaaaactatgttgttttctttt

SEQ ID NO: 170141 - DNA, 415 bp, Glycine max
  unsure (1)..(415): unsure at all n locations
gtctacactttcgcaagctatttattcttattctagtccaacaagaggaatctgaggacgaagcttactttaagttagtctaaacctagaagggttgtctaaattatgtctagtccaacaagacggatctgaggacgtgatgcaatcctccctatgaaaggaccagttaccagagccatgagcaagagggctcaagaggattgcgctagagctgataaagaacgccttacggttctaatgaaccttacggtagatctttgagcccatgggtcaaggttgggtccactcttctttgtaaatattagaataggttttntttcttcatttgggccttgtattttggccattctagcagtatacgggtctatgccttgatttcacggcattttgagtagtctctgtagaggattctttg

SEQ ID NO: 170142 - DNA, 370 bp, Glycine max
agcttagagaggaagcttcaattgagaaaattattagatattaggggaggggagcacgcaattgaaggaggaaaagagggagagaatttgaactttgaagtgtgtctcataagactctcattcatcaaagttacaacaagtgttacacatgcttttatttatagcctaggtagcttccttgagaaacttccttgagaagtttccttgagaagcttccttgagaagttttcttgagaagctaaagcttaactacacacatccctcttataactaagttcacctccttgagaagctttcttgagaagctagtgcttagctacacacacccctctaataactagtcttgtcttgcatactaaccctagggggg

SEQ ID NO: 170143 - DNA, 282 bp, Glycine max
  unsure (1)..(282): unsure at all n locations
atataanaacaatcatgtaaacttcacacatcacaatctaacacacataaagcgatatttaacctactatatacagcgataagacgtcctacaaagcataaatcaacacgatctaacctaatatctagggttcaaagctgactcatattatatattcactttctatacagctctacctcactactcctttatctattcaattactatacataacctccacaaaaccttcactagcaagtaactaaacatccttcacccacaaatcactccaattatattaaa

SEQ ID NO: 170144 - DNA, 392 bp, Glycine max
  unsure (1)..(392): unsure at all n locations
actgccgctgccgctgctttggtttgcgatcgaaacttttttttatgcacagacgnatccctggttcttctccacgacaaaacaaggggtgtgaagagaatgagggaggaatgagacgtattcggccagaccaaatctcttaagatatcaaggtatgcaaataaacgaaaggattaagggaatgaagcgcgcagatcctctcttttaaagggacttgtaatccacaaatgtatcttgagtgataaatgaaggttgagcaagtctttgcttgctacaactacaactacattgaacagaagaagatcccactggccttcttggagtttgagggatatgccttcatgtggcggaaccaactgatgagtgatgtttagaggactaaaagacctttg

SEQ ID NO: 170145 - DNA, 442 bp, Glycine max
  unsure (1)..(442): unsure at all n locations
tcgacactataaaactcagcttgtgctatgtgctgagtgtgggatgtattttgttatgtattcatggaacctantatttataggattggagcatagttacgggtccttgcttgtatgggttgttataacctgtgcacataattctctacttacagataataattgggagcttgtagataatgttagagataaatcatagcttatagataaaaagccagaagataactctaccatgtagataacttgtgtctttgtagataattaactacctgccacgagataaaggtattcaaatatattccaatattaataggttagagataacttgtcggttacggagctcgattgctaatggctaagtgttcatgctcctattacacggctgacatggaggcttgacacatgtcacggattgccatgtaagatgtcacgtgtatgttat

SEQ ID NO: 170146 - DNA, 193 bp, Glycine max
cgttaatttgcactccaaattcctcctttaagtaatcaaagtcttgcatatatgtgattgatggctgctgcctaatctttgccctaagctttttaaaagaacactttttctttgctgttgtgtttttgaacactctagcgcatgagcgttcactattgaaaagtttgacttggaaacattttcacctttgttc

SEQ ID NO: 170147 - DNA, 457 bp, Glycine max
  unsure (1)..(457): unsure at all n locations
tgaagacaagactatacgaggtatcctccttgggtatttaatatctctaaggggtaccgtgtctacaacttgcaaactaagaaactcatcatcagtcgagatgttgaagttgatgaatatgcttcatggaattgngatgaagaacaaggcgagaagaacgttcttatacccgctcaactacctcaagaagaagatgatgaagaagacccaggtgaaccaccttcaccttcatcacaacaacaagatcaagaactatcatcaccagagtctactccaagatgagtaagatctttggtggacatatatgacacctgtaacttggccatacttgaacctggaagctctgaagaagcgtcaaagcacgaagtatgggtcaaggcaatggaagacgagatacagatgatcgacataagcaacacatggngagtagtaaatcgtccccatggaaaagatatca

SEQ ID NO: 170148 - DNA, 390 bp, Glycine max
  unsure (1)..(390): unsure at all n locations
agcttaccacaatagngggcaatgcaccattttttttatcaagngagaatagcatcaaatcatcatgaaattgtacagtttctaactttcacttaattgagcggatgtacttctgcaaggtaaaactagtgtccaaatttgtattttgtaaagaaaatgacacaaaaacttacacaatatattactcaaaatatggtttatcaccttgccctccataaagataggaggtggcgggacctctttatctagctacctgaagcatctactatcgaaaggagagaaagccacaagtcctttattcgataaaagcttttccatatacaatctatacctcatatcatccttagggatctcattatcattgacatcacaggtatcctctccatcgga

SEQ ID NO: 170149 - DNA, 355 bp, Glycine max
ctgcttaatgacatgatgaactatctatatgagctccgctcgatcatattgaacgcggtcagtgtgcacagctgatggcagacttattatgacaaaccaatcacgtaagagctacgtatgggactactgatgtcacctactatgatcttcgttcatgacatcgtacaaactcctagagccctagctatgaattgtactgatgcacttgatctgtgccctcacatttagcttactactcatccgtgtcactaaaaatacaccctagagcatgcgcgtgttctgtggcggaactcctaccaacaaatgatcctacatagatacaatcactatatactatcataggataaccttctct

SEQ ID NO: 170150 - DNA, 375 bp, Glycine max
  unsure (1)..(375): unsure at all n locations
agctagtgcgaatcaaaccactcctgcattatatttttagcatgcattctttatttctttacccactcctcacgtttggtttttagggaaaaacaccataactaaacgcgccacaaggcatccctatcgcaccagatccaaatctacaacgatgggtgatcaagaggagacacacgaacagatgaaagccgacatgtcggatctgaaagaacaaatggcttccatgatggaggccatgttaggaatgacgcacctcatggaaaaaaacgtggccaccgctgtccctttcaatttggctgccgaagcaaacccaactntntatggaaccgcgcgcatactccctcaaaataataagaagcgaaagaaaccctgggg

SEQ ID NO: 170151 - DNA, 370 bp, Glycine max
tcatgtctttttgcccagttggttaatattctccttgccaagcaaatgaatacatgccggtgtcggcggaaccacaaattctggtgagctggaacgaacaacctatccgaccaaagttgaaatttttactgccacaccgaacaaaatagaatcctctaccgttaaaaaatagtatccgccaccgttcgaaaaaaaaataccgcaatgtcgactgaaaaatatcagtcacggctctacaatggccgatgtcggctattatatctcttattccatccgtgaactaaaattcgatgatgtctaatagggaatgttcgatcggtgtcatccggtgatgcttctttttaaccttgatcgacatgtttctggctac

SEQ ID NO: 170152 - DNA, 395 bp, Glycine max
agcttgaacagattaccccagttggctgtgtgttggcctttgacaaaaatctcttctagtcatctaaggtccaacatgctatggattctgccaaggtctttcttcagctgagtttgacaatcctggaagaaaatggacaaaggcaccaaaaggcgctaaacaaggtggtgtcattggaggctgagtttgccaaatggagggctactgctcgcatagtctagcaagtggagtgccctaaggtagctaatgccatcttcgtatttgttgaaattgtgaagtcaaaccaccaactatcttccaaggttggcagcgttttgaccaagatgttgtgctcccagctggatgatgatgaaatgtttgaacgttgccacggcttgcacaaagacaaaaatgac

SEQ ID NO: 170153 - DNA, 327 bp, Glycine max
  unsure (1)..(327): unsure at all n locations
tacttcttgaccttcttgtggcatctctacttccactgacaaatcatatttgagagaatggcacaactccagcgagtttggcctttgaaaatggaggcaaggacactgtttgtagtggcacagacttttcgagtcgcggtanggttgttgttgcggcgtactgcgtggaggagcttggaggagtataggcgttgtttggtttgggaagtccaggagggagtgtgagaaaatgagttcttctggtggaggtgaaaggttttggaaatgtnttgaaacagagaagattgatttgtcaaaaatagtactccacgagtgatgagaatcatg

SEQ ID NO: 170154 - DNA, 294 bp, Glycine max
  unsure (1)..(294): unsure at all n locations
tctgatctgacatcaactccctctgtatctatcgatttctgactttattaattttaagatcggagaaatatttcagtgcacgttcttacatgaaagatgcgcacaacttgtgctacaaaatacactcttaanttacgacccacaaaactacttacgtaaaatgtactgcacattgtaaagttgtcaatactgaaaatagcgcgcttcacaccacgcggcatcactctattatcctgaatattgatgagcatacaatgtctccggctcctganctctttaacccatcgcatttct

SEQ ID NO: 170155 - DNA, 284 bp, Glycine max
  unsure (1)..(284): unsure at all n locations
aaaaagggtttcaagccaccatattataagggctgctaaaattgcatcaaaaaaattactgaggtaaatgattctgttttttgcattcccccaacccctgtttttatttattatttaatcccgacacaattttgtatggattttaccttggaccttttgtatatatgtataaatatagtagcgaaactcttaatatctcttggnttgggcactattaaaacaaaactaaagttgtgataaaataatacaatatttacaaattcattgttgccctgttgggctgc

SEQ ID NO: 170156 - DNA, 387 bp, Glycine max
tactcaagcttctgcccgtctctaactataatttgcaacaagcaatttctttttatagattctaactttttggtaataccatggtttttagttctaattttggtctaaatctcttacattttcctaagattttattttaagccttatcattaattctagctagcttagtactgacatagctaacaaaacaagaaatattaattaagaatattaacgtaatgaaaatcattgtaaattaatctaataatttattctaggtatataatttaattaaggaatatatctattattttgaataaataagggaattatatatccattaattttatactttatttctaattcttattatggtatgaacatcaatcttattgcttctaatatttt

SEQ ID NO: 170157 - DNA, 390 bp, Glycine max
gcttagtgcgagtacgcatgtccaagtccacttttgcaactataaaaaaagagtcaaatcaaggagaaaaaatatactgagtcttaaagcactttaatacacgcctaaagcctcataactctcccttagagaattctttcttcactccaatcattttctattttctttttccattccttctcttacatcaggttctaaacctattttcaagtgtaagatctcttatggctatgagaggctaaacccttatatagttagggtctagcagacctaaaaagttaaaagatgtattgtatacttcatatctatcaatgtaaacaagtggtttttttcctattatcctttcttacttttagtttcatgtatcattcatccttgcatcatctttga

SEQ ID NO: 170158 - DNA, 398 bp, Glycine max
  unsure (1)..(398): unsure at all n locations
actaagcttgatntaaaatgtttataatactttaactaatatttgaatgtttattcctttattaatatatatgtgacgggtagagggtgtcacaaatgtcctaagacgcttgccaaacaatagctgaaaggttggaacggttgatcaacctaaggatagtcactaaaggttcagaagcatacgtcgccacgaagaactgcctaaggatcgccagacgtgtgactactaaacgcaatgtatatgtgcagtcttgatgaacacgacgtatggaacatgcatgaagacccttacaatttattacgccgtatatgatctttgcatgccctataactagacaatggttattacttaattctatctgagaacctatttatcttctttccggacttgacaatgtt

SEQ ID NO: 170159 - DNA, 270 bp, Glycine max
  unsure (1)..(270): unsure at all n locations
acactatacaacacctcagcttgatatgaagaagtgtataatggagcaaacttctgctcntattcgttgaccacatagtggcacctgtagatatgtcactggcggtcccgacaccttgggaacgtcacgtgccgtgctattgccgccatccaagcttgaccaattccgacccaacccgggcatacttaatcagtgagaacctgtgatgtacctaaaccggcgatctcctggcactcaatagacaaatcgaaccgcgaccacacaccacgg

SEQ ID NO: 170160 - DNA, 355 bp, Glycine max
  unsure (1)..(355): unsure at all n locations
ccccccccctctcgtctttcgttcactcatctctttcctcacccgcccgccccttgatctttagcctggagcccacaannacgcagcagcggctgtcagacaccctattgggaggtgaaggccttttacaaacanaacttctagccatgaaaggtccaacctgctgtggagaccgccaaagacaatcttcaactgaggtccccaattctggaagagaatggaccactgccccataaagccctagccaaggtggcgttattgaaagccaaactctccatatgcgtgatttctgatctcagagcctctctagtgtattgccccaatgtaccaaaagctctctctataatttgggaaa

SEQ ID NO: 170161 - DNA, 399 bp, Glycine max
  unsure (1)..(399): unsure at all n locations
tctcgctctgcctgccgtatgctgtcgcccattatcttctgccaacatcactgccgccagccaccgccattttttccagtgatcactggatctggtgtgcctcaccaagcatggcccagcccagaaggtttcaaagtccgaaaccctataactcaccatcatgtgcgtcatttcttcgcaactctgtcaagcacatgctgctcacgcgctggtctctggttaccagaactcaggtgcaacaacacagtcagggtcgtcagcctcttcaggtctagtttcaatcttcagatcatcatttctttgctggttagaaagtgtgtctggntttccgtgcatgtacagctagctgttgactgtgaagttgggttcaagagctcggttgtttctggtttctatcac

SEQ ID NO: 170162 - DNA, 338 bp, Glycine max
agcttcaacattcaatatcgagcgtttcgatatattacgggactgaatcagacatccgagtaaaaagttattgtagtttgaagttgctcagagcttcaccattcaatatcgagcgtttcgatatattacgggactaaatcagacatcagagtaaaaagttaatgtcatttgaattatctcaaagcttcggtattccatttcgagcgtctcgatatattacgggagtcaatcagacatccgagtaaaaagttactgtcgtttgaatttgctcagagcttcgataatcaatttcgagtgtctcaatatattacgcgactcagtccgacaaccgagtaaaa

SEQ ID NO: 170163 - DNA, 408 bp, Glycine max
  unsure (1)..(408): unsure at all n locations
cgtccttgatttaaacatgantgatacatgatttttgttttgtangattcaatttgggcaaaattgggtgaggacaagtgtgatttcaaaaatctgcactctatgcagaattttgctgtccaatatgtgcagcagaattttggctctgtgcacaaaatgttgtgtatttgctggttgcggaaagagcagtacagattgtgttctggacgttttatagcagatcccaacggtcacagtgtaaacttatgtgttagagacttccagtagaattttcgagtcgatccaacggttaacgaattgggacgacgagaatgttactgggggttttaagtgagaaaagctgtgatattggtttgtgttgggccagagtttctgcctccgccttgtttccttgtttggaagttcatg

SEQ ID NO: 170164 - DNA, 358 bp, Glycine max
tgcaagaagctgtcgtgctcaaagtcttttgatgaagccacaacttgaagactttggagtaaaccttgatcacattcctctaaaatgtgacaacacaagtgcgatcaacctaaaaaaaaaccttgtcatgcattctaggactgaacacatagagataaggcattattttcttagaaatcatgtgtcaaaaggcgattgttgtattgagttcattgatagtgagcactcaactatcagatattttcactaaacctcttgctagagataggttctttttcattagaaatgaaccatgcatattaaatgcatctagcatataatgatattttgtttgcacagcgtgtgagattgacattgc

SEQ ID NO: 170165 - DNA, 395 bp, Glycine max
actaagctcgaataggaagtgttaagggtgaaactttcttcttttattgttgaccacagagtggcacctggagatatgtcgcgggggtcacgagaccttggggacgtcaggtggggtgctattgcccaaaaccaagcttgaccaatcccaacccaacccgggcatagtcggtcagtgagaacctgtgatgtacctaagcaggcgagctcctggcagtcaacagataaaaggaaaacaagaccacaaagcacggaggcttgtggtggctggccagctgtgaattctgtgtaatatgtgagatatggcctctggtaatcgattaccaagggtgggtaatcgactgcaaggcttataaatgaagacaggaggctaagatggtctctggtaatccgata

SEQ ID NO: 170166 - DNA, 391 bp, Glycine max
agcttgataatatacccacacagattggctttatggcttactgcatgcctcagaggaaagccaaaagaaacttgttgtggactggattccacctagctaccttgaaagggcaactgccaaagaggccaccttaattctgaacaatgaattatattaccagcctgttttatttattatcggtcataatagacgatttcagcctcatttatatgttattggacaatggtgccgaatcctgatgcttttaaggcagcatggaaactattaaaagggtcattcacagccatgaaattaaccatttgttatattatcaatttccctcattttggctttgagaactctctcagtttttgtatctaactaatctttgcctacacggtgcagatggtgt

SEQ ID NO: 170167 - DNA, 394 bp, Glycine max
gcttgtattcttgcatagataaaagttatttgtacagaagattgtaaagggtagacattgtgtaccttgagtttccatggagatgggacttagtaaaagaaagggctcaccaaaggtgaaccttgggtttgttgagccttggaccacgggcgtgtttgccttgggttttatcaagcctatggagttgcgtcaaggcttaccaaggacgagccttgggttttgtggacatgtaaggatcagcaagcacagagcttgagtttgacgagtcttgtgtgcaatgtaagtgttgtgctcttgcatacatgacactcgccgtatgtgtcatgtattggagacgaactaacatgctcttgcatacgtgcctcttacaaagaggcatgaatcaattggactc

SEQ ID NO: 170168 - DNA, 407 bp, Glycine max
aacaaagaaatctattctaaagatacatctaattattacactcctcctcaagctggaacatataaatcgtatgcaccaagcttggaacatataaactgaatcctaggtccccttaaggatctagtcaaaatatctgctggctgatcattagagttaatgaactcagtgacaatctctttagacagtagcttctcccgaataaagtgacagtcaatctctatgtgcttggtcctttcatggaagactgcgtttgaagcaatgcgaagagcaacctgattatcacaatatagcttcctttgcaccactttgaagaattcaactcttcagaaattgtttacccacataagtcacatgtaacccaactatagatctatattcagcttctgcactagatcgagcaacaacag

SEQ ID NO: 170169 - DNA, 397 bp, Glycine max
  unsure (1)..(397): unsure at all n locations
agcttgcatatgcatactaagttctcatactatttacaatngacnnaagggatcatgcgctaagcctataaacgggcatttagcgctaatgcttgattcaattggtttccaacttgacttcacaagctgagcatgcactggtgcgctgctctaattcttcatacatcttccattcttctattcatgtatccaaaaactctacaaaatagaataaaacactataaatttactaattttagcagtcttaagataaaaactcaaaagaatctaaattcttatctttttaagtgaaaagaagcatcaaaaaagaagaaattagataattactatataatataagtgcacaaactaagtatgcataacaattatcactgcttagaactgattgagttcatta

SEQ ID NO: 170170 - DNA, 412 bp, Glycine max
  unsure (1)..(412): unsure at all n locations
ttctacacctatgcagccactctgttcataaccaattaacataaacgaagttctttctctactaccaatgtttgtgtcagaccttataatcaccgccacaaatctgttgtcatgagcaacggatcgagcncaccgcaatacatcatctcggttgtcaaacacctacaaagcaatccagacaatntcagttgtttacaacacattcattgtattaaatcactcactatcatgaacattattacctgagaagtattgaacgcatncgagcaatcaacatgtgggtcattcataccacattcttcttcatgttgataatccatattaacttcttcagacattatactcgcatacatccatngatattcgtcatcttaacataagcatacattcacacacatacaaacctatcgac

SEQ ID NO: 170171 - DNA, 419 bp, Glycine max
tgattatgtataaactcccagtgtctttatattatattgtgtaacacgttcctatttcaactcccttttgtaaacctacttctcgttatttttgggcactatattggttctctcgttaatggcctcaataatgaatgccctgcagattgttattcacctttgaatatatggtgtaaaaaacatcgttgggaatccttttggttaccggggattttctgacgaaaattgcagaagtgccggtatctcattcccctcttgctgacttggtgaacagatgatcatctaaggtcaatctgagcacataagtcttcttctatgactttaaaatatcggctttattgcactgctataaagtatgacatatcatttttgtggagcctgtggagttcacagagactgagtatgatttgaacagctga

SEQ ID NO: 170172 - DNA, 350 bp, Glycine max
  unsure (1)..(350): unsure at all n locations
gtcttgtgagacacaactcanagctcaacttctcttcctttctcttccttcaatttcgtgcttccccctctctctttctctccctctttcttnttctccattgaagcatcctctccaagcttcttatccaacgctcatcttggtggtgaactccttcttcatggcttattcttaatggatggcgcctctctcacctctttcctttgtcttcgctgatctcatggtggaaataccataaaggacccattgaactcaaatcacctcatatacccacacancttcatataatcatgcattacgaggacgtgtcgagccacacttgtattattactaaccactccaaactgacc

SEQ ID NO: 170173 - DNA, 180 bp, Glycine max
accaaaaaccgcaccaccccccccctgaaaaaagcaagcaacaacccccacaacgaggcggacgggcccccccccaaaagcagggaacccccgcaaaaaccggtgccacacccgcgaaaaaacaacccacggggagaaacctggggctcgcgaccacccacagaagcaacccccccctgc

SEQ ID NO: 170174 - DNA, 406 bp, Glycine max
  unsure (1)..(406): unsure at all n locations
ngctttgtagagaggagagagatcggcacgggttttggcatgatcttaaaagaagagttatgtgcttgcacaagggctaaaaagagtatggctcatcacttggaagccacggagcaaatcatgctagccatcatagggcagtacaaggaagaattgaaccagcccatggcccatgaacaaaagctagtggaggattttgcacaagtgtatgctgaaaaagaaccaagagggaaggtgattgatgctctgcgtcaaaaagcaactatttggatggatatattcgccttgaacttgaatggaagtcaagatcttccgcgtttattaccacagcaaaaaccatgggccgaagtgttgactgccctccaggagattcatgggcttaataattactgtcaacacatgataa

SEQ ID NO: 170175 - DNA, 402 bp, Glycine max
  unsure (1)..(402): unsure at all n locations
agctggagttgctgcagatgatgtccaacgttatgtcaaagaataagatcgggctgctcaatgcacaaggcaagataaagtgtcaaatgaagaattgaagctgcacgattcacgatgtcggatataatgtccaggacatcctgcctganaatactggaattgctaaaagcattgaagctgtaggatccacgatgtcggatacaatgtccaggacatcctgcccganaatactggagttgctaatagcattgaagttgcaggatccacgatgtcggatacgatgtccaggacatcttgcccgaaaatactggacatataaatctgttatatctttaacagactatcgtgcagttagcaagagattagatgatctatctttatggaacgaatanaagataatta

SEQ ID NO: 170176 - DNA, 303 bp, Glycine max
ttcaaaaccacacagcagccgaataatggtgaccttccacgcaagagatacaatccaggatggaggagaagacgactcagaggagcccatctcatacgcaaaaatctgacaaagagcgatcacaaacagcgcaaagaaccaaaaatgagaacgccatcaacgaggggtctagggaccaaaataaagaggctcacacagagacaggggccacaccaaatagaaaggagaagaagggtgcgacaaagaaaaatgagtcgagaaaaaaagacgccgggggagcacgttataaaaatgtgacacaag

SEQ ID NO: 170177 - DNA, 290 bp, Glycine max
ttcccttatgctatcaaacataagaagggataaggtaatattgcagcctatgctctttctcggcgtcatgcattactctctatgcttgaaacataattgattggtcttgaatgtctgaaaagcatgtatgaaaatgatgaaacttttggagaaactcttaaaaattgtgaaaaattttcacaaaacggtttctttatacatgaaggcttccttttcaaattgtgtgtgcctaaatgttctactagaactttgcttgcttgtgaagcacatgaacgaggtttaatggggca

SEQ ID NO: 170178 - DNA, 255 bp, Glycine max
  unsure (1)..(255): unsure at all n locations
agcttgngcaaatcaaatcactcctacattttatttctagcatgcattnnctttctttacccactcctcacgtttggttttttagggaaaacactataactaaacgcgccgcaagggatccctatcgcaccaaatccaaatctaaaacgatgggtgatcaagaggagacacaggaacagatgaaagccgacatgtcggctctgaaaaaacaaatggcctccatgatggaggccatgttaggtatgaagcacctca

SEQ ID NO: 170179 - DNA, 345 bp, Glycine max
  unsure (1)..(345): unsure at all n locations
tttaattgcctattcaagatcatatttacatatgaaccggaaccatctagcaaagattccacaacctttcatattctgagagagatatacatatgcagacaatatccccatactatattatagtcaagaaatgagaaaaatgaagatacacgattcgattctatctgagtgagcaagattaaaagttaaatgaacttgaatcttctaaatgatcatgtgattacaaactttgaagttcgaccatctatgtgtcattgcataangcaaacttaaagatcttgcattgttaaaatgagaatcattgtcactataccaagtnccatatatatacatgctactagctct

SEQ ID NO: 170180 - DNA, 404 bp, Glycine max
  unsure (1)..(404): unsure at all n locations
agcttttttgtaaaaagattcaacaagttncttattagtttgaggaaatcagaggcgacccaattttaaatcaaagagaaagacagaaacttcatcctctactttaaaatgctttgaatgcaatcaacctggacatctgagggttgattgtcccatcttcaagaaaaagatggagaaatctgaaaagaaaaatcttagtgaaaagaaactgaagaaagcatacatcacatgggatgaaaacgatatggaatcttctgaagattcagaaaatgaagagataaatctctgccttatggctaaaagttatgaaagtgatgaagaggtaacatcttcaaataacttatctatttcttttgatgaattgcaagatgcatttgctgatctgcataaaaagtcaattaaac

SEQ ID NO: 170181 - DNA, 392 bp, Glycine max
  unsure (1)..(392): unsure at all n locations
ngagatgaggaagtgtccaacggtgaaacttcctgcttttattgttgaccacagagtggtacctggagatatgtcgcggnggtcacgagaccttgcggacgtcacgtggggtgctattgcccaaaaccaaacttgaccaatcccgacccaacccgggcatagtcggtcagtgagaacctgtgatgtacctaagcaggcgagctcctggcagtcaacagataaaaggaacaaagaccacaaagcaaggaggcttgtggtagctggccagctgtgaaacttgactgatatgtgagatatggtctctggtaatcgattaccaagggtgggtaatcgattacaaggcttacaaatgaagacaggaggctaagatggtctctggtaatcgattacca

SEQ ID NO: 170182 - DNA, 380 bp, Glycine max
acatctatagcagccacttttttttttctctgtgttcccctaccccttactctaccaccattcctccctcttcctcaattaccacccctttctgcaaaagaaactttcaaggcctgttcttcatctttctcaagagtatactgcattctttgttcatgcactaaaaggctactttgcaatccatcgatggtgagagcagagacatcattagactcttcaattgaacatacaacataattgaattgtgatgtcatggacctaaaaaccttctctaccaccttagtttgacccattgattcaccatgcgcggccatcttatttgcaattgctaaagttcttgaaaaatactcattaacagtctcattatctttcatagaaag

SEQ ID NO: 170183 - DNA, 424 bp, Glycine max
tgctgaactccttcattgcatataggatggacgagttgtgattggcctcacttctatctgttattggcctctataaggagatgacacatttcttttcaaaaataccatcttcaaaaggaaacacagttgtttatgttttgttcatcccaaaaacagaagtatatatgcttctggtgctcgtttccctcttgttcctctgcacattgagaacatatctgatgatgggtctagattgatgcagatcaaaggtgtttggtcaccatggtgatgagaacatgcagagccaatgacaagtatgatgggaaacggaacaaagaaattcacaactctatataggccataataactcgcttatgagcgataccaaaacacaaatatttgtgaagctcgaccacataatatattactataattcaatgcgtct

SEQ ID NO: 170184 - DNA, 382 bp, Glycine max
agctctccatatattgcagagatgctgtgattgacatcccctatggcccaactctcaagcaaagaactgaggagtacaagagtttcgagaccctcctctatcttcttctctacctcctttgataggctaacaataaccatgaaggtgcatatatgttcaatcatgttctgacccccatatactacaacttgaccccccgtggacaccacgagatttattcctcggcgccttcttttgaatcaaaacaccaagctttgaccttaactcatacgcatcggtattaatagatacctgcttgaacaaacggctcgtcatatacttacacatcatagctacaacctcccgattaaggagctcccatttggagcccgtcttatccttc

SEQ ID NO: 170185 - DNA, 352 bp, Glycine max
acattcaccacaggaactgccttcttctgttctcagatggagaatgcctttacagcaccttcgcaagggattctcttatgcctcttaagtgcagatgtccaaatctttgatgccatattatgacttcatcttctttggaggatagacatgtggaggagtaactggtttcttgaggtgtccataggtaacagttgtcctttgatctgctgcccttcattagaacttcactcttctcatttgtcaccaagcattctgactttgtgaagtttacattgaatccttcatcacacaactgactgatgctgatcaagtatgcagtcagtcccttcaccagcagtactttgttcagact

SEQ ID NO: 170186 - DNA, 348 bp, Glycine max
ctatctggcacgttcagtttggggccaaaaccaaaatactattatttaatcattcctattggaattggttggcctaactaataaaacatgaagaaaccaataataggaatacatgtcttatttaaatcccaattccttacctgcgacataattattggacctccctgcgtctggaacaatttctccgccttcatcatgctcacaatcttctcagtaaatttttgcattgctgcctacatcattgcgaaaattgaacggttgctgagaaaattcacagaatttcataattaaataacagcaacaataactacgagtaaaattgaaaattccaaccttgaaaggttcatt

SEQ ID NO: 170187 - DNA, 209 bp, Glycine max
gacatttttttttatgttaaaatcagcaactgaataatgatcggacaacccatatgtcagagtccaatgaaaattaatcgaaaaacccagtttctattgataaaccaaaaaggccaatgccggcctataggaactcttattatatattacaaaaaaggttgtatggggaatactaatacatagtcctgaagcatattctatgagaggaa

SEQ ID NO: 170188 - DNA, 410 bp, Glycine max
tcatcctactatgacgactgagaaaactggggccaactgaaagggtgagaaagagggaagaaaccctgctgtgactgccattcctatacggccaagttttccaccaaacccaacaatgtcattactcagtcaataacaaaccttctgcttacccaccacccagttattcacaaaggccatccctaaatcaaccacaaagtctgtctaccgcacttccaatgacgaagaccacctttagcacaaaccaaaaaacaccaacaaataggaattctgcagcataaagcctgtatggttcaccccatattccgttgtcatatgctaaacttgactccatatccactcgatattcaatggtagccataaccccaaccaaggctcctcaaccttcatctttctgaggatacgactcg

SEQ ID NO: 170189 - DNA, 345 bp, Glycine max
  unsure (1)..(345): unsure at all n locations
ccccgattcaaggcgggctgcagcaccggctccgcttccctaactgtactggaggcggttgcggtggctttatcctctatggttttctggagttttaacatgacctccgagatggaagccatttgatcttttaaggccgataaatcggccttcatctgttcctgcatgccctcttcattatccatttttctggatcgagtgttataggggtgccttggtgttttcttagttatgatgaaattcctaaagaaataaacaacggtgagtatgccaccaaaacatgagtatgccaatggatgatcggagcacttggatccaccccaagtttntataatacataatgag

SEQ ID NO: 170190 - DNA, 321 bp, Glycine max
  unsure (1)..(321): unsure at all n locations
agcttncagctccacgttaagctattcaattttttttttttactctgacaacttatcatcctaatcctttgccttttcaagttcttccttgaaagcttctatctatatttttagattaaatataacctgattttcactggcctcttgtggagaaaactctaccagctgatgatgcatcgattgggatgcaagaatttgagccttgtagttattaaaaactctaataaaccatcagtttaatctgtaaagtattgtctatactctaaaagaataaaactatagtgaggcttagattttactaacctttaaggactaacttga

SEQ ID NO: 170191 - DNA, 470 bp, Glycine max
  unsure (1)..(470): unsure at all n locations
aagattatcctaaaaacctttttttttattcattccttccccatacttgccctcttttcttaggcacttagctctcatacttgaaattatagcatacacacttattaactttatttatacttacagttttttttacaaagaacagaagtagtgtgtatatactattttctttgaccatttcaatccttacccagtgcctcccncaaatttggaacaaatttaccttgataatacctcccccaaatttgggacaagttttccttgaaccatcttctgtggatgaatgctctctacaacctaaaataaggtagcagaagatacaactgaataggcttgaggttcaatcaatcaatcaattcattcaacttanactgggtgtaaaggataattcattcaatcacaacgttagctcnttgcctaagtagctattcataatcaaacatggccttcatcatccttaagttcatgcg

SEQ ID NO: 170192 - DNA, 238 bp, Glycine max
cgcgctgcagctgcccccacgcgaaaccttttattgatgaaggcctgtaaaaaactaggttgtttagagcccgtcatctcttcctatgcaaagatttttcaaaacatttggcaattcttaaaacatatcccaatataagcaaatcccgtgctcccccaaattaagcatgaattcctctttttaccctttataaagagtagactgactaatttaattaaaaggaaggggctctgctaat

SEQ ID NO: 170193 - DNA, 333 bp, Glycine max
gttatatgcttgtttactactacttgataacctactcatacgaaactattgaatctattgactaaccatcggcatctttcacttttcttctgtcagagtatcgttgtaagtctggatgatcatgctacctatttatgttttgatgataacaaagaatatatgcgtgaatattatgagagtcacaccagtgagtgactatgtataacgactttctgtttgagagaaaaactctctgttatgttaactacagttacgcgctatgataaagcatcttctgttttaccccgctacttggatattaactacgtcctatgctgagatcggatacttcca

SEQ ID NO: 170194 - DNA, 286 bp, Glycine max
cagcaagcccgcggaacaacaggagcccaatgtgttttttgtgcaagagcaccgaaccgtcaacaactgccttcgcggcgacaaagcaaggaaatgccactgcgaagctgcgaacatccaccatacctgccccgaaagcaaaggaaccgccccacatcttacaagataatgaaaccagacgagctaatgagagacaacaacaagaaccacgggaatgaaaaaataaaaaataaaaaaagccacacaacacaagaaaaaaaccccccctccacagggaaacaaaaaa

SEQ ID NO: 170195 - DNA, 354 bp, Glycine max
tctatataagctgaaccatcctatcaataaagacaagttgtgttttattcagaacaatagagctgatctctttgatcttagagagagtgattctcctaaattctcgagtgagtcaagaacaccttggctgtatcacaggactttcacaacctctgcgtgttgccctcgctggagagagtgattctttccttcctttgatcatcacccttgttctttcataccacaattgcagataatccacctctgtccagaattatctcgtggccataactgccattgtacgcactcaaattaagtgattcttgagcctaaattgaatttcaaaacgacacctttcacctcgttctggaatca

SEQ ID NO: 170196 - DNA, 438 bp, Glycine max
  unsure (1)..(438): unsure at all n locations
ttgagccaattcannacgacaataacgtttactctgatttctgattnagtcccgccatatatcgagacgctcgaaattgaatgttgaagctctgagccaattcaaacgacaataactttttactcagatgtctgattgagtcccgtaatatatcgagacactcgaaattgaatgttgaatctctgaccaaattcaaacgacaatagctctttactcggatgtctgattgagtctcgtaatatatcgagacgctcgaaattgaatgttgaacctctgagccaattcaaacgacaataactttttactcggatgtctgattgagtcgcgtcatatatcgagacactcgaaattgaatgtngaagcccttgaccaacttaaacgacaatcaacttttactcggatgtctgattgagtcccgtcatatatcgagacgctcga

SEQ ID NO: 170197 - DNA, 395 bp, Glycine max
  unsure (1)..(395): unsure at all n locations
gcaagcttctaaggaagtttcttaaaaattttttttgaagctacctagcctataaatagaagcctgtgtaacacttgttgtaactttgatgaatgagagtcttgtgagacacaactcaaagntcaacttctctccctttttcttgcttcaatttcgggctccccctctctctttctctccctttttcttttcctccattgaaacattctctccaagtttcttatccaaggctcatcttggtggtgaagctctttcttccatggcttattccctagtggatggcgcctcccctctcctcttctcatttgccttccactgcatctccatgggaaaaaatcaccattgaaggacctcattgaaactcaaagatccatcctccatagaagctccacaag

SEQ ID NO: 170198 - DNA, 299 bp, Glycine max
tagctgaagctgatttaaagacggatttttgtttctttttgaatctcctaaggatatgaaaagttgatctataaacaaactgagttctaatgaaggaagtatctgggcatcattatccgtagtttggccacatttcatgataagtaatatgatgcatccaaggaatgcatttcaagattgagcctgcaatgtaaatattcaatgctaatggcttgaaaatggtgtcaatgtacccagggagagatgtgattccaaaagtgaaaggcttagtctaacacatactgaaaggggggatagaa

SEQ ID NO: 170199 - DNA, 399 bp, Glycine max
cttctatagagttctacaccacattttattctctttattttctaaaaaaatctatactctttgcccaaagttctagaattttctacaacttctccgcttaagaagggattccaccaatcttaatgtatcaaaccgacttgtattttaaatataaaaagtctaatttaccatagatattaatacagtaatattccttctataatataaggcgggtatatatatatatatatatatatatatatatatatatatataatccgctctaattgttatattttattgacttaaaacatatttttaatttttttgaatgaattcaattttcaatttgggctttcaacaaacattgttagtcatagtttccatcaattttaaaatatttcttttatataacacaca

SEQ ID NO: 170200 - DNA, 394 bp, Glycine max
agctttacgtggttaacaatgtttctacatccatgggaaaatgcagcttatcatcatcacactcatcatggagattaaaagttcaatacaagccgaagctagctttgatctctcttggtttctttagacaaaacctctcttaatatcctcgctctctatcacctttcgaactctctttctctctaaaaaaaaaccccctttctcatttacatgatcaataatttatatacacaagttgctagctttaggaggaaaagatttttctttggtgccatgtcactaattcagttaagacaactaaattcagttatgacatcaattatacaatccttcacatttgtggctttggtgatttttgagtcacacacaccacatatatcatgcccaaatttga

SEQ ID NO: 170201 - DNA, 418 bp, Glycine max
gacctgagccccttgttcatctgatccatttcatgtaacttcatcaagttaaggtaggtctctctaactcttgaaccctatgattgctgttaaacttccttgaacatgttgtcttgaaattttcgtgcttgctatcctgtcttgaatttatgttctgaactattttccttgggtttttatgccaaaaatgagttctttgcatgttaaagcatagggttaggcttaaatttcacttaaatcagaatttcctagcaaaggttacgatcaaaacatagttaagtacctttgatagaaagaaaatatgtcacgaaattaaattgtgttacaatagcatgaactatctctcttagagttctgacctcacaaatgagttctgtaggcttgaccatataggatagcatataatatttatggaaat

SEQ ID NO: 170202 - DNA, 398 bp, Glycine max
  unsure (1)..(398): unsure at all n locations
agcttatgcattgctgcttaatatatataattttaatganggnaagccttggtacttcgatatcaaatgatatagcaaaaacaaggaatacccgcgggaggcctctggcaatgacaagagaacattgcgaaggttggcggttggcggttggcttcttcctaagtgggaatatcctatacaagaggaaccatgacatggtgctatttcgatgtatggacgtcgaagaggctaatcaaatgctggtagaggtgcatgaaggatcatttggaacacatgccatgtcccggaaaattctgagagcgaggtattattggctcactatagagagtgattgttgcatccatgtgagaaaatgccctaagtgtcaggccttcaccgataatgttaatgctccaccc

SEQ ID NO: 170203 - DNA, 384 bp, Glycine max
  unsure (1)..(384): unsure at all n locations
ctaagaatgctaagctcgtatgatgatatgaactgcgagtctacatacttcgagagtgtganacacacacttcctcgtctgtatattcatgatacgcgaacactctatacatccatgtggtgcaccttagaaggcattattctagcatgggcatgatgtgaccttacgaccgcttatctagctaccggagccattgtctcactaaagtgtataccatggtgtggggataacatctgctacaatgtgagcctggagacctactatcgagccatacactatcttatccgcttgtgttacaacctatgtagaacatgatgtcaagtatgagacttggatcaatcccatcatcatcctcttaatggttagctgtcatgctaacatgat

SEQ ID NO: 170204 - DNA, 314 bp, Glycine max
  unsure (1)..(314): unsure at all n locations
agcttgctccagaacaaaatgtttgcttacaggtttatgttttgaggncaagaggttctgacggtaaaaaccgaaacttaagatcacccagtgaggttaatgtgtcaagctaatgacgttaaagaagcgcttcctgtgaggcaacacagttttaatttttgttatcatagcttttgcatgcatttgatcatttggaacttgctgtataatctgtacattggagtttatcaccttatccttgaatgttagatataagggtttcaacttgtttaagaagggactaaaaaatggattataaaacactttttgaaaaa

SEQ ID NO: 170205 - DNA, 51 bp, Glycine max
cccccaccgccaagcccgagatcaataacaacgccactcacacacacaccc

SEQ ID NO: 170206 - DNA, 251 bp, Glycine max
ttaacaaagtcataaaaataaccaagggggagtttgatcttcagagttaaaacctgataaataagaaacaattaaactgatcaaattgtaatttaagtaggaaaaatattgaaacaaactaaatatgagctccaatgcgagaccctgactggacatagtcaatagtaaaacatatattgacctgcacaggaagttgagaatatttttgaaactcttgtgacgtctcggatgccccagagaatatgatatgc

SEQ ID NO: 170207 - DNA, 347 bp, Glycine max
gctgcagctgcctgttttcttaatgggatatttttttttcaaaaatgaatttgcttattttgcatactaatttccaatactacattactacatacggtgagcatgttagaaccaggtaagagcgcttccaagaggattgttgcatggctccaaattgcaatcaagagttgaagctgcaattattgagattttaacaaattgtttctcccatacaattatagtcatatcagctgcatttattcagataatctcttacaataatggatcacaacgtaagtgagactgtgtattttaaaaccatgactggttgaatccatgtctggcttttaatatacatacccgatttt

SEQ ID NO: 170208 - DNA, 433 bp, Glycine max
  unsure (1)..(433): unsure at all n locations
gtgatgagggtagcacccagcaataagaatgtgtcagatcaaatggccaatttctctctgctttttgaaacttgtctttttctttcttccactccaagacttatgtcctgttactatgctaattaattatcctctttatgaaccatcctacttacgagtgttaagtgttaagttgctgattgaattgaatcaattttgaaaagaaaaattatatgatctaattacttcaatgctctcaattaatcatccaatcaacttggttaacaatctaaactcagtttaatttaaaatggtttggatcanatcaaattggttttcaatcctaatcttatctttattcttnccttgaaaaaaatattaaatcaatgattcttaaaaacgctaaatcaatgacaaaatatataataaacatcatacacagatatctaaaata

SEQ ID NO: 170209 - DNA, 411 bp, Glycine max
atgcaagctttgttcattatagtaccgcatagaatgtttgttttgtgcgtatctgtaaagaataggaagacgtgcaataaatgagaaataaactaagaaacatgatgcataatttggtaaaccattttactacatagacaattgcatatgcctttgttgagctatgaaacatgatgcatgatttgataaaccatttactacaatgacaactgcatatgcctctgttgagctatgaaacatgaagggtggtagtgaaactaatcaaattgttgcctagataatgtaaaagccaatggaagagattgtaaattcttgttacttatagtctctatgatgtagcctctatgccattggttttcatatttgcacgtgtacctttggctatatatcctttgttcaagcttattaatg

SEQ ID NO: 170210 - DNA, 243 bp, Glycine max
  unsure (1)..(243): unsure at all n locations
acttaccacctattgtaatgaatcgctctctattatatatctcaatagctctaagttatgagacttctccttttcttcatttacaaaaacgtatcggccacttctgaagtgcatttgttctgatccaacgatctatatttcccccatgacttgtatgcataaaggattaaaaagaacaatcaatgctcacattctcttccacccatggatgnatgagcatcattgcatctaaaatgactttgc

SEQ ID NO: 170211 - DNA, 347 bp, Glycine max
ttaattgcctacagaagatgccatgggttctgcttcacttcgagctcagccttatcagcttagctcctgttgcgcttcctttcatactcatacaaaaaccgtatactataaagatgtctatatcccatcactcttaactcttaaaacaatatcatttctatgtctcaggtaaatatcttcaggctaattaactactctctctttcctatttactattcttctaaaacatctctctcattgaaaactttctttcgcctctataatacgaatttacctttccacattaatatctatatgtaatacactaacttctttcatcaacataaccgtagtgcacaatatatata

SEQ ID NO: 170212 - DNA, 306 bp, Glycine max
tgcactgaaacccggtaggaaatttttttggttaaaccaaaattccctctctttctttcatttaagcatcatgatcaaactcttaaaaaaagatccgggactacaattttggccgctggttaaaagtttttttggaggcactaacctacaggacaattaccgccccatatataggagctctacaattaattgccacatcaaagagcgcgaaggaactatatgtgccgtaatttaaaaccttgagtatgagtgtttttctggtgctgacttaaagagggagctaactatgtctctctctggatatat

SEQ ID NO: 170213 - DNA, 428 bp, Glycine max
  unsure (1)..(428): unsure at all n locations
atgtccaataatagttgctatctctgcatcacttttaaaatgctctaacaaaccagtgaacacaactatcttcccaccaggtaagcagaaggcattaacaacaggctcatttaccaccaaaatcctccaatttaacccatccaaatgtgatgttgcagctngtgaccctctttcctgaccctttttccggctctgctgaatccatttatcgtcaagaatctcatcctccttggcccaattcccttcaatcttctcttcactcccagccaatgcattcaatgtctcccttccatccccttcaaccagcatagcatgctctgatgcataccccaaatcactccacactttgttctctttctcaaccctctctgcaatgcatcnnactatatcttgggcatcattgtcactctcacactctcangatgtat

SEQ ID NO: 170214 - DNA, 352 bp, Glycine max
tgccattgggcttattgggcatgaccccgatagccttgatcacatgaaatacgtgggtgcatgctttgtttttgagataatacttgataaatatgcaagttgttgtgacctgccctgtgttggaacttcgtgccatttaccccacgtgttaggactcaacagtactggctaaagaggagggaatctagccgccatttattttgctatgaatcttccactagatgtgaataataatggagctgcctttgacgctatgaaacctccgtttaatgtggaagtcgtcaaagtgagaattcactctatcgcttcaactccacatatgagcgagtgcctccacctttctctttgattt

SEQ ID NO: 170215 - DNA, 359 bp, Glycine max
aaaacatgctctattttcatctcccactccaagtacgcctcccgatcattctttacttgtaaggggggaatgaccaggttaaaaccctcacatcaggattgtctaagaacaccaacattccctcttcagctgcattcttcttcattaagatctctatacactatttcatccaacctctcatggagcgcttcatctcgttgattcattaacctctccatatgttgcatcaaaacttgcatttggaattgcgaaagcccccctccatcattaggattcgtgcctgctatctcaaacaaacaaatcatacgtgacaagacaattatagttgctgtttgaatacctcacccactcaagtgtat

SEQ ID NO: 170216 - DNA, 296 bp, Glycine max
  unsure (1)..(296): unsure at all n locations
acatccgactaacaagcgatggccgtttgaattacctcggacgctcacattacaacttccaacgtctcaatacatcaccggactcaatcacacatccgactaaaaagttattgtcgcatgaatcagcctcacagcttcaaaatctaatttcgatcgtctcgatatattaccggtctcaatcacacatcctgactaaaaaagttcttgccgtctgaattngctgaaagcttcaactttcattctcaagcgtgtcgatatatcacacgacttcatcacacctccgactacaacgtatc

SEQ ID NO: 170217 - DNA, 300 bp, Glycine max
aaaaaagaaagctccccatcaaggggccgaagaaagcaaaagaagaaaactcccctccaagattgggagaaagccaaaaaagaaaaggaaaatccccatccaagaacggaagaaaacaaaaaaaatatgctcaaagggctttgggcccgacaatatctgaacaatacacaattggcccccccaataagggaagaaaggaaaccaccacctggagtgggcctctccctttgattggcacccaaatcctgtgcgtagtgacttttttcctcgccctaaccaaaatgaaaagggaagggccaa

SEQ ID NO: 170218 - DNA, 316 bp, Glycine max
  unsure (1)..(316): unsure at all n locations
tcttatcctacatcattacacaattgtttttaagacaatggtatattcatttagtagtctatgctntactcaattaccatgtgatataatcaattacttctctttctataagccgcttagaactgatcaagaacactctaatcgattacattgaggatctaatcaattacattgttcttgagagggttccagtctttgtgaacaatatttaattgatgaaaagatactataatgatactttgttaaataatcgatacattgatattaatcattacaggtggtatactatttctcttaaataccccttgtgtttact

SEQ ID NO: 170219 - DNA, 387 bp, Glycine max
  unsure (1)..(387): unsure at all n locations
agcctatcacgaattgggttatggatctttgttgatgcaacaagggcaaagagtcataaactatcctttggagatgggcgatagctttggttgaagcaaataaggtccgccgaatattaaggcccgaaacaattttttgacaacatatgtagactttgtaccaacataagacgcaaactngtcatgatttagccgatggaattttgtcgatgcaaaaaggctatggactggtcttttaagttggttacaactttggttgccaccaccaggccatgatatagtcattggatctaacacaaagaacatataggatatatttttgtggcctttaaggcttagggattcattttcaacactaccctccccgatatgtttaattactataaa

SEQ ID NO: 170220 - DNA, 259 bp, Glycine max
gataccgcccaatccagcctgcataggaatgtctctgcacactgccctatcctgctgaagtcaaggttaattgattggggacccaaaccttgtgcgttctggattgttagtttcaagatagttccttcaaaacaatcgttcatgatcgctggacatctacgcagctacgagggtggggtgatatgtgcttaaagagaacataatacatctcaaaagaacaccaacggagcggaacaaagagcactttgaggacaccttc

SEQ ID NO: 170221 - DNA, 237 bp, Glycine max
tttttttctggcacctccactccacccaccatcttgccaccactatcccacggcgaaggagaatctcaaaaagtcccccaccactcttttaatgcagaacaaatcctcgtccaactcttggaaataaaagacacttgaacaccgccctttgaacccgaactccttggttgatcaaccctcttaaatggctgactgaccctatggaaagcgacaacctcctcaagcttacttttctac

SEQ ID NO: 170222 - DNA, 355 bp, Glycine max
aaagtccttcagattcaatctgtgtgttcttgactgtatggcatgacatgaattgcaaagattgagacttgtgttagttgttgattgttggataagcctacacacttgtgttagagtgaaatagtagttgtgaggccttggttaatgatccttacttgatatctgtcgctcttactagcttatatcagctgtgttccttaataatcatgttcatatctttgaaaagctgcatgtcttgtgagaagctgtgattgaagcattgtatgccattcatatcatgcgattgaattctttggggcaaacaccttgtgaataatcactgtgattttgtcacttgaggacaagtgagttgttc

SEQ ID NO: 170223 - DNA, 170 bp, Glycine max
tctgcttcctggaccccaaagaccgagcagcagcgtcgaagacaaaagcgggctaaatttgttttaatcctacgccacaaaccatctaagactggaaggaccacacactatattgaaaaattgaggacctgactatgacgcaaagaaacacgtgccaaaaagggatcgtg

SEQ ID NO: 170224 - DNA, 218 bp, Glycine max
atttttcaaaaccaatacacagttgttacaaaaatttctaagtaccaagtgatctcttgtatcattacagtggcatatcataccatgaccaattatttaaatgttcaatatcgtacgtcaaatatttaatatgtatgatcctattatataatacagtgattgacgtgattaatcatgtaaagacactttataataatatggtcatacccatgtgatca

SEQ ID NO: 170225 - DNA, 320 bp, Glycine max
tattcttaaaaatacagaaataactaattgtcaaagccgtcacgtatataaaaagataatcttaattggtttttctctcattgtacggggcatcttaattataaatactacaatacttccattttgcttattgttaacattttgtaaaagaaattaagtacttgcgtcgactggtttttaaccctagctatcttgtcatatatatatatatatatatatatatatatatactcatgtctcaattataaaaccctacataataaaacattttataaagatagacagatactcaatataattacatattccttagatattac

SEQ ID NO: 170226 - DNA, 349 bp, Glycine max
  unsure (1)..(349): unsure at all n locations
ctgccgctgcatctgcagtcaatcctacaaaactttttttttcaagcacaaaataccttaatttctgatggattccgtagcccaattacctctaaaagatcacatgggaggtttctgctcacgcnataaaataacacttctggcttcaaacgtaaaaaaatttaatatttacccataactgtttttgcatgatgtgacatttctgcttagccgatatatactccatactaaccttctgcatgagttaccgcgtcatcactcttttgccccctacttactttttgatctgtcaacaaggataccatttgttttcatgtatgctcatccttgcctcattctttacaaaaca

SEQ ID NO: 170227 - DNA, 273 bp, Glycine max
tcataacgtttctatgtaataataatacaagataatctaaagataaatgttacacacacacacacacacacacatatatacaaccagatagcttgtgctgtaatcataaaacaagaggtttgtgttgcaagcttaacagttaagatctaactgacttataacagacttcagctgtcctaacagaatgacaactggctaactaagtctgacaatgttctgactcatcaccgagtcagctaacagaaatctacacacgaactctcatcacatatg

SEQ ID NO: 170228 - DNA, 340 bp, Glycine max
  unsure (1)..(340): unsure at all n locations
tctattgacagtcactcatgacacatgtnctcaggctttctctctttgtgagttattgttgcaatggcatgtcggcatgtcatccctacatcaaagttgtaaaatcatcacacatgtatgttaggaatgaaaaaaaaaactgtaaagaacacaacctgttagttgccatactccacaagtgcatgtccattaagctaaattgacctcaaccttattcccccacatgtggacctcatatctcatgcccatgttatcaccacaccaaatgggagtccgttgattagaaaaatgaattccttttctagtctttatactgcattgacataatggccaggctttc

SEQ ID NO: 170229 - DNA, 413 bp, Glycine max
  unsure (1)..(413): unsure at all n locations
tgcctgcatgcatgctancgtgaccgaaagtaacatacaccttcttcttcctttgtcattccttacgccatttcatagaagcgcatacacacttgcaatcccaaagcatatacctatcaccaacaaaggtttgaacaccatctaacctttaccaagtcttctaaaaaagagatgaatcttcaccctcatgtccttcttgaccaacatttctaacacccttctttaccccagagccatcatgctgcttaatataaccaaaggatgctatgactgaagcccctataatgaatgatcttttgattggaacatacggttcagaatcttcaggatgttgaaatgttaaaggaaaggggtgataagacgaggataacgcaaaggggcattcaatcgccatgccttatgcatgcgatatc

SEQ ID NO: 170230 - DNA, 419 bp, Glycine max
  unsure (1)..(419): unsure at all n locations
tacaagaaatatgacaatcattacaaacaagggccaaacaacacttctcatggcacgagtgtcaacatgcactttataaaataatcatattgcggtcgtgctantttatgacacatacgtatttgcacacataaaaattttgtgtgaagcattttacgacacctattcatgtacatattttttgacaaactttttcatgctacatcctatatatatatacacacattttttggaaggcttcctttgttacctactcacaaatacacatattttgaaaaacactcttacgctacccatccaacactntgtaaggcacttcatgctatatatattcatattatgcaacgcagtttcatgctatatatattcatattctgcaaggcatttattcaactttctgcagggcatcttattcaaca

SEQ ID NO: 170231 - DNA, 477 bp, Glycine max
ttggctgcgcacgagctcatatatcgtgagtatttatataatatgacgcattgtaatcgattacaggtattggtaatcgattacaggcccaataagccttctggtaatcgattacaggatgttgtaatcgattacaggctacctgttcatgtgtaatcgattacactggatggtaatcgattaccagagcctatcctatgctagtttctaagagaatatctatatttatgctcaaatacatcctatatgtctaattttcactactaatacactaaagtcaatcattcaattactatatacacaagacatcataaattctatcataaaaacaagaattcaaacaagatcaaccaaaataatctacaatcagaaggtaaaaagtaaatcaaccaatcaatcaaccaatcaatcaaccaatcaatcaaccaattcaatcctatttttctaaatctcttacatctaagagacctaattctc

SEQ ID NO: 170232 - DNA, 396 bp, Glycine max
agcctgtgcaaatcaaatcactcctacattttatctctagcatgcattggatgttagcctcgtcctttgtcacgggaagccggaaggtccatatcaccttcttaattgtacacatggggcactgcgcccccaaatgcgcgagtaagaaaagataattttccgggctctcgtgtccgtaaaatgcattcatatcatgcatcgcataagcatctcttcataacatcataatggacatatcctgcatttgtccgttatcatattccagcctcaccttttgcatgagtcatggcatcatcatgcatatgcgtccaacaaactttttgatctgcaaaattgcataccatttgttttcatgtttgctcatccttgcgttttcctctacaaaacaaaaacaaa

SEQ ID NO: 170233 - DNA, 479 bp, Glycine max
  unsure (1)..(479): unsure at all n locations
tgtctcagcgtctatgcgagacagagaccaacatgttatttatcatcgccaagtacgaagaagagttaggtctagccacggcccacgagcatagaatcgcggatgagtatgctcaagtatatgcggaaaaagaggctagaggaagggtgatcgactctttacaccaagaggcaaccatgtggatggagcggtttgctcttaccttgaacgggagtcaagaacttccccgattgttagccaaggccaaggcgatggcagacacctactccacccccgaagagattcacgggcttctcggctattgtcagcatatgatagacttaatggcccacataattagaaatcgttaggaaacttgtatggtctctcagaccttgactagatatgacttcctttctgaaataaaatgagttggtcccaggttctactccaaaagcttgtgcnatcaaatactcctacatctatctctagatgcattt

SEQ ID NO: 170234 - DNA, 356 bp, Glycine max
catacctctctaatagctaagctcacctccttgagatgagaagctagagcttagctacacaccccctataatagctaagctcacccccatgacaaaaaacatgaaaatacaaaaaaaagttcttactacaaagactacttaaaatgccccgaaatacaaggctaaaaccctatactactagaatggctaattataattccttgttgattaatccttgagttccaagccaaatttctaatgttttaggtgattgagacctagaaactcagagcttgatcaatgaatgtctacaaatgcaagtgtttgatccatttttgacatcaaatccttacacaatttcaattcagatctaggat

SEQ ID NO: 170235 - DNA, 472 bp, Glycine max
  unsure (1)..(472): unsure at all n locations
cgcttgtggggcttctatggaggctagatacttgagcttctatgaggtcctttaatggtgattttccgccatagagatgcagcggacgacatagttgaagaggtgagaggaggcgccatccactatggaataagccatggaagaaggagcttcaccaccaagatgagccttggataagaagcttggagaggatgcttcaatggaggaaaagaaagagggagagaaagagagaggggggagcacgaaatcgaaggaagaacaagggagagaagttgaactttgagttgtgtctcacaagactctcattcatcaaagttacaacaagtgttacacatgtttctatttatagactacgtagcttccttgagaagcttttcttgagacaacttccttgacaagcttctttgagaaaactttcttgagatgctagagcttatctacacacacccntctaataactattctcacctcc

SEQ ID NO: 170236 - DNA, 396 bp, Glycine max
cagcttgagatgaggaagagttgaagggtgaaacttcctgcttttattggggaccacaaagtggtacctggagatatgtcgcgggggtcaggagaccttggggacgtcaggtggggtgctattgcccaaaaccaagcttgaccaatcccgacccaacccgggcatattcggtcagtgagaacctgtgatgtacctaagcaggcgagctcctggccgtccacagataaaaggaaaacaagaccacaaagcacggaggcttgtggtggctggccaactgtgcattttgtgtaatatgtggattgtggctctggtaatccattaccaagggtgagtaatcgattacaaggcttaaaattgaggacaggaggctaagatggtctctggtaatcgattacc

SEQ ID NO: 170237 - DNA, 215 bp, Glycine max
ttttttctcactaaagggataacacttacgctcaagtacaatgaataattctgctatgccaaggatgaactaactaagaaatgttatgtattgccccatgacttgacaaattcacacttaaaatgctctttctcggtcttctcttcgtatttttgttactctcaaagcagaacttaagtcagcttctatagactcttgagaaaagaattattaca

SEQ ID NO: 170238 - DNA, 333 bp, Glycine max
tgttttcttccttagctgggataacactgagaatctgctaactctcactggatttgaccaaattattacatgctcgctttcatatgtggatgaggtcactttttccccaatggttccacttctaatgaccaaaattctaagcaatactctgaaggacctttggtttggttcattcttttcctaaattttgttgcgtgtaaattaactctcgaaggttcaatttcacggcatctctggatattgttctaacaccgagccgccacattatagatgttcgccctttagaatcaaaattgaagctttcaaatgcacctgcttctgcccctgaatctg

SEQ ID NO: 170239 - DNA, 304 bp, Glycine max
  unsure (1)..(304): unsure at all n locations
ccatatactataatcagcacaccctccactgctctaaaaacatgcttgcttcattggtgccgaaataaaatcgctgtcgctcaatccacaagcacgatgcatcctctagaacctcatgattttggataacatactaatggtgatgctaccaacgtcgagtggacatgaaagcgccaatcgcgagacatgcgacanaaaacggtgaatgtgactgttatcacatattgtcgacgagctgaaatatagactaagcatgcattggatgtcgtctcgatggtcggagcgtattacagagcaagagtct

SEQ ID NO: 170240 - DNA, 395 bp, Glycine max
tgcttgagctcattggtgcttctttatttttccctcggaacttgttcctgctctattcttcctttcaggccctttttgtttcccgctctaatgcttcgaccctagtcatgttgacatctctcagctcgtcacactttttcctgaccctaatgactattgtctttatcttctccttgaccactctcatttttttgagctccactttcaaagcttgcacttcttcgctttcctcaaggacttttgcttctttcccacttaggccttttagcttcgggagccaagttatcccttgcgttctaaacttcaaccacttgtgatagccgtcgatgatgccattgctacttcccctaatctccttatctttcccttccactatattccacgctttacggatt

SEQ ID NO: 170241 - DNA, 385 bp, Glycine max
  unsure (1)..(385): unsure at all n locations
tgcttntacagagtattctcgcaaacagagtgatctggactggttntcttatgattttacttagtgagagtgccttgacttacccattgtgaggtatgtcttatcatgtactactaagcacttgacaaagtttttcactgaaaatggtaccacattgcatgtaggcttgagtctagtgtctctgttgcataacacttgtgtttgactttcaatgagttaaagaatgaggttttggtgttattttctggagtgtgtgaatttgaataggtgtcaataatgcgtgtggtcttggaagtgatgtctgttatgtaaattcagctctaagcattatatgtctcacatgttctattggtctattatatacaaatgtgataattcattcccg

SEQ ID NO: 170242 - DNA, 429 bp, Glycine max
  unsure (1)..(429): unsure at all n locations
ttacagcacctgaggcatgcaagtctatccagcccccatcaatagggcctttatagagaaatattgtatgccaaggcaggcaccgcaacagggtcaggcacaataaaaactagttgcagatgtgccactgccgcctttacaggaggcaccatccctggagtccatctccactcacctgtgaaggattgagctccagatgcacaggtacatgctatatgtgactggccagcangcggccaatcaccggggtcaggtccagctgaatgagaccttctactgatacactatgcactagcagagccaggacaccaatcctttccatggcttacccccgagtagttccgagccatggttgcctatcctaggatgagctcgattttgagacaggggcacgacccgtangggcccctggggatgatgattaagctc

SEQ ID NO: 170243 - DNA, 426 bp, Glycine max
  unsure (1)..(426): unsure at all n locations
ctaatgtctctacctaacattntgganaaaggaagaagggaaaagggatggntgaatagggacgcttcccatcatctgtgggaagggcatagttttgggatctggttgaacaggacactgatccttggatccttggtggagtggtatctgtgatgttcaaagacactatatcaaggagacaagtaataaagtagaatattaagctgagaattcaaagatagttagaaactgcagaacttgtacatgtaaatcattattatagaaggatatataaactanaaagtggaagtggcagatgaaaatgtcactaacatcacgtgtgcttcactccagcacanattccaccaccctcttcatattgtgcctgaaaatggcacgtggaaacaaaactcttgtngcaagtcacgtgctgtgatggtggatcat

SEQ ID NO: 170244 - DNA, 447 bp, Glycine max
  unsure (1)..(447): unsure at all n locations
ctaagcttgtaanataatggacagggcttaatctgatggttctgtgcaggtatctcattattctaaacatatgtagcttaaatcgtatctaaaacatgtgacacactctatatatataatttattttatagacaattcaaaaagctaaaaaaaataaaaatatgaatcgaagcctcttcggtctttcctaacaccatcaaacacaataataataaacccagatcaaacatcatcgtcactatcgccgcttgaaacctccttcctccgccgcgtcttcctcttccacatcgtcgagctctgcacctcgctgctcttccttgntcctccctcaccggagtgagccactgagtcatgcaactcggacgagtcgtcattgtcctactttccttttccttcaattgngtgaaattaaaagaggagaaaaaagaaagagtctgcacgtgttca

SEQ ID NO: 170245 - DNA, 393 bp, Glycine max
cttattcttaaatgaagtaagagtgttcatatatcgtgaataatcatctatataggttttgaagtatttcggactatctgcatccatgtctggacaacatatgtctgtatgtttgatttctaataaatcagaactcctctttgcaccctttctaaacatggtagttggcttacccttaatgcactctacacaagtctcaaaatcagcgaaatccaaagtactaagtactccttcatttactaatcgcttgattctttcaataaagatatgtcctaatctccggtgccaccacatagaggattcttcatttacaatacatctgtttaacccaccacaaacgtgcatagaagtagcgtccttttgcacattaatcgaataaagaccatcaaccaa

SEQ ID NO: 170246 - DNA, 492 bp, Glycine max
  unsure (1)..(492): unsure at all n locations
catactaagctactaacatagntagtagaaaaggatgcatattataacagatgtttgtattggctccaagattattagagtttcgtttacagacgatatggaacattgatccgcgcagangatttaagtacctaanatacaccttgctggttgtggatgttcaagtcattgaaaagatcttgcatttctgtataggattcactaatttatctgagacttacgaatcctctaagtgtgactaatgtcaccttctcagttgaaattgaatatgtctactgcataagcatggtgttcaaagattgtgttaccatataacacgtacactgtatcatatgatgcatagacttgactttgcagtataacatccacatctgacgctaccgttagcatngacatttgactggcattggcaactactcgtaactaccatgcgcgctcccaaagaataaccagtcactgactattgaacactacccaactgacatcgatgat

SEQ ID NO: 170247 - DNA, 373 bp, Glycine max
acctacaagactcccatttatctccaaaccccatcccccaaaatcaagaggaaagaatccacccaacctgaattttgaaatcccactcgtaccacacacttcacgaccccgaaaatgccctcctttctcgatttggaacagaaatgagtaccaaaggttggagcttttgtggggtttcaatggagaatgagggaggagaaaatggcaactcgaaagagagaagagagctgtctgaaaaagtgtgggggctgactgatgacagacaaaaacttttggttttaaataaagagcttcctctttttctttctattattttattcaactctgcccctgtcctatttgattgagcaaaagaggccacttttcttttgat

SEQ ID NO: 170248 - DNA, 353 bp, Glycine max
  unsure (1)..(353): unsure at all n locations
ctgcaggcttgcaagctcacaaaacctacttatctctngatttgctgcttctctngcatcctacaaagctctttttccgatataagcactgtggggtgctgaggaattctgtgccttgggcattgcctaatatgtacccttaatttgcacaaaacaagctttaaataggctttgaattcatgactttgcgcttaacgcccccctttctcttaccacgagtaagtggatatgagcttatcactaatcgtgcactaagcttggccgaaaacaactactgcgcttagcacactgatctcgcgcttatcatgcgacttttattttgatgccctgcccgatcttttattgcgctagca

SEQ ID NO: 170249 - DNA, 404 bp, Glycine max
  unsure (1)..(404): unsure at all n locations
agctttaacaaaagttttcacaaataatctattcacagcaaaaacctagcangactacccataatatctcccaaaaccccatacccacgaaaatcaagagggaaagaagtccacccaaacctgaattttcgaagtcccactcgtagccacacacttcacgaccccgaaaatgccctcctttcgcgatttggagcagaaatgagtaccaaaggttggagctttgttggggtttcaatggagaatgagggaggagaaaatggcaacgtgagagagagagagagctgtctgaaaaagtgtgggggctgagtgatgagagaaaaaaccttcttggtctaaataaaaggcttcctctcttttttctattattttatcaagctctgcccatgtcctatttgattgagcaa

SEQ ID NO: 170250 - DNA, 382 bp, Glycine max
  unsure (1)..(382): unsure at all n locations
tctgactcaccatataccttgacccattgtgagaatgtcaatccttaccctcggaagcanaaaaggaagagaaggataatctccaatcaaaggaaaaaagagaggaaaggaaattcccaatcacagagtgggagaaagcaaaaagaaaagatagaaaattcccaatcaaagaatgggagacagaaaacacaaagagaacgagaagaatgatagaaagctcctggtcatagatcgaaagaaaacagaagatatatgcagagaggtctttggaccagacaatatctgaacaatacggaattgtcaccaaatgaacaaaagaaagaanaggagaccataacctanaagtggtctcttcctttgataccaaccaaaatcatgtgca

SEQ ID NO: 170251 - DNA, 396 bp, Glycine max
tttcaaggaagtttctcaaggaagcttctcaaggaatattttcaaggaagctacctaggttataaatagaagcatgtgtaacacttgttgtaactttgatgaatgagagtcttgtgagacacacttcaaagttcaacttccctccctctttttctccttcaatttcgtgctcccccctccaccccaacatttaatctttgattcttttttttgttccattgaagccttctctctatgcttcttatccatgacactctctgggaggtgaagctttttcttccatggtctatatccattaaggatagcgcctccctctcacttttctcctttatcttgcgctgcgtctcactgggagaaaatcaccattgaggaactcattggatctaaagatcatcc

SEQ ID NO: 170252 - DNA, 390 bp, Glycine max
  unsure (1)..(390): unsure at all n locations
ggtagtatgggcctgatacctttttgtggcgacatgcacttcttanaattgacagatgcccgtaatcagagctgggcaccccaagaccctcgtggacttctctgggtccactgcgtgtcttgcangcgcgatccctgcaaacaatagatgatatcataaatcacgtgagagaagtgcatacttacctatgtcacgatggcatgaccttgctgtggggacgggcatcctgtacgattgacagaggcccgtaactagagctggaaacctcagggccctgttgngctcctctgggtccactgggtgtcttgtgggcgcgacccctcgcaataatagatgacatcagaaatcagctgagcgatgtgcatacttacctatgtcaggatgacacat

SEQ ID NO: 170253 - DNA, 140 bp, Glycine max
acaaaaacgatcatacaccgatccaacacgaccacatacaataactcctaatctcgtgggcggtgggagagaatcaacaaacgcaagcacagaactcagaacagggtgcaggtgcggctcaactaacatccatctaaaca

SEQ ID NO: 170254 - DNA, 283 bp, Glycine max
  unsure (1)..(283): unsure at all n locations
catgcagtattcttatgcctttntataaagacaaatgctgactcaccctattcttggttatgagatatccttcaaagaataaaaacacaaaaaaggcattgcattctctaacaaatttgtatattgacatctttttctcaataaacatatattctcattataaaaatattgtctgtatatgaaaatgtattttattaatgaacacatggatctatatatctatatatatatatatatatatatatatatatactatatcattatatatatatcataattcttt

SEQ ID NO: 170255 - DNA, 352 bp, Glycine max
atcaaatctatatatgataagataagataagatctagatgaaataatatctagatgagatcaaatctaaataatatctagacaagataagatctcattttgtagaataaaatagtttgcgctcttcaagtccaagcccaattctggatccaagcccaattcttcattaattcctgaaattagattaaaaacatcaaattagcagaatgggcccaaataataaaactgcctaattaatttgacaattaagactaatcagtaattaaaacggtgcacacagggttaagaaataggagacaatactggctcatcacacacttattaatttcatctgatttacagactgtttttga

SEQ ID NO: 170256 - DNA, 462 bp, Glycine max
  unsure (1)..(462): unsure at all n locations
actaagctacaccttatacggaggaaaaagtcgatctcatctcttncctaatgttatcctattcctttttcctttntctcttcttggaaacccttgtcattgtagaatcttcaaagggatcgttgcactcaaagcccatcaaaaccaagagtcagagttgggaagagtgcctcttcgtagcatgcttgcattttaaggtaagaagggagtgagacatcttttcttgcatgatggatagaagaaattctcttatatcacaattaatagtatatctgagtttctatatactatctaattgtcgcaacgtgcacttcgtgggcgagcgagggcgaagctcacgggtgcgctttccaaaggaggaaagatgcgcggagtcgccaccgacgcttatttgtggaaaacgtccgaaaaaccgaatgaaactggtcaaaatgaatattctaagctcgggagttatattta

SEQ ID NO: 170257 - DNA, 337 bp, Glycine max
tgaaatggctagttaactgaaaaccgctagcctttggagttgtaaatacttgttatgttgttcacctcctttgcagccgcctttcttgggtggaaaccgcgaccaaattctacagaagatagtttaagacaagattaagctgccagcatttttgtcacgtgaagcacatctcctgttgaaaggggtcatcagttgtccacaaagaagatatttccttagattgttctggaacagtacatctaaatctcatgattatttggcacataataagctctatataacttttccgtttaaaatactattgctaacataggcacgcccatgagatgttaattgc

SEQ ID NO: 170258 - DNA, 312 bp, Glycine max
  unsure (1)..(312): unsure at all n locations
atttggatcanggtgtctgtggccgagtggtatttcgagttcaatcgcttacaattggtcttggctcaacatgaacactggcgttaagatcattcacgcaaggttcgattgctataatctctatctcttcaatattgctcctttacctaatctaattatctggatttgcatgcaagctctccacctcattcacgggcgtttaatactgctcattntgatcttttagcgcgctttgcgacaaatatatggatcacggtgtctgcggctcactggtactttgcgttcaatcgcctacaattggggatatattct

SEQ ID NO: 170259 - DNA, 365 bp, Glycine max
ggaatgttaatcgttacgtctcggtttctatttacttaacggctcttcgatataatataaataagaagcgccctgattgtagatcttattttctatgcagaatggaccgtttcttttaataccggtgacttcgcgttaccgtcacaaaagtttccaagggttctaggaacacaatggcggaatcagggacttataattcttcctgtgaatgggacgggtcagtaacggagggcaataggactttgctctatctccgacaaatgatacaccttaattcgattccttaagtggaagcgcaacatgtctacgaagactcttcctgtgtattgaggagtaaagaccctcctttcttttacgagatggtt

SEQ ID NO: 170260 - DNA, 184 bp, Glycine max
agtgagaaaaggaagacaatatatgcaacctatttgtacataatataagtctatactctatacacactctccacctctgcattgtctggccttccattcttcactttactaagcacatcctacaatcaagaataatcatgataagctacatgcaaacaggattcttcattcaaatgttcacaag

SEQ ID NO: 170261 - DNA, 451 bp, Glycine max
  unsure (1)..(451): unsure at all n locations
agctatggcagcatatggtttaaggttcttcaaaatatataagtaaatagtattagttaaaccaacttaaaatttgaaaaggtttcggcaggacaaggttaaattcttgcttagtatacctgctggaccagatagcaaaatagccctgcttgctggtgggaggttcctggtgtgcttggaaaagtgaagatgttttaaatgaacatatgcagcactggtcaacaaaacttgagttctttcactgcaatttgtcacattatatgcatgcataagatatggtgctatcaggaaaaggaaaataaaaatgaaatattgctcatgacatctgaataaataaggaanataggtagtaataataatacattaaattcctccatggttagatcaaatccatctgtgacaggacatgagctccatatatagagatccgcgctaatataaacaatatcta

SEQ ID NO: 170262 - DNA, 404 bp, Glycine max
cttgaactaagctctctatatatttgtgtctcaaccagagttcttatttgtatgctccaagaaactgcagtttgacagcctatgcatgtacttctcccagaaacctcaacttctgcagagagatacacaagcttttgggagaacttcaagcccaaatgggaatcagttgataagagagaaggagagagatggagaccacggttgagcctacttacgtattgacccacgaaagatcatatactcttttggctctttatacctatgttgcattgccaaattgaaactatggaggtgtatgtgacaattcagcacacttcggtgatgagttattttaatgggcttttacatttttgtgccaaacttctgtgtacatggattcgcatcactttattttagtatgactc

SEQ ID NO: 170263 - DNA, 328 bp, Glycine max
  unsure (1)..(328): unsure at all n locations
tagcgtggaaccctttttttttattttttagaaccgcnggtggtagctcggataaactcttacaatcatagttggatactgtgcgaccatctactccacaccataacatcaccgtaatactatgtcacgacagtggctgggagaggcggcatggcgaaactcgtgaacgatggtttcactaacgaggtggggtgataatggcggacatgctcctgataatgatgctcgacgaacagagagaatttatttatgtctctgtggtaaattagttcttatgatgtggcgtgccagcgaccatggatgacggcggcactgatatgtgaagctc

SEQ ID NO: 170264 - DNA, 438 bp, Glycine max
  unsure (1)..(438): unsure at all n locations
agctnttcaactaataataaaatcctctttatgaagagtcacatctgttgatgtgtaatcgattacacctttatggtaatcaattaccagtgactgttttcgaaaaattcatttccaaaagtcacatttcttcaagtgacttgtttatgaagattctttcaaaagtcatatctttttaagtgattagttttaaaggaattgccaagagttacaagttttgacttgagtcatcaagaaactatatatatgtgaccttggcatgaaacattttaacaatctcattcagatctatcatctctttcaaccattctatctttcaatctatctttcaatatcttctttcatttctttcagaaacttcttattacatcttctctccatctttctaagaagttttgttcaaaactttttcttccaaaaaagttctttgtcaaaact

SEQ ID NO: 170265 - DNA, 356 bp, Glycine max
  unsure (1)..(356): unsure at all n locations
agcttggaagaaaacttacgattcgacattatcttacaattttttcctaaccgggaatttcgaattatgagaagtgcttgtttctgactctatggcgttgaaaattattataccatattgcttatacattactactatatatgatactacaccgtgttttcattgcatctaagtttacgaaattttactatattaccatggtaattggtaacaaaggtatgactagtcattacagaaacagaaataatttctaattatagttatgtacctatagagggagacgtgctcgaggttgattaattatactagtcgacatcgtaacgaaagtcaaaacgcgacttntcatttcaataatt

SEQ ID NO: 170266 - DNA, 395 bp, Glycine max
ctcagctttgctgaaattcttttgtggtgttttggttgtgcttatgggtcttttcattgaaggccgacaaagacttgtggttgttatggatggctttgggataactgggcgggggtaaggcgaggtttgtattggctggtaatgacattgttgggctggtgggaaacttggccgtatatgaatggcagtcacagcatgggtttcttcctctttctcaacttcttcatttgccccagttttctcagtcgtcctagtaagatgatcaaatttgcctcttttcggacccacatcgatcctttcactggcgaagaccaaatccgggaagctttgagggtgcgcagcccaccaccttttcatagtagagtatcgataatgtgtctaccatcacgattatc

SEQ ID NO: 170267 - DNA, 435 bp, Glycine max
  unsure (1)..(435): unsure at all n locations
catgcaagcttaaacataatgtcttntnatgttatgcttcaaataggatcacacccattgaggtggttgctctctggtaacaaataacacatcaattcacatagaaactctcacaaatatacctaaatcactttcagctaaaacctaatctacgataaagagcacactgcatcaagagtattaccaacaaacaaaaagctaaaaccaaatgtaaatacacacaatggggacctggaaaaagacaaagaatgagagagagagagagaattacttggaattggtgttactgtcaatgataattttggcatccaatataagaaggggagagaaagtgagaaatgcgaccaggaaattttttaagcacatatgactcaaacttagtgacgggttgacataccttattaggtgacaccaaattaatttgtcttaatcata

SEQ ID NO: 170268 - DNA, 457 bp, Glycine max
  unsure (1)..(457): unsure at all n locations
tcagcctgattgctaagcgacagcttatctgtggcttatcgtgacctattgtcgccaagcgcaattcctcacggccataattgaggtccatgacgctaagcgccagtcatggcagctaagcgagattcattgcagtaatatgagcggtaagcgagtccctctcagctaagcgcatactcctctgtacttaagatgcatcattntagctaagctggccagagcttggcttattgagagttgtagcttttctaatctgcagacctcgctaagcggatgtaccctcgcgctaagccaagtntctattatanaaaactgattntgaatttgaacttcggctagtgcacgggtccgctagcgagtcttgttgagaaacaaacgtctctcttgtcacttagcgtagtggccactaagcgaaagtatacaaactgcttagtgagtgtatagcagcacactcaca

SEQ ID NO: 170269 - DNA, 401 bp, Glycine max
  unsure (1)..(401): unsure at all n locations
gtcacctgcagctgcagcttgaacntctaagatgcaacatcnttagatttaaacttcataaagcaaatccaacacattcttctattgccatcaatgaaaacaacataatacttactcttatttagtgatggtgttctcatgggtcctccaacatctgtgtgtatcaattgcagcctttctatagcccttcaagtcatattttatagaaaagggagtcttgtttgctttccatattggaagatagcacatgcaggaagttcttcttctaatttaagtgagatttttgcaagattgttcttcttcataaacattagagcaccatgatggaaatgccccaatctcttgtgttaaagtattgtgctactaacctctttgtgcattgcagcctgctctttgttcat

SEQ ID NO: 170270 - DNA, 533 bp, Glycine max
  unsure (1)..(533): unsure at all n locations
cgttaagaactgagganaaatcaagatttatcttatacgcacatcgtttctcgtgtatgatatccactccacanagtttgaagtagaggagagattcaaccctataacgcaacgtggcggacaaatgtgggcagtaaacttgaatggtcgtcattgtcaatgcggaagggtatttgcgcttcactatccatgttcacacattattgcagcttgtggttacgtgagcatgaactactaccaatatatagatgttgtttatacaaacgagcacatcttaaaagcttactccgcacaatggtggcctcttgggaatgaagcggctattccttcttctaatgacgcatggacatttatccctgacccaactacaattcgtgccaaaggtcgggcaaaatcaacaaggataaggaatgagatggattgtgtcgaacgatctgacacccgacacaatcagtagatgtggagccgaagagcatacacgcgtcgctgccaatgcaattgagcgtggaagtgtcanatactgattatgatgc

SEQ ID NO: 170271 - DNA, 444 bp, Glycine max
atccttatagtcacctgcggcatgcaagcttgtgataactgctgaccatccatgtttactacgttgaatcctcgggtacccttaccttgaatcatggagtcatgacgactttgaggaatcccaattggtgtagctgtatttagatactcaaaacaaaattcaatagctttttcagcaacgtatctttaaacaatgcttgctttacgtcgatattgattctttgtgtaacctttcaacaccttcatgtagcgctcaaccagatacatccaatgtaaaaacatgggcccacataaccggatcttccccacaagatgaacaattaagtgaatcataatgtcaaaaaatgtcaggggaaaatacatctccaattcacgtaggatgatgacaacctcattctccaaattatccaactgttgaaggtcaataaccttgctacagataaca

SEQ ID NO: 170272 - DNA, 144 bp, Glycine max
  unsure (1)..(144): unsure at all n locations
cacgcatgcaaccagctgctggcaataaaccacacacgccanatgccattaatgttgcatttccaacattctgataatagccaccctaacaaaataaagaggaagtccaatatatgtgacaacaaatagccacatacacacatc

SEQ ID NO: 170273 - DNA, 444 bp, Glycine max
gcttccttaagaagattcctaaagaagttagagcttagctacacatacctctctaatagctaagctcacctccttgagatgagaagctaaagcttagctacacaccccctataatagccaagctcacccccatgacaaaaaacatgaaaatacaaaaaaaaaagtcattactacaaagactactcaaaatgccccgaaatacaaggctaaaaccctatactactagaatggccaaaatacaaggcccaaaacaaaggaaaaacctattctaatatttacaaagataagcgggctcatacttagcccatgggctcgaaatctaccctaaggctcatgagaaccctagggccttcccttggatctctagcccaatctacttggagtcttctacccaatgcctttgccggataggattgcatcaacatctcttgtggatcagttcta

SEQ ID NO: 170274 - DNA, 451 bp, Glycine max
agaaagagagaacgcgcaagctcataattttaggtttaaaagagggagagaagcttaactctgagttgtgtatcacaagactctcattcatcacagttacaacaagtgttacacatgcttctatttatagactaggtagcttccttgagaagctttcttgagaaaacttctttgagaagcttctttgagaacaccttccttgagaagctaaagcttagctacacacacccctctaataactaagcccacctccttgagaagcttccttgagaagattcctaaagaagctagagcttagctacacacacacctcactaatagctaagttcacctccttgagatgagaagctagagcttagctacacatcccctataatagctaagctcacccccattccacaaatacatgaacatacacaaaacaagcctctactacaaagattactcaaaa

SEQ ID NO: 170275 - DNA, 458 bp, Glycine max
  unsure (1)..(458): unsure at all n locations
taatagtcccttataaaacaaacacaatatacatcatatgagattcagnctattcatgtcaagaatggttatgccaaggatttggaggaatcttattcatcaatatatgcatgggacgctatgaagcactgactctgacatggacatcggacacgacacggatacttcaacatagctaatgtctaanatataagacacagggacaccacatacacacaaacaaagaaattctaattaaatgaagtatgagtaacagaataaaataaggtgacagcttaagtattcaagtcaataaaaaantaatttggaatcagacacctaatgagaagtgtcgaacaagtattgaataagtgttcgggtgtgtcagtgttagaaacgtgttcgacacagtaacactntaaacaagagaggtgttcgtgcttcatatataatacggaaagcanaccatgtaatgacat

SEQ ID NO: 170276 - DNA, 403 bp, Glycine max
agtcttgaaggtgcgtagcccaccatcttttcatagtagagtatcgataatgtgtctaccatcacgatcatcgtctccctttccatcattgggggtaccacctgggccgccagatccctccaccttttgggcgtgttctttgaaagatccgtccccctttttgcaaatgttctgtagttgcatcctatccggaaccatatcaaaattgtactgatactgcctaacaaaggcaaccattaggtccttccaagaatggactcgggaagattccaagttagtgtaccaggtaacagctaccccagtaagactttcttggaaggaatgtatcagcaattcctcatcttttgcgtattcccccatcttctgacaatacatctttagatgggtcttgggacaaagagtc

SEQ ID NO: 170277 - DNA, 413 bp, Glycine max
  unsure (1)..(413): unsure at all n locations
ccgcgacaatgtaccctatggtgcggtggtgccgtgaacaacactcaacgcgaagttaatggggccatgacaatgtacccttccttttgcggagctgacggtggtgtggcggagatngacctcaacaggagacgccgactaatagcacaataattnttagacactgaggatgatgagtgttcaattagcgcacaagggggacatatatatatgaaaccatgttaacgacagtgtatttctaaacccatctttgacagtcaagatcctctacaacaatggttataaatacaccgtctntgataaggttnggcataaccaacacagatggtgctgtcaaaaacgtcattgagacgtcacgtgccgtcacatgccctcgtaaatggatatattacaaaatgcactgttacttacta

SEQ ID NO: 170278 - DNA, 361 bp, Glycine max
  unsure (1)..(361): unsure at all n locations
agcttgtacgagtactgagaaagattcattatattgtgtgcaagctgccctcaccaccagatttctgagcaactccttcttcaatatttttgtgagggacttagcaacatggagaggagtatgattgatactgccagtggtggagctcttggtgatatgaccnctgctgaggctaggaatttgattgagaagatggcttccaactcccaacaattcagtgcaagaaatgatgtcattgttcttaaaggagtccatgaggtggccatgggttaatcttcatctactgaaaataaaaaagcttgaaggaaaacttgatgccttggtaaccttgtaacccagcttgccatgaataaaaaatcta

SEQ ID NO: 170279 - DNA, 501 bp, Glycine max
  unsure (1)..(501): unsure at all n locations
tactaagctgagaatatggggacccatacatgtggactaggtggcggtcttgcgatggtgcataacgattctccacgtccacaaatcacgtataacccaccatcccctgttgcccacctccaactgagctcacgtactcccacgtagcccttatcctcgttcctctcaacgtcgggtgctcatcaatcctcccaagattccacaacatccaactaattcaacattcaatcatcacaaactaacacagccaagaaaacagggcaaaggcagaaaactctgcccaaaacacanaccaacatcacagcttttcacattcaattaccccagtaacattctctttgttcagttcgtaaccggtgatcgactcgaanatttactggaagctctagacataatttacatttgaccgtgggatctgtagaaatgtcagaacccatatgtactaccctttacaaccagcatgccaagcgtttctgactatcaaattctgtgacattcaca

SEQ ID NO: 170280 - DNA, 427 bp, Glycine max
  unsure (1)..(427): unsure at all n locations
agctggcatctttcagttacttgacttatagnccaagaaagaagtttaactttcccatcatagacatctcaaattctatctacatacaacttgaaaattccttacacaaagtttcattagtagaactaaatataatattatcaacatatatttgaacaattaacaactcattgtttactttcttaataaacaatgtttaatcaacttggtctctagtgaaagattgctcaagtagaaaactgctcaatctatcaaaccatgaccttggttcttctttcaaaccatactttttcagtctatagacatggttaggatgttagtagtccacaaaacctggtggatgatctacataaacttcttcttcaatgagaccattaaggaagaaacacttcacatccacctgaaaaagtcttaaaatcatgataca

SEQ ID NO: 170281 - DNA, 470 bp, Glycine max
  unsure (1)..(470): unsure at all n locations
gcttctagaatggtttagctttatttttgtctacctcgattctcctttgatgaacaagaaagcacaagaaatttccaactgatactccaaatccacatttctcaggattcatttcgagtttatgaaatctcattctgaaaaagatactgctccaaatcgcctaagtgccctctccaaattggtcgattgacaaccccatcatcaatgtataccctccaccgattgctaatcgactcatganaaatagcattaatggcctattgataagtggctcctacattcttcaaactaaatggcattactaacccattcgtttatttaagtgcccttggacatcanaaagctatgtntgatacttcttcttccgccagatatatctaactatatcaagagtgcttatccatgaacataagaatcccatggntngtcgccaatctaccagcatatctgcaatggacatcatatattca

SEQ ID NO: 170282 - DNA, 334 bp, Glycine max
ctgcggctgcagctgcgaaaaattttattacgttttctcccatgcgaccaaaaaagaaaaatgctactaccttttacaaatcaaatagtatgaagtatattgccccacgcagttgttcacgactcatccaaataaaatatttggaacgtctattagactattactctttaacagtctactgtgtattttaacggtttcattaataatgtcagattaaaaaataattcgtcaaattataattttggatgacgcttacgtgacaaagtggacgtttgattttgaaaaaattaaaattacttatttaaaataatttaagaactaaacgtcttctttt

SEQ ID NO: 170283 - DNA, 302 bp, Glycine max
  unsure (1)..(302): unsure at all n locations
gacaatcacttcatatctgttaagtctcagatagcttgcccaatctaaaattaatctatggaagtaaagggaatgactgctgtcaattctgccccaccnccctttttcctaagatatagtttggttgctctgtgtttcacttatattgggttttccgttgttaccacttcggaaatgaaagattcatgtttgcaaagaatttctacatctaatactattggtaactaatcatcagaagcanaattagtttgaatgacactctaaataagctctattagaattacgttctacaaaggggcact

SEQ ID NO: 170284 - DNA, 445 bp, Glycine max
  unsure (1)..(445): unsure at all n locations
agctttagccttggaatgttccatcttgctactccttatatctctaacaccctcaaaattactattactattactattagagatttttttccgacactcaacataatttcttctacacccaacataatttttaaaattccaaccttacctctatttacttcttcttcttcttcttcttcttcttctttggtccttggttatttgtttcttcatacaccattcatttccattttcttttgcttgagctactcatttcatgttgtggttggtttggtcgaggtgcattatcgcggtggtttgttcgtagtttttagttgtcgtcgtggtgggtgttgcggtgcaacgacgaaggatgttnagttttttcatctgcaactttgatatgtgctaatccgtaaaaaacatacagatttgcagttggatgaatcatatagattgacaatcc

SEQ ID NO: 170285 - DNA, 398 bp, Glycine max
  unsure (1)..(398): unsure at all n locations
cgcctcacagagatccacgaaggataaagcggctgattgttcagttccgctcccgaatatgacaaccaccatattatgagcgctgagcaccagtagcgcttcgaggccatcatgggatggtcatttctctgggagcgacgcgtccagctcagggacgacgagtataccgacttccaggaggaggtagttcgccggcggtgggcatcactggttacccccatggccaagttcgacccagacatagtcctcaaactttatgctaatgtttagcctacagaggagggcgtgcgagatatgcgatcctgngtgaggggttagtggatcccgttcgatgcggatgctcttagccagttcctgggataccctttagtgctggaggagggctangaatgcgagta

SEQ ID NO: 170286 - DNA, 434 bp, Glycine max
  unsure (1)..(434): unsure at all n locations
agcttgtaccctataatatgacccagatgtataccgaanaagtattaacaagcaatattcacgtaagcaaccacagcctgccaccctgcgccaacagcaacacctgagagaacgggttgcacgttgttgatgacaatgcaaagggccaacatgggcgtgagctctaccacaatctttctcacttctgaatcatttgaaaacaagaaagggtactggttccggaagattatcagcaccatcgagagcatgacaccgatcagagttgaagtaatcacagcaacaagaagtgaaaactttgctgttcttgggtgacatgctcctagttcatttgacaccctcacactgcaaatgtaattnttggtcactgactgatttatgtaaatcattcaagttttaatggttatgcacaataacgtacaacagtctatactatt

SEQ ID NO: 170287 - DNA, 393 bp, Glycine max
  unsure (1)..(393): unsure at all n locations
atcaattactatgcctataggttggacctcccataagagtatggagtcagcaccactcttaacatttctgatttaattccttttgtaggtggagctgatattgaggaggaggaactaacagatttgaggtcaaatcctattcaagggaaaggggatgatgcaatcctccctaggaagggaccagtcactatagccatgagcaagaggctccaagaggattgggctagagctgctgaagaacgccctanggttctcatgaacctcacggtagatttctaagcccatgggccaaggttgggtccaactatctntgtacatattagactangatgtcattatanttgatccttgtatntacggctccataatgtaagtagggtaccctagaaatat

SEQ ID NO: 170288 - DNA, 385 bp, Glycine max
agcgtgttgttacatagatgataaagagatattgaaagattaggaagtccaagtggtgaggatgtctctgtcacctctagaaacctcacaatcactcaaactctcatccaatactccgcaagataagcttcttcttcaatctcagttgtccctcaggatcttcacaccaaaagttctctccgccactcagccactcagatgaatgcttccaagaacagagaaaatgccaaaaatttgagaacttccttccatttctgattgcaggctttaaataatgttgctatttattgggcgttcgctcagccacattctggttcgctcaatcgaattaagcgagtgtgactcttgcttagcgcacctatacaggtcatcttcttccaagttc

SEQ ID NO: 170289 - DNA, 414 bp, Glycine max
tttcttgagatgaggaagtgtagaagggtgaaacttcctgcttttattcgttgaccacagagtggtacctggagatatgtcgctggggtcaggagaccttgtggacgtcaggtggggtgctattgcccaaaaccaagcttgaccaatcccgacccaacctgtgcatagtcagtcagtgaaaacctgtgatgtacctaaacaggcgagctcctggcagtcaacagataaaaggaacaaggaccacaaagcaaggaggcttgtggtggctggccacctatgaacttgattgatatatgagatatggcctctggtaatcgattaccaagggtgggtaatcgattacaaggcttaaaaatgaagacaggaggctaagatagtctctagtaatcgattaccaaggggtgtaatcgatta

SEQ ID NO: 170290 - DNA, 356 bp, Glycine max
  unsure (1)..(356): unsure at all n locations
cntgtatctctatcatcaatgttagctcttatggtattaataaatctcattagtcatcgtgtcatcaggggtatccacattagtagtttcctgtcccacaaaatattcattcacagttccaggagcactagaatgagttggacaaagctcaccatcaatccaaacagaaaattactcatcaacaacctgacaaaaaggattacaaagagaaatttaatattgcctctatgattgatgaagttcacctgtctcagggcattgttgaaagagtctctgactactctcttgaaatgctcttaccattgatcactagctgtatctacatcaacaagctgttacttcattgattaacttcc

SEQ ID NO: 170291 - DNA, 426 bp, Glycine max
  unsure (1)..(426): unsure at all n locations
agctntgaacaatatactcggccttcatttaactgtctctgggcttggcggccacgctcaacaaagtactttcgacacctactgtacgttgatttgaccaaggctgttatgggaatgttgtgacaatccttcaaaaccttattgatacattctaagaggttggttgtcatgtggccatatcgacgtccttctctatcataagccatcgtccatttttcctttgaaatgcgatcaatccatgttgctatggctagacttagttcacgaaatttttctaaattttgataaaaaaaaatctgcttgcaaggagtgtaggctgcataaaattagttatcaataacaattttaagatatagggaagtaaataaacgtgaccataaatatgagatttacccaactcttcagcattctttttgttggattatg

SEQ ID NO: 170292 - DNA, 392 bp, Glycine max
  unsure (1)..(392): unsure at all n locations
ctgcaagcttgattttgagttgatnttagccttagtttcactntggttattagtcaattcattcaaggaaactttcaaagaaaaacgtttgatcgattttttttattatcttatttaaagatattttgattattttattattattttgctttttttggtttaaccaaggttacagcgtgaacgatcggttagattttgttttaacagtgattaaacgagattacaacacaaatgaccgattgaaattcattttatcatttattaggtgagaaaatggcttaaacgatcggttaaagctcgttaaaaatggaagaaaagaaaatcagaaatgaacgaaatgaagatgaaagcttaaaaacaagaaatgaattgaaagtctcggattcgaaaac

SEQ ID NO: 170293 - DNA, 531 bp, Glycine max
  unsure (1)..(531): unsure at all n locations
taagctgcttcacaatctctccttttttatgatgacacacctaanatcattatacacatacaaactctatcttctaatcgatcactcacttaattccccccctttgttntttgagcttaaacttcacttgaagttaagttatttaattatatgagttcttgattcagtcccaattttttctccncctttggcatcaacaaaaagccaaagtgcgtatagagacattaaatcatacacaaactcataatcatccaagcattttaatccatacaacaagcaaggaggacaataattcatacataaactaagcaaggaagataataattcatccattaactataataaaatgtcagataattagaaagtcatccaagataaccaaattaaaacaactaatttagaaagtatatactaataagtgtatcaaataagtcataagacatcataacatacaacanatcatntgtctaagtcactagcatctagaagtnctaattctcttctaatggtgtagaaagaatcttttgatag

SEQ ID NO: 170294 - DNA, 466 bp, Glycine max
  unsure (1)..(466): unsure at all n locations
ttaagtcacctgcggcatgcaagctggacatatgtacaaaaaaaattattatttgcacgagtgaaattcgatcacaatgacaagcgaaaaatttagaaaaaatagaatttaatttcagaaaaaagaaagaacccaaaataacccagaattgatcctctagggatccctatacatgttccttctaattcccaagcatgagtaactcatcatttacctcaatgtagttgctcaagcattctctgttagcaatagtggcatttctagtgctctctagagctcctcctccggttgctctattaaggttcttatgcgtcagagagaaaaatgaaaagaaggtgttttataaaaacttctatgggttaaaagttcctttatatagtaagggaactgatgacctaannnaattttctttctttcttattatntatttaatgaaaacccaaaggcatggtgttcaaatcactca

SEQ ID NO: 170295 - DNA, 428 bp, Glycine max
attatatacatgcttacctattagttaaatattttttgtagtagctaatcgagtttatattgttagaacttatattgttattaattaattgacattgaagatgctatagtgttggtttgatatgcttttgaaaattattcgagtcgatgtgtatgtactgcgttgtgtcttataaatatttctatgaatgtataacaagatatatgagtctcattgaagtatgcgatgaattgtgagttatgaattatgcaatcacacaactgttagaccctataaggatgacgagttaatgcgcaatgagttgtgatgtgtttcaaggtgggaacccgatgagtttaatcacttgacgcgcaatgagttaacataattttggaaaataattgagatcttgaaaacaattgagtagttgtatgcatcgcatagttcat

SEQ ID NO: 170296 - DNA, 264 bp, Glycine max
agaccaccgatcagtatactatatacctattcagttccgagcatggcgggaacaacaaaatgctgctagtgacagtggaggtccctcctcaaagccacaaacaaacattattattataaccctacctgatgatgtacagcacctttcaataatgaccattataaagaagcaataatggaacaaattaacagggtggtcttcattgatcacctgcgctagtgggacaagtggatgatgattaaaccggccagcatagcattacta

SEQ ID NO: 170297 - DNA, 351 bp, Glycine max
  unsure (1)..(351): unsure at all n locations
agactttctcggttctcctgtggaatgtgcatataagtaattcatccaaaaactntaaaatgatcactggcggtttcttgttgaaccatgctccatatggcgtcatatttaagactgctttagttggagaacagttgaggatgtatactgctgcgctaacagcttctgcccatagattttctggcaggtttttgtgctgtagcatcgaccgagccatttccataatggttctattattcctttcagcgacaccattctgttgtggagtgtgacgaacagacaactccttcttgatgccatgatcatttgcaaaattgatgaatatgtgcccattgaattcctccccgcgat

SEQ ID NO: 170298 - DNA, 372 bp, Glycine max
atgccttctgttgcacacatctggatgctactaatatatgttctgaccgagagaagaccttcataacttgtcagaacagattacaatgaatttttttccttcataccgttatgtaaaacttctggtctgagatttaatcattttttcacaaattcaagaacaacatccccttattctgctctgataatgggctaacattacattatagaacaccaaattgtatgtctgatgaatgatattacaaacttgactattatagaaactgactaatcacaaaaagcatgatttaacatcacacccacaaacgtacatttctctaataaggtgtaggcttgatacatcagaaaaaagaggtgaatagattctactttc

SEQ ID NO: 170299 - DNA, 436 bp, Glycine max
gtgtggagcttcatggagaatgttggtaaagaaaggcaacgtgagtttatacacacctctctgaaatttttcgttttgctgagtggggagagagaaaagctttttggtcttaaataaaaagggttttccctttctccattattttatttatgcaaatgccacatgtcttcatttgagtggagcaagaagggcccactttcccttttgactgtgacccatactcagccacaaaagtgagaaaaatctgacctttgaaatgctaaaatcctgcctcggtttgcgtgccgtttctctggtcccagtttctcgcgtttctctgcgtccgtcggggccagttttctaaagtaagcaatatatatatcaaaacgctcagaataaaaccccgagcgtggttcagaggttggtttcgttaaattctaagtccacgccaaacgat

SEQ ID NO: 170300 - DNA, 382 bp, Glycine max
  unsure (1)..(382): unsure at all n locations
taatatctccacactctnntgggtggtccattctcggatggccttgattttctcacggtccacttggaccccatttctaccaactacaaaacctaagaaaactatattatctacacaaaaggtacacttctctatatttgcatagagggtgtttttcctaatgactgaaagaactcgtctgagatgtcctaagtgatcatctacgctcctactatacactaaaatatcatcaaaataaacaactacaaatctacctatganatcccttaagacatgatgcataagcctcataaaggtgcttggtgcattagtgagcccaaaaggcatcactagccattcatacaaaccaaactttggcttgaaagcacgttttcactcatca

SEQ ID NO: 170301 - DNA, 435 bp, Glycine max
  unsure (1)..(435): unsure at all n locations
agcctttatccatggtctcctatggtggtgagctncttctagactcatcttctccttgaagtggcatctcctctctctcttccttctccattccattgccattcatcttccaagaagcaaaggaatccatttatgaagaagatcctaggcctacaagctccaatggagcttacatttggtgaattaagttttaaaaaaatttcccctaacaagttttaattctctctttaaaagaaatttgcagacttaatatgcagaaaagaagtaatgaacaattaacttgatgcttctttaaatatgcaaagtaaaaattaaagtacaacaaagtaaaagagtttagggaagagagaattgcaaactcaattntatacatgttcgaccacgccctatgcctacgtccaatcctcaagaatccacttgtgatttcactaactt

SEQ ID NO: 170302 - DNA, 415 bp, Glycine max
  unsure (1)..(415): unsure at all n locations
gtcctaatggacattataaactagaatcttctcactttatactncaatntacactaactccaagtttagcttctctaaccctcaaaatctcacacttttctacctacaacattgtcattctcacatttaaccctaagttaactttccccttcatctctaccagttttctatcagcaatttcagcacacaaacatcacaaagcatcatcatataaccctaacacagaatgggtaaatctggctcacatcaaacatgtcaagtttagcatgctntcaacaaattccttcacaaataactaccataaggcataaacctagtagaactacctatcatatctcccacaaacccaatacccacgaaattcttgtgagaaaaagtctacccacactctgatattctgaagtcccacaacgta

SEQ ID NO: 170303 - DNA, 420 bp, Glycine max
  unsure (1)..(420): unsure at all n locations
agcttgtaggccttgttatcttttcatcatatggagncttttgcttcttgaagtttaatggtagcggaatgaagaagaaagaaagattattggagacgccacttcaaggagaagatgagtcaagaagaagctcaccaccataggaagccatggataagagcttgaaggaggagaaaatgaggggagggagaaggagagaaggagcacgaaattttgtgcctcaaatgaggtctgaactttgaagtgtaattctcaaatgattaaagttgaaaaaatgcacacacatgacctctatttatagcctaagtgtcacacaaaattggagggaaattntgaattctattcaaatttcactggaaattgaaattgaatttgtggagccaaaatttcactaattatgaattgtgaatttaagctatg

SEQ ID NO: 170304 - DNA, 464 bp, Glycine max
  unsure (1)..(464): unsure at all n locations
ctcagcttgaggaatatggngtacccatcacatgtggtactatgtggcggtctggcgatggtgcanaacaattctccacatccacaaatcacgtataaacccaccatcccctgttgcccacctncaactaagctcacgtactcccacgtagcccttatcctcgttcctctcaacgccgggtccccatcaatcctcccaagcttccacaaaatccaagtaattccacatccaatcatcaagaactaacanaaccaagcaaaataggcaaaggcagaaaactctgcccacaacacanaccaatatcacagctttttacatacaaataccccagtaacattctcttcgttccaattcgttaaccgttggatcgactcgaagnatntactggaagtctctagcacataaatatacattatgaatgttgggatctgctagaaaacgtccatagcccaatatgtactaca

SEQ ID NO: 170305 - DNA, 397 bp, Glycine max
agcttatccttatggcttgcctccggacttcaccccccgtgccaccccggaagagttaagccaagcccctactttcgaggggcaactcccaccttatgacgactatcccgggcaagacgatgaggaaggagatacccatcttggccccctgctccacctcaaagatccgtccccccatgaactaccccaaccgagcatagtccgccatatcccggcttcacccacacccgtaaaagaatctgttcccttcttggaagataaggggaagatggaggcgcttgaagagaggttaatagcagtcgagggccttggcaattacccattctcggatttggcggatttatgtctcgtgcccaacatcgtcatccctcccaagttcaaagtactagactttgat

SEQ ID NO: 170306 - DNA, 464 bp, Glycine max
  unsure (1)..(464): unsure at all n locations
tcatagtagaatactggtaatgtgtctactatcattggtcatcatttttcgtcattgatgtgccacttgagctgccaggttctccacctttgggcgtattctttgaaagatccgtgcccccttttttgcacatgttttgtagttgcatcctatccgaagccattataccgaccctgcccaacgaaggcaaccattatgtccttccaggaatggactcgggaaggttccaagttagtgtaccaggtaacaactaccncagtaagactttcttggaaggaatgtatcaacaattcctcatcttttgcgtatgcccncatcttccaacaatacatctttagatggttcttgggctagtagtccccttgacttgtcaagtccacaccttgactgngagggggatgaattggtctangacactctctangtagcaaggctaatcttacctctcaatggcctgagccttc

SEQ ID NO: 170307 - DNA, 447 bp, Glycine max
  unsure (1)..(447): unsure at all n locations
agctntgcatagttgcgttgtcgaccattaataaaattaacaattgctaattcaattgggctgtttgggcttgttctatgtgaattgtcatttgggttactagttacaaaataaaaatttaatttcttaacaattataaatttataataataataaaataaaataatatattatttaaatttgatgggttgatgggctagcccaccaacccacgggttgaacccacttaatccacggactaagtgaaccgggctgaaaagttgccaatatcgattttnttttaattgagctcggcccacctctagcccacagtgggccaggctggcccacaggccgaaaccccattttgacggctctacttctaaaatttcttcttctttaacttttttttatatcttnttcacaaattatattaatattaacactgtatgagtactattatctttt

SEQ ID NO: 170308 - DNA, 436 bp, Glycine max
agcttagagaagtgattgcaggctatgatggaactcgggcagtacatcctggtctaattccagtctgcatggagattttcaacaacaacatgggcaatgctcccaaccaaaataaagacaatgaaacgcgaagatggcgcaaacataaccgagcaagacctcttgcagataccaagaggagcctgcaccatggaaggtctcagatttatggttatatgcttcttaatttaattattaaactcttaataaatatcttaagtcacttgagcctcttttcaatttaattagtttttttttattaaaacattgtcactagtatgtgattaacctatctttttgttattgatacaagattaagctattcttatctcaaagtattttattaactatgctcttattgggaacaggaaaaaaggaactacttaaagacacttga

SEQ ID NO: 170309 - DNA, 493 bp, Glycine max
  unsure (1)..(493): unsure at all n locations
tcaagcttgacacggaatcatctgtatgggtgggatgttgaattctggctgcttctgtcgcggatatgatggtgcacacggtgaaccacaatctgaaatntcttttggtgaggtagccatggaaaagcagagcgtctggaatgatttcctaaatctcataaaactattgggaaatgctggtgataacactaatgccaagcagatctcaatttgtatgaagaatgtatatgggcgtgtgaagcaacggtcgaatntgctttgtggtgaacctgctattaatgtcaactgattcgtctgcgcacgttcagactgcagcagctgctataatttctctatcagacaaaagcgcagcttgcccctcacgattctaaactgattcgcattcaagcctctgtgaaatatctgctatatgtgcttactggcaacctgcttcagcgtgatcactctatcatcaacacaatctctgatatacggatgtctcacgccaatgtgc

SEQ ID NO: 170310 - DNA, 433 bp, Glycine max
  unsure (1)..(433): unsure at all n locations
agctngttctaatttcatggcattggcctttacaatgaataagagaattttgtccttgccttttccaactaacaaaagaacctatgtgatcatatactgatcagaatttatgattaatatgattttaagtaactattataaaaataataaatttattcaatataattatttgtgatcagataattataaaaaatgattttatcatgtcaatatatggtctaatttttcaataatatataattagttgaaaataaaagacaatctagttaaaaagtgaaattatcgaggagtttcaatgttgccttagtggctggtttgctaaagtactaccggaaattagactgaaaagcccaagcaantttcttggcattcaatttactcactgatcaataatcataaaanaatgtcaactaccaatatccgcgcactatag

SEQ ID NO: 170311 - DNA, 409 bp, Glycine max
tttgatgcaacctcaccctcatcatggtgatggtgatggagataatagtgtgcgcgcgttattcccatagtgggtattggaggcttgtggaagaccaaacttgcaaagttggtgttcactgataagaggatggatgaactcttccaattgaagatgtgggtgtgtatctctgatgacgttgacattagccagataattattaagatcatcaactctgcttcttcttcagctctaactatcgcgtttacccaccaagaaaacgttaacaacttagatattgagtagctacaaagtcgtcttagacatatgctttctcgtcaaaagttttggatgatatatggaatgatgaccgagccaaatggatagagttgaaagatttaatacaagttggagcagtgtgaagcaaaat

SEQ ID NO: 170312 - DNA, 433 bp, Glycine max
aagcttgggtatgcttggttgtaatatcaaaagtggtgtgattaataatcgtaatttgttaaagttagcggaacttggtagtttttcaagaactatacgtagtctcggtggttgaaacggaccaatataaatttctgctccttatctttatttgctttctcttttgtgctttaaacttacttaggattcaaatttgatttttgtttttgaaaaactctctttgtttttataaaatttgggtttatcatttgaacccatttgcaaaaatctaatatttgtgtttacacatttttatcaatagacgataacgttattattcaagaaaaaggttttaaatttctaaagtcataattcaatccctctttcttgtaatatttacctttaccatatagcaatacaaataaagttctcattcaaataaaatcatcgttca

SEQ ID NO: 170313 - DNA, 322 bp, Glycine max
  unsure (1)..(322): unsure at all n locations
ctcagctttagccaatggacttaccttgaattaattcctctgatagcccttttgagccttgtttccctttccttgttttgaagctcactacaagccttaagtgaaaaaccatgatatcaccatatccttaaggaattttgaagctttggaattgttttgggaataagtgtggcggggttcttgtttcattggataacttgtcttgttggctatacttcattgatgtatttgggccatactcgatgtacattgtatattggttaaatgttggacatgctgaatgaaatgctgtttctcanaggatatagagtaaaaaaaaaag

SEQ ID NO: 170314 - DNA, 291 bp, Glycine max
  unsure (1)..(291): unsure at all n locations
agctgcagcttgcactgtcatggatctnctcattttatatccntatcagaagacngatttaacactccactatccatcactacatagacacacatttgtaaaatggtggacacaatttgtcttattccaagcagatccataacaatgtaatctttagttccattcaccaccataatttctcatagcagctgatccaaaacttctgtgtctgtgaacaaaagtttcatctgacaacatttttagcatgatcgaaattaaaggagaccctaactaaaaatctaaaggaagttt

SEQ ID NO: 170315 - DNA, 414 bp, Glycine max
  unsure (1)..(414): unsure at all n locations
tgtttggtgtcactcgtatggttaacagaaagtcagatgaccattgcaagtgatactcactaatgtctatagttccatatcaatcaatatgttatacttctattttttgaacaaatagtattaattatttaccttaatatggatgttagagataaaaatagtgattctaaatttgaaaggatgaaaatcaaagaagttctttaactgccacccatataggattaaaaatagtttcttcataatttagagagataaaanaaaggacaganattctcttgcttactttatagaaactaaaatatatctaaacattctcgtaacgtttgtttcaagtttgatnttaagctataatgaacaaaatattattacattaaagatcacaatcgcttgagtctattcaaatgaatagtatct

SEQ ID NO: 170316 - DNA, 460 bp, Glycine max
  unsure (1)..(460): unsure at all n locations
acctgaggcatgcaagcttgcgttccgggtctattcatatgctattngcattacttaaannacattntgttgcgtatacccccactagttcaaagttcaaactattcattgtttaagataacgtacacataaagaatattaatagcacacatttgaagaaaatcactataataaaataatttggataacaagtttttattttgaaacccataaacctattaccctattgcaaatcaacacatcatggataacaaatttgatgcgacattttactttttaattattagntatatatttattatatttatttattattcattttttataaaataataatttttaatcttttggacctgatagctctattgcaaatcagtacatcattgatgggagttgtttatatattntgagatgaatagaaagatngtgcaaattgccaattcatcaacgcagctaaact

SEQ ID NO: 170317 - DNA, 455 bp, Glycine max
  unsure (1)..(455): unsure at all n locations
cagtataagacagccatagcctgatgcgacacgtcttctatccaacatttatcttgaaatctaatgccaactttgtaagtctaaacatgtttaggaaatattataatatctcatcttgcctattttcatgataaacaaagatgtttacaaaataatttacatgtttggaaacagtttacaattatacaaacaacaattcttatacaataagctgttttgtctaatctaaaaatntgtaacttatgtctatatgtcaataatctttctttctttttttanaccgttttcatactcttctgccgtgtaaaagtcgattatcttaaaatcatcttttagcacacttattcaaacattctctatttattataatcaattattgaaataatgtaatgttttcatctatcccaacacatcatgtatcctgtaatcaaaacattcccacttctcgttaacat

SEQ ID NO: 170318 - DNA, 388 bp, Glycine max
  unsure (1)..(388): unsure at all n locations
agcttgagctcattgttgctgccccacattgctcctcggaatatatctcggccatgctctgccttgcgcgccctcttggtttcttgttcaagggctcttgcggtagctatatttatatctcttagttcggcattctcctttcggattttaagagctgctgatttgaacctttctttgactgtttgggcttgctcgagttctgccctaagggcctgcacctcttcgtcttcctccggtgcctcaacttcctccgttttagcggttctcaaactcgggagccaatccaaaccttgcacgtgggctttcaaccaccttcggtagccattgatgggcccatngttactgctcctgagttctttgtccttcttttgcaccacctcccatgcct

SEQ ID NO: 170319 - DNA, 484 bp, Glycine max
  unsure (1)..(484): unsure at all n locations
aaacatgaataanatacatgaactaattgcaataattgaacttattactcatatggtttagtcaagttaataaatttagggggcaattcctctaaaaatattatggggcaataatattttttgcgtacgtctggtatcaagatactcgaattcttcgagataatctagaaatgaaaataagcggaattgcgaagatatgtctaagaaatntaatttcatgttaccaattcacatattaaaataatatatgaatccaataaaataattgaaattattgatcacgtggtttagaaaattaataaaattagggactgattgcgtctactatcaagatacacgtactaacgttagtgataatctatgaaagaatataataataatgagtgaaagttgaatataaaagtgaataattgaacattagagaacanttttcttataaaattctgatatatattagcttataagtntctcacagtgatatcta

SEQ ID NO: 170320 - DNA, 464 bp, Glycine max
acctgctgcatgcaagcttctaagaattggtcaggaacatttatgttgaaaaggtattaacactgggtagacttttggtagttgcaaaattcacatcatattttagctagcaagttgatttggaatttttattaattgacatacttgtggactttattttagtcaaaggtgaaatttgacttgtttaaaaaatttatttctcttcattcctggaaataaatgccttatgcatggcattttatgctcgatctgaagaagctcgtcaaagtcatgctacacaaaattttgctttggtaatatatattctttgtcctgttcctttgagctgtatggatttgtctccggcaacagaggagcttaatgacaaaatgtgggtttatagtattgtattgatatttcccatcctgcttactgtttttttttgtgctgaatctgcaagagccttgattgaagatgacttttaa

SEQ ID NO: 170321 - DNA, 366 bp, Glycine max
  unsure (1)..(366): unsure at all n locations
tgactaatactatgatgcatcataacgtaccaatgacatgtattaatctcctataccaacaatagatgtcatgggtagcataacatgtactaatgttagtangataaccgttcaattnttaatatataaagcctaaactaagcataataagcccacagattaacattcttttccttactatatgaatgtgcgaaacggaattgaactattcgattgatagtatatgagcggtgggacacacctgatctttcgctaacaaagtgtcccagccgttatctctcaacagaacccttgcttcttcatactttatagccaccggataattcacatctctcagccatattattctactgcagaacaggctac

SEQ ID NO: 170322 - DNA, 483 bp, Glycine max
tacttcagtcacctgaggctgcagcttggatttcttttgtagggaattttttcttcctattatggagccaaacccagtccccctcattaagaactagctcatttcttcctctattgcccttaattgaatacacctttgtttggttctctatttgggtcttaaccctctcatgcaacttctttacaaactctgacctagattccccttctttatgtataaaagaaatgtcaagtgggaggggaatgaggtctaagggtgttaagggattgaacccatatacaacctcaaaaggggattgcttggtggttctatgaacccctctatttgaggcaaattctacatgaggaagatactcatcccaagacttatggttgcctcttagaagagcccttaaaagagtggataaagacctattcactacctctgtttgccatcagtttgtggataccagtggagacaaaagaaacttatttctatctatct

SEQ ID NO: 170323 - DNA, 380 bp, Glycine max
  unsure (1)..(380): unsure at all n locations
agcttgtagaatggctatacacgatacatgtcagggctngatttggttcaaggataaaagggatgccccacattatttccatgacacaaatgcaaaaatgatgatttggaaattttatgcaaaactggtcatgcatgcacctatgcggacgctcaagtgtcaaatttttatggtcatgtgatgctagggctcaggattcatttcctctattttaaatcaacccaatgtttccaaaacatgttcttttatcaatttgtgcattcctccaagtccctttcgggcgtctggggaaattatcacagcattcacccttcaggtgtagacacgtttttctcttcaaaaatcggttatgatcaatgagactttttttcaaaaaaaag

SEQ ID NO: 170324 - DNA, 379 bp, Glycine max
tgcaacattgatcatcctactacgacgagtgagaacactggcgccaataaagagggtgacgatgaacgacatacccatgctgtgactgccattcctgtacggccaagtttcccaccaaacccaacaatgtcattactcagtcaataacacaccttctctctacccaccacccagttatccacaaaggtcatccttatatcaaccacaaagcctgtctatcgcacttccaatgacgaacaccacctttagcacacaccaaaaacacccaccaagatgtgaattttgcagcgagatagcctgtacaattcaccccaattccagtatgctatgctgactctgctccatatctacttgataattcaatggtagccataaccct

SEQ ID NO: 170325 - DNA, 421 bp, Glycine max
agcctccaagaaagattatctaaaatcatgtatactcgcaagcaaagcaaatgtcccctctaataaaactaaactcatatgggaatgcaaaagtctacacacaatctccaataatgttaccaaagtttttaagcaaaatacatcatcaaagcggagcggacaggttctccatgtgaaatgcaaaacaagcaatatgcctaagacagattgcactgaaaaactaagcctaatactaaccaaaagagaacttagttaaacctaacatgcttaatgtcaaacaaaatacacatcccacaccatattattatattgaaagaaaatttaatgacaaaaatcaggtagcctaagtcaaagggtattcatcattatgcccccatgaaaaatgaaacactatatttgaaaatatgctgaggactccatt

SEQ ID NO: 170326 - DNA, 346 bp, Glycine max
  unsure (1)..(346): unsure at all n locations
ttatatgctcatgtatgatatcgtttgcctgcatagatagtgcatgattacttgagatgctatacactgtcaattgacgccccttcgctctatcttatggctctgtagggattatactgctctttgaggcaaatgcttgaggttggttatttccatgccgatcctcatccaggataccttgttgaataaatgatggatctctcgcatatgttgactctggaatgatggnggatattccaaggcattaccggattgtgcttattcacatggtgagagatgctcagatattactcatttttatggatgtacattaaatggattagttataacttccactacattctat

SEQ ID NO: 170327 - DNA, 374 bp, Glycine max
agctatgctatatatttggtgatggaggttgttgtaccaatgttgcaagttccatgttagtgtccaaactgaatttggatactaagcctcatcctaggccatacagacttcagtggcatagtgaatatgaagaggtgaaagtgactcaccaggttgaggtgtgtctcaccattggaagatacaatgatagggtgttgtgtgatatggatccaatggaggcaactcatatactattaggaagaccatgatattatgacaccaaagcaatgcatgatggcttcaccaacaaaatctctttccagttccatgaccagaagattattcttaaacctctatcccctagagaagtgtgtgatgactcactcataatgaga

SEQ ID NO: 170328 - DNA, 473 bp, Glycine max
  unsure (1)..(473): unsure at all n locations
tttatactctaaggaggccatcacacgacgtcctcctatctctntatccncncnctctcagacattatcccaagttgttctaaccatttnctgatctacattagtattgcctgaagaatattggatactcaaccctcccaattcttcaactttgggcactacatgagtccatttgagttgccgaagcactatggctggggtatatgctcaaaactacctagagctgaaaattgtatcctttggaaaataccaagggcatacccatggaaaatggtcgacttcatatgttaagtgttccttcttcactcagcacggtgtcgtttcttcattgacattcaatgaaatcttcttagaggatcgatggcataacccatgtgaatggatacatacagatgagttactatccaaacatacaacaaatgcgtgcaacatcgtagtggccctctcttcttttcatgacatagcttcatgga

SEQ ID NO: 170329 - DNA, 365 bp, Glycine max
agcttttaggcattcattatatgattctttatccggagactacaacaatagttccaaacacccatgatattttgtcactcgttaaccatatccacgaggagtttgcattctgcactgagattctttgtaatgtggaacacacataacaagttggttgaagaaggaaatagtctccaatgcattcatgaaagcaaatcccattcactaacaataacctaaggcgacacgtcatctttgacaaacaatcctttcaccttacttaaagtccattcaaaattattcgttccctcataatttaaataagtcacggcaacaatcaaagtcatgtttgtagaagcatatgttatatgaagttttgatgatgc

SEQ ID NO: 170330 - DNA, 503 bp, Glycine max
  unsure (1)..(503): unsure at all n locations
tatttatcatgcctaanaagtaactaatnatcattgaannatgttaaaacctttatatcctagagcaccctagccattttatttctcaactctcaaacctgtcatacttaaagttctcacggattggatctacagataaaaaaaattaaaaaataaaaataaaaggcatatattattaatgcagacaattaattntcataanaattccccatgtcaactaattaacatgcaacaatgtaagtatagctgacaataattgtcaagttcggtattctatacaataatatcccggaggaaaagctataaattagttaaaggaacataccttcaatgcatttacaaatatgccgctagattcagtagaaatgtcccattgaataaatataataaaaaacaatattcgttactcagtagttagtagtctcaattntgagttataaaatannaaatagtcatcaacctcgtgtcaaacagaatacatatagcgagagctgaatcaactt

SEQ ID NO: 170331 - DNA, 376 bp, Glycine max
agcttaccaccataggatgccatggataatatctagaaggtatgagaagatgagtcgagggagaaggagagaatgagcatgaaattttgtgcctcaaaagaggtttgaaccttaaagtgtaattctcaaatgatcaaagctgaaaaaatgcacacacatgacctctatttttgtctaagtgtcacacaaattgagggaaattgaattctattaaaattgacttaatttgaaatgaatttgggagccaatttggagccaaatttcctaatatgattatgaagtatttcccaaacaacttcaatattactatggttggaaatacaaataccctaaacaaaacttttagggcctaaatcaggggaaaaatctattttag

SEQ ID NO: 170332 - DNA, 414 bp, Glycine max
  unsure (1)..(414): unsure at all n locations
tccatcaagtggtaatcagagcactaagagcttcaagtaggtgctctcttatacctccattaattnttcgctttaccttctcttccattgtgttttcttcatttntctccatgtatctcctcacatgtcttgtgataaatgttgttaacatgattctttatagtctccaccgattaaacttgctatagaagctagaattgattttctatggttcaaacttcttgttcttgttcttgaaccatgaattgtgttgagtttaggctcctttgagttttgtcctgttatcttttgtggctaacacctaaaccatacaattcttacaaataaattaaagtagaataaaacttcacanatctacagtgacttgttcacctattgtagttttgtcatacacgtcatgtctagtcatgaaac

SEQ ID NO: 170333 - DNA, 433 bp, Glycine max
agcttgcctcgttaattaaataaaacacttctcattgagtataaatctgataatattcctttacattcttaagcaatttgaaattttagtttagtagttttttcttggaacagattcttagtcttgtttttttctaccctctctacgggtatgaatgcttttgcacacccttaaattgatactattgctgctaattcttagtctcatccatcaaggtaagcttgcctcgttaattaggttaaataaataaaacaccactcattgagtataaaattgatactattgctgttaatcttatagtaagttgggctccacttcgccttagccgtttagttgctgcataaggtgtaatatttgaaaaaaagaggtgcagttttgcaaattgtggattcgaggaattaactccatttttgcaaataataaataaataatg

SEQ ID NO: 170334 - DNA, 364 bp, Glycine max
  unsure (1)..(364): unsure at all n locations
ngataacacgcaatgactaatgtcgtcttctgcgccattcgtcaatcgcggctggacaaacccgtgacacgcggagaattacgaaatcttccgcgctcacaagatctgtcatactgactcttgagtcacgctgacgggcagaaatacccgagtggttatccgtataaactttttgctgtctgttagacaaaaagcttgatagcacgcagagactaatgtcgtcttctgcgcccttcggtaattgcggccgacaagaccgttgacacgcggagatttacgtcttcttccacgctcacaagatctgtcatactgactcttgagtcacgctgacaggcggaaatacccgagtgtgtatcgtataaac

SEQ ID NO: 170335 - DNA, 213 bp, Glycine max
  unsure (1)..(213): unsure at all n locations
ggccatttgatgcgactgnttcatttctttgtataagcactcaccgctaaaaaagtatcgcgttgctgcatagtctgctcctttaaaaatcggatgactactatttgctatcacccgagcttgctatgataagaaaacttgccttgggtgaacccgatcatgattgaatccttatgtaaatgaaggttccaactatctatgcccgattgatac

SEQ ID NO: 170336 - DNA, 353 bp, Glycine max
catatatgatctcctgcgaagttaaaggacttaaactaaacgttgcttacttcagtcatgccatatcgttccaataagcgatgcccagcgatggcttcccattcttgcataacaggcagcggaagtgcagaggacccacacatctgaatgctcacatgataatggtagatttctcagattgaattagaagtcagcactatacattaatgcacgagaacatgcaacataacttgcacgcatgcccatgcatggtataataccacaccactaagttacacactcgatcaatcaaattataaattcaatatttgtcattcgttttaaattcaaacaactctccatctatgttctta

SEQ ID NO: 170337 - DNA, 375 bp, Glycine max
  unsure (1)..(375): unsure at all n locations
agcttcaagtngctcattgactccaaattgctgcaaagaagggcagagatctgtatggtgatctgcagaagaacatagaccacagacacttgcaacaggtgcatatttctgattcatggcaagctgagttactaggttgaccaaggcatcaagttttccctcaagctttttattttcaatagatgaagatgaatccgtggccacctcatggactcctctaaggacaatagtatcatttcttgcactgaattgttgggagttgaaagccatcttctcaatcaaattcctagcctcagcaagagtcatatcaccaagggctccaccactggcagcatcaatcatactcttcttcatgttgctaagtccctcatagaa

SEQ ID NO: 170338 - DNA, 390 bp, Glycine max
  unsure (1)..(390): unsure at all n locations
aatcctcatatctcaataatcttagctctacaatttcaataagattggttgcatgctaggaagattccgaccatcatccttatagctccaaacaatgatgcttcttctcaacagaccaaaccaccacaaggtatcataatatgcttcttctgcccaaatcatcttggagtgcgcatatgtttatgtgatgatcttgngcattttcccgacagcaaaaacatcttgcaaaactagcagccccaagactatggaagctgaagcttgntgactatggcaagctctattctggttgcatgcataatcttacatatcataacattctatttgaagctgattgcacatatgctngtgatgccgctattgttcctatcaagtgccaatctacatatt

SEQ ID NO: 170339 - DNA, 436 bp, Glycine max
agcttaggggtctgcttaagaaggaccttatatcgatattttataggaaacttcagccggcttaaattttcacgcgatgggcccaacatcttgcattacttgcatgatcttcgtcagctgaccaaggcccttgggttacccactctggttttagcaaatatggacattatgtttgaacaatgaccatggtaagagaggcagaagggagtccggatcctctccgttaccccaaagaaatggacatctcaatttttactcttgaacatcccatgccatgtgctcttgaatcaggatatgacctcccacccctgaacgacatattcaatattgttccaatgcattaatactaacaacgaagctttctattttctctcctatcctaacattttcacctatagactttttaacacgcccaccggagaaagaatagaattta

SEQ ID NO: 170340 - DNA, 433 bp, Glycine max
  unsure (1)..(433): unsure at all n locations
tcgctatatgtatgtcattgnggtcctgccctgacacatgttctctanatgttacaaggaagtanaanacataattgaaagattatgtggtcaacgttgactgaaanataatctccaccaatatcagtaaaaaattagtcttggtctatgctagcccaaatcaattaacgtttaaattcttaaatcaaaaataattgtcttatggaatgggaaacctatgtctctggcgtagcacaaaaaacacgtataaataattacagttgaaattctttatttatagatagatattctttcttaacaatagtgttaatggataggtacaatgaactctttattaaatgaatcacaatatattaatggattatcttgatccattgnggatacgtattatgatcgatgtaatccatccatctgtcactctactgtatgtgag

SEQ ID NO: 170341 - DNA, 404 bp, Glycine max
  unsure (1)..(404): unsure at all n locations
tagcttgactttcttctatcaagtaaaggatcttgcctactanatgatctcatctcaaaacaccttaatgtaactagcaaaggtgaaagtctctctactattgatagaacaatgacatgatgcggttaacaagcaatttaacgaggtgcacatggaagatatccgacccacaacaaagattaacacttaactgattaggagacaataattttaaatcaagaatgatcacttattcagaatcaacaacaaatattccaaatgaattctataaaccaaaacatgaccatagtgtacacacatatggagacgtcagacagtttgacataatcttataacacaaagaatgaattatactcgggcctgcaagtgtaatggagttactcgacttcaacatgccacacaaa

SEQ ID NO: 170342 - DNA, 378 bp, Glycine max
  unsure (1)..(378): unsure at all n locations
tacttntattcgttgaccacagagtggtacctggagatatgtcgcgcgggtcacgagacctttgggacgtcacgtggggtgctattgcccaaaaccaagcttgaccaatcccgacccaacccgggcatagtcggtcagtgagaacctgtgatgtacctaaacaggcgagctcctggcngtcaacagataaaaggaacaaagaccacaaagcaaggaggcttgtggtggctggccagctgtgaatattgtgtgatatgtggattatggcccctggtaatcgattaccaagggtaggtaatcgattaccaagggtaggtaatcgattacaaggcttaaaagtgaagacaagaggctaagatggtctctggtaatcgatta

SEQ ID NO: 170343 - DNA, 437 bp, Glycine max
agcttaagctccttattctgcaaaggctcttaatatttgaagagtatccttgtggaaccttcacccgacgaagacactgacaaaaacttatcttttccttcttggacaaagtatggcaggctgggggcaagtaaattttcttcccatcagaccttggatgcaactgtgatcgtatgcccatatcagctagatcttgacgggtattcaagtcatccttcatcttgccttgaatgttaaggagcgttccaatcacactgtcacaaacatttttctccacatgcataacatcaatacaatgtctaacgtcaagatcagaccagtacggaagatcaaagaaaatggacctcttcttccatatgcaactctttactttatccttcttttgggtattcccaaatacaatatatagatgttgagcccgccgatatacttgttca

SEQ ID NO: 170344 - DNA, 395 bp, Glycine max
  unsure (1)..(395): unsure at all n locations
tattaatgaaatatgcctgtattccgatatgtcttgtgggtcccaaaatttcttaatgaatttgaaattaacaccgtccggaccaggggctttgtcgcttccacagtcccaaatagcctccctcacctcctnctcctgaaatctccctaccaacatgtcattttgctgttggttaattgactgaaatcggataccgccaagagttggtctgctaggttctggttcatgaaatctctgttggaagaaaactctaactgcctctntcaccttcctaggctcatccacccatgcaccttcaatcatgaatgcctttangagattatgtctgcgggatgcattcatcatgaggtgaaaataccttgagttgcagtcaccttctttgagccatctggatc

SEQ ID NO: 170345 - DNA, 368 bp, Glycine max
taagcacctgggctgcagcttggggatattttaacctcccctttatgtgttcaatagtgtgaagaatgtgcacccaaaaattcttcatagagagttttaatccttgcatatgaaggagtttgagttaatttcatattttggcaatatggtgataatggttgtgaaccgaatgaagcgttttgaggatactatggaaaatgtttgtgtggtagagaagatccttcattctttaactgcaaaatttgattttgtggtttgtgcaattgaaaagtcaaaggacttagaataaatgaccatggaccaatagttggttcactttaagcatataaagaaaggttcaaaagaagacatgataagcgtttggagta

SEQ ID NO: 170346 - DNA, 531 bp, Glycine max
  unsure (1)..(531): unsure at all n locations
ctctctaatacaagtaccctcaaaagagacaacgatgataataatattatatcctcagacagaatgcaagcacatgtgtgaatgcacacaatatcctctcctttcaagcacacactacttagaaccagcaaaaagttagatcataccaaagaggcgtaataaatgttcagcaccatatatggttgatggagacacattatccacaattgcatcattatatcgcttgcgttcttttttgtacaagagcatcatatgcaatgctttatcacaataacaccttattcctttcaacatttctcctattgaatcatgagcactgtatcacagagataatgtacatgctntcatagttagtataaggtgttcacagcctacatctaacagctacaactnaatgtacaagatgagtatataacacaaataaatagacagtgtacaataggacgacnggactgacatttaaatatcaatctatctctacatgccatcttctttgatttgattcaaggactttgcagaattcataacagt

SEQ ID NO: 170347 - DNA, 360 bp, Glycine max
agcttgcagtggaaactcgctcaagcctttcatatttaaatattaagttagttattttaacaaaaattgatcctccaccaaataactgtcttcgtccctagtttaataagtttcactcttgcacgagagtcgagagtctctggccatatttaaaaaaaatgtcttaataagtatttatgaaaaaaaacacgataaaatacgttaaattttttatgtataaataatttataaaatctctctcatttaatttatctaaaatttaattttaaaaaatattttattttatctttttattttcttcttttataagtgtttcttttttttgtaaattatctaaacaaaatctcaatataaatcaat

SEQ ID NO: 170348 - DNA, 445 bp, Glycine max
  unsure (1)..(445): unsure at all n locations
tggatccaaccaggcctacatagttcgattgaacacctgtacgacaagacaggatttgtggattcaagtaaaatgaccatatttcgttcacctcttcttcattgtccggatcgacggtagggaaatagtcagtgaaccaggccgggccaacttctcgactaatgaatggaacatgttgcggaagaaacttgtcaaagctcaggaaaaccctcatatactttaggaacagcttttgtgagcttggatccaaggtcttgggcgttagtcgaagtgctctctggccttcgatcgagcgatttgcaacttcttcagcataatcctgcgggattattaatcccactttctgttcanaagtggcatttagccacaactggagacgcacatatgcccagacactaagaacgaagaaccactcttcgatttcttcagatcatcgcatgcctca

SEQ ID NO: 170349 - DNA, 489 bp, Glycine max
  unsure (1)..(489): unsure at all n locations
ggtgatggtcttcaccgttcactttcggtccttctatttcccaacatcatattcatgagtacttttgacgtgatcctctttattcactccttccacttcaaccgttttgtctgcagtagtgcatgtttccaatatctctggctccccagatacactatattcttttgtctcttcctgctggtgctcaatcttttcttcatcctttctcagaaaaacttcagagccctccagtactttgtcatcagctctatcttttaatgcaggtagttctccatcagcagcattggatgtttcctcttcaataggtacctcaaccgtttctacagctctagcttcttctccataacgagtggatctngtgacatctgtatctctcacacatcatgtcatgatttcgttacaaccaaccttctcttctctatatcattatcacccttagcggngtcatcagcttcttgcatctctgcttccttgtctcctcttcttttc

SEQ ID NO: 170350 - DNA, 376 bp, Glycine max
  unsure (1)..(376): unsure at all n locations
agctcggttattatgttatatgaatttctacatactaggaaagaaggttctgaattctgatgatacccataatcttgttaggtgcccgtcactgtcagaatatatatccttatggtgcattaagttaatctttcattatttcaacttcaatggtaacagtgttattatcacgatgagaaggcgcgattatttcgatatcctgatcgtttctttagtttaagatatatttttgttgatatacacttaatttggttcaaaacaagntatttatgatataacaattatataaaaaaactaactgaaagataatcattaaaataataaaattagcatttaagcctacgatcatgcgtgccagattactctaatttaccta

SEQ ID NO: 170351 - DNA, 249 bp, Glycine max
  unsure (1)..(249): unsure at all n locations
gacttgtcaagttctgtatatctctgngaaccttcaccatttcatggcatttccctatcttcaactctgcaagaagaggaattgctccttcatcaatctttatggtcttcaactctggcaaggactcaaggcacaaaacctttagtctcttcaaccatccattcttgaaatgcaactcatcaccaccataagcatcatagaactcaaggtacgacaattctgacaagtctntaaggaagggcatggatc

SEQ ID NO: 170352 - DNA, 400 bp, Glycine max
tgcttccattgttcaatttcgagcgtctttatatattatgtgcccgaatcggacctccgtgtgaaaagttatgactatttaaatctctcgtgagcatctgtcgttcaatttcgagcgtctcgatatattatgggcctgaatctgacattcgagttaaaagttatgaccatttgaatttctcgagagcttccgttgttcaatttcgagcttctctatatgtgatgcgcctaaatcggtcatccgagttaaaagttatgaccatttgaatttctcaagagcttccgttgctcaatttcgagcgtctcgataaaatatgcacttgaatcggacctctgagtgaaaagttatgatcattcgaatcgctcaagagcttccatggttcaatttcgagcgtctcaat

SEQ ID NO: 170353 - DNA, 401 bp, Glycine max
  unsure (1)..(401): unsure at all n locations
nntaactcgatgtccgattcaggcgcataatatatcgatacactctatattgaataacagaagctctcgagaaattcgaatggtcataactcttcacacggatgtccgattcgggcgcataatatgtcgagacgctcgaaattgaacaacggaagctctcgagagattccaatggtcataacttttcactcggaggaccgattcaggcgcataatatatcgagacgctcgaatatgaacaacggaagctcccgagaaattcaaatggtcataacttttaactcagaggtccgattcaggcgcataatatatcgagacgctcganattgaacatcgaaagctctctagaaattcacatggtcataactcttcacttggagggtcaattacgcgcatcatata

SEQ ID NO: 170354 - DNA, 424 bp, Glycine max
ttcttgagatgaggaagagttgaagggtataacttcctgcttttattgtcgaccacagagtggtacctggagatatgtcgcgggggtcacgagaccttgtggacgtcaggtggggtgctattgcccaaaaccaagcttgaccaatcccgacccaacccgggcatagtcggtcagtgagaacctgtgatgtacctaagcaggcgagctcctggccgtcaacagataaaaggaacaaagaccacaaagcaaggaggcttgtggcggctggccacctgtgaactttgattgatatgcgggttatggcctctagtaatcaatcaccaagggtgggtaatcgattacaaggcttataaatgaagacaggaggcttagatggtctctggtaatcaataccaggggatgtaatcgttaccagcttgaaatg

SEQ ID NO: 170355 - DNA, 361 bp, Glycine max
  unsure (1)..(361): unsure at all n locations
ctgcttttattcgtttaccacagaatggtacctggagatatgtcgcgcgggtcaggagaccttcgggacgtcaggtggggtgctattgcccanaaccaagcttgaccaatcccgacccaacccgggcatagtcggtcagtgagaacctgtgatgtacctaaataggcgagctcctggcagtcaacagataaaaggaacaaagaccacaaagcaaggaggcttgtagtggctggccagctgtgaactctgattaatatgtgggttatggcctctggtaattgattaccaacggtgggtaatcgactacaaggctcaaaaatgatgacaggaggctaagatggtctcttgtaatcgattacca

SEQ ID NO: 170356 - DNA, 416 bp, Glycine max
  unsure (1)..(416): unsure at all n locations
agcttctggtgggacatctngactngctttccaatctgacattcaccacagatnctgccttcttctattttcagattgggaatgcctctaacagcacctttgtcaatgattttcttcatgcctcttaagtgcagatgtccaaatctttgatgccatatattgacttcatcttctttggagactagacatgtggaagagtaactggtttcttgaggtgtccataggtaacagttgtcctttgatctgctgcccttcattaggacttcactcttctcatttgtcaccaagcattctgactttgtgaagtttacattgagtccttcatcacacaactgactgatgctgatcaagttcgcagtcagtcccttcaccagcagtactttgttcagactaggaagtccttatggactagcttt

SEQ ID NO: 170357 - DNA, 432 bp, Glycine max
  unsure (1)..(432): unsure at all n locations
tcatactaagctgaatcgacatccgtgtgaaagtatgaccatctgaatntcacgttatcttncgttgttcaattttcagtgtcactatatgtgatgcgccacaatcggacattctacttatatgttatgaccatttgaatctctcaagagcttccgctgtacaattctgagcgtctcgttatgtgatttgtctgaatcggacatncgtgtgagaagctatgaccatctgtatttctcaagagctttcgatgttcaatttcagcctcttacatattatgcgcccgaatcggacatccgtgtgagaagatatgaccatatgtatttctcaagagctctcgatgttcaatttcaagcgtctcgacatattatgcgcccgaatcggacatccgtgtgaaacgttatgaccatatgaatatctccacagcttccgat

SEQ ID NO: 170358 - DNA, 461 bp, Glycine max
cgctgggagaggatgcttcaatggaggatttgatagagggttataatgagagaggggggagcacgaaattgaaggaagaaaaaagggagagaagttgaactttgagttatgtctcacaagactttcattcatcaaagatgcaacaagtgttacacatgcttctatttatagactaggtagcttccttgagaagctttcttgagaaaacttccttgagaagcttctttgagaaaacttccttggcaagctagagcttagctacacacacccctctcataactaagctcacctccttgagaagcttccttgagaagattcctaaagaagctagagcttagctacacacacctctctaatagctaagctcacctccttgagatgaaaaagctgggcttagcttcacaccccctataatagctaagctcaccccatgacaaaatacatggaaaaaccaaaaaagt

SEQ ID NO: 170359 - DNA, 484 bp, Glycine max
  unsure (1)..(484): unsure at all n locations
ctaagctccccgttatggggatncatanatgtggactaggtggcggtctgtcgatggtgtataacaattctccatatccacacattacgtataaacccaccatccgctgttgcccacctncaactgagctcacgtactcccacgtagcccttatcctcgttcctctcaacaccgggtccccattcaatccttccaagcttccacaacatccaggtaattccacatccaatcatcatggactcacaaaaccaagcaaaacagggcaaaggcagataactctgcccaaaacacaactcacaatcacagctnttcacatacaaataccccagtaacagttccttcgttccaattctgtaaccgctggatcgactcgaatattntactggcagtctctagtacataagtctacatttcgaccgctgggatctgctagcanatggtcagaacccgatatgtacctaccttttcacaaccagccatacac

SEQ ID NO: 170360 - DNA, 440 bp, Glycine max
  unsure (1)..(440): unsure at all n locations
agctntgtttcttgatattgcatgctctttcaaagggagggtaaaagagcttgcaacacaaactctagaaatttgtgaccgctatccagcagctggaattgaacttctagttgaaaaatcattggcaacttacgatggctttactatagggatgcatgacttgcttcaagaaacagcaagggaaattgttatagaagaatctcatgtagatgctggaaaacgtactaggttatggtctctaaaggacacaaatcaagtattaaaatacagtanggtaagattatttttgtctaactaaatttcaattcatttatatggtagagtttaatttgnnngtntngcctgcataattttacattcctaattagttgatcatcgcactgaattggaggtaattataatataatcaaaatcttatcgtttgtgattgaatgatatgt

SEQ ID NO: 170361 - DNA, 326 bp, Glycine max
  unsure (1)..(326): unsure at all n locations
atatcatgatgtattcgaatctcatatnattctcattacttcggttcttatagttataacattggaggtagataaatatgtagagtagcaaatgtatgcttggtgttagctagcttttaaaattactgcttcgttaattatttgcagagcaaccttatgaccgcatcccaaatttattgctgcacatgctctaacactcacacgaatcgggagaaatgaattcattgaataatgaacaagtgcccatatacgctctgtnaagactctcttcctttcacattaaataatcttaatactttggatgcatgtttatattgatgcacatt

SEQ ID NO: 170362 - DNA, 467 bp, Glycine max
acctgcggcatcaagcttccgacttgcataagttactatatgctttatctttaggatagcgcgtgagagacagaaagaaaaaacacaataattgagagagataatgtgaatcgaatgcagaattattttagttcaatcagaagtctcgtcctaagtatattcgacttaaaaagtgatatcaataaaaaaaatgagagagtctggttgataattaatgttcgcataattttatattaaaaaaacaagtttacttagtccaacaaaggttgagacaaccaaaaccttgcaaattgagtccttgaatctactcttccacttttttcccctttttctctccttctccaaaaacaaaaaatactctggaaaaagatatttcgggcagtaacgtactctttcctaaactttagaaaagatagataatgaaatgatgacgcggttgaagaattctggtaacactccttaaagtt

SEQ ID NO: 170363 - DNA, 463 bp, Glycine max
  unsure (1)..(463): unsure at all n locations
ctaagctngagganatatgaatgagaaataaatctagttctacatatatatttataactagtattaattcactcgttctactttatctaactctaatgacaaagatcatttcgattagatctgaattgtgtgtgtatatgtttgcgacaaaataatccaagaatataatgtagattctgtaaaagtgtgtatgcgcctgtccggtacgactctatgttatgttatcacaaggtaaattaatagacaatattacaacatatatattagatatctggcatacgtaccgttgcagcgttgcattactcagaaccctgatgcaaatattaanacaattacctcgaagaacttcctttaactttataaacatattctntcataacgttgtagttcgaagtttgatcattcctacattacagacgaaagaagaaaatatcacatctaacactaatgaatgatcatatta

SEQ ID NO: 170364 - DNA, 378 bp, Glycine max
agcttgagattgatcaacggaaagtctttataaatacaaatggtcataattttcactcacaagtctgattcaggcgccaaacatatcgagacgcttaaaattgaacaacggaagctatcgagaaattcaaatggccataacatttcactcggatgtctgattaagtcacataatatatcgagacgcttgaaattgaacaacggaagctgtcaagaaattcaaatgctcataacttttcactcggatgtccgattcaggcgcataatatgtctagacgctcgaaattgatcaacggaagctctagagaattcaagtggtcataatttttcacacggatgtctgactcaaggacataatatatcgagacgcttgaaattg

SEQ ID NO: 170365 - DNA, 236 bp, Glycine max
  unsure (1)..(236): unsure at all n locations
acttgtgaaagagagccatgagggtgggctcatgggccactctgggatagacacgacccttgtcttactcaacagaaaagtttattggccccatatgaagaaagatgtccatangcattgcactacgtgtgtggcttgtttacaagccaagtctagggtgatgcctcatgggctatacacacttcttaccaatcccatcttgacctttggtagacattagtatggactttgtcctt

SEQ ID NO: 170366 - DNA, 436 bp, Glycine max
  unsure (1)..(436): unsure at all n locations
agcttattgaaagaatttaattngtagattataattattatttgaactattgtagcaaatcttgttgaaaaatattttattctaatttatattagcctattttataatattatgttgatgatattaaatgaatcaattttattactttcagacatttgataatattgtattaattgtattggatttttggatgaattatgatataaaatagtagttttaagaagaaaaaaaatcaaatttagatggataactcgttggtctgaacggaaccaaaccgttcatgaatgagttggattggatttcaaaaaaaattgtggaaattgaacctaaccaaaccaatcatatctgattgggttgaatcctaaatttaatcaaaactgattcgaatcggtctacacacacccctacataaatacacattttaatttgatcttat

SEQ ID NO: 170367 - DNA, 266 bp, Glycine max
  unsure (1)..(266): unsure at all n locations
ttcttctatgttataactttgaagatggnactgttacttactcacaaaaggagacagaagaattatgatgcagtgttgtcgttttacctattgttattatatctagattctaatgcgtctgcatgcactattataatggtacactatggtggctggtgggctatacaacggcctcctatttgtaccacccctactcttatatcctacgacatcagccccttcggagcgctccactctcctcctcctttcactcccccattcactcc

SEQ ID NO: 170368 - DNA, 430 bp, Glycine max
  unsure (1)..(430): unsure at all n locations
ctgcaagcttgacgcagtatataaataggaattantgttatattaaacatcttcagaaaaaaaaggttggactgataatctgcgaaataataaagagaatccattcatcatatgttattggaacttcattactgtttgttctctttctttgttatgaaaagacatccttggagtttatcttcataacatgccactagaaaatgacttgggatcaagaactgtagtggtcggcttcttggattgatgttttagagtttcgtaatttgttttgattgacatctgatagggacatggtagttgtcacatctaggccaatgcttcatttgaataaagtcaacacacaaatgtgcaggacattttaagaccagacacccccagaagacaaagaggaatcctcctcaggacattcaaaatgcattctcgatcatta

SEQ ID NO: 170369 - DNA, 424 bp, Glycine max
  unsure (1)..(424): unsure at all n locations
aacgaggctaatcgacaagtgtaccgagtcgcagaagtaatataaaatggtaagaatcgagtatcaaatcatagggaacttgtttcattcaaagagcattcattcagtaggtaaacatttgtataaagtcagcaaatataacaagaaattgagttatagttctaatttaactactaacataactatctaaatgtgagagataaacagatgattaaaacgttgtgtcttcctactgaacctacttggtgttactaagtatttttctctatataacactgttttagtgttctattccgaacacaactcttctaaaccacgaatcctcgagtgaatggcctaactctatttaaacttcgttctagatccctcgttgaacttagcatanacgagctgcattaagaaatacgacatatataaactaaat

SEQ ID NO: 170370 - DNA, 397 bp, Glycine max
  unsure (1)..(397): unsure at all n locations
agcttgaaggcaaactgtatgcgttggtcaactnggtaacccagctggccttgaatagaaaaatatacacctgtcgcaagggtttgtggtttgtgctcctctgctgaccaccatacagacctttgcccttccatgcagcaacctagagcaattgagcagcctgaagcttatgctgcaaatatttacaatagacctcctcaacctcagcagcaaaatcaaccacagcagaacaattatgacctttccagcaacagataccaccctggatggaggaatcaccctaacctcagatggtccagccctcagcaacaatagcagcctgcttcttccttccaaaatgctgctggcccaagccgaccatacattctctcaccaatccaacaacagcaacaacccc

SEQ ID NO: 170371 - DNA, 435 bp, Glycine max
  unsure (1)..(435): unsure at all n locations
agtgataactcccaaggtggtcgcatctatctttcaaaggtttctagagatatcatccnctttgataacaaacattgtggcagtagggactaccaacgacaatgtatcatcaaagacaaaaactctagatgaggtttcactgtcattaagcaagtcggagacttagcatgaccacaaattcacctccacttcctatgttcccatggacccgggtatagggcccttaacaactcatagtgtgtacagtagaagcaaatatattttgatgttctgatgatgccaaaggatcacgcgcttctcaagcttctattcaagacaagaatcgaagaaattcaagatatatgatcaagataatctctagagtcttaggaaggaaattccaattngaaacaacaagagggttggccaaagaatatatagtaaaatgtttttaca

SEQ ID NO: 170372 - DNA, 380 bp, Glycine max
  unsure (1)..(380): unsure at all n locations
agcttggttattatgtaatatgaatntcttcatactaggaaagaaggttctgaattctgatgatacccataatcttgttaggtgcccgtcactgtcagaatatatatccttatggtgcattaagttaatctttcattatttcaacttcaatgttaacagtgttattatcacgatgagaaggtgcgattatttcgatatcctgatcgtttctttagtttaagatatatttttgttgatatacacttaatttggttcaaaacaagttatttataatataacaattatataaaaaaactaactgaaagataatcattagaaataataaaatagcatttaagcctacgatcatgcgtgccaatttactctaatttacctattta

SEQ ID NO: 170373 - DNA, 413 bp, Glycine max
  unsure (1)..(413): unsure at all n locations
agcttcattctacacctgaaaaaaaggatgagatagttgcacaaaagagacagcttcgtaacaaaaattttcatgcaagtggaccttcttctagtaattatgacttaccggagccttatatccctcttttattcccacccagagcattccaaacaaaaagatggaagaagccgaaaaggagatcttggagaccttcagaaaagtcgaggtgaacatacctctgctagatgctatcaagcagattccaagatatgccaagtttctaaaggagtagtgcacccacaaaaggaagctaaaaggaaatganaggattagcatgggcagtaatggtgtagcattgataggtaaatttgttcctcacattcctgagaaatgtaaggacccaggtactttctgtatacctcgcattattg

SEQ ID NO: 170374 - DNA, 400 bp, Glycine max
  unsure (1)..(400): unsure at all n locations
gacttcttctanatgatcttcattgtctcctttatcatttcctctggaatcttgttcatgaatattcatatgctctgaagaatctgcaatatcatctatcatattctttcttgaccagatagcattagattcatcaaaggtaacatgaatggattcctcgatattcatagcccttttattatatatcctatatgctntgctttgtaatgaatatccaagaacaataccttcatcagaatttgcatcgaattctcctagattatctntaccattattgagcacacagcatttgcaaccaacaacatgtagatgagaaatattacgttntctaccattatataactcgtatgggggtttcttttaaatgggtcttattaaccgccctattcattgatgtaca

SEQ ID NO: 170375 - DNA, 404 bp, Glycine max
  unsure (1)..(404): unsure at all n locations
agcttattctcatctagctactaccattctttcttaatttgngcataatttttttaagtatgcaatttgtgtttcatatggttattcttgtgaatttcaatcaagactttaacttgaatactatggccaccactgttaacacttgaggagttccatgactctatttttgttaaatttcaaattcagttatgatgcaatcctaccccgcaagggcattggatagaaaactgcaagtagattgggccagatatgcaagagaaggccctagggttcttatgagccttagggtagatctcgggcccatgggctaagtacgagcccacttatctttgtaaatattagattaaggtttcattatttttgggccttgtatttagggctccataatgtaggtagggtaccct

SEQ ID NO: 170376 - DNA, 459 bp, Glycine max
  unsure (1)..(459): unsure at all n locations
tgacatatctcgcttaagtacatagcatgtcacacttaagacaacttgacttcattattcatcttcaagggtcctctcgctcaagtgttgaggaaagtatgctcgagcgaggcatgctagtgtctccttcatatggttctgacttggctctcttaagctcacaacaagccatgcttaagtgagtataactcgtgttcctgactcaatttcctataaaaacttccacaaaaatagtaaaatgtcccaaaactaacaacctaaagatcctatccgataattcctaatttatactaattctgagttaaaacaggcgttagtgtatcacatatgtctgataattgcctcanatcatgtatgaaatatattttgcgattatcanagtacttcancattagaacattgcttgtctcaagcacaacaacttctataagaagtacactgacaacaattctaccatac

SEQ ID NO: 170377 - DNA, 400 bp, Glycine max
  unsure (1)..(400): unsure at all n locations
agctngaaggtttgtaacccaccatcttctcatagtagaacaccggnaatgtgtctactatcattgttatcatctcccttcccatcattgagggcgctacttgagctgctagatccctctacctttaggtgtattcttttaaagattcatactccttcttacacatgttctgtagttgcattctatctggagttatatcaaaattatattgatattgcctaatgaaggcaaccattaggtccttccaagaatgaactcgagaaggttccaaattagtataccaggtgacggctgccccagtaagatgggaaagagttcttgctttgcacaacatggggacagcctgtacttcacaatgcttctcctccttgacctacaacattggggattggacaactta

SEQ ID NO: 170378 - DNA, 411 bp, Glycine max
  unsure (1)..(411): unsure at all n locations
tcattctacacctgagaaagaggatgagctagctgcacataagagatagcttcctgatcatgagggagctaacaaanatnttcatgcaggtggaccttcttctagtagttctcacttgcagcaacctcctatccctcttccttttccacctagagaaattccaaacaaaaagatggaagatatagataaggagatcttggagaccttcagctaagtagaggtgaacatacctctgctagatgccatcaagcaaattccaagatatgtcaagtttctaaaggagttgtgcacccacaaaaggaggctcaagggcaatgaaaggattagcatggacataaatgtgtcagcattgatcggtaaatctggtcctcacattcctgagaaatgaaggacccaggtactttctgtgta

SEQ ID NO: 170379 - DNA, 458 bp, Glycine max
  unsure (1)..(458): unsure at all n locations
catgcaagctttaatgctagaaaatgtggatttcagnttgttggcttgataaagacaccatattggaagtaaaactcttgactgttaagtccctttggagagaagcgtaactgatgtgtccttctacaacctaatgttcctattcttgctcattccttagagtgcaaccaacaaaactggtatatgctccttattttgttcttgcataaggatttttttatcactttttgtcttaggaaagcctacgggatttttagattattagatttggttcgatcaaatgagagatntatactactattctaaaagataaagcatacttacttataatcattaatcagaagactaatgactttcttaattatgcatgtgacttgctcatttatttgatgcacgattgctaggtcaaaatcccctactgttaaattatatatcaagttcggattctaccttactgc

SEQ ID NO: 170380 - DNA, 370 bp, Glycine max
  unsure (1)..(370): unsure at all n locations
aaagagagccatgatggtgttctcatgggccactctgggatagacaagacccttgtcttactcaaagcaaaagtttattggccccatatgaagaaagatgtccataagcattgcactaagtgtgtggcttgtttacaagccaagtctatggtgatgcctcatgggctatacacacacttacccatcccatctgcaccttgggtagacattactatggactttgtccttgggcttcctagaacccaaagaggtgtagactctatctttgtggtggtggataggtttagcaagatggcacactctataccatgccacaaggtggatgatgcttnccacatcttataactctctttcacggaagttgtgagac

SEQ ID NO: 170381 - DNA, 340 bp, Glycine max
  unsure (1)..(340): unsure at all n locations
acgctgctggtggggcttctatggaggctatatcttcnattttttttgaggtccttaaatggtgattctccatcatggtgatgcagcataagactaagcaaaagtggctagaataggcgtcttccacaagggactatgccatggaagaaggatgttcaccaccatgatgagccttggatataaagcttggaaatgatgcttctatgcatgaaaagaaagagggagagaaagactgagggataatccctaaattgaaggaagaaaaaatggagagaagttgaactctgagttgtgtctcacaagactctcattcatcaaagtgtcaacaacttgtacacat

SEQ ID NO: 170382 - DNA, 305 bp, Glycine max
  unsure (1)..(305): unsure at all n locations
gaaacctttgcgaaatgcctcacggacgacgttacggaaacgcttcaggagcgcctccgcttagattntcttcacggaaacaatatttccaagcaaattcgaaagagagagaagggccgaaggggctgaaccctattgttcttcacttcctcccctattcatagcaaaatacgggaggtggttgccggccagctctctcaggcgagccaggttgcttcctccagagacaaccgtcttctggaggaatattctggagggcccaagtgagcctgtgtgctattagcacccccattttactaagacac

SEQ ID NO: 170383 - DNA, 450 bp, Glycine max
agctttctacaatcaactatatactaatttatattataaattttgaacatattatgttgttatatatgcagattttaaatcagatagaattagtataaccaaagagctgttttgctcaagcaagccaaacaattatatgcctaggaaaatgggtttgttctttcacaccactgaacttaagagaaatttttgggttggcactttctttttgcaagtatcctcattaaaactaagctagagtggcaagcgggaaatgggataattattgagttttggcatgataaattggtgtgtgagaattggattaatgtctccaagacgtggctaatatataaaatccttcccgacttgatccttaataaaattaatgtggtgactcatttgtgaatagcagttatgtttattcgcttgaaaattaatacattataaaaaagtacacttaatttaaaa

SEQ ID NO: 170384 - DNA, 488 bp, Glycine max
  unsure (1)..(488): unsure at all n locations
atcatattatcagcatatcataactagcttatcacaactggtcattanatcactatctcttgtataatgaattaatgatcatatctaatacaatatacatgattcttataacgaactgtaaaattcgtagtaacatttacaaatataattactaaaaatctaataaattattgccgtagaaataatggagacataattggttgtatctccaactagaaagggcatatccttntcatgcttcgtgttagttagttatggtcaatccaacactcttgtttcttctgctatgttggaacattcttttgtgacaactgataaccgaccgtttgtaaataccacccaagagccttgtcatcatgcaaatatagcgatagtgctaaggtccacaaaggcaccatgttatgtatatcaaaaaataaaccactcgctatcccactatatgaatgcaactatcgactgcgataatctttactttatgcttgatataa

SEQ ID NO: 170385 - DNA, 403 bp, Glycine max
  unsure (1)..(403): unsure at all n locations
agctntagtcaaacagaataatccaaatatgtcanagaattttgtattgaaaaagcataacaagactttctgtgattggtttaaagataaaatctttgcagatgagaatgcttcagaaacattaagaaaactagcagatgggcctaaaaggaatgttataacttggcaaggatacgacataaacaagtattcattttacaaaaaagcacaagatgacaaaagtacaatgcagaccagtggggtcaccctaagggctaaatcttaacacttcgcaagtgtgaatgacaccaatccctgtgtagcatccatcccttactttgggttcattgatgaaatttgggagcttaactatgtgaaatttattgtatgtcgtttcaaatgtaaatgggttgacagcaacacc

SEQ ID NO: 170386 - DNA, 119 bp, Glycine max
aaaatgatgaccctacggctgcaaactcctaaatctcgtgagatcgctttgaaatgaggcggcgaagcagtccttgaatgcaaaaaccttcccctcccttgtttatatatttttggtgc

SEQ ID NO: 170387 - DNA, 528 bp, Glycine max
  unsure (1)..(528): unsure at all n locations
cgtggagtcanaggagatgctcttcattngaatcacttatgaatacagatatcttagtctctaaaaaggtgtcaaaggattggtaggaagctatggagaatcttagtctctaaaaagttaatttcttccctcanagaattggtaagctcttcatttgaatcacttatgaatgcagatgaggaaaaccttacttttcaatnttatntaattgcgctcaatnttatttaattacacttaattaacttctggttatagcctttaccattttgtanaggtttaatcctctaatgagcttggttatattactggaatgaattntatttgtagttctcaagtactttttcctatgtaaaanaaaacaacttaagtctttgtgttcaatgggtaagcaattntgcagttgttatatcaacctttggcaacatttaacagtaggagtgggatatatatgctcaagaccctagaaatagtagaaatattacacggcaaagtttctatatctttcatttaagcatatatnatatcact

SEQ ID NO: 170388 - DNA, 388 bp, Glycine max
agcttttcaccactctaagggtccatttgtttgagaggaaggaaatagagtatattgaaatagaaaaggtgaatggaaataggtgagaaataaagtggaaattaaaagtgtttggctgaagagaaatacagaagaaataaggaaacaaataaagagatgaatggaaataggtgagaaatagtgtggaaaaatactagtggacccaccccatttccactctatttccattcaacaaacaaccaacattatttccactccccgtatttccactctccccaccctatatccatgttgccaaacagggcatacaagagcacactatgccactttataaagtataagggtatgttactgaaggggattgtgaatccggaggcaacattcaaag

SEQ ID NO: 170389 - DNA, 399 bp, Glycine max
  unsure (1)..(399): unsure at all n locations
atacttagactangtggaagtttgcaagacaaggtaatatatggcactgaagataaccaccaaccttgtacaccttttgttaagaacccttctgagatgtttggtttcactcaagggtgcctcccaatggatagatgggatgaacttaactacttttctgaaaaagctgggtaaaattcaattctccctgtggtgtgtatgtgtgttttgaactaacaagattcgccttgttgacttgaaaggtatatntntaataacactttanaactatctatntcagagctaagattatcttcggattaaatgctcttgctgganaatcaatacacagtggttctgcataaggaccttggaactacaccaatgccgagtcctttattcgatatactgttggaaatg

SEQ ID NO: 170390 - DNA, 388 bp, Glycine max
cattatatccctctgtttgtacaggttaagcctatggctttgactgtttatgttatatctcatggactgcgattattttctcacctctcctaatcaaaatatattatgtttcaaaatatgcacgagcttgaagagagcaaatttgcagctcttcaaaatatgcgagaaaaccaaggtcttgataaagggaatatggctgaaattgatggctatcaaaacttgtttagtttgatgaaatagaggtttctgagtttcaagaacccaaaatatatgtaagagtctggctgacattatttagctctgcaaaaattaattcttttgtatgataaagcttatatccttatttctttatacaaagagagtggagcatttcaagccttgctgaact

SEQ ID NO: 170391 - DNA, 374 bp, Glycine max
  unsure (1)..(374): unsure at all n locations
cttatgctncacacatgtgttatgctcttgaatatgccttgncttaataagaacacttaaagcaatcatcagtatctaagttcactaactctgcgtttgcttcatagtgactttgcttcattagaacgtatagttcttggagggactctatgtctcaatattaagcgtgttaatgccttgcttttctttctcccttcaattattatcttctgcattgtttcgttttaatgtcctttgaaaaaataacacaatatggtatggatggtgaacaacccaccatcgtacatggaactagaaactttctcaagcgaaagactttattataattcatttaaaactcttccatctatttgaatatgaanatacttgtaaac

SEQ ID NO: 170392 - DNA, 424 bp, Glycine max
agcttgccatataatatgcctgattcctcaaggatgtccatggtataatttctctagaaattatgacaccatcgtggattgtgccaccaccattctatgaaatacgaagtttttcaagatctttgccaaaaaatcattgaaaagaagtttcaactaaatgatgccaacatgccatggtgattgttagaaactacacatctattcaaataaggattctagaaggaatggtcaagtttccccctctccttttttaaactttacataagtcctattcagcactaattgtctctttaatttatatttttcagtcaattaacttgatctctaaaatgctcaataacattagatgtcaactcctttgtcatatacaagaacatgataccagtcaaatgattacgtacgagatgaatcatgaagtatctac

SEQ ID NO: 170393 - DNA, 457 bp, Glycine max
  unsure (1)..(457): unsure at all n locations
atctaatcattctaatccactcaaatcatacagtttctcattcaaatcattcacagacactcatttcatacaaaacaatccagtgcatatcaaattcaaccagttcactattcaaacaagctntntgtacaagcaatcaactcanagtactgaaatttaaagaactgaaacatatacgctaaaatttaaatgactgaacataaatcataaaataactgaaataaactaaaatgttcaaatgcacaaaattaaatgtcctactcctgtgattgctcttatgcatgctcattgagatccaacacctaagcagctagtgaatcctaagagataggttgttctaactcacatgttggtgcagatggcatggaatcatcacgtatgggtgctagagatggctctggaatctagtntgtggaaatctncnntctctaagccatatgtacacctgcatcaaaat

SEQ ID NO: 170394 - DNA, 365 bp, Glycine max
  unsure (1)..(365): unsure at all n locations
gatcttaagtcacctgcggcatgcaagctttgactaaatcaaagtctanacggtagatcatgaattcattgcaatttctagcaactactctacgtctccaaccaaggggtttcaggcactgtatggaatttgctgccactaaagattaaaaaatatagtggtggcatagttgaatcaagcattaacttttaagcacgtgatcatacagttccttatattgtctgacatcaatgactaagagatcttaatctcttttcttttggaatgaatattttgggttcggttttgactgtagacagcattgtcttgtctaccacacctgtggaatttactttgtagaactcaaattttgaatatagagatgt

SEQ ID NO: 170395 - DNA, 312 bp, Glycine max
  unsure (1)..(312): unsure at all n locations
tgaagtgagaaagtgtggaagagtcagtcttcctacttttattcgttgaccacacagnggtacctgcagatatgtcgcggcggtcacgagaccttgtggacgtcaagtggggtgctatttctcaaaactaagcttgaccaatcccgacccaacccgggcatagtcagtcagtgagaacctgtgacgtacctaaacaggcgagctcttggcagtcaaccgattaatgaacaaagaccacaaagcaaggaggcttgtgtggtggctggcaactatggatcttgagtgatatttggaatatgaccactggtaatc

SEQ ID NO: 170396 - DNA, 395 bp, Glycine max
  unsure (1)..(395): unsure at all n locations
agcttcctcnaagtgcagtttcccgggctcagaggtatcactttncgaaggttaaagatgccgacattgtttgcagactaaaaaaaatttgtgccgaagaaggccttgattttgaacaggatgcttttgactttatcggtgcaaaatcctgcggttctgttagggatgcagaaatgatgcttgatcagatgagcttgcttggtaaaaagatcaatatttctttagcttacgagcttgtaagtctagtgcttttgttccattcatgtgtttactacaaactaacctcatttttttcctcggtattctggcttacccctntaatgttctgcagactgggatcgtttccgatgatgagttgcttgatttgctggatctggctttgtcatctgatacat

SEQ ID NO: 170397 - DNA, 403 bp, Glycine max
  unsure (1)..(403): unsure at all n locations
agcttatgccattactgtaaacaactgttatattgctaataatatggataaatttgatgtccttgtctctcattctctcacaattacatctttgcttatttaacttctattggaatatgaatgtaagccattggtttgtttgctcaagtgacctgcactctcgagttgatctccaagtctgttcaatcagaaattgctcattctacacgtttggtgaaggtgctgtaaacaacgagtaaagtaaaaagttaaaaaaaaaacatttgactggctgtgtttcaaataaaaagtatagacattcatttgacctcattntatcattcctaaagttgtctttttgagagaaaagtgagttatcaagaataggagtcgttcgacttaatctgtcaattgaaaatccttt

SEQ ID NO: 170398 - DNA, 532 bp, Glycine max
  unsure (1)..(532): unsure at all n locations
ggtgtctacattatataggatatatatntaanatataatcattattcttaatanatataacaatatataatttctattaagaaaattatcaacataatttaaaaaatagtttttcaatatgatattaaaaaaattgcataattaatctaatattaattgaataaataatatatcaaatactaaattaattattacataatcaatcaactattatgttaaatatcggtacgaccaattaacaaagtatttgactntgaatttaaattaagtaacaaaattttgcatcagcttatgcaaaattggttaagtgaggtggtgagttgttgtaagctctaaaatagtttctctgatntctattgataaaaaagaaaattctcgagttattattatcggtgtcatatttcaactgacttaatgactgccgatcacatttaactncaatngatatgaatanatanaatttaatnntttgaaaaaataataaatntcaaaactgatgtaaatttgatcaatactatttgttcatgcatac

SEQ ID NO: 170399 - DNA, 402 bp, Glycine max
  unsure (1)..(402): unsure at all n locations
atcttaagtcacctgcggcatgcaaagcttgcattggaattgcgaaagccccactccatcattaggattagnacctgacatctcaaacaaacanatcaaacgtaacaagacaattatagttgctgtttgaatacctcacccactcaagtgtatcacacaattatggcttttctctaatgaaacactcttgccttttaccactctaattccccttgagttcttaggtaattcaagagattatggcacaacaaagaacaattcaccaatatgtgtaaggtaaggctagagagacaaggaaccaagaaaaatgctaacaatgtttttaggcacaaatgaaggaaataaaattcagaatttaggaattcaagtaacaatgcttcatgcaacccatatattacctta

SEQ ID NO: 170400 - DNA, 456 bp, Glycine max
  unsure (1)..(456): unsure at all n locations
ctgcacttggaatcgcgaaagccccactccatcattatgtattttacctgacatctcaaacaaacaaatcaaacgtaacaagacaattatagttgctgtttgaatacctcacccactcaagtgtatcacacaattatggcttttctctaatgaaacactcttgccttttaccactctaattccccttgagttcttaggcaattcaagagattatggccacaacaaagaacaattcaccaatatgtgtaaggtaaggctagacaaggaaaaggttaaccaagacaaaggctaacaatgtttttacgcaccaatgaacgaaataaaattcataatttaggaattcaagtaacaatccttcatgcaaccaatatattaccttanagagnatttttttttaagttcttcaagcatgaaccattcagcccaactattttcttttttaactatgcttatacg

SEQ ID NO: 170401 - DNA, 207 bp, Glycine max
acactttttttcttgggctgtaacatacctatttcctctcatgactttgccctccagagctcttcacattccgcttgtgactcttagctaaacaaacttccattctaaacaaaggagtgggtaacctaacacttcatctaaaaggtagggcaaacgtttgaacaaatatggatgtacatgaaaacctgactctttgggtaagctccc

SEQ ID NO: 170402 - DNA, 476 bp, Glycine max
  unsure (1)..(476): unsure at all n locations
ctgtctcgagtcatcaagagattatcaatatgtgaccattgcttgaatttcaataatataattaacatcacctctcaaacatctttcaatatctctctacaaaattatcagattcatttctcttcatctttctaacagattttgatcaacactttatcttcctagaacagttacttgttcaaaaacttgctctattcatctntttcattctcttctccctttgccaaaagaacgaaggactaaccacctgaattcttttgtgtctctcttctcccttaaaaaagattcaaaggactaaccacctgagaattcttttgattcttccctttcccttaaacaaaatatttcaaaggactaactgcctgacatatccttntctctccttcccaagattcaagggactcacccgctgagaactcttcgttcaacacattcgatgatacatcctttgtggtacaagtcgacggtacatctac

SEQ ID NO: 170403 - DNA, 373 bp, Glycine max
acgagctcactcgtaactaattacctttatattaccgcttacaacaagggagccagtctgacacttttcttggaatatttgctatagcaccagaagtccaatcccttgtgtgtgcatgggtttgttcctagtttataacccgggtgcactttgacccttcatttttaatttgttcaaggaaccaatacaagatccttattcaacctgcataaatgtgaagccaagcaaaaccttctactttgttcatatccactcactagtttgcctaagtacttgaataggggatgttagttgaatcctcataacaatggtcttgacatataaaatactgttactataaaacagaatggctctgaacatatacataaatccc

SEQ ID NO: 170404 - DNA, 406 bp, Glycine max
tgatgttatgctctaaatgtatacgtcgtgggtgcgatttatgctgtgataactcctgacacaccatggtgaaatccatcttctcttccccgaacaccatttgtagagaaggatcacatatgaagaatgaagggtcatttgggctctgtagcttcctggacttgacgtagttaaaaagagtagctattattcttgagcgagtctctacctcaatccctaaaagtttagacagtggtgatgaaaccataaacttgtcaggtgtataattcatttctattgcaatcagcgcagtaaattctttgtttgctttcctcttcacctcaaaaccatcctgttcggtaggggaacgagcactatcccatacaatgacatgattattgtgataaaggctttgatctaacagtat

SEQ ID NO: 170405 - DNA, 390 bp, Glycine max
  unsure (1)..(390): unsure at all n locations
tagcccttatgcaactgcctacatgctcaaaaatggcaaacatacgcatgccaaattgtttcgtaggttattcctcaaaaaatcatgcgcaaatgcctttgaggcatttcaccgagcacttggtgggcacatgtttaggcatgaatagcaagggaatgggggcaatgtggcatgcccaacctattcagaacacaacttaggcctaaagccatngcctacaaccttncaacttaacaaaaacaagcatcaattcaaggataaaatgcctcaaggatttgagcaagaatgtacaaatggagcattaaaatataccaatggaaacctanagagccaaagaatgaggtacttacttgttgggggtcaataatgatgccaaatggaaccaaaaac

SEQ ID NO: 170406 - DNA, 477 bp, Glycine max
  unsure (1)..(477): unsure at all n locations
tgtgcattcaatatcctgatgagggtgtttcatatgttctctagactggactaatacatttgcttcccaagtttcattgtcttgcaggtgaagatcctcataagcatcttaaggagttccatattgtttgttacaccatgaagtcccctgatgtccaagaagatcatatctttctaaaggcttctcctcattctctggagggagtggcaaaagattggctatactaccttgctcctaggtccattttcagctgggatgaccttaagagggtgttcttggagaaattcttccctgcatctangaccactgccatcagaaaagacattttaggcatcaggcaacttagtggagaaagcttgtatgagtactgngaaagattcaagaaattatgtgcaagctgtcctcaccaccagatntccgagcaactccttcttcaatatttctatganggacttagcaacatggagaagagtatga

SEQ ID NO: 170407 - DNA, 435 bp, Glycine max
  unsure (1)..(435): unsure at all n locations
agcttancaaatggacctaggggttgcccagtttcttcatatctttcgtaatacttatcacctctatcatatctaataattttcacatttatatctaattgccattttacttcattgtagtaaatttctaaggcatccattgcctaagaaatctcaagcagtaagtagacataaccgtaacgtgaataatcatcaataatggtgataaaatatcattcctttccgaaagaactaacatcaaaaggttcacaaatatcagtatgcataatttcaagaagctgagcgcttcttgtagctcctttctttgtatgttttgcttgttttcccttaatacaacccacacaaatatttagatccgtaaaatctagataaggaagaattccattctttattaatcttttcatcctttctctagaaatgagacctagacgttta

SEQ ID NO: 170408 - DNA, 460 bp, Glycine max
  unsure (1)..(460): unsure at all n locations
ntgatggtgttgagaagaaatacatgtttgtcatcatcaaaaagggggagaatgtgaatatgtatacatgattctgatgatgtcaaaagaagaatcaaacaaagttgcttcaaaagataagcatggcttcaagattaatacaagatctcttcaacaaaaaaagtcctgcttcaagattaactcaatatcaagtcttgccttaaaacaaagtgctttcaagacattcaaggctctggtaatcgattaccaggcagtgtaatcgattaccagaagacagggttgacaaatagctgttgaaaagggttttgaatttgaattttcaacatgtaatgaattaccatatttctgtaatcgattaccaacaacgaaacttctgaaattcaaattcaaaagtcatgacccttcaaatataactgcgtaataattacacagacattgtaatcgattaccagtggagagt

SEQ ID NO: 170409 - DNA, 437 bp, Glycine max
  unsure (1)..(437): unsure at all n locations
atgcagcttgacatcgcaatgtttcaatgaaatcctgaacgcatgaatgaaattgattcaacattggcatctttctcttcaattttgtttgtttagatgatgatgcacaacgtttcagtgtggatgagccattntgcaccaaatataatgcatccacatactcctagtaagacggatcacgcttcgttgatctttgttgtttgatcatctatttcttttgagcaccttttgttttgacattttcagaaggagcacacatccaatttatattagggtagacaatttcccgaagtttactctttagaatcactttgacacatatatcaagctcttcaaaccacttggaaatggcttccatctcttccgttatgcaaaattcgggctcagataaacccaggcctgagaaacttagccttcaacaaaacattattggacct

SEQ ID NO: 170410 - DNA, 423 bp, Glycine max
ctaacagacttattttgtttccaagtcttaatgttatcttgtagtttttcaagaagttattctagccttttatgttcgcctagtcttgttggagggagaggagggggaaggacaggaattaaggaattaaggaattaaggaatgaaatagtcattttcttcctttgaaagaagaatgaaaagtagttatatcactactattattattagtgtttggtttgcaaatatacttttaaagtcatgtaatcactttaaaatgttacgtgatttctttataaaaaaatagtatttatattcgtggtttaatatttatttctctcatcttcaaatcaaacaaactattactaattacatttctcaagtagaaggatgaaaatcctcaattagacttagatgaaagttcttaatgttttctcattctatc

SEQ ID NO: 170411 - DNA, 439 bp, Glycine max
  unsure (1)..(439): unsure at all n locations
cgggatccttaagtcacctgcggcatgcaagcntggtaagcagcacccttttccttgaactttcttgntgcctctgtatgaatcaacatctctgtctcacttaccagtcaaattcatgtatttcacgtgttcattaaatcggaatcattaattcagggtcgcccatcataaacgctgaagctagtttttagttnttatatagacgtcaaaattcatgtttgcgatccgtttcaaacacgtttggatgaggagagagaaaaagacaaggaaaaggaaaatcttcttctgcttatttaattcagtacaaaataaaaatgcaagtatatttaaataattcatatatatatatatacgacaatgagtcaatataacaactttctctcctcactatttntcttctcctgtggttattttgtagttattctttacaagatatttt

SEQ ID NO: 170412 - DNA, 472 bp, Glycine max
tacccaaacaggaccaatatatatcttgttcttattttcttctccttgaagcttacggagaagtttatccaattaagaaccatgaaataagcattcagcaaaatgcctagcaaatccacccattattgttgttctatccaacttagaaatagcaagcattcatcaataaataacaagacattttataaagtacagattagatttgaatttattcacaattggttataagaaaaagaggaaaaggatcgaagagaaacataacataacataaccttctgaagagtgaacattttgtcataaaggtggagcacgaggttcaaatcagcatcagagttgcggttctttaagttggcagcaacagcttccttgttatcctttatccacttgaagtctatcgtggccttccattgaggcttcacacctgacagagcaattttttttctctaaaaaaaatcacgttggttgctgagaa

SEQ ID NO: 170413 - DNA, 294 bp, Glycine max
agcctcaatgctgcccaagcgtttcgccacaatttaagaaaaaataacccacgccgttttgggaagaataaccactcctcgattgataaccaaaaatcatctctacgacaaatactcatattatcttcaggagggccaaaactccctcaacgaataaaaggcaatgaatgaaaactgtctaactagatggacctcagccattaatgcaatgtaaagaataaatactataatatcatataattcctcattcagataaattatatctaatataagcaagaaaacatgtggacacag

SEQ ID NO: 170414 - DNA, 471 bp, Glycine max
  unsure (1)..(471): unsure at all n locations
tcatacaattaacatagaacctatatcctaatgttatattctatcagagcgttgtgttcccatgtcctctnacatgaggttcttcatagtcatccacctattcatctgcttccccgaacacaaagttcaagatcatcacaggatccaaacacaaacagcaaaccgggagtgagttatcacattcctaactactagagagaaacaagacaacatatagtagccaaatacaatttacttagcatatctcacattatttcatcactttgtcattcaaaattcacttttcaatcatcaatcacaatacacaagaatcacacactccgatcaagacataataacacatcaatttcataataaaaaattagcaaacgtatgcaacagttatgctaagactcaagcctatatgcaatgtggtaccatgtcagtgagaaacctcgccgggtcttagagtacatgacagacacacacaca

SEQ ID NO: 170415 - DNA, 381 bp, Glycine max
ggatccttgagtcacctgaggctgcagcttggatttacatgtttttttcaatttaatcttccaataaaccctgaggagtggataacaaagcataacttcctcccaaaataatctcaatgtcatcacatccgcttgaaggtttccacaaaagaatctcccttcacatcatttactgttgctcatatgctcccacgaacaaagattcgtaatcatcacaggtactcaccacacagtacaaaattgcgagggtaagtttatataaaagaaatgcacaagcattacatgcacattattagccaggatactatatcagatatgtagaactcagcttcatgatgatgaatcaagttgattcatgtactttgatgatgaaaacgatga

SEQ ID NO: 170416 - DNA, 432 bp, Glycine max
  unsure (1)..(432): unsure at all n locations
tgacacanagaacaaaatagaccttcacatagaatagtatcataacatacgactgtgtttggcttttaaaattgtgacaaacctgaattggcaaagcatccatgtctgctctaagagcaacaaaaggaggagacccacaaccaatttttgtcaccacaccagtcccagccacaggccacttgtaaccaacacccaacaggtcaagctcacgccttatgatagcacttgttctgaactcttcatatgcaagttctgggtgctcatggatttccctccttattctcttcatccatttcaccgttctgggactattagctagctccagaatctgctgcttcagagaagaactttgattcgagaattcattattgcttgaaggagtttgaaatgagaaagagaagcatgtggtgggtagatacacgaagagtacga

SEQ ID NO: 170417 - DNA, 418 bp, Glycine max
  unsure (1)..(418): unsure at all n locations
agctatacatgatattgttgtatctaanatgtgactccttgttttgtgaagatcactgcttcttccaacattgtaatcctagtttatgtttatgacaatctaatccatattgttggtctttagctttctactcatggttgagcttcagtgcctaacccctcattttatcgatatgtgaccataaattatccttctcaggaaataaagtctgccagttcatacatttccctctaagcatcatcggaacgcaatcaagataatcttacaggttggatctatctgaataaacttctcccaaaatatttctaggagaaaaattatccgaaacacaaaatgaaatgagattcttcacacattaaaataaactcttgcatcagttaatttgtaaaaactctgtcatcttttagaaaagttatat

SEQ ID NO: 170418 - DNA, 397 bp, Glycine max
cttatgacacattaaaaagtggatgatatgaacttcattttctatctggattcattaattttttgacaaaattatactatagattcgagattccattcgggctttattcccagacagggaatgtttcactcttgtgagacctttgaacaacgaaaatgatctacagcgactggaccagatatcagtaagtaacctatcacagctggcatattcttttgtagtcattttgttgtctcttaacttttttgatattttatcttaaatatgcagatggataaattaagaactggatttcgagagggccttgattctttgacaaacgttgttttcgagagaacaaggccaaaacaagttggtgcaactatgatgactggacctgtattggtcggcataactg

SEQ ID NO: 170419 - DNA, 408 bp, Glycine max
  unsure (1)..(408): unsure at all n locations
agcttgtaatctattacacatatactgtattcgattaccanagccaatgttcagaaaatattctcaacagtcacatctttttatgtggttcttgaatggctatcaaaggcctatatttatgtgacttgagacacgaatctgctaagagttctttggatcaaataggtcttatccttttaaaaagcaaaatcgttttatcctcttacaaattccttggccaaattacttgtgaatcaattaggaattatttgagtgctcaaattgctcaatctatctttttcaaaaagatttcttctttcctctttttcattctgaaaagggaataagagaccgagggtctcttgttgtgaaagaattctaatcccaaaggaagggttgtccttgtgtgtttaaacttgtaaaaggaat

SEQ ID NO: 170420 - DNA, 427 bp, Glycine max
  unsure (1)..(427): unsure at all n locations
ntgtgaagctcctgtgatagctatacctgtttttactcttccatctgaagtagaatgtgacgctcgcggagttggcattggggctgctttgatacacaacataaggcctatagcttatttgtcggagaaattgggaggagccagattgaactattgcccctatgacaaagagttctatgccattgtgagagctgttgatcattggaatcattatatgcgtactaatcactctatattgcattcagatcatgagtcattgaagtatatcaatgggcagcataagttgagcccaacgcatgctacatgggttgacattcttcaatcttctaatttctcttcacaatacacggatggtaagagtaatgtggtggctgatgcacttctcacgaggtatgctgtaatgtctattctcgaaactcgctcactt

SEQ ID NO: 170421 - DNA, 432 bp, Glycine max
  unsure (1)..(432): unsure at all n locations
gcttcttgagatgcctttnggttntcttattatatgctctggtgaaatcaactatctcattaaagacatcgatatgaaaataatcaatgaatctagaggctagcacaacatacaaaaacacataatccactaaccgaaggctcttcaacatgatattttcaatcagaagcacccaattcacttgaatacctgattttagaccatacacgatttgtaaatcgttgtcagtcacctgtgcatggttgctagacattggtgtgagaatgtatgttatgagatacacaagcattctatctttagcaattaaaccacctacatctaagcgattcctcagattccttgttgagccaaggagcatacctctgtaagtttgcatcttgttgtaaccatcagcagattcttcaaacttgcgggctccacccatgtccagtc

SEQ ID NO: 170422 - DNA, 388 bp, Glycine max
  unsure (1)..(388): unsure at all n locations
nntagtttatcacttttaattaaatcaaatgacacaaacaaactaattatatttagtaaaatagttaaattaaaaattttaaaattcagattattatacaaaataaatatattattacacaaaattcagattttaaaatatatattcacccaaaaaatatcttaaataatttaaataatataacaaaaatactaaatttaataatatcattttcttaataacaaaattaaattataaaataatattagataaattaatttaataaataaataattttaataatatataaacattnttataaaaaaaaaggaagaaaggaagtcggggtgccagaacncgacttccgtgaaaagcatgaaagcggtgtactttcggaatacactcccac

SEQ ID NO: 170423 - DNA, 468 bp, Glycine max
  unsure (1)..(468): unsure at all n locations
tggatccttaagtcacctgaggcatgcaagcttcctcgtggcttctttgaaaaactttctcaagaggcttctttgagaagctaacgctntaactagtaacacccttttaataactaaactcacctccttaaaaataattacggataaaaataacacaacaaatataatcaaacatcaaacataattactaataatatgtagatatatatatcagggtgttacacgccatatgatgtgtaaagtaaggtaaatctcttgttcttgtttattctgaagttaatttagcttttatacctaaagatacttgatggatagattctggtgctactactcacataaatgtaaccatgcagggttgcctgtggatccgattgccaagtgatgatgaaagattcatatttgttggcgatgacaaaaaggttgcggtggaggctataaggaactttaaattgcagctaaagacctgaa

SEQ ID NO: 170424 - DNA, 436 bp, Glycine max
tagactgggctgtacccgagattgtggactggcgatatggccatagtttgaccaagacccattctccaacctggaactcgtggtcacgacggtgtctgtcggtgatagctttcataccattctgggtcttctgtagcttttgtcgaagtaaggaaaatatggattctggttggctgagtaaatcatctactgcatcaaccttttatgtgcccgtcaggtactgtggaaagctcggcgatttgcggccaaaggttacctcgaacggtgtcaaccccgtggccgaatgagtggatgtattgtatgaccactcaacccacaacaggaaacgcccccacgtacttggccgtcggtggacgaacgctcataagtactgctcaatgactctgtttgcaacttccgtctacccatcccgttgtagatgatacatagaactcat

SEQ ID NO: 170425 - DNA, 447 bp, Glycine max
  unsure (1)..(447): unsure at all n locations
ctataatctctatctaagccatatcactaatctacgttttattaacaccaccctcgaggctacaatataaagcaacgcccaaagtgaatgcaattaaggcgagctatgtgtgaccacaattaaggcgagctacgtgtgaccacaattaacgcaagttaatggtaactacaattaaggcgactctccaacaaatacaaatttccttggttacatagttcttagtcatgtgagaaggccacgagaggcaccaacaatgacaatataaatngcntattttaatcccatgaaaaaaangacgccaagaaggactttgaagtcatcaagtgagatctcatggtatacaacaatcttgaaccttcgcttcttaacaaacccaatgacattattgatccatgtagccaatgacacctattgngatgaggctntcctcgcgttgtatactaactt

SEQ ID NO: 170426 - DNA, 438 bp, Glycine max
agcttagatgctcctatgcaagacctcaatatctcaacctctcatgcagaaataacaactccatcagctcacgttttgcaaagactctaatttctttcttcccaactacaaaagcatggctctcttcaacactacacagatcgctttagtccaaacgtcttcatccaccagtgtaaccataaacccaatatcagcttttccttccttttcttttgctccaacctctgaaacccactaaatacctgtgtttcattctgcctacgcttgacatctctgccagaaactcttttattccgcgccgtgtctcgggattgatgctcttaaccgcgacttctactcccttctaaagcgccttgtacaccttaccacttgttccaatcccatcaccttcctttcaaaaattccctttgtgcattacaaatcttcagaaagataatc

SEQ ID NO: 170427 - DNA, 415 bp, Glycine max
ctaagctggtgtgtaacgcctttatggataaatctattcttttaaaaatttcataaggaaatttatgaaatctaaaaggcaaggaaaaaggttaaggtaagaaaaagaaagaataatgccacaatccctacgaggatttcgtttggtcaaagcaacaaggatttcgcttgatgcttttgaacaacaaatccttgtgtcatagtcatcagacaacaaatctttgtagtggcgagatgttggggtgtactaaaaagcagacatgcatttcgaaatgcattaatggaaacatgttttttttctttctaaatatcgcctcatgaagagtgttcacaagaaggaataatagaagttaaaacacatatagcaatagctacccacttgcaaaaagttgcattatttgataatggatttcaat

SEQ ID NO: 170428 - DNA, 418 bp, Glycine max
  unsure (1)..(418): unsure at all n locations
agcttaaacaaacaacacatattgatggctcctacaatttttaaaaatnttcatctttctttctttggttgtgatcgagagtcgattttaaacacactacttgtggttatacacaacaaaagataagcatgctaactcatgctctgacgtagcacgcttatacatattatatcaaacaccctttgcgtatgcataacaaaacacatgtttaataatgttatgagaaaaggaacattgaatcattggggtcttggcacacttcccagcccggagaatatatgacacacatgcatactctatgtgggagtaattagcttcttggattcctaatggtggaacattcacattctatttttcctcactatgagagaatatcacttaataatgtcatgtcgaagtgtaatgactttgatgcacc

SEQ ID NO: 170429 - DNA, 300 bp, Glycine max
gataccttatgagggcaacagcacacgtcaacgatacagtgaacttccacgagcacggatggctctcgggaaacacacccacgaacgataccttcaaaacggccggctcacgcctcacaaacaatgccgccgagaacgcggcaaacgaaaacaagccaaaacacctctcatgccgcgaagggtcacgacaatcttcctctcctactcatcccacatgtgacaacgcgcaacacaccacgcatcgagcttgagaaaagacacacccgattcgaccataaaacattaatacactagggacaa

SEQ ID NO: 170430 - DNA, 402 bp, Glycine max
agctagcaaccaataggttatcttatgctccccacatataccatgaagtatatttcctcactaaaacaatataaccaaacaatacagagtctaagagaaacatacaggattttgttcagcacgtgacttgctgagagagctaggattctaatgttaattatctatttcaaattggaaaaaaaaaataactgaggtgtaagaaaatataaagcacataagcagtgaggatcaaatgaaaagcaaatttcatatttttcaaatcattgtatatgaatgtcatagaattaatggtgtctcatcatgcagttctaaaattcaatctcctctctaactaaaatttcatatttgaggttaatgtgccttttcatgttaagtactgagaggagggttgaacaaccttgt

SEQ ID NO: 170431 - DNA, 404 bp, Glycine max
  unsure (1)..(404): unsure at all n locations
tgtcataactntatctcgagcttcagtggtgtttaatattttaaagatctttaacagaactagtggatcatgtgtgtcattttgatactaatttgcttctattggaagaaaaagatattgagttatacgttgtatccaaagttcatatctagaaaataaaaatgaagtataaaatgttaagcattttgtactatgtgttctttaggtgcttagtacattgctggccgccatacttttctgagctttcataattgacattctatatttacatcaatacaggaataaacagatctttaaacaatggtgaaatcaacaaggaaattatgcttcagctttctaatgtgccaaaagctgtacctatctgcaaaatttctgatgttgacttttctgaagtatgtatgact

SEQ ID NO: 170432 - DNA, 418 bp, Glycine max
  unsure (1)..(418): unsure at all n locations
agcttggaaccaatagacaatatcttgtattctatcatccngataggaacaaccttgctacaactgaatttaagtctagccaaggtctaaacatgtgataattgatcacaaaaattatctaatcaattaccctatgttaaacacctatgttcatataaacctagtgatcttagcattcacaatcacttatgcatcagtcttaacttgatacaaaaataaagtaaattatgagtacatacacctgcttagatctacaaacaatcaatataaaatgtcacatatatgaaaacatgtgtgatattgtaaagttacataaatcaaacttctaagactaaattttcaatttacaatctccctctctttgggttttgagaaagccaaatcaaaatgaagtgtattgatggtttcgttaaattgt

SEQ ID NO: 170433 - DNA, 400 bp, Glycine max
  unsure (1)..(400): unsure at all n locations
tatacgtgagatccacaaccatatattacaagaaacatatatttagagcgctgngttcggaggaactcgttaccaaggttttgcattctccttgaaaaactaaaaatatatcgaataaacacgtgaactctatttaaaaaaaacaaagatctacagtgaatgaagcaaagaccactggtgacttgcccagccatatcattacacacaaaagtccatgataacacaacaatcttaacaattgaaaaatagcctcgcatacataagcttcccacgcgaccataaaaaaaacaaaaaaaaataccatgcactgacacgcattccaattaggctcagataactgcaccaacgacacatgaatncacaatatatctccgaataggcaccaaataattaacataac

SEQ ID NO: 170434 - DNA, 360 bp, Glycine max
  unsure (1)..(360): unsure at all n locations
agctnggactgtgctagagagaanaacatatgaccaaagtgaaccaagagccatttctagggcaaaattgggtgttgaggagtncaaatttgattcggtggaagtttaggtgtaaatccagtttgagaaagtttagattgatgttatagacttgtgtgagttgagagtttgctccaaatttacatcattctcaatttcacttctcaaacctagaaaacccattgaattgaggggtattggacacctacattctgtgttgttgtgttttgaagcttgactttggtttagacatgattgatacatgatttgggacttgtaggatttgatttgggcaagattggatgagggaaagtgtgaatt

SEQ ID NO: 170435 - DNA, 472 bp, Glycine max
ctcatactcgatggtcgaccgagtagtcttctcttattctaacaaatataattaaggtaaaaggaaaactccatcttctataagaaaaatagagatatctcctaaaaccaaatattacctattattagaggaaatatacgataaaatcatattttttttctaattatcttataaggaaaattgatatcttatcattaaatttgatctctataaaaggggttatcaaggtttaggtaaaataactcttaatctaatctatattttgatatctattatacctttataccactaacttgaacgtcaaagtatcatcacaagtacactccaccgtcatccttggaggagctcactgaagaatattagtgtgaggagattctaccaaattcgataataatttaagttattgaagagaaaaagacttaaacaaagtttgggtattagtgtatgtgtcatcaatctttaacaaatgtta

SEQ ID NO: 170436 - DNA, 397 bp, Glycine max
  unsure (1)..(397): unsure at all n locations
agctcgtcaaaaagggagccaagttaaaaaatcttttcaaagcaaaaacgttgtttcaacttcaaaaccccttgaactacttcccattgatttatttggtccttctagaactatgagtttaggtggaaattagtatggcttggtaattgtggatgattactccaggtttacttggaccttgttttttaaaacaaaaaatgaagcttntgatgcttttcacaaacttgcctaggtgattcaaaatgaaaaaggtctcaacattgtttcaattagaagtgatcaaggaagtgaatttgaaaatgagtcttttggaaacttttgtgaagaanacgaaattcaccacaatttttctgccccaagaactcctcaacaaaatggtgttgtggagaggaaaaat

SEQ ID NO: 170437 - DNA, 475 bp, Glycine max
  unsure (1)..(475): unsure at all n locations
tatgcacggaaaatgtaattatgaaattgagatgcccttttattcaccatttcctagttaaccatgcattaggtaccatgttcaattattttttaaagtgaaacgggtttatgatcccaacatggttggctcgtggtgcctaacacatgaaactaagaatgtagtgtgaagtttcacgcttcccccttttttgtttttgttttgtagaggaaaacgcaaggatgacaaacatgaaaacaaatggtatgcaattttgcagatcaaaaagtttgttgaacgcatatgcatgatgatgccatgactcatgcaaaatgtgaggctggaatatgataagggacaaatgcaggatatgtccattatgatgttatgaagagatgcttatgcgatggatgatatgaatgcattntacggacacgagagcccggnaaattatctcttcttacttgcgcatttggnnggcggagtgcccatgtgt

SEQ ID NO: 170438 - DNA, 428 bp, Glycine max
  unsure (1)..(428): unsure at all n locations
agcttaataagtgcatttgatgtagctccatgtagagcttgtaggccttggatcttcttcatcaatggagtcctttgcttcttgaatatcaatggtagcggaatggagaagggggaaaggtgattggagacgccacgtcaaggagaagatgagtcaagaacaagctcaccaccataggaagccatggataagagcttgaacgtaggagaagataaatagagggagagggagagaaggggcacgaaatttatgcctcaaatgaggtatgacctttgaagtgtaatttctcaaataatcaaagttgaaaattgcacacacatggcctctatttatagcctaagcgttacacaaaattggagggaaatttgaatntctattcaaatttcacttgaatttgaatttgtagagcccaatttggatcccaaaat

SEQ ID NO: 170439 - DNA, 424 bp, Glycine max
  unsure (1)..(424): unsure at all n locations
tgcctcacagaggtccaggaaggacaaggtggccgatataactagttccgccccggagtacgacagtcaccgctttaggagcgttgtacaccagcagcgcttcgaagccatcaagggatggtcgtttctccgggagcgacgcgtccagctcagggacgacgagtatactgatttccaggaggaaatagggcgccggcggtgggcaccactggttactcccatggccaagtttgatccagaaatagtccttgagttttacgccaatgcttggccaacagaggagggcgtgcgtgacatgagatcctgngttaggggtcagtggatcccgttcgatgctgatgctatcagccagctcctgggatatccgatggtattggaagagggccaggaatgcgagtatggccagaggaggaaccggtctgat

SEQ ID NO: 170440 - DNA, 382 bp, Glycine max
  unsure (1)..(382): unsure at all n locations
agctctcttgagaagctagagcttanctactcacccctataatagctaagctcacccccatgacaaaaaaacatgataattcaaaaaaaatcctactacaaagactactcaaaatgccctgaaatacaaggttaaaaccctatactactagaatggccaaaatacaaggcccaaaataagaaaacaacctattctactatttacaaagaagagtggacccaaccttggcccatgggctcaaaaatctaccctaaggttcatgagaaccctaaggccttctttatcaactctagcccaatcctcttggagcctcttgctcatggctctggtaactggtcctttcctagggaggattgcatcagcttccttttagtgcgtcacg

SEQ ID NO: 170441 - DNA, 422 bp, Glycine max
  unsure (1)..(422): unsure at all n locations
gttgcagatntggtcttcgctagtgaaaggatctatgtgggtccgaaaagaggcacatctgatcatactactacgacgactgagaaaactggggccaatgaagagggtgagaaaaagggagaaacccatgttgtgactgccattcctatacggccaagtttgccaccaacccaacaatgtcattactcagccaataacaaacctcctccttacccaccacccagttatccacaaaggccatccctaaatcaaccacagagcctgtctaccgcacttacaatgacgaagaccacctttatcacaaaccaaataaacaccaacaacaaggaatcttgcagcatagagcctgtatggttcaacccacattccgtgtgatatgctaaacttgatgccatatccactcgataattcaatggtagcca

SEQ ID NO: 170442 - DNA, 423 bp, Glycine max
agcttctgatgaccaagcccaggaagtttatagagtcataaatctattctatgaagtctcaggcaagaaaattaatgagtagaaatcctttatattttttttcaaactaatcaacaaggataaagttgaccacttgagagtcatcctcaagattccagttatttctaccacaaagagctattgggtttccccattcttaattagaggaaaacaaccaattaattttatggtatcattgataaaatcaggtaaaagttggggagttggaagtcttgaaagatgtctcttgctaggtgtataactttagctcaatcctcatttttgagcattctggggtacattatgcaatcaactctccttttggcttctgttggtaaagctattgagaaattatgcaaagatttcatatgggactcttcttca

SEQ ID NO: 170443 - DNA, 439 bp, Glycine max
  unsure (1)..(439): unsure at all n locations
tcaactacttttttagtgtttggtgccatttatttgttttattgcaagagaagggtgtcaaagtataatgagagtaaagacattcagagttcagaacacaaggaggatgaggaaatggctcagaaggaggatttaatgatctttcagggtggagaggaccttacaataggtcaatagcaaccacaaggagtccaattaggacatccatagtttcagaatatcattttttaagtttgttatatataaatttcactatcatagcttacccaaacagtgacaaagtagagacaaacattgactctatcatagtttggtatttttttcagttctactatttctttattggtgtcttctntttctattcttggtaatcgaattttgcatgtactttcaacttgtataatgggaacataaatttctttctgggtctcttcaagtt

SEQ ID NO: 170444 - DNA, 475 bp, Glycine max
  unsure (1)..(475): unsure at all n locations
ctcgacccgngatccttgagtcacctgcggcatgcaagctttggctntgaggactngctccaatggctcatcatgtcttatattgaacctttcttcataggcttgaagagaacccatcaattggtctacggtcattgagtctaaatccttaaactcttcaatagcacaaaccacataatcaaatttagcaattaaggagcgaaggatcttttccaccacacgaacatcttccatattttctccataacgcttcatttggttcacaatagccaacaccttgttgccaaaatctgagatagattcggattccttcatatgcaatgattcaaactctctacgtagagtttgtaggcgcaccttttttaccttatcaacaccttcaagggaggttttcaaaatctcccatgcttctttggatgcggttgcatttgacaccaactcgaacatagcttcatccaaaccttgatgaatgaaa

SEQ ID NO: 170445 - DNA, 486 bp, Glycine max
  unsure (1)..(486): unsure at all n locations
ctcagctctgtatgccctctcncctcggcggagatttcttcttcggcaaaggcgagatagttgttggcagtgatattattgaccagccctccgaaaccttctaccgagatgtcttgggccacatgggcctcgttcagaaccttcactagtagagcccgatgaggctcggagctcatgagtaactccaacagcgagactctggccggagttttgttgagctgttcgataaccttgaattcgctctgctgaattatacggaggaactcactggcttcctctagcgacacctcctttttaccatcctttttctccggaaggccttttgccgtaatatctttattcgaagcgtggggtgcttcgccatcttgttcctcccncacttttccttttcccttgacgtccgcgggttggactggtaggtccggaggcgcgaacacacgaccactacgggtcacaccactcagtcccgtgatattggttacttta

SEQ ID NO: 170446 - DNA, 432 bp, Glycine max
  unsure (1)..(432): unsure at all n locations
agcttatatngaatagctggaggttcttgatactgagaccgcctttatccttcgggaaacaaactttgtcccactggagccaattgattttctgagaccccgttccacaaaaaggttctctgaatgccagagagagtccttataattttttaggtgctttatacaaagagaagtanaagaggggtaggcttgaaaggacagagtttataagcaccaatctcggcaaattgaccacacaggttttatttacaaactatttttagtcaattttgaaacatattactcgagcgtctgatttggtaagcattttaccagcacgatcactgaattcgtccacgtgacagcttggagtgcattagttagcatttcgtcattgggattggcgaaacacacttggtagaatggatttcatcatcctcgtttggcgaaata

SEQ ID NO: 170447 - DNA, 471 bp, Glycine max
  unsure (1)..(471): unsure at all n locations
tcagacggcgacgacggatctcaatctccggctgacgttgatttntctgcagaacgcggctagctacggctgccggcaggaaattcgctggccacggtcgccgtcaatgaattccgaggagtccgggacgaccacggcgtgcttggagagcgggatcggagatcactacgctcacgacggagaccggaaagtgctgaaccttttcatttgagagttctctttcgctctccgagattcgtgtttgagggttctcgctgacgcgtctttttgccttttttttataacgctctattttgagaaagagtttttcccggaattgaatccggtgagattctgtaagaataccggcacaggatttttctctctgttgttcttgctagacagggagagaaagatgagggttagtcggtgatgattcttcctttcttcttttctttnttcttccctttgagctatcaaacatgttatgat

SEQ ID NO: 170448 - DNA, 429 bp, Glycine max
agcttaataaatctatatatggtttaaaacaagcttcccgtcagtggtaccttaagttttatgggataatatcttgatttggttttgatgaacaccccatggatcaatgcatataccacaaggtaagtgagagtaaaatatgttttcttgttttatagatgatattttactcgtagccaatgattggggtttgctacttgaggtgaaacaatttctttctaagaattttggcatgaaggatatgggtgatgtatcttatgtcatcggcattaagattcatagagatagatctcgaggtatcttgggtctatcacaggaaacctatattaacaaaattctagagagatttcagatgaaagattgttaccaagtgttgctcccattgtgaagggtgataggtttaatttgaaccaaagtccaaggaatgac

SEQ ID NO: 170449 - DNA, 476 bp, Glycine max
tgtccaccccagacaacttgatagaagaagcctaaacttcattggtctaagctgggggagcttgacatgcctcacaaacctgcaactcttacactagtcgaggttaccaccctcgacaccgaacaatctcccttgacacaagacaatttcccttgacactagatgatggaagcttgcttgtggagcttctatgggggctggatctttgagcttcaatgaggtccttcaatggagattttccaccatggagatgcagtggaaggcaaagtagaagaggagaggggaggcaccatccactaaggaataagccatggaagaaggagcttcgccaccaagaatgtgccttggataagaagcttggagaggatgctctaatggaggaaaagaaagacagagaggaagagagagtcgggagcacaaaattgatgaaggaaaagggggagaaaagttgaactttgagttgtgtctcacaagac

SEQ ID NO: 170450 - DNA, 425 bp, Glycine max
  unsure (1)..(425): unsure at all n locations
agctcgaccccagctattaaagtaaactaagtttgtgtgtgatgtctcccctgtgcattgattggcatgaacttagcgctcatgagccagcacataaaagttgttgtttacatgctattggtatgacactaaaacttttcatttacttgtggacgatggtaagagaaacactcatgttatttgaatttatttgtactacttttattgggatttcaaatcgcacanattatgtttcgttntttggtcaggggcatttttcaaaattctcttaatacctattacttaacttgcttggcccctccatgcctttgtgggctctcttctcatttacatttcaatggagtcatataagaggactttccttttcatgttctgtttctgggccttaaagatggattattgaatgaagctaccgctcttggtgt

SEQ ID NO: 170451 - DNA, 378 bp, Glycine max
  unsure (1)..(378): unsure at all n locations
ctttaagccgncgggttcaccgcacgcgcatagaccttaatttctctataanttaccacgccatcaacgggagccacgacgaacctttctctttctctctctctttctctccaaaattaaattaaggaacggaagtccactggagacacctgtgtatatacaaatatcacttccaccaagggtgtatattaataaaccctcgaattctaaaagactaaaataccctattgacgcttgcattacaagaaatatatagtgtaccatctcgaactctctacgtgacaagtactaatttgggagaacgcatacgaaatcatcatttccacagcctattgtatatatcatgtaccacaaacaacacgcagcattgcaactctc

SEQ ID NO: 170452 - DNA, 396 bp, Glycine max
  unsure (1)..(396): unsure at all n locations
gcttgttacaaaagcatcaatatacattgttgcactctcaganaacagntcatgggtagacaacaatctgaaatgataaaacatgggcaattacaatgttactgtttacccaaccctggaaatccgaattctaacatcatatgccagatggatgattgtgccaatanaaaacaacaacaatttgtatacgcctatgaccttgaaactttaagagtaggttaggaatcaatgataaggggaatattttttaataaaatcttttgttcagaaatttataaaacattatgtttggaaatggaaatccatttttactttagttgtctacaaacaaggtagctgaatcgggatacaaactgtgattttgaaggcccgctttccaaatcacgaatcaaaatt

SEQ ID NO: 170453 - DNA, 432 bp, Glycine max
  unsure (1)..(432): unsure at all n locations
tccntatatatatatatatatatatatatattcccntttcttatcaaacaaaataaaaaatatttcgagcctcgtggaccacattctacagggccatctgaacaacaagatcactgtccacacctgcaccatttgttgctacagaaatgattatttggactcaccacgttcactatagcagacttggctttaactattttagacagcttccaattaattccatctttcattatcaaattgatatgaagcacatgatccaatctttcacagtttttattatactaccaagattacccttccacgaatggatgtctctttttaatataagcaatgatttttattagatatatgtttccaagctttcattaacaaaatcaacatgtccttattcattacaagaatctgatgacaaactgtgcgaacttatctgat

SEQ ID NO: 170454 - DNA, 252 bp, Glycine max
caaagtctgtgtggtggtcgcattatgatcatttaccacatagcctggcgaccggtgcaaatttttttttcatggccaattaggctaccaggttaaccaaggcatcttatataccttcaagctttttagtctcgcctaatgaggatgaatttgtggctactctatgcactcctctaatgataataagcatcacttctgacactaaaatgctgggagcttgaagccatcttcccaattaaatttctggcttta

SEQ ID NO: 170455 - DNA, 443 bp, Glycine max
  unsure (1)..(443): unsure at all n locations
cttcttntccatatattttttccttccnccccccgcgcgcgtgtgactcctgcacacggaataaaaactagctatacacaaacgctaaccgaccaatattttgtgaatagaacataaccgaatcaacccagcttggcacccacagggcaaaaaccaagacatgagatggaggctcaatttaaacagaaactatcactttaaatcagctctcagacaaacctgacactgcagaggagaataaacgactccaaccacacaatgccaaaaacctttattttcaaaaaaatcaccgattccttgaacatatcctatgattcacagaaaaacatgcacagtcacacatgcacacacaactgacccactatactaaactaagaacgcgaccaaactaataaccctaccaataacaaaccaccaaaccaacgaaaccaagacactccccc

SEQ ID NO: 170456 - DNA, 403 bp, Glycine max
  unsure (1)..(403): unsure at all n locations
agcttgtgaaaaatggagctgctttatggtatggtatatanaataaaaattatatatgttgtccctttgtttttcttcttcatcatttctcaattaattttcttccttaacgcatttgcatatgcaggttgagaaccatgaaattgacacacaactgatggggaaggtgaagcagttgatcaatgcatactatgaggaaaacctgaaggaaagcttctaccagtctgagatagccaagaggttggagaaacagcagaacacctctgatatagattgggaaagtacctttttcatttggcatcgccccacctctaacatcaatgaaatttcaaacatctctcaggagctttggtaagtcaatccatatatgttcctttttctttttttttacctacatgtattc

SEQ ID NO: 170457 - DNA, 441 bp, Glycine max
ctatgaaactcagcttctcaagatgccttgaattgttgcgacggggatgttgttatatgtgggatttgaaagaagcaggtgagaaaatccaggaggtcaagcagagggatcatgatcaagagaatttttttacttcttatgctagtgaagcagacatgaagtcttcaacttgaatattgtatgattgctgagactacgtaccttaattagttattgattcctagattttctgtccctttgaaaagaatgccacatgacatgaacgggagatggaatatctgggacttttttctctctgctatgggctttcatgatgtaatagccatgcataatgcaggaaagaaaaaaataatacagaagggcattataatatgggcttgaagttaaagctgaatgagtaatatgatacggctttgctggatctgtataacccgcgtctat

SEQ ID NO: 170458 - DNA, 421 bp, Glycine max
ccggatctctaagcaccgcggctgcagcttgtgggagctcattgagaatttgtgaaacacaggccacgtgagggagggagagaaaaggcttctgaatttttgctttggctgagtgaggagagagaaaagctctttttttttggttgtaaataaaaagggttttccctttttccattattttattcaagctctgccacatgtccctatttgattggagcaaaaagggcccactttttttttcgactgtgacccatactcagccacaaaagtgagaaaaaatctgacctttgaaacgcttaaatcctgcctccgtttgcgtgcccgttctctgattccaatttctcgcgtttctcttgcgtcgccggcgccagttttctaacgcacgcaacttatatatttaaaacgccttataataaaaccc

SEQ ID NO: 170459 - DNA, 483 bp, Glycine max
  unsure (1)..(483): unsure at all n locations
gacctataaaactcagcttaaatngaataaaacgttcaatcctgcttgtttctattaccatatatgtgtaattgatcacacaatgaaaattttgaattcaaattttaatagctgtctgccatcatctctggccactggtaatcgatcacatcctctgcgcattgattaccagagagtaaatctcttgcaaagactttttaacttacatctcttggccaaacctttcgctacctcaattacgaattcccttcctatttaatatacctttcctaagactctagagactgacttgatcatccatcctgaatagctttaatctctttgtcttgaataaagccttcagaaacatgtgatcctttggcatcatcaaaacattcaccttgatcctttgtctataatctcccctcttttgatgatgaccatccctgaaattcagaccagccatataccacatgatagcacgttcacccaactcttactccc

SEQ ID NO: 170460 - DNA, 314 bp, Glycine max
  unsure (1)..(314): unsure at all n locations
agcgtattgatattatcagtgttataaattctcagatatgcttngtgcttcctagggcctattgcagaaatactaaacccctcacatagacagaggatatgtttccattacactaaatatactcaaaaggcctaccaggtgatgaaatgctatgtcattatttcaatcaactcatcccatcgatgctggaaacatcatattcaaagctcattgcttagtaatacatggacagaagtctatattacatgacacttgacactgacataacaatcaagtgcaaaatcccccaccctgttagttataatttgagattg

SEQ ID NO: 170461 - DNA, 473 bp, Glycine max
tgcaaacagttcgattcaacattctagctcaaatcatttgatcttaaagtcaaattttctaaaatgaaatttttaattattttatatatgcacaatgggatagcttttatttatgcaaactttacttgtaattatttttttctttgtcataccttatgatcccataaaactaatagaataaattcagttttaccttaaaaaaaaataaacaatcattttatctaaaatctacaaataaattgaaatatataggatttaaaaattttgacttttggttcatatgattcaacctaaagagttgaattgaactgttcatgagtttgaactgagtcaagttcgagctgacaaaaatgttcatacaaaattcacattgagcttcaaatcgaattaaatattaacgagccgagtcaaattgaaccaaattaaattctattttgatcctacttatttgtatctaacgacgtatcgatcaa

SEQ ID NO: 170462 - DNA, 418 bp, Glycine max
  unsure (1)..(418): unsure at all n locations
agcttcatgttnttggtatgtacgcgaatgacttcaagtcttccaacttcatcaggaacaccaatatcaatttcactatcaaatctaccagaccttttctatgcagggtcaatgctatttggtcgatttgtaggcagcggcaatgaaattaacctcaactatatatcaaaggatatccacctcatatgccgcttggggctataatctacacataaaggaacaactaaaaatctattgaggaacaggtagagaaactaaagccaccaataagtgtaaaatgctcagatcaaagatagcccaccaataaaaatgagatttttattatatatgtctgcaaaattatgaaaggaaacggatgtttgtntgataatcctagctgtcaaggactactttttataaccattatattaacaaaata

SEQ ID NO: 170463 - DNA, 410 bp, Glycine max
agcttatcaaattataaagtgataaggatgtgataacttcatatagatcattagcatattaaacactcataatcgtggaagcattcaaaagatgaataaatagtgcttacaataggatggccatcatgatgaacaataaacaaactacaacacatagctggtgtgctaaaaacagctaattaatgactgagcctgtagtgatgacccgattgcaccatctatgtttagaactaggttattttccttggtgagggtgtagttttcaactttaacagcatactccatgtttttcacagaaagaaaatgcgtgcgtgcaaacttttatagcaactccactctcttatgtgtgctatccctattcttcatcgattataatttacagaacaaaatcaagcttcatacatttacat

SEQ ID NO: 170464 - DNA, 312 bp, Glycine max
  unsure (1)..(312): unsure at all n locations
cggccttaacgatntagtatctaagaatactcttgaatatatcctatatatatatatatatatatctcacagatatggaaaaaggacttgccaccaacaaaccacctctattcagaggcataaagtacaactactaaaaggagcatatgatagcccatttgaatctattcatatagatttataggatgttgtggaaaatggagattgcataccatatgatgaccagctgaatgagatctcaagaagccagtggatggagcaccaaaatattagacttttactaaactccaaagttaggaacgtgatgttaca

SEQ ID NO: 170465 - DNA, 427 bp, Glycine max
agcttctaaactttatacaagaatgaagctctgataccacttactggacaagtggcctcagatatcctaagaaggggcttgaattaagatatcacagacaaatccccaattaaaaattttacttttaatttaacccaacaacccaggattccttttaaacaagaactcctagataataatgcaaaataatcttactaaatagaaataataagcaataaacaataaaggagtttaagggaagagaaaatgtaaactcagatttatactgcttcggccacacccttgtgcctacgtctagtccccaagcaacctgctcgagagttccactatctttgaaaatccttttacaagatctgaaccacacaaggacaacccttcctttgtgttcagatttctttacaacaagagaccctcgatcttcttaaat

SEQ ID NO: 170466 - DNA, 316 bp, Glycine max
tgcccagagaaagagtccacggaggaaatgcttatcttctcataagactggaaagcgggttctaatgactgctctacggcctccacataaggcatacaggatgggcaactcaccaagatgtcttcctcgcctgatatgatgaccacatgcccttccactacgaatttcaacttttggtggagtgtttacggaacaacttccactgactggatccacagccgtcccaactgacagctgtaaggggggttaatatccattatttggaacgtaactcgacaggtgtgagggcctatctgtaccgggagatcgatctccc

SEQ ID NO: 170467 - DNA, 377 bp, Glycine max
attggagttgaagaatttgagaatgacactgggaataagaatcataatatgataactgtgtgcaaattactttctgtagtgaccaatttataggacccaatttttacaaaactttattgacaaataaaaaaaatataacatgataaagcaccattaaaaaaattgacaagctacagtcacgttttaaaaaaattgacgagctatagtaacggtcataaaaaaattgaccagctacaataaccagaaaaaattgcttttgtgttgcctctttggtatctcttctttctttatcttttactctctttgcctttccatccaccccctttcgcccaaccttcacctgcccgtgcgattagagtagcgcacgtacaccttgc

SEQ ID NO: 170468 - DNA, 299 bp, Glycine max
  unsure (1)..(299): unsure at all n locations
aaactacccttctctatctgataatcaggccagatgcatgaccatatgtcttatacaaggagataagctctccaattctttggtgatgcctctgtaaaacataattatatcatcaacatacattatatatgacttggagtgccatacctcttatactaggccactaggagaagcttacctctgtggactaaatcagcaatcttgtcactaagaacccnctccgctgctcaaaataacaccagagataaacaccctcctaacgcatgaaaagaaaccgatagtctttctattaattgtac

SEQ ID NO: 170469 - DNA, 447 bp, Glycine max
atccttaagtcacctgcggcatgcaagcttgctaatgtatcctcttcctttaaagatagcttatctccacccttcatgacattcctatcatatcttaacatttttatcatatcctaaacgtattttgttatatctactcatatcttatacccactgattatgggattaagatataataatattatggcttaacagggtctatataaagcatgttaggttaagagggtaaaggcagaatacacttgatgctcttgttaggcaacctttaagcctaattgaggaaaccctattctgaaacaattccaactctgcacttaacttggagaattagactacttcttgactattgaagccgggtatctaaatatggttattatcccaagcctattatttctgatactaaacaaggctcacatgaatgaggctgaaacttttacacttttgtgc

SEQ ID NO: 170470 - DNA, 465 bp, Glycine max
actaagcttgcacattgaaacccagcttgaccaacaagattcaatttggtgcctggagaaggcataaacttaccatatgattgaattacattgtctattacctgcagaaatcaaaataataacatcattatttgtgaatcataacataattaatatccaactaaacaaaatgtattacatacctctccaaacctatgaaggtgttgtttccaaagaagcaagtgttgattccatggtttaggctttggtcctaacgtcaagaagaagttaaagagggatacatgagaatgagagaaagtgagtctgtgagtttgtgtatatgatcgcaatacatgcattgtatttatagaaaaaaatctaacagtaacataattcatttggtgggatctacggctgtgattatttcggtaggatcttgaccgttcaacgtgcgttgctctaattggtgatatctaagctgttcat

SEQ ID NO: 170471 - DNA, 441 bp, Glycine max
  unsure (1)..(441): unsure at all n locations
cacctgcggcatgcaagcttctncctctttctgcttctagagctcttcttcctaaataggcactatggctactctggaattttgtgccctggccattctgtacaagtgtgtagaagctaacatagaaggtgtaccctaattctacacaagacaggctttaaataggctctgaattcaaaacgttgcgcttagcgccaccctcacgcttagcgtgagtaaggggaattgggcttagcgccagtctcgcgcttagcctggctaaaggcacctgctgcgcttagtgcactaatctcgcgcttaaggcgcgactttgatactgatgctctgccagattctcctttgcgctaagcacgttgaagctgcgcttagcggtggtggcataccctaatttcatccgggaaccatccgttgttgggatgcgaccctcgtttgaccacttcg

SEQ ID NO: 170472 - DNA, 485 bp, Glycine max
  unsure (1)..(485): unsure at all n locations
actaagcttctaaggaggtgagcttagttaggagagggtgtgtatatctaagctctancttctcaaggaagttttctcaaagaagcttctcaaggaagttttctaaagaaagcttctcaaggaagctacttagtctataaatagaagcatgtgtaacacttgttggaactttgatgaattaaagtcttatgagatacaattcttggtggtgaagctccttcttccttggcttattccctagtggatggtgcctcccctctcctcttctcctttgccttccgctgcatctccatggtgtaaaatcaccattgaaggacctcattgaagctcaaagatcctaggcctacaagctccaatggagcttacatcaagtatctcaaatggtgaaaccatcaaagaagcgcaaaggttcttcgagtagaagccaacgacaccacgaggcttaggatactccaattccttccttcatctcctcatcctcattg

SEQ ID NO: 170473 - DNA, 457 bp, Glycine max
  unsure (1)..(457): unsure at all n locations
atcctctgagtcacctgcggcagcaagcttgaagaacaaaatngccttaatcatttccaaatatgcatgtgaattaggacgcatcaacaagaatcaagccaagactattgtgcaagcaatcaatggggcaaaacacaccaaatgattataatgatggatggctcaaattctcacaaaggtaaaatcatcactttcaaattgagctttcaaaactatcatgacatgtagagaagaatcaaggatttcaagtcacaaaatgtcaagaacttttattttcaaaacaattacccatttcttgaacatatcctataattcaaagaaaaacatgcaaagtcgtacgtgcacacgaaattgacccanaatattaaactgaaaatctgacgaaactaacaacattaacaaattaacacaactaacaaattaacaaaaccaacaaaactagcaaaaccaaagaaca

SEQ ID NO: 170474 - DNA, 476 bp, Glycine max
  unsure (1)..(476): unsure at all n locations
tganatgaggaagtgtagaagggtgagactctctgcttttattcgttgaccacagagtggtacctggagatatgtcgcgggggtcaggagaccttggggacgtcaggtggggtgctattgcccaaaaccaagcttgaccgatcccgacccaacccgggcatagccagtcagtgagaacctgtgatgtacctaagcaggcgagctcctggcagtcaacagataaaaggaacaaagaccacaaagcaaggaggcttgtgtggtggctggccagctgtgaaacttgattgatatatgggatgtggcctctggtaatcaattaccaagggtgggtaatcgattacaaggcttaaaaatgaagacaggaggctaagatggcctctggtaatcgattaccaaggggtataatcgattaccaggcttgaaaacgagatcagggagttaagaacgcttttggtaatcgattaccaaatggtgta

SEQ ID NO: 170475 - DNA, 426 bp, Glycine max
agcttaaagtatgcctgagtaattcatccttatgagatgttgttgaagtattggcgatcagaattgccattccttggattatatggttgaaccaagctcacgcttttacaaaaaggttcatcaagtcaagttgaaatatggaagtaaccgtcttgcaaaattggggcaaaagatgaatcgagtcacatcactgcttcgtctactgccaaacatatttaggattattgatgtccttgttacttccagtttcaccttgacaaagatgtcatggaccatgttgaaaatctaaattgattcaaccccatatctggcgtaaaaattcgcaatacttcaactgtacatcattcgcatgcatccatgccttttattggttgcattgctcgttgcattctttccttgaaaaataaaataaaatgaacttaatca

SEQ ID NO: 170476 - DNA, 449 bp, Glycine max
tctctatgaatcttcttaaggaagcttctccggaggtgagcttagttatgagaggggtgtgtgtagctaaactctatcttctcaaggaagttttctcacagaagcttctcaaggaagttttctcaacaaagcttctcaaggaagctacctagtctataaatagaagcatgtgtgacacttggtgcaactttgatgaatgagagtcttgtgagacacacctcaaacttcaacttctctccctttatcttccttcaatatcgtgctcccctcctctatctttctctccctctttcttttcctccattgaagcatcctctccaagcttcttatccaaggctcatcttggtggtgaagctccttcttccatggcttattcattaatggatggagcctcccctctcctgctctcctttgacttccgctgcatctccatggtgaaaaaacaccat

SEQ ID NO: 170477 - DNA, 426 bp, Glycine max
agctttaaaattgaatatttaacgctcttttactgctggtaatcaattaccaaatatgtgtaatcgattacacagtgcaaattttgaattcaaattttaatagctgttgtaaatcagatttggccactggtaatcgattacattctttggtaatcgattaccagagagtaaatctcttgaaaaagactttttttgacttaaatatcttggccaaaccttttgctacttcaattggaattcccttcctatttaatgtaatcttcctaagactctagagactatcttgatcatccatcttgaatatctttgatttctttgtcttgaataaaatcttgagaaacatgtaatcctttggcatcatcaaaacatcagcttgatcctttgtctacaatctcccccttttttatgatgacaatccctaaaatc

SEQ ID NO: 170478 - DNA, 370 bp, Glycine max
  unsure (1)..(370): unsure at all n locations
cttcncanagcttacggtcaaatctgcgagcttttcattgttcaagtctccacagaggccactgccctcctctgccagtattatgatcagccgttgagatgctccacctttggggacttccacctatcacccatggtagaagaatatgaagagatcctaggatgtcctctacggggaaggagaccatacctcctgtcacggttctactcctcattagctagaattcccaagatagtgcaaatctcaatgcaggaattacaccacccgaagcaagtctacaatgaggtggttggaatacccagataatatttggaggcacagccagaatcttggagcgtaaggcgaatggctcccgttcatagacattctc

SEQ ID NO: 170479 - DNA, 419 bp, Glycine max
  unsure (1)..(419): unsure at all n locations
agctttgtctntcttgtggagttgctgcatgtgnttgtctttccaaccagttccaccaccaagggaatccactggatcgtgtatctgtcatcggggtgtgagttgatttcggagtggctttccatagctgtttcgcatattcaacaaagttattacatatagagaattttgttattccaatggaaagatggagtcaattcaactattctgtcctaagaatgtttggttccatgtctcagatgtgattttcagaagtttaatagttatagtttccacgtctcaaatgtgatttcttactagttttcaaaaacactcgcagaatcacagacattttcttttaaaaatgctagttttgaaggattaagccagtaatagaacatgcaatcacattcaaaattggacaagaaaataatagaatg

SEQ ID NO: 170480 - DNA, 446 bp, Glycine max
  unsure (1)..(446): unsure at all n locations
tgtnaaagtcaaatcacagaccatggcacttggtgaatattgaattctcacaatgccagaacatgctttaccaatgaatccaacactagacaagaatcctcaacttaacacaacgtaaccttttggaaaaaaataaagcaaaagttaataaacctcaccaaatctactaagtaattgcacagcatgaacatctccaattccatgaactcctgcatttataaagtattaaaagtattaaatatttgttaaaatttcagaagcttatataactttacccctaagagcatgcttggtacaggatcattctaaggaaatgatgattcaatagtttgtcacataaaaatacatataatggtgattncaatcctaaggactagactccttccaacataagaatggcccgacgatgggagttcttctacaataagtgaatctctacaatgatg

SEQ ID NO: 170481 - DNA, 420 bp, Glycine max
agcttgaaggaaaactcgatgccttggtctatctagtaactcaacttgccatgaatcagaaatctgcatctgcacctgtcgcaagagtctgtggtctatgttcttctgcaaatcaccatacagatctgtgtccttttttacaacaatctggagtcaatgagaaacctatagcttatgctgcaaacatttataatagaccttctcagcatcaaaaccagcaacaacagaatcattttgacctttcaagcaatagatacaatccaggttgaagaaatcatccaaatctgaaatggacaagtcctccacaacaacaacaacatatccctccttttcagaatgttgctggtccaagcaagccatatgttcctcctccaatgcagcaacagcagcagcaatcacaacaaagacaacaagcaactg

SEQ ID NO: 170482 - DNA, 452 bp, Glycine max
  unsure (1)..(452): unsure at all n locations
ntgagaaacatgtaacccttggcgagctttctttttgttatcatcaaaacattcagcttgatcctttgtctacatgaagctgttcaacatcttttttagatggatacataaattgtgaccgttatatttaaatgatattaatcttccaatgcagcgcatttaaggcattaaagacgactgatgacaacaaagttcctcanactacaccccagtgaaggttagtcccacttgaaacaatgcttgcaaattaaaatgttattaaacatgttaatacaaacagtcaattctttttcccatttaatgtagagtcacgttcaatgcgaaggctatgagtgtgggtattatgtgatgcattggatgtaacacaatgaaccaagtccttaaaccaattcaagtgtttataccaagacctcattcattgaacttcattcttctatttattattatctttt

SEQ ID NO: 170483 - DNA, 201 bp, Glycine max
atgtcggcatacaaatatctagtcgtggctatactcacgaccgatgtcaggtattttttgttcaatccaattcctgaataatttctggatgatgtccaatacgacatgttcgatcggcgtcatcaagtgacgctcgctttttatataagacctggtggatcggtcatatttcctggccgacatcgactatcatctttttta

SEQ ID NO: 170484 - DNA, 365 bp, Glycine max
agatgtgagaaagcgtggaagagacaggctgccttcttttgtttgtcgaccacaaagtgctacctgacgatatgtcgcgggggtcatgattacttggggacgtcatgcaaggtgctatttctcaaaaccaagctcgaccaatctcgacctcactccgggcatagtcagtcagtgagaacctgtgacgtacctaaacaggcgagctcctggcagtcaaccaataaaagaacaaagtccacacagcaaggaggcttgtgtggcggctggccacctatgaatcttgagtggtatctggaatgtcgcctctggtaatctattaccaagggtgtgtaatcgacacaaccgctataaatggagacacgatg

SEQ ID NO: 170485 - DNA, 424 bp, Glycine max
  unsure (1)..(424): unsure at all n locations
agcttagcagaagaaaatacttntagtatggaatctaactcatctattggtgataatagctcttcattcaagctcaatgaaggggaaggtaatgcagaaaaaggcctcaattctaatcaagttgtatcatctcaggcagaaaatggaggggtaaaacacaatgaatcagtcaaagattttaaagcagagaaaacatatcttcttggccggatgaagaaaacagaaaatagaacacccttagcagaaagtggaatttattccttactgtctagctctgacagtgttaataatttagacagcgagacaggtaagatgccttcatgaataggtagcattataattctaatgattattggaggaaacattcaatttagttctccgagttacatgcatcaccacattagtccttaaaaattggtcacta

SEQ ID NO: 170486 - DNA, 436 bp, Glycine max
  unsure (1)..(436): unsure at all n locations
tgtcatttgagagttgagaccaatgtgattnttaactgcaatttaatcatcaaatcgattgtgttttctataagcatttaatgtacttctttcatcattgctaattgatagtggcttccctcttaactagcaaaactgcaaaagcttaaattagttgatatgtttagttatttaagatttatatgaatgccattatgtctatcttatgaacatgtaattatgtacttgtatgcaacttcaaaggatctactaatctcttaatgcaagaattgataattaagtctctttatttaatgcatatttaaatattttttataataatattgccatcatggaaacttacagtacgatattcactgtccattttcatggctgctaacttttgtatttgctcacaggtcgagaacctaactttcaaaagagtatctanagtacc

SEQ ID NO: 170487 - DNA, 412 bp, Glycine max
agactttgctgcatctatcttccctcattagtcatacaaacacagcctatattgaacattgggattgcttaaaattcggatatacttattcttgatgggcaattttgatttggaactctataaataaactatccatagaaaaacgatagaagcatggtactttattaggaagaaatatttataaaacccaattacaaagataaagcattgcctttgccccttctttgaaattgtttaaccagttacttctccaccatatctagcatagcatttttttttcccactgttcctcctttgctgcaattctggttcttgatattcaacccttcattttcccttttgtcttgctcccaagatatcccttccctcggaccctaactggcaaattcagatcactacctggcctggaaat

SEQ ID NO: 170488 - DNA, 348 bp, Glycine max
ggacctataaaactcagcttgcactgtcgaatgaacttgggacttttatttttatttcttagttctcagcacgacacaagtgtattcacgaaagatggtctaccgttgcttgtaaaatcatgacgacattcacataacaaggtgtgcgttgtatagagaaatacgggagagcttctaccacctatttttcagaaacttacgtgaagccgtgctgccaaatctgtattctcggaaataatggtagtgcatattgataatctagatgtgaaacgacattggaccacgaacggatccacaactttgttaaagggtagattgcatttttttttctttctgtgatctagaaca

SEQ ID NO: 170489 - DNA, 393 bp, Glycine max
gttaatgtgacatcaagtaatgtctaaaattgaatctataacggagatcatgatatggtattgtaagcgacatccttggccagaaggggtttcattgggatggcactaaacacatgatcacacctgagaatgaaaaatgcttggaaagaatattgcactgtaagaaatctttactatatcgctaatcgctattcaaagcacatcggattagactatttctttttttcccatcgcataaattggctaaaccatttagatctaaggcgcttcaaaactaagatgatatattggatttgagtgctaaagataaactctctggtcatggaactggaactgctatggatgctgatgaaacgattagttcataaacaaaataaagtgtaattcatgggt

SEQ ID NO: 170490 - DNA, 404 bp, Glycine max
agctttacacgtatcagtcaagtgtatggtccatatcgtttccaaggcgctcatcgataatggttccagtttaaacgtgatgcctaaaagcactttggagaaattaccattcaatgccttccacctaaagccgagttcaatggtggttcatgccttctacggcacccgccgaaaggttatgggagagatctaccttccagtacagataggccctcacacatgccaagttaccttccaaataatggacattaaccccccctacatctgtctgttggggcgtccgtggattcactcagtgggagttgttccctctacactccaccacaagttgaaattcctagtggaagggcatctggtcatcgtattaggcgaggaagacatcttggtgaactgcccattctcta

SEQ ID NO: 170491 - DNA, 448 bp, Glycine max
  unsure (1)..(448): unsure at all n locations
ccgctcgcggctgctgtcttcatagttctcgcgagcttggtgtttttaaagtgaggggggagagttttgggtggaggaaaactccccctccctcgtttttttatttgcaagcgcaggggtgcttgcccaggcgagctaacctgtacttttttttatggaagacataagcatggccctctatgggtcggcattcgcttactcgaacccactcaaggtagattaggcatccattatttattttaaacaaacagtagtaataatcactatgaatttaaaggatactagcctaccttgcagcggcgttttccgtttgtccagagctagggaagggacgatgatctgtcagtcgtgaccttagcctctatttgcgtccgtccctaagtacctgaaaaatacgaaacgacattgtgcggcaaaccgtggctgcgttatcgcnttaccctgatgg

SEQ ID NO: 170492 - DNA, 189 bp, Glycine max
attcggcctaaccttctttgtctgatccagaacacggacgaaaccttgtctccgctccccagtaactgaaaatatgtttgtgtgtgtcaaaacacaacttcgggcgagctcacacgaaaaaacctatccgacctacattgtaaatcttaacggcaacaccgaacaaaacaccatcctctaccggaaaaa

SEQ ID NO: 170493 - DNA, 396 bp, Glycine max
  unsure (1)..(396): unsure at all n locations
tcagttctcaattacgagcgcctcgagagattacgagatcttttcggtcatccgagctacaacgcattgtcgcgtgactntctttagagcttcccgtttcaatctccaccgtctcgatatatcatacggctcactgcgatatccgagttaaaagttatcgccgctcgaattttcttacagacaccggtgacattcccgagcgtctcgatatcttacagggctcgatcacacctccgacgtaaacagtattgacgtctgatcttccttccgagcctgtgatctgaattacgagcgcctcgatatcctacgggacaccaccggacatgcgagtccaaagtgatagctgtgcgaacctgcttcgagcttcatgtttcattcccgagcgtcgcgatatat

SEQ ID NO: 170494 - DNA, 433 bp, Glycine max
agctttccaaatccgatcatggaaggacttggcaactgtcttcattatgcagtaccagtataatacggacatggctcccgatcggaactcagcttagagtatgactaagcgagagcatgagttcattaaggaatatgcccaaagatggagagatctcgcagcccaagtcgtaccgctcatgacggagagggagatgatcacaattatggtagatacgttacccacgttctactatgaaaagctgataggctacatgctagctaactttgcggatctcgtcttcgccggagaaaggattgaatctggattacggaaaggcaagttctaatatgcttccaacaacaacagaagagccccattagtgggcgcgaggaataaagaaggagacgcccacgcagtcaccaccgacccgacgtggaggaaagcaccccca

SEQ ID NO: 170495 - DNA, 476 bp, Glycine max
tatgactcttgacaatttctttaacactagtcacttaatatgttgtgacttttgaacaatcttcagaaacaagtcatttgaagaattgtgacttttggaaatgtatttttcgaaatcagtcactggtaatcgattaccatcaaggtgtaatcgattacacatcaacaaatgtgactcttcattttgaattttgaaaattaaaacgtttagaggctctagtaatcgattacaagtgttgtgtaatcgattacactagtttaaaatgatttacaactattaaacacaagttgtaactcttgaaatttgaaatcttaacgttttaaaacactggtaatcgattactaccttctggtaatcaattaccagagagtaaaactctctcctaatgactttgtgaaaacttcttgcgctactcaatgttttggaaaacttctttagtaattatcttgattgagtcttctcttgattcttgaatc

SEQ ID NO: 170496 - DNA, 417 bp, Glycine max
tctccaacgggcatgcgcatctccactcgccgcaatttcttatactcccgccacacgacggccgtgcctcctctttggaacgaccccaagatatggcccttccgcaactcaattcacaaccttttcactataactctccggtccatcatcatctctctcatcttcttcaactcttttcatcttccttgtctttttctacttctcttcctttcacttggccatccaattcttttctattgaccattattcgactctgtttttcccgattatttccacctctcacatcatttttcccttcatcaatacctttctcttcaacaactttcttcttgagtcaacactcttctattccttattcttccacacaacccttacttcttgtcatcacagctctgcattctccctgcgattctctct

SEQ ID NO: 170497 - DNA, 323 bp, Glycine max
  unsure (1)..(323): unsure at all n locations
agctntgggattattcacatgagttaactatatacaatgaatgatcaattgtgaaaatgaattgcatcccatacctagaatcttctccataattccaccgaatttatatgtgtatagatgcatgcaagcaaggagtggtcttgatggttgctttctgaaaaggtactacggcggtcatttacttgcagtagtgggacaatatgaaaacaatgcattttttgtgattgcatatgcaatagtaaatgttgaagataaagacaattggaagtggttcctcacattgttacatgaagacattggagactacgaacaatatggctgga

SEQ ID NO: 170498 - DNA, 369 bp, Glycine max
  unsure (1)..(369): unsure at all n locations
actcaccttcgccttggtgcgctaatccttattctccagctccttcctcacatcctaaccgtatgaagttggatgtgctgcgatttgatgggacagatccctccagttggatctttaagataacacagctttttgactatcattccaccctgnactaacatcgattgaccatagcctccttctatatggagagactgactttggcttggttccaatggatgactcgagatggcctgatttcgtcgtggccacgccttctccacgctttacaggtccgatttgctccttctccgtctgaggcatccatccgacctctgtcaaatcgacacgaggtatagttcatgaccttgctgtccaaactgtcgtact

SEQ ID NO: 170499 - DNA, 435 bp, Glycine max
  unsure (1)..(435): unsure at all n locations
agcntgatgatgaattgttctacccttattttcactctggttattagtcaattcgattaagaaaggaaaatcccaaagaaaaacgtctaattgatcttttttgattatttttactaaaaggcattttttgattattatattactattttgcctcttttttggttttaaatgtggttacgcatgaccgaacaatcggatttcattttaacagacattaagagatgttacaatacgaatgatcggtggaaatctattttattttttgattaggtgagaaaatgacttaaataaatgactaaagcacgtcaaaagggggtacggaaagttaatgatatgaaaataaaagcacgtgaaaacatatgaggaccactaagggtacatataatgaattaaaaagtttgatttctggaacttatcggtctgaaacaccccaaa

SEQ ID NO: 170500 - DNA, 345 bp, Glycine max
tgatagcacgcatagactaatgccgtctgctgtgtcttttgttaatcgcggaccacacgcccgttgacacgcggagatttacctcatcttctacgctcacaagacctgtcatactgacttttgagtcctgctgacgggcggaaatacccgagtggttatccgcatcaactttttgctgtctgtaagacgaaaagcctgatcacacgcacagacaaacgtcgtcttctgcgcccttcgttaatcgcggtggacaaacccgctgacacgcggagatttacgtcatcttccgcgctcacaagatcttttatactgacttttgagtcacgctgaccggcggaaataccc

SEQ ID NO: 170501 - DNA, 297 bp, Glycine max
tgacctccataattcttgatacgaggcgacagatcctatgtgaatgcctctacacaatagacgctacacacggagtcttcaatgaagtttcaaatgccatatcaaacgatgatcccaccttgctataatatgaaacatcagacgcacacttcaccaaccatcgtctgataccatatacgacataacttttaaccttcgcattcgcctacatccaatcacacataacaacggctctgcttcatctttcgacttaacaatctctcccccccccccctcttcttctatgccaaaccaaca

SEQ ID NO: 170502 - DNA, 280 bp, Glycine max
cagctcttatgctctgattactcacttgatgtgaacttgcttgtggggctccaatggaggcttgattcttgagcttcaatgagttcctttaatggtgattttccaccatggagatgccgcagatgacaaaggagattaggtgagaggaggcaccatccactagggaataagccatggaagaaggagcttcccatcaagatgagccttggataataagcttggagagaatgcttctatgaaggataagaaagatggagagaaagatagagggggggggggg

SEQ ID NO: 170503 - DNA, 441 bp, Glycine max
  unsure (1)..(441): unsure at all n locations
taatacctatcatgaatatagttgccactatttctctttctattatggctgnccatcaaacaaaagcttactcaaaaaaaagtgagaaaaccaacctgcacatcgacccaatctcatcagagttgtgtaggtggaagaaatcaatggtggagtccacccccatggaaacgaagaggaaccaatgaaagtttctgacatagttctgcttggatgcaaatggagatgaacaagacctaacggcctataaaacacacataaagtatgggaataggtatatttaaaaattgggaggtgcccgattcaaaattggaggtgtttgattcacatatccagcataaaatggcccacactgaggaggttcaatccaagccaacgttataattagactaataattactcagcacacaaatcacacactgccctaatctactatttgactct

SEQ ID NO: 170504 - DNA, 415 bp, Glycine max
  unsure (1)..(415): unsure at all n locations
aagctctagcttatggactaccttgttttattccttngacagcccttttgagccttgtttccctttccttgtcttgaagctcactacaagccttaagagagaaaccatgatatcaccgtatccttaaggaatcttggagctttggaattgttttgggaataagtgtgggggggtgttgttctataggataacatgttttgttggctatgcttcatgatgtattttgggccacaccttgatgacattgtatattggataatgttggacatgttgaatgagatgttgtttttcacaggctacagagcctaaaaataatcataaaccaaatagaaaagcattcaagttgagtgaataagatcttacatggcgaaagaatgatgagacttttggttttactctttatgttctaaattct

SEQ ID NO: 170505 - DNA, 418 bp, Glycine max
  unsure (1)..(418): unsure at all n locations
agctatcacatacttgatacctatnctatatttttagcacgataattacctccaaggccaagatagagcaaattggagagattcccaatttgagatggaaccttccccacgaatcgagaataaaagaggtcgaggtgagtcaacgaggccattgcacaaaggaaagaaggaattgccataccttttaaatcattgtcgctcaagtcaagatatccaagcttatagagattcccgatctgagagggtactgttccgttggcaacaacatatctcatgtcaagatacaccaaatctgatagattcccaatctgaggaggaatcttccccctgaatccagtatgagagaggttgagatgagtaaccgaagtcattcgtccaatgaaagatagaattgacataccttttccaagaattcatt

SEQ ID NO: 170506 - DNA, 318 bp, Glycine max
  unsure (1)..(318): unsure at all n locations
gcttatcgaagatcccaatggactcggaagaagattctcttgctccccaagtcatatcaagtatatggtcccgccaattatcaagcagtggatcatatgatcgacgcccacgtaaatngaacaaattaaagctgccgaaatcaatcttcaatgatctgtcattgcttacttaagctatggataattacttgatttatgtctcattacacaatcttggaagatcagctggtaaaaatgtataataaaatttattgtggattaaaatactgccgggtttgattttgtgaggcccttacctggcacacatatggggtgatc

SEQ ID NO: 170507 - DNA, 420 bp, Glycine max
agcttgcagtgagctctttcgaccctattttataccttgtaatctggcttcactgaatcccatatattttttgtcgcgtccctctcgaggatcgttcaaggacttcacgatctattgtttggaaaaggtaattatttacctttaagtccttcaacttctgctcctcgatcaatttgcattgtgtctccgtaggctctattccatctgccaccatcaatatcccattctcaatgagatcctaatattctttggagcggagaaaattctccattaacattgcccaatgatcataatgaccattaaaccttggaattgcaggctgcacgaaactgctactcccaccttctgccattcttctcaactcgttctactcaaaagaaagaaaaactgcagtttctttcttgactacactcactgttt

SEQ ID NO: 170508 - DNA, 473 bp, Glycine max
tgtactaacaatcagactaaattgaagcaataattcatttgtatttatgttgattgtctatcccaaattctctttcttcttcctcacaacttttttatgcttatgttcaatttctacatgcttccattcaatttcatgagaaaggaattctaagcgtttttatatttatgagaaaggaaaatatattctaacatttttgaaaacaatttttcataatgtatttataaaaaattgtgaccaacactgcttcaacactactaaaaacaattttcataataaagctatgttttaatacattacaaaaatagtttttacaatgcattaaaacataattatattacataaactagtttttgtattgcttgacggatgaaaataaaggttaaattcaatgaagacgatgggtgaaggaaacaccaaagaaagagaacgttgcgtgggaggaagaaggaaaccatacatgggtagataat

SEQ ID NO: 170509 - DNA, 422 bp, Glycine max
agctttgagcttcgagcacccacgactgtttcaagagcagtgtagggttttcttcgacccacagttccaacagtagtgtagggttttctttgacatttctttgatagggggttctatggattccaacgagcgatttccgacagtattgaaatcaatgtggggcaatgtgggtgtccaccgagcggttttcgacagatttcaggtgggaggagaaagagaagagagactgcagcagggttttcgagcgtgcgagttgtgaaatttcaacacgttttaacttattaacataataacatcggttttttaaggattaccgatgttaagatgaatcggttaacatcggttttctaaaaatcgatgttaacatcaacaaggtaacatcagtttctcaaaacaccgatgttcagttcaactccttaaca

SEQ ID NO: 170510 - DNA, 471 bp, Glycine max
  unsure (1)..(471): unsure at all n locations
tctccttctttatgcttctagggctcttttccncaaatatgtgtgtggctactctgaaattcttttccttggttgttctgcacactgtcctaaaaggtgtgtaaaagctatagaaagtagtaccctaattcgtcacaagacaggctttaaataggctttgaaatcgcgacactgcgcttagcgccaccctcgtgcttagcgcaagtaagtgaaattgggcttagcgccagtctcgagcttagcctggctaaaggcacctgctacgcttagcacaccgatctcgcgcttagcgcatggctttgatgttgatgctctaccaaattctcctttgcactaagtgcgctgaagctgtgcatagtagtggatatgcgcttagcccaactgttgagcttagccccactgctacattntgcaattcacaacttagcctctnttacctaacaatcacagattcatcattaatacaaggaa

SEQ ID NO: 170511 - DNA, 414 bp, Glycine max
  unsure (1)..(414): unsure at all n locations
tcacctgcggcatgcaagctngagtccttttgagaccaatgttggtctaagtgttgaaaaagttggcagtatggaagctcaaacacttatagtttgggggaggatttgtttgatacaatcggtcctctcttccataccattatacttcctattagtgtatagggctctatcaaagatcatcacaaagctagtgtgtctccaacataacttccttaatttggggagcaaaggaagatgagagaaaaacgagtaaaataaagtgggaaaaggtatgctcaccaaaagcttgtgggggacttggtattggagagatggataattttaataaagctctattatctattagctaagtgattgtgaagataacaaaaaagaaactctctgggtcaaagtggttatagctaggtctaaatc

SEQ ID NO: 170512 - DNA, 451 bp, Glycine max
  unsure (1)..(451): unsure at all n locations
cggacaaattcatganatggtgtgcgatagcagcttctctatctttacaatgttgaagggccacaactctctgttgcttagtaaaggctctcagatcaacttgaattttctcatcatgttgctgaagagtttgagataacatttcttgagtgactccttgtggctcaacatagtgaatagggttaatgtcccttgaacttgtagagttgttggttaatagaatattgttagtgagagttttggaaaaatcttcaaaagaggatgcttgtggttgttctagacttggcacttcttttttatagtcaacataagtattctttttgtcaaacatgtcattaagtatgaatcccactacatttgcatctgcctaattggtcgcttgatttgcaaagtgtttcaacatccacttacacttcatcgtgtatgtccaatgctattagaactcgattga

SEQ ID NO: 170513 - DNA, 434 bp, Glycine max
  unsure (1)..(434): unsure at all n locations
tagcttgcacaacaagtaactaattttgttttttacaaaatganatggctaactaactaactaacttccattaatatatagattgactactcagaaggaagggatgagcattgattaaactcatctaatctacctaattaaactaattacacaaaacaaagcctaaactcccagcccaatttattaagtgcagaggttctgacttccatgcttaatttaacccttgaaatcgtagaattggccaaatcttatttgtgacaaaattgattatcgttttcatagctttccagagactactctcatgagccatttggagttttttagtgtcctataggccctgcataaggaagataggtcaagtaagcataatatctgaaaatttgctacaattctcaattanagtcaatgatttgcctaagaccaatattgagtta

SEQ ID NO: 170514 - DNA, 474 bp, Glycine max
  unsure (1)..(474): unsure at all n locations
ctgcgaaatgatntctatacaaaagttagtcgtataattcgtctaacatactcctaggcgcctgttgggatttcccctgcagttactgtttggtccactttttctttatacaaatatgttcaagggaaatccggtttgccggaaagccaaccggatcgtcaagtatttaaaattaaaatggatgaatccgagtatcgaactcagggaactagtctaagacaggtttaaattcagaaatatggcattgttgaaagaaatattgataattgatgatttagaataggattaaactaagtctacgctaaaaacagtaaaaatgcaagtaagtaaaattgacagcaataggtagaagtgttgggtctttctaactgactagctgatggatataaagatgtttctttaatcaatcatgctgttgtgttctatactatagccctaaatactaaacctcgatccctattagactgaatcaat

SEQ ID NO: 170515 - DNA, 193 bp, Glycine max
  unsure (1)..(193): unsure at all n locations
ggacccaaggacgcggagaaccgggagggattttacctttcacgncaaaccaaacctctgctgagaacacccgaaaacaaaactccaccacagggccaatgcgagccacggggaagaaaacggattaaaaaaaaaaaatagattctaagactcaagtaccacaatccaaacaagggggagaaatgggaataag

SEQ ID NO: 170516 - DNA, 384 bp, Glycine max
agcttcggaagaaagtgatgaggtacaatctcctaaggcaaagcttgaaagagcccgggtagtcaaagagaaagtcaagtccatagccatcaaagtctgaagagagtatgatgaactaagggacgtcaatatggccaccgatgaagccatggaatgagaaaccaagaaggcccgaaaggaagaacacgaccaaaacaagttttgaggggctttatagggcagcaatagtgagctcaaacttcgaagaggtgaaaggaatcatcatgggtcaaaggcatgatctggaaggacgagctaaaggcttgccttatgtcgagaaagaaattgtcccaacagttaaagtgagactgataggaatatgtgggccatcatcgatgagtgcca

SEQ ID NO: 170517 - DNA, 476 bp, Glycine max
  unsure (1)..(476): unsure at all n locations
tctactgagtaaatataagaactaaacaagacatatttacaatcctaccaaaaagaaccatagattgggagaaatatatacatttttgaaaacttttctatacaaaagttagtcataaaagatgactaacaatgccttactttggagtaactgaacaaatctaggagcttgattatagtgaatttatagtgcctgttgctagtcgtcttatacgtctaacttttgtatagaaaacttttacaaaatgtatatattttctccaatttatggttcttttcctacgattgtaaattaatttttctttgtttttatttgtactcagtagaagccttgtgtatggaattaatgtcaatttctcttcaatttcaggcaaaaatgagcttttctgaagaagtgctatagntgatgtctcgccaagcgagctcaatgcgcttagcgagtgtcatctgctaagtgaggcatccacgcgcttagcg

SEQ ID NO: 170518 - DNA, 420 bp, Glycine max
agcttgtgcctctccacgtctggaatattaatgtagcatacagatccaaagacccttaggtgctttgctgatggcttcttcccgttccaagcttcaattggagtcttgtctttacagactcaattggacatctgttgagtatgtaaacagcagtgtagactgcttcagcccataatgtggtaggtagtcccttctccttgaacatcgatctagccatctccataactgtgcgattctttctctcggacactccattttgttaaggagaatatgcgactgtaagttgtcgctcaatgccttcatcctcaccaaatctttcaaactcgcgagaggtgtactctttgccatgagcacttcttagtacttttattccgtttccactttgattttcagacaaggcctttgactttttgaatactc

SEQ ID NO: 170519 - DNA, 471 bp, Glycine max
  unsure (1)..(471): unsure at all n locations
tccatcaagttgtaatcagagcacaagagcttcaagtttgtgctccttaaacctccattaattntttgctttaccttctcttccattgttgtttcatcatttttttctccatgtatctcctcacatgtcttgtgctaaatgttgttaacatgattctttagagtttccaccgattaaacttgctatagaaaatagatttgattttctatggttcaaatttcttgttcttgttcttgaaccatgaattgtgttgagtttaggttcctttgagttttgtcttgttattttttgtggctgaaaactaaatcataaaattcttacaaaaatattaaagtagaagaaatcctcacaaatctagagtgacttgttcacctattgtagttttgtcatagaagtcatgtctagtcatgaaacttgtcacataagatttcttatgtngngctgaattctatcttcttgtttctttgtcta

SEQ ID NO: 170520 - DNA, 423 bp, Glycine max
agcttgatcaaaatagagtctatacattccactcctctcaattcatacgatttctcattcaagtcattcataaacactcattcataagaattaacaccactgaataacattatcaatcagttcactgttcaaacaagctttttgtacaagcaatcaacactcaaataactagaatttaaatgacaaaaatttaaatgaatgaaacataaggcaactaaataactaataactaaattgttcatgatttgcagaaattaaaacaaaacagaatttaaacatcctactcattcgatggctgatcttcatttaaatccagcgctggagtagctggtgcatcctgaagaatgggttggaggggatggctctggcatgggatattgtgaagatacctcttcttgagccatagatgtatctgcagcaatt

SEQ ID NO: 170521 - DNA, 470 bp, Glycine max
  unsure (1)..(470): unsure at all n locations
taagcatcacattcattntacacaaatttcagcatgcttataaagccttgaattatcatgaacgtcatacatccatattaggaaatgaaaaaagttagagtatccacacataatcttcaatctactagagactacattttgatagtataatctccgactacaaaccattaaaatttcagaagaatgacatttatcaaaaagtgtgtagtatagctttgatattacttcattagctatttagagaattggtattataattgtcaaaatgaaaaactactatatgttagagatagggggagcaacatgagataagcaacatgagcaacatggtgaacaacctanaggctaaagcttaaagctcaaggaaaagcttgaagaagttntgacgaagtttttggcttttacatgccccactctcttgagtggatttatattggttgtaccttggtattgtgcttagaaattaatat

SEQ ID NO: 170522 - DNA, 425 bp, Glycine max
agctagttaagatggacaatacgtgggctacactcttaataggatagtcacaacttccacaaatgttagtcataatcagcatgtaatttattcattcgatttaaggaatgagacatacatatatttgtcgtcgcctcttggtcttgacataatcatttatagtctcacacaatatcattggtgttttgatcgagtggttgtcaatgactttgttaatataagaagaaaactcaattttttgtttggcaaatgaaggagtaatgaatcctagagtcttggactatgtcgctaaatgttagttgtgactaccttccaaactttgctcttttttatgagcaaataccattatgtgtctcggaaacaaccatgtcctattgttggccaccaacaaacactttgtagctatgtatacacttgagtgataa

SEQ ID NO: 170523 - DNA, 280 bp, Glycine max
gtttcatgcaccgctgcctgtgcccaaaagaaatctatcaacgactaaccgcctgaattctttttgtgtgctctcttctcacctcttactcggatacaatcaaaaggcactgaattccgctctgaacttctctctcgtgctctaccattatccccttgtgcgagacaatccacaacgacaccaccccgagaattcttgagaaacatccctttgcctacttcctaagtgcttcaaggactaaccgactaagaattcttttgcatcccgaatcacgaagaat

SEQ ID NO: 170524 - DNA, 337 bp, Glycine max
  unsure (1)..(337): unsure at all n locations
agcttgttcgcattnttagtgaaggaatatcgagacttgtgggccgttgcacccatttagtctcacattttttctatccaacaacccaagagtccgatggcatgcggagccaccttacgcttatccgcacctcctcattcggagaccccaagttcgatgacacgcacagaccaatgtggtaatctgcaccctttctcgagatgtcagcgtcttccggtcgagacaatnttagtctcacatttttgctatctggcgacctaagagtatggtggcttgcagagaaaccttacggttattagcacctcgtcattcggagaccccgagtctaatgacacgt

SEQ ID NO: 170525 - DNA, 406 bp, Glycine max
  unsure (1)..(406): unsure at all n locations
ntgcctttaaggcttgtacctcatcactttcttcctaattctcaacctcactgtttctcacagcctatacatttgggagcaaatccaatccctgtgtccggactctcaaccacttatggtagccgccgatgatcccgttactgctttccctaaactctctgtcctttcttcacaccgnatcacctgccttgcgaacctcttggagtacctctgcattgcggttactgaaaccgccgtgcatgaaaggcgtgacgctctcctgtaatggcgctcctctcatggagtagccaccctgtcttatggtgacgaccggattataaataatacaaccccttgttccatctatggaacatcttgacactctctccatgaagatagaatcctgactctttcttccttctaccga

SEQ ID NO: 170526 - DNA, 319 bp, Glycine max
agcttattcaattattaacttgtgtcaatttgttcccatgcaacacccccatcagttccattatcttactcttctcatcctacacctgtttctctctccaaactaacaaccaacaacttggtcgtccaccagcttctcttcttgtatggattctctgaactggatgctgaaatctcgtatctcactaattgctcatcttgcctttcacgggaagagttatgaccttccgaaggtgacaccgaactcctacatggagtcttcttattcgtgggatgctatggaagagaactatgaactgtctctactacctgaaactccc

SEQ ID NO: 170527 - DNA, 400 bp, Glycine max
  unsure (1)..(400): unsure at all n locations
atcatcatatacatattgctggacaccgtgagaggaattggctcaacaaggatctgcatttattatgttctatctgatcactcgctagaatgtgagttgagaaccctactgaggacttttaagactgctatgacactgtaaatataaatgcgatcggatgttttagactgcttgacaaatgttgctgatagaactgcgcgcatgcaactcttggcacataaactatcatgacgtgaagatattgcatcccattatacatgacactaagtttcaaccagtctctagnttatacgccatttctcttaatccacggattatgtcctcatgtgctttgcaccgccctaatctatatacatacgacgcctcttgatgtgaataaatttgtcattccttctattat

SEQ ID NO: 170528 - DNA, 412 bp, Glycine max
  unsure (1)..(412): unsure at all n locations
gcttttgctgatgtttctttgattccttattctcttaggaatagatggctgaattgaatagttttaactaaatatttcaatttttgtagttggatatatttataggaaagacaatacttgtgcagatatgctngggttctactggtgggattctaacccctttttctttggcagcagagctcaataggaacaagataggtttacctaattacaggttttcttagttttgctcatgagtttggtttttatgtcccccatgattttggttatgttgctcttgttccttttcttttgataatgaatatcttggtttgctgcattattcctttagtagttggggtgtcaacctggttgaaatctcaacaactttagtgtggtaagcatccttggctgaaaaaacctttataatttt

SEQ ID NO: 170529 - DNA, 476 bp, Glycine max
  unsure (1)..(476): unsure at all n locations
tgttacttctgtgttgtgtgtntggaattgtgttgagggttctatggaacctgctatttataggagtgaagcatagataaagttagagataagataaattgtagcttatagataaaagttagaagatagttgtaccttatagataatgtgtgaccttgaagataattaactacatgctaatagataaaggtattcaaatatattcaaatattaatacgttagagataatctgttggttagggagtccaactactaaggaccgagtgttcgtgcttctattacagggttggcatggagggctaacacgtgtctaaaagtgtcatatataatgccacgtgtattntatgggttctggacggtacaactaatatgctatgtccttttgtgatcaagcattgcctaatgaacaagactgagaaacagattataataacattataggatcatcgtttggacacactgacttatacaatgaa

SEQ ID NO: 170530 - DNA, 339 bp, Glycine max
  unsure (1)..(339): unsure at all n locations
agctttaanagtgcaagtaacaagaaattttctntgtgtcttctctctcttctcgttattcctttctcttcttcttattgctctatactagcatccttcaaaaactacaccactaacatcttcaaaaactagtgaacgattttcgtcaatacagtggcggcagcattggccatgatgatagcttcactagctacgccagcggcactagcgtctctggcaaagggtcattaatggagtcaaggtgttcaatgatgatgcactcaacgcttttctcccttttcaattgattcttctattctcactcgcttgttaaggatgcatttttcttaatgttccaag

SEQ ID NO: 170531 - DNA, 466 bp, Glycine max
  unsure (1)..(466): unsure at all n locations
ntgcaccctccatacttagaccctaacacctgactctataactctcatttcttcctcataggctcgcatctccatttgggcaaaagggccacattgaaaagaaaaatattcttcactcctaacccgctatttttcttactttgacaaatattatcctaactttccccacaaaccttcctgctaccctactcacaacccaataaaaagttcctttggtaaccaataaaggcttcccctacatgtttagggactttaaaaaaaaaaggaaagaaaagagacaaagaagacaacaccaaatgaaacaggcacactctccccagaaatggcaaattcttatgtttccaccccaacaatttttttctaaaacttatcaacaataggcttccaagattccatactcctatggtttgaacctatcattatacctaaataatcaaaagggtaagataacaatgtacaattcaag

SEQ ID NO: 170532 - DNA, 428 bp, Glycine max
  unsure (1)..(428): unsure at all n locations
agcttcctgaccatatatatnttgagaaacctagcttattataatctagtcctcataaaatatggtgtcttgacgaggagttaggagaactccaagcggggttgcttttaaatttgtgagtccgaagctctctgtcatgtcaataacttgatttgaaggagaagcaacattgaaagaatgtaagagtctatccaaggtcaagtgcaccacacgcagagcgagtgatgccccagggcatgctcgccttccagaactaaaagggacgagctcatagttctgaccctttacatcaacatctttgtggcttgtcaaaaacctttcaggcttgaaatcattagggtcactccaaacacgaccatccctgtggatcttccaagcattcaccatcaattgtgtgcctgcaggaatgtgatatccacatgaaaagg

SEQ ID NO: 170533 - DNA, 470 bp, Glycine max
tgcagacccttctatggcacaaccaggactgtcatctccttttttattcttgtcctcggcaagtgccttttccattggagatcaaggtgaaatgtggagtccaaggttcaagaataattcctcttttgaagtgcgcttacataatcctttccacgtggaaggacttaaggcagttagtgggccatatatcaccatggttgaagtatcatggctttatagagagagtcacaagtcggctgatactgagaagctgctccacaatttcaggtgaggctgctatatacttatatttgtttgagatagtacagttgaattaattctttggttctatgtggagtcttaatgagctcgtccttttatgttgatttacgtcacttatttgtcgattagaagaagtagacctccgcaggttgaaacactaagagaagatagcttcttggatcacatacacaatgctgtactgatgcatg

SEQ ID NO: 170534 - DNA, 429 bp, Glycine max
  unsure (1)..(429): unsure at all n locations
agcntgtctttactgccagacgacacaacattctgtattatatatatatgataaatcttagtcaatagaatgtaacgtgtttgctatctaaaaagatgaaggatggctcttgcacaaaaaacttgggcatgtcaattcaaaacatatttcaaaactatccaagaagaattttgatgcaatcctaccccccaagggtattggatagaacactccaagaggattgggctagagctactaaagaaggccctagggttttcatgaacctagggtagatttttcagcccatgggtcaaggttggattcacacttctttgtaaatgttacaattatgttttccttcttttgggccttgtatttcggccattctagtagtatagggtcttagccttgtatttcacggcattttgagtagtctttttaaatagggac

SEQ ID NO: 170535 - DNA, 436 bp, Glycine max
tgaaggcatgtaacccaccatcttctcatagtagaacactgtttacgtgtccactatcattggtatcatctccctcccgatcattgggggtgctacttgagccgcacatccctccatctctgggcgtattctttgaaagatttgtgctcccttttacacatgttctacagatgcgttctatctagggctatatcacaattgtaatgatactgcctaatgaaggcaaccattaggtccttccaggaatgaacccgagaaggttccaaattagtataccaggtgacggtttcccctataagactttcctggaataaatgcatcaacaattcttcatcttttgcgtatgccctcattttcctgcagtacatctttaggtgattcttggcgcaagtagtccccttgtgatgcaatcctactccgcaagggcatcggatag

SEQ ID NO: 170536 - DNA, 434 bp, Glycine max
  unsure (1)..(434): unsure at all n locations
agncgttgttcctctcgctataatcaagcttctgtccacttataaatacaccttcatgcacttaatacccctctttcaactcctcttaatccgtacaaaaaaataacaataagagactcttctgtggatctatttctccgaaacaacataatattgaaaggactatcaacatggatatagaaagaaaagaaaatttgacttaaccacatactccactttatgtttcctttgtagaaaagagaaataataattgatgatattaagcgaatcgtttaaacagataaataaaataaaaatgtgattagcattaattaatatacgcgttttgattgttgaagtatccaaaaataattcaaagttctattgtgttgccaataacacaaaagtaattcggaaatgcatactatcatccaattttaattcaataaattcga

SEQ ID NO: 170537 - DNA, 480 bp, Glycine max
tgtgtctcttcacgtctggaatatgaatgtagcatatttatctcaagacccttacgtgctttgttgatggcttcttcccgttccaagcttcaattggggtcttgtcttttacagacttagttggacatctgttgagtatgtaaacaacaatgtagactgcttcaacccagaatgtgttaggtagtcccttctccttgagcatcgatctagccatctccataactgtgcgattctttctctcggacactccattttgttgaggagaatatgcaactgtaagttgtcgctcaatgccttcatcctcacaaaatctttcaaactcgcaagaggtgtactctttgccgcaatcacttcttagtacttttatccgttttccactttgattttcagcaagggccttcaactcttttaatactccaaagacttatatattttctttgagaaaatatacccatgtcattctagagtagtcatcaatga

SEQ ID NO: 170538 - DNA, 388 bp, Glycine max
ctgcagctgggcaaagattattgcccttttgaggaaaggtccatatcttgtaaattatcctgttcgtaactcaattggcaccccttttctaaaagaaacaatgcattggcactgacatagactttctcctctctctctatattttgaactctctatatatatgtacctactctgatatcaagcaatattatgaaaagtttttttactttggtccctcaacctcaatccaatactctcttttcttatataacattttataccttacaactttcttttactttcctctttatacaatattattttcattttaacctcataaatatttctatatgctccccataaataattaaaaaatattttttcctatcaaaggctttcaagtatttaa

SEQ ID NO: 170539 - DNA, 280 bp, Glycine max
gaacaataaactccagtgaacgataatgctctaatactaagtacaactttaccacagtacatttctcttcttatataaaattaccacttttctaccattacaactatacactcgagtcattcatgggcttttaataccaagtctgagcataactcacttatgtaatcgaactcacagtccacctcgagctgcgccgttcactaacacacatgagcttgactgagaaccccatgagctgagctaacatagtccatgaactactcaccttatcgacacccct

SEQ ID NO: 170540 - DNA, 397 bp, Glycine max
  unsure (1)..(397): unsure at all n locations
gaccttaagtcaccgcggctgcagctctgctctgctataaanctcttttatggatatnancctccaaccctgttgaataataatcatacatctataggattttcccaaagatccaaatatttggtcagcacagtcattgcatgcagtgtgaagattgagagattttcttaggcaactttttgaattacttgggttaagttattttcttatttgtatactagcctagtgtttcagcttcccaagttatatatattggatcttgctcttaatgaaaagggcctcttatttcactccctgaaatagaagaaatagacacggagtttaaattagtatcctttagaactgtacattacaatcgaactccaccagatcaacatacttgaaaaaatgaaaatga

SEQ ID NO: 170541 - DNA, 424 bp, Glycine max
  unsure (1)..(424): unsure at all n locations
tgatgtgctctgaacctaactccttttgaagttatantgtttttggccatacatgtattgatgttaataaacagagggggtgaaagaattgaagctgtggagataggaaaattggcttgctgacctattgtggagatttgaaggcagctaaaacaaatattggcagttggctcatttatattcattactcacatgtctgtagtcccagattttgaggtgtatatcatatgtatgtttatttcatattgtacaaattgtactcaacagtcaacttaatgcattttttgactctccattatgcagttgcataattcttgaaatagaatttattccattatacagcctttgtgcaatataacccaactgtttctgctttccaatatgggtatggttgtgagccatttctcctctcacagctcaatta

SEQ ID NO: 170542 - DNA, 411 bp, Glycine max
  unsure (1)..(411): unsure at all n locations
agctttcattgttgacaactaacattgttaatngatgaccgcgatgcatgttngtgccaaatcattgacaatgttctataatgcagaataatttattcttttgcagcattgtgatatttctatcacacttggatttggataggtcccaattaaggcaaaaattatgatttttgcttgatcaactaaaatgttctttgtacatatttttctgggtatataatattaatctatgtatatctaatctttaatatttctgtcattattgttattgcatcttttcaataatcatgtgatgtcttgggttttattctgtaggttttattatcatcctaatcaaatcggtgatgatgttaatttaactgtgattctatttttctgaccttgctatgataagatattaaagatgtactt

SEQ ID NO: 170543 - DNA, 387 bp, Glycine max
cttactttgtgagttatgcagaaaggaattctgttatttcatctattcacaactaagtagtacattcactcttcacaaatcaacatatttagtctcaaatgatcgaatgagtactaatggacaaatgagttggagggactgatcatatggatttgttacatcaaatttacatgaggtcaattaagcagtgaacttttgttctcttatcatcaaagtatttatgtttcaaatgcgacaaattaagaaaaaaacttactactatgaaacaagatagtatgttaccccaacatatatataattaagttcacaatacaagttgctgcttattattaatcaaccaaccaacccacatactctctttaatttgctggtgcacatatgaagctc

SEQ ID NO: 170544 - DNA, 415 bp, Glycine max
  unsure (1)..(415): unsure at all n locations
agcttgagcgtcactctacaagaggtactgctctanccttctcatatccttaaaatattcttgtatctggagatgcaaacgcccaagttaataatttaatattaataatcattccatgcatgaatcatggcaacgaacacaactactttgtagaattagcttaccttttatattggtcgatatgaaaacatttcaactacatttaataatataaataacttaataattgaactgaaaatgtcttttatttagggaatgtattttggctttctgtcatgaaccttttcattctagctggttatattattcattttcaataggaatatgctatttatatttttaaaataaagaaataaccttatatgtggtgcaatattggtgggtaccattatcaatttttagtctttaaaaaaaa

SEQ ID NO: 170545 - DNA, 367 bp, Glycine max
  unsure (1)..(367): unsure at all n locations
ggacctataaatctaagctctcgcatgtattgtttattttgcttttttgactatatcttggccaagttttatatttcgccggttattgaatggatctttaccaccactccttataaatgtcaaaaatgcttttactgaccctagatacgctgggtgatagttaattgcgttaaaggttttagtggctatttatatggctggtaaaagttatattaatggttcgtaaaaacgaattttgatgtagtgcacaccttcaccatttggctatccccaatccaccaaacaacgacncgattctaccagctctttagagtacaaaatgttacttcacgtgtgtctgaacagcttccttgttccaatgtttgat

SEQ ID NO: 170546 - DNA, 426 bp, Glycine max
  unsure (1)..(426): unsure at all n locations
agcttgtaggattatggcgtacccatcacatgtggtactaggtggcggtcgggcgatggtgcacaacatgttntccacatccacaatgcgcgcataaactcaccattccctgttggccacctccaactgaactcacgtactcccacgtagcccataatctcgtttctctcaacaccgggtccccataaatactcccaagcttccacaacattcaagcaaaaaaacattcacatagcacaagctttcacagccaagcaaaacagagcaaaggcagaaaactctgccaaaacaccaaccaaatcacagctttcttacttaaagacccaataacaattcttcgtccgataattaacatggaacactcaaaatttctggaagcttaaacatagcctcatttgaccgtgggactactagccaaacattccc

SEQ ID NO: 170547 - DNA, 444 bp, Glycine max
tgacaggttcacgtgcaggtgctgctactggtggaggcactttaatctggttgccagacctcaaggtgatggcactcacatttttcggattctgcacagttcatgaacgcaatttgtcagaatttttgggactgagcttggctcaactgagtagccatctgccccatctgatttttcagactctgaatggaggctcttgtctcttgctgaaattgcatattctggatggtcatttgccacactaactcttctaatgaaggttgaggaggagcctcaattgcttgttgtctttgttgtgactgctgctgtgttggacgaggaacatatggcttgcttgttccactaccattctaaaaacgacggacatgctgctgttgttgtggaggacttgttcatctcacatatggatgattcctctgttggaccgactggccttcgaataat

SEQ ID NO: 170548 - DNA, 385 bp, Glycine max
  unsure (1)..(385): unsure at all n locations
agctntgatgtgttctaaaagttggttatgaatttcatagaatgcaagtaaaattctgaatgcttatgtgatactttatgaattacttatattttaaaacttataaattgttatttattatttgtaagttctagagaaattgaagaatcaacttttatagacgagattgaatctgatgatgaaggtatattcacttttaggtatcattattcatatctaattnttcagaatttttaaaatataggtggatctttgtttagtagcattactcaacatttgccagatagtagatattattgttgatcagtaaagtaattactgtagaaccaagcttcatgatgaatcaagaatgatctcaagatattttgatgataaccaagatgat

SEQ ID NO: 170549 - DNA, 481 bp, Glycine max
acctataaaactaagcttgtatcccaggaggggattcgagcttaatgctaatgggcatcctttgaagattctgaggaagaacatgactactctagctcagacatggagcattctttccttttctaacctcattctcatctcccacacatctaatgtgaccttggatagagccaaattgatttatgggattattacgaagatggacatgaacttggggtacctcatctcccaccagatctctctgattgcacagcatgacacatccagacttggattccctaccttgatcaaagctctatgcaaggccagaggagtttagtcagactctagatccctgccattaacttggcatatattaagaagaactgttggaatcttgatgatccaaccgttaagcacagcttcagcgtgcttagtgcgacagaagaatctggcagggcatcaatatcaagggcatgcgctaagcgcgagattagtgtgc

SEQ ID NO: 170550 - DNA, 427 bp, Glycine max
agcctgttgaaattgccatgtttgggtgagttatacatacccattctgctttaggggttttgcgatgatatttgtgatgtttatatgctgaaaatgctgatggaaagctgttagacatggagggtacaactaacttacggttacaaagtgagaatgtgatgttatgagtggaaaaaagagtgacgctttgagggttggaagactaaatctgaattctgcggtaaatggaggttaaagtgagttaatactaacttgaaatgtcatttaggacttatgaaaaagcttggactgtgctatagagaaaaataaatgaccaaagtgaacaataagccatttctagggcaaattggggtgttgaagagtccactttcgattcggtgagattttatgtgtaaatccagttcgaacaaatctaaataaatggtat

SEQ ID NO: 170551 - DNA, 464 bp, Glycine max
  unsure (1)..(464): unsure at all n locations
ctggagaatgatttctatacacaagttagtcgtatgatagcgactaacaactcccaacttacttccaatgaaaggcctttttgttacaaaatttgaatgcaatgaaggtaagtaaattgtcaattaaaaaatacagaaaggtcctcaattttggtggtttttctctctttggtgattcactcaatctggagtgcttcttagtccaatagctcttgaggtgattggccccttgcttcttgactcaaattcgtcaagggatgacaccaatactcctttccaattctctatatgacaactcacaaacaaggaaacaaagagacaagcaataaccaaagaccacaaaaatgaaatgaaagctaaaccaatagatttttaacaagacaaantttcaaggattattcaacaattaaagcaataaaaagcacataatagacagctaggactcaaagagaaacctacaatga

SEQ ID NO: 170552 - DNA, 345 bp, Glycine max
tccggaattcctttccaaccccccagccccgttcataagagaaaagagcgctactgcaatctacgaatcaaaggattgagcccggcagatcatttcattctcgagacctcccatcgagggaggaacaggtatccaccaccttgtgcgttctatgttaccatcctttgaaactgctgaggagaaatgctgacaaaaatcgtccaaaggtctcgagggaaaacacctttcttccttcatccaagatcggaattcctaccatataggcactagtttgccacaagtgaagaataacggggagacaccatccggtcgactatgacagaatgggcttaaatattatccacc

SEQ ID NO: 170553 - DNA, 383 bp, Glycine max
gctctcccataactggaaacatggacgtgtcccctttaccggatctacagctcactcccagtcccagccatatcctctttaatacctgcccacatcgatataagaacacatcttttctcgaacgcactaacacattctataatattctctcacatatgcactattaagtcgccttaacttcattcttctttcatcattactgacaatgatgaagattctgatggcgagatcctcttcttgactcgagcactagtgcgactattattataccactcatttgcccatgtcatcatctcttgttcacatcctgatgaagatactccagccagtgctcgccatggcacacatgtccatcatttcgacctataacgccccactacagc

SEQ ID NO: 170554 - DNA, 404 bp, Glycine max
  unsure (1)..(404): unsure at all n locations
agctctccctctgtgatcaaatacccacattccaatagaatccatcttgggcctttttcccacaactttcgtatatgggagagaaatgttcatcttaagcatacaagtccctaatattatcaaatcctaaaattcgagctcccaggaagcaaaacaatgtgtgtctcatagagagggtattagctaccacatttgttnttccctttttgtatttgataacatatggaaattgctctaggtactctacccattttgcatgccttttgtttaacttgctttgccctctaatgtacttaagcgattgatgatcactatgaatgacaaattccttggaaactaggtactgctgccaagtctagagggctcttattaggcataaagctctttatcatatgtggggtagt

SEQ ID NO: 170555 - DNA, 400 bp, Glycine max
tattggtggaagtcgtctgtatgcctaatattttcgttatagtatctagaaatgtctgttgagaaaagtatcagaattactagtataatcgttatgcataatacccaacaaatgaactggtgatctcttggaccacaatatcatgatattacagatgggaaaagcgtgcttaagaattgtttgtttcttccaaaatatgaaaaattggttaagcattgcaaaggccagtaattatatttatttatttttgatgatttaagaaagataagtagatatatctatgattacattgagtttaattcttacgataaattttcttacataaatattccataggaattcattctcctaccacattatattaatgaatacgatgattgtacaatacagcgaatttcta

SEQ ID NO: 170556 - DNA, 310 bp, Glycine max
ttacagcagattttattaatgacctcttaacctagaattaatataacttaatgtcattaacctacggaattaaaaaaacctaatggctgagtgttactgaaattgtggcaaccaaaagtcacccccaacagccaacaagtcagccaccatttggtctcccaaaaggctgatgcctaagttgccaaatgggcccttattacaacttgaactaaacctaactaaagcccttttaattgattaacccaaaacatatttttggtcagccaactttacaaggattgggccattatataaacaaactaaacactct

SEQ ID NO: 170557 - DNA, 445 bp, Glycine max
  unsure (1)..(445): unsure at all n locations
ttgagcaaattcaaatgagaatcacttttgactcagatgtntgattgagtcccgccatatatcgagacgctcgtaattgaaaacaaaagctctgagcaaattcaaacgacaataactttttactcggatgctcgattgagtcccgtaatatatcgagacgctcgtaattgaaaacagaagctctaagcaaactcaaacgacaataacttttacctcgggtgttcgattgtgttccgtagtatatccagacgctcgtaactgaaaagggaagctcttagaaatatcaaacgacagtaactttcaactctgatgttcgatagagccccgcaaaatatcgagacgctctaaattgaaaacagaatctctgagcaaatccacacgaccataactcttgactcggatgtccgattgtgtcccgccatacctagacgctccaaatgaaacc

SEQ ID NO: 170558 - DNA, 428 bp, Glycine max
agctgtccaaatgaagaatgttgaaaccatttcaaaacttccaaagagattcacccatattgtgaatcacctctctagtcttggaaaaatgtatgaagatgatgagctgcacatcaaaatcctcaatttgcttacatgaacttgggaaccaaagattacaataatctcgaaatccaaggacttatcaatgttgatggaagctttcttcgaaaaattgcttgcatatgaacatgagttgattcaacaatctcatgcacaacacatgaaaaagaaaataaaaggaatttcactcaaagctaactcctcaaaggaagcttacaaagaatgttccaatagggatgaagaggcaaagaatttcagcttaattagtaagatgttaggagaatctctcaagaagtccaaagacaaaaatattctctaaacctttc

SEQ ID NO: 170559 - DNA, 409 bp, Glycine max
  unsure (1)..(409): unsure at all n locations
tgagatgaggaagtgntgaatggcgaaacntcctgcttttattgttgaccacagagtggtacctgcagatatgtcgcggcggtcaagagaccttggggacgtcacgtggggtgctattgcccaaaaccaaacttgaccaatcccgacccaacccgggcatattcggtcagtgagaacctgtgatgtacctaagcaggcgagctcgtggcagtcaacacataaaaggaacaaagaccacaaagcaaggaggcttgtggtggctggccacctgtgaactctgattgatatgtgggttatgggctctggaatcaatcaccaagggtgggtaatcgattaccacgcttaaaaatgaagacacgaggctaagatggtctctggcaatcgattaccaccgcgtgtaatcgattac

SEQ ID NO: 170560 - DNA, 112 bp, Glycine max
accacttcgtctatccctcagcctccaccgttaaaatgaactaaccaaccccgctattgaccacatagccaaggtccaccaacaataaatccctcaccactctcccactctt

SEQ ID NO: 170561 - DNA, 386 bp, Glycine max
agctttgatgcatctattggagaggttaatgaaacaacgagatgatgcgctccatgagaggttggatcaaatggagaatagagatcataatgaagaagacaggaggagaagagggaatgatggtgttcctagacaaaaccgaattgatggtattaaactcaacattcctccatttaaaggaaagaatgatccggaggcctacttggagtgggagatgaaaatagagcatgttttctcatgcaacaactatgaggaggaccaaaaggtgaagcttgccgccacggagttttccgactatgctcttgtgtggtggaacaagctacaaaaggagagagcaagaaatgaagagcccatgggtgatacattgatggagatgaaaaagatca

SEQ ID NO: 170562 - DNA, 445 bp, Glycine max
  unsure (1)..(445): unsure at all n locations
tcanacttgcaacagaggagttgagcaggttatttagattcgtcttcaaactctcagaggtgactttgagcgtttgtttatggaggagtccgagtcaatttctgattatttttctcgagtattggccgtagtcaatcaacttaaaagaaatggtgaagatgttgatgaggtgaaggtcattgaaaaaatacttcgaactttaaatccaagttttgacttcattgttaccaacattgaagaaaacaaggatttaaagaccatgactattgagcaactcatgggttccttacaagcatacgaagaagaacaaaaagagaacaattaaacaaaaggaggctacggagcaactactacaactcaacgtataggaagcaaactatgcaatatacaagagccaaagaggaccaggtcgtggncaagatcgtggacgtggacgacgacatgg

SEQ ID NO: 170563 - DNA, 401 bp, Glycine max
agcttatgagaacaaaattgcctcaatcatttccaaatatgcatgtgaattaggaagcatcaacaagaatcaagccaaggctatggtgcaagcaatcaatggggcaaaacataccaaatgattatgatgatggatggctcaaattctcacaaaggtaaactcgtcactttcaaaactatcatgacatgtagaggagaatcaaggatttcaagtcacaaaatatcaagaacttttattttcaaaacaattacccatttcttgaacatatcctataattcaaagaaaaacatgcaaagttgtacatgcacacagaattgacccacaatattaactagaaatccgacgaaactagcacattaaccaattaacacaacttacaagtttaccaaaccaacaaaact

SEQ ID NO: 170564 - DNA, 480 bp, Glycine max
tctgttcctgctattaggccttaaatctaagcttgttgtaggcctgataacgatcgcatattccaaatgatattgatgatcccataacttttcctcaagcctatgtaggtgccatgggatgcaactatgtttgggggtgtacaatgataatgtccccatgtacataaagcaagaagatcttgggggacataacacatggtggtcaatgtctaaaaatcgttgttatacaattatggcttatgtaagtaaatctaaattatagtccattacctaattcattatcttaaattgatgcataatttactttattttaacaagaataggcatatgaatgagttaagtccacgatcggggaatacctctatgtatcgattccttgggccatactgcagatagagatctgtttaatcacagcttgaatatgaggattctatctacaaatggatgcataattcatggagagatgtatacctacgagcc

SEQ ID NO: 170565 - DNA, 322 bp, Glycine max
agtctctggagtgataacgtgtatccatatctatcacaaatgaactctcgattatgaatattaataactgcttgctgtatacaaccgtatttgtcttgtagcacgtaccatgcatatgctgtaatattctatacacgcccaatcactatctttaaatatttccttcgatatgaaataaagcaagcagaatacactctagtatctttctctctttcgctttatacacttttttacggagactccccctcggcctcgaatacaaggggtattacccatcacgatgagaaaaacttactatgctacaaattctctcacttcaaaa

SEQ ID NO: 170566 - DNA, 249 bp, Glycine max
gttcacaccaccacatgacgaatatgaacaatgatctggagtcatgtgttatgatgacgaaagtcttcaaaacgtgctctgcattatttttaacgtctttaccaatcctccattcctttaaatttggacacaaaaacctgtagaagatgaggtgggaatagaacaaatggatagttagatagtcaaacagaccagtcacctctgttaatccctctccacattgagaaactctcattcgtctctatctta

SEQ ID NO: 170567 - DNA, 141 bp, Glycine max
caacacgagcgcaccaaggggaacaccacctttgccgaaacccacagggccaaaaagggccaatacccacccgccagaactcaagagacaagcagagccccacgtaccaccccaacaaaggggaagacgacaccccacacg

SEQ ID NO: 170568 - DNA, 236 bp, Glycine max
aatgctcaaaatgctaaaatgcgtacaatgatcaggatgcacactatgcctaactaatctatgaaaggttctattctatctcacgatcaaagggttgtaagtcacatggattgcccctaatcatgcactatatgcaacaaataatgtgttctcaaacaagcacctgacaagggggtaaaactacaactatagttcaacgatatccaaaggagctgaaattttgtcagccacaccct

SEQ ID NO: 170569 - DNA, 445 bp, Glycine max
agcttgaatgaccatagtatagggcatctttgtatttccaaatggcgtcataagtaggtagttttgcttttggatttttagctacaaatggataaagcaagcatagacaaaaatggtaaaaactactttttccaaaattgataattcctatcttaaacgtctagattaatgtgctaacttcatctattattgtgctaacctccctaggaatacgtctactcagagaaaacttcacagagaatctactcacatagagacaaattacattgcaactcaatgcacaatgcaatttttgcatatatgaaaatctagctctgacagtttctatttctctatcaagcttcccaaagactaatcatacacacacacacacacacatataataagcacaaaaacaagaattaaaacacataatcgttcaacttacacatacatgacagatgac

SEQ ID NO: 170570 - DNA, 472 bp, Glycine max
  unsure (1)..(472): unsure at all n locations
ctaagcttggnatgcacacagcttcacaagagctatcttggctccttttttattgttttctacagggctgatgaagtgtctattgcttgngaacatatatgatttgccaccatgtttacagaggtgcttaattaccaggggaagaaagggcaatttgtgatagttgaagagcgtagttgtatagtatatatgatattgaattagcctaatttgcctaactagaggacaatctgattcattctgtgaacaaaaagttaataattaataaggccatgatgacccacacacttacaattagtaattgtcttcattcactcatcttttttcagaatgtttgcctctctatgcaaatntagaagcctcacttgaatggtcctctaaaggaacattagcatgacatactagtgtagtttacctatggttgtaggaaacaccacgcatatcacacaataatagtcttgacaccacgtat

SEQ ID NO: 170571 - DNA, 184 bp, Glycine max
ctcttaaggattattcctatatgctagcctattaggcaatgaagcctcttggaatgagaacaatttgatgtgctatgcctcttacaggaggtagaccacaagacacctttttgggaaagacattttcaaattcatgtaacaacaaaaaaatcttatttggaaggactcgcaacctttaaattac

SEQ ID NO: 170572 - DNA, 330 bp, Glycine max
atccgctaagcgcagaccttgcactaagggctctgtgttcacgcactaagccgagcttgctcgcgctaagcatagagaccgctgattggttggctgaatagttcagctaagcgtacatcactgcgctaagcccaacatcttcactataattgaaccttaattagcgggcttagtatggatgaagtgctaagcgccacttcttctttagaaaaatattattgtagcagtgctaagcacgctatcctgagctaagccccaaatccattctgtaatttgagctctttaactgggcttagtggggcagcatgcgctaagcgcccatctcttaat

SEQ ID NO: 170573 - DNA, 386 bp, Glycine max
tatagatactcaagctgggaaaatacgaagcaagccacaaactctcttcacagtatatttattgttcttacctcacaaccccttgaacatcttcacatagacttatttggtccctttaaaactctgagtttgggtggtcattactatggcttagttatagtacatgcttactcaacgttcacatggactttgtttctgaaaaccacaaatgaagcctttgatgctttcgcccacttgcccacgttattcacaatgaaaaaggtctgaagattgcttcacttatcagtgaccatggagaagacattctaatgagtcttctgaaagtttgtgaagaaatggaatcaccataattctctgcgccagaactcttctaatgaaacaaaata

SEQ ID NO: 170574 - DNA, 348 bp, Glycine max
tatgacagagagcgagcacgatacacaacaagcccacgttgttgtttgttacttatattcaataggttaaattacttatttattcttatacattcgctatttgtattttttaattttaatagtcaataatttaatttttttaaacttttatagttcaaaaatatttgtttaattctgatcatctgtattttaattctcttctagttcatatcggtcaaaattaatctctttaattcatataactgggatgttaattatctcttaattcttgctaaaaaatatataaaatattagtacacactagctataactatccactattttctattataactatttacgataatt

SEQ ID NO: 170575 - DNA, 278 bp, Glycine max
  unsure (1)..(278): unsure at all n locations
tgttggcagtgatattattgaccaaccatccgaaaccttctaccgagatatcttgggccacgtgggcctcgttcaaaaccttcactagcagagcccgatgaggctcggagctcatgagtaacttcaacagcgagaccctggccagggttttgttgtgtngttcgataaccttgaattcgctctgctgaattatatggaggaactcgctggctctctctaaagataccttctttttaccatcctttttctccggaggacctttcgccggaatatcttta

SEQ ID NO: 170576 - DNA, 370 bp, Glycine max
tacccataggtgctctgctgatggcttcttcccgttccaagcttcaattggagtcttgtcttttacagacttagttagacatctgttgagtatgtaaacagcagtgtagactacttcagcctacaatgtgttaggtagtcccttctccttgagcatcaatctagccatttccgtaactgtgcgattctttctctcagacacttcattttgttgagaagaatatgccgcagtaagttgtcgctcaatgccttcatcctcaaaacatctttcaaactcgcgagaggtgtactctttgtcgcgatcacttcttagtacttttatcccgtttccacttcgattttcagcacgggccttgaactttttgaatact

SEQ ID NO: 170577 - DNA, 208 bp, Glycine max
accaagcacgcggacaaccgagatcaaagcaccaattccgggaacaggcaaacggcctgggaaagcaccctccaaccccacacaacgaccggagcaaaaagaaacccggggccaagaggagcaaccaataatgcgcgccccccgccgcaccaacagaaaccgcggcccgcgataagaatggcaaccaacccttgcgcgccgggcgcac

SEQ ID NO: 170578 - DNA, 279 bp, Glycine max
  unsure (1)..(279): unsure at all n locations
gcagctgcaactctgaaaaaacttttgcttggttattgatcaaactcggtgcggacacctgctctttatgtcaaaaactcaatgtctgcccacccagactacttcaaactccctttgtnattcagagacaatcaagttcgatgacacccacagacccatggggccacctgcttttttgtctaagactcaatgtctgccgaccgagactactttagtctcccttcgccatccaaagacaatcatgttcaatgacatgcatagaccaacgtggttacctgc

SEQ ID NO: 170579 - DNA, 373 bp, Glycine max
  unsure (1)..(373): unsure at all n locations
tggttgaagttgctgaanaccgcggaaggtttggtctgttttatgagcctacaaatgccgacaagaggaggatttctttataaaggaaagaaaaaagcttatctcatttacaagggggaggacggaggaccatacgtggagagggtccctatttgtcacatcaacgagagctttgtcagcgcagggtggatgcatgaagatcaagttgctatgctggacgaagaaaccaatcaagattagccaaattgggtgcaaccgtgttccctgngttttgaattgaaaattcggcagatcattgtgctacctgagatntctgtgtcgaatccaatgtaatcaagtagtttggaccctatcgttatgcctatgccttacg

SEQ ID NO: 170580 - DNA, 350 bp, Glycine max
  unsure (1)..(350): unsure at all n locations
gctgcaattntctcttatgcaaaacttgtagctttaagaaaacacaaacttagagacaaaaggagaagatttgtataagcagagcaaattgttgaagaccgactttattcataaagcacaataaatcacttggttagccaatgtggttatggtgaagaaatcaactagaaaatagaggatgtatgtggattatagcgacctcaacaaagtaaggatgcttaccatttgcctaacatcgacaaattagttgatagggcatgcaggtttagattactatattttctagatgcctacacgggctataatcaaatcaagatgtgatacaatcctaccccccaagggcattggat

SEQ ID NO: 170581 - DNA, 182 bp, Glycine max
taaatatacggtcttcctctctctctattattttatttaagctatgccacatgtctccattcgagtggagcaaacagggcccactttctcttttgatcgtgacctatactcatccacacaaagtgagaaaaatctcgactttgaaacgctaaaatcctgcctcggtttgcatgccgtttctc

SEQ ID NO: 170582 - DNA, 352 bp, Glycine max
  unsure (1)..(352): unsure at all n locations
atgactttgctgtattatgtggttgcacttgccgcattgcttggatctaatttatttcattcctaccttgaaatccaatntgatgatttagcattttgtgtgtgctatttttatttgcttatggagaaatcagagattttggaataaaattatataattctccaattcttcgtgcaagatcaaataaccaattgttgtggaagatgtaaagttgattttgatatctactaagctagaacctatgaaaatattggaatgctcttaaatcgggatgatagagtggatggttctacgtcaatggttgtgataactcaatcgggttgatgaaagaataaagcaatatattaatttt

SEQ ID NO: 170583 - DNA, 302 bp, Glycine max
aatgttgccaaagataacttaatgtatcctcactaaagcagcattcttcgcacttttttttttcacaagatagtctgctcataatgccaaacagggtaatgtgatgaattaattaaacttgctacacataaattgacgtacatgaaattgtcatcaatataacacctgtgctaatatatcaaaattaaattggtggtatagtcaccatcatcaaaaaacctaaccagtcacttttttttacttaaaacaaatatatccccgacaatatatataaagcaaacatagcgtaaacacatatttaa

SEQ ID NO: 170584 - DNA, 393 bp, Glycine max
cccttagattttctctgccagcaatgtcataaataaggcagggttgatgttcaaaggaaactttaaatcctttttaatcaactgacctacacttaaaaagttttggtcaatgtcaagtacataaagaacatctgatattattttggtacctgaacacgttgaaattgcaatggttccttttccttttgcaaaaatatagccaccattcccaattctgacctttgagacattagttggcttcaaatccttgaatagagtcttatcatatgtcatatggttcgtacaatcactatcaatcaaccaacattcaaaactactcctcatcgaatagcatgttgcagtagaaatataatcttcttccctctactcaacatcttgggcattgacttcatg

SEQ ID NO: 170585 - DNA, 414 bp, Glycine max
  unsure (1)..(414): unsure at all n locations
taagctttcgaacacaaaccttgccactggtaatcgattaccagattttttttactctggtcacttacaaaattttgtgaaaactctcttgaacaacaacattgtgctatgtttgctcttgaaaaatcttttaaatactccccttgtgaagtcttcttgattttttttcttgaaacttgaattcatcttttcttgaatcttgaaatcaaacttctcttgaacttgatcttgaacttgttgacttaatcttgaaatcattctttgggctctttgccatcatctttgtcattatcaaaacttcttgaatcaacttgattcatcatcatgaagcttgcttctacaatctcccnctctttgaggatgacaaccctgaaatcaagaaacacatgcacatattntttcctatcgatcact

SEQ ID NO: 170586 - DNA, 431 bp, Glycine max
  unsure (1)..(431): unsure at all n locations
agctttacananaaagttgcaagagacatgttattgatatctctcgattctgcaattgcaattacctttggttgccattccctgcttaaacatcttagaactttgttaatgagaccctcattaggaaatatctttcctaattatgcaagaagattaattatatgctgaaatctcttttgcatatcttgaatggtctcattttgattcattatgaaaagtccactattcatgtgttggggtgtttattctagatctcttaaaatctattgatccttcatgggttacttgtaatgtatcccacatttcttttgcattcttacaatatgagactctaaagtattcatccattcctatcgtaaggcaaatatatctttagccttcaagaatattgactcttttctttctctcatccattgttcctaggttttcta

SEQ ID NO: 170587 - DNA, 434 bp, Glycine max
  unsure (1)..(434): unsure at all n locations
ttatttatgtgtatttgctccctatcttttattttactatgaaagactcttccttacattttgtttgggatcaaatggcgggcgaggagtcgatgctccatctcaaggctgactttacttgggagtggtggatacccgatgtgataaaaaatgttaataacttcctgngtacctttgttatatgttgatgtttgttgacttacgccttttgtgtacttctcacatcgtgttacgtgttagagatcacttctatgagtctagaacctttttcttttgtatgtattcgatctaggtaggcctacgctctactatttctgtttatgtgtatattcagacatctactttgtcctcatatacaggtgtaccttgaggctctatacgctaccttacttcgggaaacacttatgcactattatatattctcgtatttatat

SEQ ID NO: 170588 - DNA, 473 bp, Glycine max
agcttgtctcgctaagcgggagttcacttttcacgcttagcgcgacaattcacgctaagcacaactccctctgcactaattctcgctcagggcgccaattctcactcagcgcaattccttcttgggttggaattgcacttagcgcgctaattctcgctcaacgaaattccctctcgggttggaattacactcagggaaacataaaaagttgttattttcaaaattccaatagtcagactgtggagcattgtcttataagctccacccaaaatttgaagacgatccaacggctaacgaattcgggattgcgattttactgaaatacgtctaccgaaaatttgaaatctcataatttcaacttaactcaacaaaactccacataactcaacatccacatcaagagattcacacatgactaattcaacccatacctgagctcattcaagtcaaccatatagtcaaataacacgata

SEQ ID NO: 170589 - DNA, 496 bp, Glycine max
  unsure (1)..(496): unsure at all n locations
ataaatactaagcttaagaaaaaagagcaaactcacattcacattacttgctgaagcaagcaatcntccgcttaagcaccaaagctcgaaaagcctaaaatcaatagaaagttttataacgagaaattgtgaaaattgaagataaaagctaggaaaatcaagagcaagatatttttcaaggataaatcagctaaagaagacgataattacttgaattaattagagatattatttgtttcgaatttcttgcgattttttccttaattaaatctagcaacaattctataaataggaggctagacattcattgtaacagtgtagaagtcccgggcaattcttagaattatattttagacttccactaactacacgcctacactattccattagacattctacgtttcattgtatgagtacacattctctcacctaggagaggaacaaatgaaccttgcttcgctttaattctatcaattcaatacttccatcttagttc

SEQ ID NO: 170590 - DNA, 326 bp, Glycine max
  unsure (1)..(326): unsure at all n locations
tctaagcgctcagngtatgtgggtttcctttctcgtttgttttgattaataaaagcacccaactggtttgaatttgcggctataagacaattaggtaagtatcctctcttaatgaactgtgtgagactgtgacgtatgtagtcactcaccactactccgatgagtagtccccgcgaaattattggcacttttgctggcttagctccctttgtcccttgtctgccagttaatgtagcctataaaaagaatataagaaaaacttaaaaagatagttaaaaaccaaaaatatttactagttgaatttaatataccgcaacctatatttt

SEQ ID NO: 170591 - DNA, 417 bp, Glycine max
  unsure (1)..(417): unsure at all n locations
ctaagcttcagcttttagctccctaacttatagcttataagctatatctgtgcttctagntnttcacatatgactataacgtaacatgttaacatccctacaaatttggtctatggttgcaatcactcaaaacctcacttgattaacataatatttaaaatttaaccagtaaggagtcattcttggtggtatctgttttgaatggttcagtttcagtccattcggacagcaaacactcccacactcctattacagagacgcatatgaataaaccacaaccctttttattgtaatcgaaattcctggacatgacctcagcagattcgcgagcacttcatagttcatacacataattgtatgaggaaatttgttttagagaagaaccaatgcttcttcaagcttactaaaatcttcaat

SEQ ID NO: 170592 - DNA, 369 bp, Glycine max
  unsure (1)..(369): unsure at all n locations
agcttagggatgaagtaaccagtctctcttttcgagctaggttactcttagaggaagcacgcagctcgcctgggcgagctactatgcaacctccacccctcatttcctataaataggcgtgaggggggctgaagtaagggtacaccatctgaagtaagggttcataacgttttctgtgatcaattccgcgatcattcctcatcaatcttcattgttcctcattcttcgactgattagtttctatttttgaagcattgaattcattttatgcacccttaggggtccatccttgctntacatgtcttcatcctcaatcttctatcattgatgaactttttctgtgtttatagcgagattcgaccgattaat

SEQ ID NO: 170593 - DNA, 242 bp, Glycine max
ctgttcttggagggaacacaacaggagggatgtgctgcttctcgcaatcagaattaccagtggaagattcacctgcacagaaattgataggtcaatttttgtcatcacctttttctggagtcgagtgaacgttaacacgttcatttgcacatgaagaaggtgctacccggtgacgtccttaacactactttcccgaactccatgagatggcactgacatttttgggattttggacagattga

SEQ ID NO: 170594 - DNA, 385 bp, Glycine max
agcttataaacaacatagaggtctctaatttcattttttatgctaaagcactgtttgaagatgcgacttttctactgcggcctcggctaacggattttgagaaaggtttcccagtccatttcaatgaatgggcaagcagctttacacaaagctttttgtatcactagtagcctacattgttacgagcctatttaatgtaaatttcatagcaaatatatatccatactctggttccctttcaaaatatcaatgtctgattgtggaaccatctgcatggtcctttatgtactattaagtacctctggcactccaattaatatatagattgcccttgctaataaaaaacacggaagctaagggagattaaaaagcaaattgtctgtac

SEQ ID NO: 170595 - DNA, 273 bp, Glycine max
atgaggggaactgcggctctcgaaatctgcactctgtgcagatatttgctgtgaaattgcgccgcagaattttgcaccagtgcagaaaaatgcttgtgtgagattggctgtggacagagtattgcagaatgagttatcgatatttgctagtagattccaacggtcaaaatgtacgcttatgtactagagactttcactatatttttcgagtccatccaacggttaatgaaccggaaccaacgaattgttactggggtctttaagcgagaaaag

SEQ ID NO: 170596 - DNA, 441 bp, Glycine max
  unsure (1)..(441): unsure at all n locations
gatcttaagtcacctgcggcatgcaagcttgaaaaaagacatatgatgtatctttcttgggtatagcaatatctctaagggctactgtgtctacaacttgcaagctaagaaactcgtcatcagtcgagatgttgaagttgatgagtaccctctttggaattgggatgaagaaaaagtggagaagaacgttcttatacccgctcaactacctcaagaagaagctgaggaagaagacccaggtgaaccacacaacataaagatcaagaactatcatctccagagtctactccaagacgagtaagatctttggtgaacatatatgaaacttgtaactcggccatacttgaacctggaagctntgaagaagcgtcacagcacgaagtatgggtcaaggcaatggaagaagagatatanatgatcgagatacacaacacatgggag

SEQ ID NO: 170597 - DNA, 473 bp, Glycine max
ataagcgcgggtctgggagacgaaggtcaagttgtttttctataccaacatgatgttccgagtacattagatttggtacgaccatgccctcctgatttccagctgggaaattggcgagtggaggaatgccccggcatttacgcaacgagcataatgtaaacctttacggctttaaaagctctatagttgggcctacgctctaaagctttttccttttgttaacgctttgtgtcttttgtttttgaatttataatacaaggatctttcttcatctgttcctccagaattagaaaggatggtcacccatgaggaccaagaaatggggcctcatcaagaagaaacagaactaatagacttgggaattggcagtggaacaagggaagtcaagataggcacaggtattaccgcacctatccgcgaagaattaataatcctgcttagggactaccaagacatctttgcctggcatacca

SEQ ID NO: 170598 - DNA, 265 bp, Glycine max
atatcccgcatatacccaacaggagtaacacccttcaatattcttgctgccaataaaagactggggtacaagcaacaagttgccgctggacttctattgattcaacgggtccacttgtcatgcttaacctcacagttgtgatgctgattaatattattacgaaagatattaaattaactcagataaaactatgaacaaaggctagagcacgtgccatactaacttggaaatagaatccagaacctgaataatcacagatgttcca

SEQ ID NO: 170599 - DNA, 378 bp, Glycine max
ctttatttcctcatcagatgatgtgtcgactaattcttcccatgtgctcatcaagactttgttggcctttggcttcttctttctcttttatttcttgcaatggcttattctttctctcaactacaccattttgttatggcgttctatcgtagacaagttatgaagaatcccattttcttctaaaatagatgaaagctctcattttcaaaatctccaccatgatcacttatgattgaagtaatgcgtactcccttttcattctgaatccctttataaaatttaaagaggatcccaaaggactcgttcttgtgagcaacgaacataacccatgtccaatttgagtagtcgtcactactaccaactatattttttccctga

SEQ ID NO: 170600 - DNA, 345 bp, Glycine max
  unsure (1)..(345): unsure at all n locations
tgcctaaagagatcatgaaggataattttgttttatgtttcacctccgctccnccaatatgacagccaccgtcttacgagtgctgagcaccagcactgctctgaggccatcaagggatggtcatttctctgggagcgacgcgtccagctcaaggacgatgagtataccgacttccaggacgagatagctcgccggccgtgggcatcactggttacccccatggccaagttcgacccacacatagtcctccaatcttatgctaatgcttggcctacagacgagggcgtgtgagatatgcgatcctgggtgatgggtcaatggatccccttcgataccgatgctctc

SEQ ID NO: 170601 - DNA, 409 bp, Glycine max
  unsure (1)..(409): unsure at all n locations
gcctggcctattgccacctttatttttgaagaactatcttttaaaaaataaaaaatatatatcttttatatccttcaaccctaaaaatagagattgtcaatgaacttccattcatgatattaatcaagtattccagaagcataattgtaagattgacaaaatggacttggctagataggttggctcgggcggcctgcaagtagggtcagactgcgctcaaaagaaatcaacttgaatagaaacaagcattttttgctcagcttatttagcccaacgagccaaatggacttggaccagactagccccgatttgtatatataataaatattaaataaaatataatatcttaatcaatttatagtttcaaatacaatttatacttttnttagacaaacatagtcctaaacat

SEQ ID NO: 170602 - DNA, 336 bp, Glycine max
atgcataggagctcgctaaactctatccttggacatcatatgcagacttttagcgtcacaaaattcaaataccaacaacaccccgaccttaagatagaactggtaacactcctaagttcacgcaatgaaaataatatccttattatctttatctatacaacatcctataaatgtgaaacataacaaaaatccttaagaactagactattcatatctaagctgcagacatttacggatttcaacactattgccatttaaactagattattctttccaagtatatattgacatgaggcaatcaacactggggcatgcttgcttagttatgatacataa

SEQ ID NO: 170603 - DNA, 337 bp, Glycine max
gaagatcccaccggttcgatcatggaaaaatgtcttgtgaagatgcacaccacatttcgagaagatccaaccgttaacgaacgctgggaagcgtttttaccgacgaagcttcatgtagctttctctagaagctctattaagaggcttccttcagaagctttctcgtgacttctttgagaagctctctcacgaggcttctttgagaagctacatccttatctatccacacccctctattaattaaatcaactctcttaaaaataattactgatgagaataacgcaccaaataatcaaccatcaaacatacatactacatatatatagatatatatatc

SEQ ID NO: 170604 - DNA, 397 bp, Glycine max
  unsure (1)..(397): unsure at all n locations
gaacctaagctacccttcaccctcctgggtttgtaggccccaccatgaccacncttatactctactactatttgtcataaacttatctgataatggccactatcggttagtggatttttgaaattttcacaccaaatattgtttgtctacattccactagcagatgaattgcggctagccaactaattacgatagtgtgtgtggaactgttgctcttctatggataacttaaaagtaacattgggtcgattttcctcactcttgaatcatgggatactgctgagcaattcatgggatctccgtactgaaatggcactggcagtcgtcttaatgccacataattgcattttgattatagtgatcaaactctatacgcctccccaagagatataatgtg

SEQ ID NO: 170605 - DNA, 383 bp, Glycine max
gctttccgaagcgatcaacaatggtcccttgactaaattatggtgagacagtctatttacacccccctactatgctaaatacaccctattttcgtgtttttccaccgatttcttttccaaacgtcacaaaaatttatggattccctggcgatgggtgttaaacgttccggagtgatcaaccaaggtctgtgtgcccataaacaattgtccctggatgaaattaaggtatgacaataggttcgcctttactttgaatgggagtcaagagcttccacgactgctagtcaaggtcaaggtgatggcagatgtgtactcggcccccgaggaagttcacaggctcctcaattatttccaacacatgattgatctgatggcccacataa

SEQ ID NO: 170606 - DNA, 414 bp, Glycine max
  unsure (1)..(414): unsure at all n locations
ctgcagtagtaaaatctgcccctgatgaatactttgaagtttggtttcaagcgctgagagtcctgngcagttggtgtaggggtggcagaagtgggaggcgctggtgtatgagtagcacaagtggaaggagctggtggtgcgaaagaagaagaaaatttgctggtcgagcccttaccttcctagtccctctgaagctaactgtcagatcatacatattccaacagtttttcttaatgtaggccaagttaatggctaggctcaggctctcataggtcagactatcagaggtaactcctttagctctgcatagagtagtgatcaaggctgagaatccgagcctagaggagttactctgggcaatggtagaaatctgacctgagattatggctccaatattcatgtgcattcctgtga

SEQ ID NO: 170607 - DNA, 372 bp, Glycine max
catgcaagcttggctcagccatcaaagatggcactttattgtgattgacatcaacaatatcatcagggataagaatctggttaatgatatccacatcccacgaatcattttgatgactaacaatgtcagcaactgccatatcttccaaaccctccgccataggagtttccacatatctatggccttgcttctcaagccaaggctcctgccaaatgttgaccatgttacccaagcctaaaccccatctctcaccttccctaagcaccaattttgatgaaaacaagctccgtgttagagtacatgtatgagatggaatctcctatatgatacaaatgacaaaagttgagtaccatatgagtgaggagaaactca

SEQ ID NO: 170608 - DNA, 379 bp, Glycine max
  unsure (1)..(379): unsure at all n locations
gaattaatatataatgtatcctcataatttattgtacttgtacctaacatgcatgtgttttgaatgtgtctctgattcttgtattcggtacttgagtcagacgcattgttcactatgaaagcacgagaagaaattacggaccacgtaattctctcgctctatcattttttttataccttgacatgcttatttaatatatttacatatacataataattcatttatcggctattatagcttgttgaatattttacaacgatctgtgcgtntaaaagaattgtttatgcttcatacagacatctcattgttcaactctgagcagagcanaaaatgctctgaaactactaattctctgcttttattggtggactatgacata

SEQ ID NO: 170609 - DNA, 314 bp, Glycine max
  unsure (1)..(314): unsure at all n locations
agcttgagaagctctgtgagaatcagattttcttttcctaacctgcgtggatatcacattttggaatcgcaacccagaggacttgaacgaattaattcattacccaatttgactatcagntaaatcagtttagcctatctaaaatataaattcccctacttattcttttcattagtgctcatgatcgggcttatctttataaaccctttctgagagtcatcgtagggaaccactttgcatcttaacatgagattcatgttgatcaagattcattcattcttcatcatgggttggatatcaaaggaagagattga

SEQ ID NO: 170610 - DNA, 284 bp, Glycine max
tattgatcgttacacatcacactgctgggtttggaaaccagaacctaatggccagctttctacaaggagcgcatactgtatgctactagaacgagcagcagatcacactgtggatgaggctttacaggacctatggcagctcaaaatccctttaaaaccaacaacatttgcttggcgattgatcaaagatagaatcccaactaaagggaatttgcggagaagacaactggagaaaggctctgcccactcctaccaactattggtctagtaatctatcaacaaca

SEQ ID NO: 170611 - DNA, 432 bp, Glycine max
  unsure (1)..(432): unsure at all n locations
gatacaactntaaactaaaactcatccataattgatattcatcatccatcaaataatgccacccaccaccaaaaccaccataatcgcatattgacaacatagaaccaccattgaagttagtgaccacaacttcaacaagtgaccattgtccttgcactcccaccatcgaagaagccacccttcaaacccctacttcacaactccttctacttgtcttcatttccttaaggactacacattcacctctttgttttgcatatcaagttcatgtcctatgagacattcttagttcccttataagttgggctaataaagtatccatctcactactgttaaaggctacgagtgtccacctgggataatactatcatntttctcanagctctcttatatgttgggagtcaatattaagtctgtacatatgaaaatata

SEQ ID NO: 170612 - DNA, 168 bp, Glycine max
actaagactagagagctttttctttaaataacctcacactacattcattcccacccaatacccgacctatatttaagcacttaggtcccataactttgcagcatacacacctaccaaaaacttttggactcacaggcgtcggacaccatatataccgagatgacacgc

SEQ ID NO: 170613 - DNA, 339 bp, Glycine max
  unsure (1)..(339): unsure at all n locations
tatgttgcgcgggtcacgagaccttgcggacgtcaggaggggtgcttttgcccacaaccacacttgaccaatctcgacccaacctggcgatatttagtcagtgagaacctatgatgtactacataagcgagctcctgctcacttacccattaaacgaacagagaccacacagcactgatgctagtgtggtggctggncaactgtgaactttcagtgttatatgggatatggcctctggtaatcggcttccaagggatggtcatcgattacgatgcttacaagtgaatattggaatctaaaatggcctctggtgatcgattaccaacgggtgttcacgat

SEQ ID NO: 170614 - DNA, 382 bp, Glycine max
  unsure (1)..(382): unsure at all n locations
actcaagctnctactnatgtgggcgggcgggacaccttcactttcttgtactatcgctagctccgaccaccgagcttccttcccgcgatgcatcttttcatgcccgccgcaatgggcttataccctaaaccctactttccacgatgaccttgcgagctcatcagacgtagcatgccgccactggcgctgcctagacccatcccgggtccataaccgacagccaacataactcaggccattattaccgccggatcggacagacgaggctgcccaaagagggaatccacggaggaaatgctgaccaccttaaacaactggaaagcggatgctaacgattctcgagcggctaacacatcaggcctggaggatgggcagcttacca

SEQ ID NO: 170615 - DNA, 369 bp, Glycine max
  unsure (1)..(369): unsure at all n locations
tcagaaatctnggaattaaaagtgagtactcaattacttttatctgactaactgcgcaatcttgcatgctatctgaacaaataacccttggcactcttttgctcctacagcattgctgcataacgcacggaaatgtagtgcaaaagacaaaacttctctcccatattaaatgcattagagaaactccatacctccattgaaaaccctcaacacaatctcatcaagggcagagcttgatggcgcgcatactaccactcttacacgatacttacaatatgcaagtagagcttcacggttctgataatacccatcattagagacaaattattctgcataatcaacattctaaccaacgaaacaccacttact

SEQ ID NO: 170616 - DNA, 372 bp, Glycine max
  unsure (1)..(372): unsure at all n locations
agcttcttatccaaggctcatcttggtggtgtaactccttcttccaaggcttattccttagtggatggtgccgcctcttaccccttctcctctgtcttccgctgcatctccatggtggaaaatcaccattaaaggacctcattgaagctcaaagatccagcctccatagaagctccacaagcaagcttccatcaagtggtaatcagagcacaagagcttcaagtaggtgctccttaaacctccattaaattttttgctttaccttctcttccattgttggttcttcattnttctccatgtatctcctcacatgtgttgtgctaaatgttgttaacatgattctttagagtttccaccgattaaacttggtat

SEQ ID NO: 170617 - DNA, 402 bp, Glycine max
  unsure (1)..(402): unsure at all n locations
ttttggggtggaaggaatagtttttttaatcaaaaatgtttgttggatgtaagaatcatgtnttctacagtttagaatcattttaatcgattacactatgtggtaatcgattaaaacgagttatcgatgttgattttttgagttctggttttgttgtaatcgattacaatggccttaatgcatttatagagttcgaatttggaaaagtgatcttcatgaaagttgtagtcttggatgttagtgttagtcgtcatttacgactaacttttgtatagaaaagttttataaaatgtttatctttttcccaatttatggctctttntgtacgattgtacatatnttanggttagtttaattntgttcagtagaaatgcccaatagtgtgaatttaatgtgtttcaa

SEQ ID NO: 170618 - DNA, 449 bp, Glycine max
  unsure (1)..(449): unsure at all n locations
tgaggcatgcaagcttataagaacaaaaatgccttaattatttccaaatatgcatgcgaatcaggacgcatcaacaagaatcaagccaaggctatttgtgcagcaatcaatggggcaaaacacaccaaatgattataatgatggatggctcaaattctcacaaaggtaaaatcatcactttcaaattgagctttcaaaactatcatgacatgtagagaagaatcaaggatttcaagtcacaaaatgtcaagaacttttattttcaaaacaattacccatttcttgaacatatcctataattcaaagaanaacatgcaaagtcgtacgtgcacacgacattgacccaaaatattaaactgaaaatccgacgaaactaacaacattaacaaattaacacaactaacatattaacanaaccaacaaaactagcataaccaaagaacactccc

SEQ ID NO: 170619 - DNA, 333 bp, Glycine max
  unsure (1)..(333): unsure at all n locations
tttttgtctttatatgccaactctctagagcggcattcgtattggttgctatcttgcgctggtgcatcttantacattcgatatttgtattgcatcatgcaccatcatggttcgtgtgaaaaaagctcttaagttaaaaacatttcttcacaggtaaaaattctctattctaattgattacagcctcattgtaatcgattacaacaagctatctgaagcttgtagagttgagtctcgtctcagtctgatcgattaccaatatctcctcatcgactacactgctgttgagacaatgactgatttattcacgagtctctactctaatcgactact

SEQ ID NO: 170620 - DNA, 299 bp, Glycine max
tacttatttgaagaagagccttggaacaactttcaaacacgattatccagggtctcggtttgtaaaaaaatctattctaaaattgcaatatgaattcatgacatcatataaacttgatactcataaagtcgagtgaatgtttgaacgttaactgctagcttattaacgtacagatctgctatgaaacctctcaagcacacaatctttatatatcaaataagacgtcatgaatctagaacacttaattgatacttcataattataaagaaactacaatccactataaaacaacatatata

SEQ ID NO: 170621 - DNA, 303 bp, Glycine max
  unsure (1)..(303): unsure at all n locations
actcagcttaagcttgctacttacggctataatcggccgtttgatatatttncctctcncggcgaaacactcttaaaaaaatactttcttttctgctgctcttgtgcctatttcagctttttttcaaataattagaatctatagaaaaaataaaacctgattaaaactgacagctattctgaatagcttctcataaagtcacattaaacaaaagcgctttcttccattgcaaatcacgtttaacgtctataaatcgatcgcgtcacgttaatatattcattatactgatcgaatcgcgaccat

SEQ ID NO: 170622 - DNA, 443 bp, Glycine max
  unsure (1)..(443): unsure at all n locations
agctttgagccaaaatcttgactcaccatataccttgacttatggtgagaatgtcaatccttaccctcgaaagcgaaaaagaaaagaatgaaaatttccaatcaaagagaaagcaaaaagaacagagggaaaatttacaatcaaagagaaagcaaaaagaaaagaaaattcccaatcaaagaatgggagaaagtaaaaaaggaagaagaagaaggaaagaaatctcctgatcaaggatcgaaagaaaacagaagaaatgtgcagaaaggtctttggaccggacaatatctgaacaatacagaattgtcaccaaaggaacgaaaagaaggaaaggaaaccatgacctaaagtggtcatcttcctttaattgccaaccaaaatcttgtgtgctagcgactctntcgccccgcactaaaccacaacagtaaagggaaaaatccaaa

SEQ ID NO: 170623 - DNA, 399 bp, Glycine max
tctacttatgtggcagggcgggcttacttcactttcttgttccaacgttatctctgaccactattctttcttcccgcgatgcttcttttcatgtccgcctgagtgggcttatagcctaaaccatacttcccacgattcccttgggtttctatcagactagttatgccgccattgtctttgtctaaacacatcccgggttcataaccgttccccaacataactcgggccatcattatcgccgcctcggacagacaaggttgcccaaagagggagtccacggaggaaatgctgaccacctcaaaagactggaaagcggcttctaacgatctttctgcggcttgcacataacgcatggaggatgggcaccttaccaagatatcttcctcgcctgacacgatg

SEQ ID NO: 170624 - DNA, 409 bp, Glycine max
gggggttgaattaagatatttcaaactgcttcccctaattaaaaatctatttcactttttactcaagttatgaattcccttaatgacaaacttcttaaatattaattcaaatgaagcaacttgaatatgaatataacgcactaataaataaaggagattaagggaagagaaaatgcaaactcagttttatactggttcggccacacccttgtgcctacgtccagtccccaagcaacccgcttgagagttgcactatcttgtaaattccttttacaagttctaaacacacaaggacaagtcttcctttgtgtttagagatcctttacaacaagagactcacagtctcttaatcccttagagaatgagaagacaagaggaacaaatctctctagaaagagatgggatttac

SEQ ID NO: 170625 - DNA, 402 bp, Glycine max
tctaactgctcttgtggctggtctaacggcatccagcataacacgattgatggggaggcgtgcaactatgattataggtggcatattctttgtgttaggtgcattactcaatggattacctacaggcttatggatgcttattgttgggagaatgttgcttggttttggtattggatgtgccaatcaggtagtcacattaattatgagaagcgttaccaacaaactcaaacatacatcttttaacgcactctttactattacttacagcttattaaaaattataaaactacaagcctcggtcgttaaatatgaaatgacacccaaagtatctaattctctataaatattaatcaacaccaaagagtgtgttatacgagacactattacgcggtcttgaatatc

SEQ ID NO: 170626 - DNA, 303 bp, Glycine max
  unsure (1)..(303): unsure at all n locations
cacctgcggctgcagctaagacatttcaaaagaataaacttataataccgtatatcagaaaggtaggggacaatgaacaaacatctaacaaattccattatctagttgtgccactactaactaactctccactcaggagtaacgacctagtggatatattcttcccaccattttggccttttggagatccttatgggcctaaaatctcccttttggttctgagtgctatcattccccactgcttcaacacnccccctgactttacgaggtaagtggcatgtagctcatcccaatcttcctaaa

SEQ ID NO: 170627 - DNA, 451 bp, Glycine max
  unsure (1)..(451): unsure at all n locations
tctgaacaatctttcatttgcgtggtgaggaatatccatatcaacccattataaagaaatcaaatgggaacaaaggctttctttccgaagggtttgagcacaggatgaacgaaatgggtaaagggtttatttcttatagctcgggctccttagctgtctatttcggagcatgttacaataaaagggtttatgacacattgcggatggaactcctatttggaaagtttgtgtgctggaatgccaatgattgcatggcctatctcagtcgagcaacttttgaatgagaagttgataactgaggttttaaagattggtgtccaagtgcggagtatagaatggttgtcatggaactcataataaaaacagttggtgggaagagagaacgtgaatccntactgaggaagttgatggtagagagtgaagagacagaggaaatgagaacaagagttca

SEQ ID NO: 170628 - DNA, 243 bp, Glycine max
  unsure (1)..(243): unsure at all n locations
acatgggtatcgcttaagaacctgcggccttgtgatgctccaacgctggcatacgggtaagcgaattcagccgcttgtatcaaagcccttttgaagggataaaagcgaattctattcttgtttgcgttggaactgcaaaaattcatatattgttgcacttangggcagagctgttggcatgtatggaactaaagccttagagggcactattgatcggttgaaatctgggttggtgtaattaat

SEQ ID NO: 170629 - DNA, 445 bp, Glycine max
tcatacaattaatatagaacctatatcctaatgttttattctatcagagcgttgcgttgcccgtgtcctctagcatgaggttcttcatagtcatccacctattcatctgctcccccgaacacaaagttcaatatcatcacaggatccaaacacaaacagcaaatcgggagtgagttatcacattcctaactactagagagaaacaagacaacatatagtagccaaatacaatttacttagcatatctcacattatttcatcactttgtcattcacaattcacttttcaatcatcaatcacaatacacaagaatcacacactccgatcaagacataataaacaattagcaagcgtatgcaacagctatgctaagactcaagcctatatgcaatgtgtaaccatgtcagtgaaaaacctcgtcgagcgcctaagagtacatgacaag

SEQ ID NO: 170630 - DNA, 329 bp, Glycine max
ttatttgtcatcaccgcatgctacccaactgtgtggacttactttcccacttacccaatatttttgggttaagagaatttggggcgcgagaacattgaacaatctctacgtacaatattaattaattaccataaaagattaccaaactcctgtccgtgaatcatgggatgtgaaacacaaaaacagcgaacgagaataggaatacatacgcaaatagattagctcccatttatgagatctatcaagaggaaaagactcttcattaattctcacacataaatttccaactattctaatagtcacgaattatataaacacactcccaccaa

SEQ ID NO: 170631 - DNA, 473 bp, Glycine max
  unsure (1)..(473): unsure at all n locations
ggaactataaaactaagcttaagctctcaatnggacaatcttctgtgccaagtcatttggaagtggcggagactataattccagattccttgattcagatatgaacgctagacagacaagttttgaaacttgggtgggtggatgatgtataacgttaggaagcattttagcaacagacctctcctacatgatgttgaggttaagtcttgcttgctgcttcgaattatgctccggtctatctgtcaatcgggggtactcaacacagacgttctgatagcaaactcggtaactcactctgatgatcccttattttggtcttggaattggaatagatctctctctgcttggaaagatgagcaaatggcacgattggccgacaaatttctggcacattgcttactaccggtagcccacatcttatacgtggaacccgatgaatgaatggatgctctgcggcatcactacaacatcta

SEQ ID NO: 170632 - DNA, 449 bp, Glycine max
  unsure (1)..(449): unsure at all n locations
agcttcgccctcagaaggaaacattaccttatatttatccttccataatttcaaccaaaaacataaaatgcgattgaaactaaagacagaaacattaatgaaactggaaatagaaatgagaatgaaactaaagcacaacgtaaatgaaactaaatgcggaagaagaaataaaaatgaaattgccattacaagtcgagaatcgaaaagtgcattacgtgaacagtaacaataagctcaaaaacgtaaaaccctaaaccctatgctctaaataatagcctaacagaatagcctttacatgaatcccaaggctactatttataagggtcactcanagtcattgggccctattacattattctggcccacaacgaaatacacactgaacaccataaaataaaattgcaatctcctaattaaaaatatacctaaggaaatgttgctttatttgt

SEQ ID NO: 170633 - DNA, 463 bp, Glycine max
  unsure (1)..(463): unsure at all n locations
ttgggttcaagcttcatggcgccagaaaggaagccttttattgtttacaatagcttcagatcaaaatcataaagaaaaagcttaagcccaggtttgatttgtaaaacatcatcctttttaccagctgaaacacccatgacatgatagcggaaacaatcaggctttgtctttgcattgcacaaaaagatgaaaccaccaatcttttcacccttctcgccttttaattgactcctttccatgccactactcttacctttgttttttctactgctagaacccttgcttaactccctatgcttctctttactctcttgttttgttcaaccttatccaactgactagtcttatccttttgagcctgctggctcttctccctangacttntgccactagtgctnctgctttgactttctttcactttattttcagccctcctgactcttcccttaggtagntcatcatt

SEQ ID NO: 170634 - DNA, 401 bp, Glycine max
  unsure (1)..(401): unsure at all n locations
agcttntcaaggtaggtgagcttatttattataggggtgtgtgtagctaagctctagcttctcaaggaagttttctcaaagaagcttctcaaggaagttttctcaagaaagcttctcaaataagctacctagtctataaatagaagcatgtgtaacacttgttgtaacatttatgaatgaaagtcttatgagacgcacgtcaaagttccacttctctccctcttttattccttcaatttcgtgctccccccttctcttttttcttcctccattgaagcatcatctccaagcttcttatccaaggctcatcttggtggtgatgctccttcttccatggcttattccttaatggatgacgcctcctctcacctcttnccctttatcttcagctgcatctccat

SEQ ID NO: 170635 - DNA, 485 bp, Glycine max
  unsure (1)..(485): unsure at all n locations
ggtagtgaggcttggcttcaaaaattcattggttcttctagcattcaaaggcttagattctaagagaacacaaatcctagacttatccaagcgatctttttcatgtgcttagcttgctcattagctntttcactttcatttgcttttgaccttattacatcatcacacctttcctttntttgctttctttctctttcttcttctctttttttctaaacatataacttatgtgttgtgtgtgttgatgccttatctctttctttgcatcccaattagttccactcccccaaatttggggcaaattttctttgaaccatatcgctctctagaatctanacatggtatctggagataattatttaagttcaggggtcacattcttgacacaatcattcagctcatacagggtgcacaggatacaaatatcattcaacggtagcttttcggtcaaaggcttgtatatgcataatcatggccttcatcat

SEQ ID NO: 170636 - DNA, 438 bp, Glycine max
  unsure (1)..(438): unsure at all n locations
agcttaagaagatatggttcagctaccattttgctcaagacatcactgacagaatcaaagcaatgatcacctttcacaagttttcttcttgaaaattttttaacaccacggaaaagaaaggccacaaaatttttggagctcagagagccttgattctttagtttctccgagtgccaacctcttgccagtaagcggcccaaacagcttcctagaagatatcattacttttggctttgctcagtcgatatcccccagtcaaatgtttgattatatcactaggtccaagagaagaccaagctttgctagtttgtattgaaaacacctgcgttttcttcacatgttccacagttgggcggggaagggcttccttccncttaccaatacctacagcttccacaagaacacccagtgctacagtagacttcaaagaagtgatat

SEQ ID NO: 170637 - DNA, 437 bp, Glycine max
  unsure (1)..(437): unsure at all n locations
tacggaactataaaactcagcttancaaatgaccgcataacccttaattagttcatatcatatcatatgtcatcttactgtgtcaatattttgcagttggacttctaaccccagattggattgttggtgttgacaacatgcactgctgcacgcccaggagggaatcagcaattttctggcgggtatcacgtagatatcttgctcgtncgcattacatcacgagactagtcgccctaagaatagttacgcttaatcaaacaattgccgtcacttgttgtatgcactgtaattctcagcctctatatttacatgtattaccaaatcatacaaatntatgtgtattatgggaccattcctaacaatagaagtgtctacgggtccgatctagtaaatatattaccaaacctcatcaaaatttatggattgaattggatatt

SEQ ID NO: 170638 - DNA, 355 bp, Glycine max
agcttacaaatatattttaagtccaagctcttaaaccaaataaaataaaatctggaccagataagataagatgggatgaaataaaatctggagaaaataaaatctagatgaaataaaatctggataagataatatttgataaaataaaattgtctgctctcttcaagtccaaccccaattccgaattcaagcccaattgcttataattctcctgaaattaaattaaaaaaaaaaattattccacgtcgcccaaatgataaaactacataattaatttgacaattaaggctaatcactaattaaaatggtgacaaaaagggttaagaaataagagaaaataatgacccatcaatca

SEQ ID NO: 170639 - DNA, 388 bp, Glycine max
cctcacgtttggtttttagggaaaacaccataactaaacgctccgcaagggatccctatcgcaccatattcaaatctttaaccatgggtgatccagaggaaacacacgaacagatgaaagccgacctgtccgctctgaaagaacaaatggctctcatgatggaggccatgttaggtatgaagcagctcatatagaagaacgcggccaccgccgtcgctgtcacttcggctgccgaaccaaccctactctcttggcactatgcccatccttcctcaaaatattacgacggtgaatggacgcactgtggcactatggcacctctcacctgtgatacaaccgagcgggttacccttatggattgccgcccaactactcaccacccatcttg

SEQ ID NO: 170640 - DNA, 409 bp, Glycine max
agcttatgcaccggaaatgtaattatgatattgttatgcccgaaaaacaccatttcctaattaaccatgcattaagtaccatgttcaattatctttggtttctaagagaaacggcgttatgatcccaacatggttggcttcgggtgcctaacacatgaaactaagaatgtagtgtgaagtttcacgcttcccccttttttgcttttgttttgtagacgaaaacgcaaggatgagcaaacatgaaaacaaatggtatgcacattttgcagatcaaaaagtttgttgaacgcatatgcatgatgatgccatgactcatgcacaatgtgaggctggactatgataacggacaaatgcacgaacgatatgttcattatgatgttatgaagagatgcttatgcgatgcatgata

SEQ ID NO: 170641 - DNA, 426 bp, Glycine max
  unsure (1)..(426): unsure at all n locations
gctcgcccaggcgagctaggatagcttcctcttattacaccgncttctggagaacttcctggaaggcccaagtgggcctggttgctatctgcaccctctgtttactaaatacaccccttgcctttntttgttgattctttctcccgaatgttatacaactttacgaatttcgtcacgatatttgtttgctttccataacgtcacgtaaccttacggattacgtaatcatcttttttttgactttcggaatgtcaccgaacttcacggattgtgtaacaatgctttcttttgactctcggcatgtcacggaacttcacggattgcctaaccatgggcgccaagtacccccgaagttgtcaaacgagggtcgcatcccaacaacagacggctcccagactcattanggtttacacttgccatcttact

SEQ ID NO: 170642 - DNA, 321 bp, Glycine max
  unsure (1)..(321): unsure at all n locations
cctgcccgnggctaaaagcatcctggaagggtatcgaacatgtgtggctactgaaagtacagaaactgggacagcattgacagtcataacctattttggaatgaaagctgcataaaggaatcattcaccatcaagagcgagaaatgaaaagcgatgctgaaaatacacataccaagtacctccctcaataatgagaaggaagtttgatccactcttgatgatttcagccacttgtccttgccagccaaccaaatcttcacactgcatagaacatacatgatacattcagctaaactaagatattacgcacacaatgtaata

SEQ ID NO: 170643 - DNA, 443 bp, Glycine max
  unsure (1)..(443): unsure at all n locations
gaccttgaatctcccttctggttaacaactcggagctgcgtaaaggatgtcatttaattctaatggcggacgaggatattgcttaaatggcttctctgactcaccacactcactatgagtaccgcgtcatgcctttcnggttgtgcaatgccccatctacttttcaagccaccatgaacgcagttctctggccatttttacgccacgtcactgccattttcttcaatgatattctcgtctatcgcgcatctctgtcggcacatntcattcacttggaacaggtgctcaccacattgctacaaagcaagttttatctcaaacgttccaactgcctctttgcacaatgaccactagaatatcgtgacatgttatcttccacaatggtgttgaactacaaccgtcaagatcatactatagtcgaaggccgatactctcttttacat

SEQ ID NO: 170644 - DNA, 425 bp, Glycine max
  unsure (1)..(425): unsure at all n locations
tactaagctntaatgcatggtagctaccattggttctgtttatattctgttagtagcccactaatgctaatatgaaaattctaatattgaaataataatggatcggttgttcagtaatggcgatatgaaaatcttgtccaatacttcctacttataagcagatgttcttaaaagtacacaggtgattcttggcactttacttttgagaattttattttaattaatagctctgtatctatgtattctataaggcatcacagcatgacaaatactatcgtggattgtcgatgtcagctctatagagtttatattgctgccctaacctggagttgtttgtcctgccatccttcctaaccggcagccgttctccttggatgatcttggtgcactcttcacattatgaatgcaacactagacgtcagtca

SEQ ID NO: 170645 - DNA, 429 bp, Glycine max
agctttataagcgcgggttcgggagacatatgtaagcgtccgcgacatgcgaagatgatattccgagtactttggatttactacgaccatgccctcctgatttccagctgggaaattggcgagtggaggaacgccccggcatttacgcaacaagcataatgtaaacccttacggttttaaaagctctatagttgggcctacgctttagggttttcattctgtcaaggctttgcgtcttttgtttttgaatttataatacaaggatctttcttcatctgctcctgggctctacacattctcattcatttgcatgtctacttctttctctaaactgcagattccatgacgagtctctccgaggtactaatacctgggacccgtctatcaccttcgagcaagacatgaatcatactgaagatgaaggagatg

SEQ ID NO: 170646 - DNA, 375 bp, Glycine max
ggcatttggacttgcgaaagtcctactctatcattatgattattacctcgcatcccaaacaaacaaatcacacataacaagacaatcatagtcgctgtttgaatacctcacccactcaagtgtagcacagaattatggcttttctctaatgaaacactcttgccttataccactctaaggctaacaatggttttacgcacaactgaacgaaataaaattcagaatttatgagttcaagtaacaatccttcctacaatcaatatattaccttaaagagattttttttatagttcttcaagcatgaaccattcagcccaatctttttttaattttgcttatacgaatttctggtctttttataacacagagatcaaa

SEQ ID NO: 170647 - DNA, 202 bp, Glycine max
actttacctcacaagacataaatcatgcgtataaacagtaagcacgtcctaccttcatacggcgaaagccaaaccgtacatgaagcaaaacccacaaaactctgctctctttcgcatgaaaaagctcataccatacaggatcgcagcatcttttctcggctgcccgcatctcccttgcctaagtccacaactctccgaaatg

SEQ ID NO: 170648 - DNA, 177 bp, Glycine max
gatagggcctatgaagccatccatttacacgccaaccaatcccaagcatttctgatccactgggtgttacacacacactcatctcacaaacattgctaagaaagcaacaatcaaagaaccaaatatcacaacgaaaaggtcaaactatatggagatggcccttaattgaatggaatg

SEQ ID NO: 170649 - DNA, 388 bp, Glycine max
  unsure (1)..(388): unsure at all n locations
gagtgaattttcaacgtttgagaaatgaaaatgagaatggggtaattttggagtaaactctcatcttcaacaagtatataacattaatttacacttgctcaaagtgattttaaggcgaacactctaccgattcaagaattgacccctcaacacccaatttaccctagaaatgactctcgctttcacatttgtcactcattgttatcatttgctctgcccaagctatcctacaagtcctaattgacattttaaactaggatcaactcactgtagactccaattaccactaaccccaaatttagctnttcaaacnctcaaaatctnacactgtgtcactcacatcactaccattcttacatgtaaccctagggtaactctncccatcatc

SEQ ID NO: 170650 - DNA, 415 bp, Glycine max
gaggaaacttcaatggaggaagagaatgacagagttatgtgtgttctgggaattgaaggagattacgaagagaagctgaactttgaagtgcgtctcacaagtttctcattcatctagctaccacaagtgttacacatgcttctatttatagcctacgtagcttccttgagaagcttcattgagaagctagtgttacacccctctaatagctaagctcaccctcaagggaacacacacgcctgcaatagctaagctcacccccaacggaacacacacgcctccaatagctaagctcacccccccccaaaaaaaaaataatacctgaaaaatacaagacagtccctactacaaagactacctcaaatgcgctgaataccaggctaacaaccctatactactacggtacgcctaactt

SEQ ID NO: 170651 - DNA, 450 bp, Glycine max
  unsure (1)..(450): unsure at all n locations
tcaagcttgaatgcactattcaatggagttgtttttatcttcttcagactgatcaacacttgcacagtggccaaagatgcatgggagatcctgaaaatcactcatgaaggaacctccaaagtgaagatatccagattgcaactcttggctacaaaattcgaaaatctgaagatgaaggaggaagagtgtattcatgacttccacatgaacattcttgaaattgccaatgcttgcactgccttgggagagaggataacagatgaaaagctggtgagaaagatcctcaaatccttgcctaagagaattgacatgaaagtcactgccatagaggaggcccaagacatctgcaacatgagagtagatgaactcattggttctcttcaaacctttgagctangactctcggatagggcgtgaaagaaaacacgaatctcgctttcctgtccaatg

SEQ ID NO: 170652 - DNA, 270 bp, Glycine max
ctcgactagaattgaagctttattttgataatctatgttgatctttaatgcaaaccttgattataccgattgcccaagtgaaatttcaattccgattggagaacaacaccaaaaacacctgatgaactacatctaagttttgacaaattgaaaactatatatacatgtcagaaaccatagaagtgaaaagtagcagaaccaccttgtgtagaacaattggccacagacacaatccctggaaggccatttatggtatgagcatctgagaca

SEQ ID NO: 170653 - DNA, 358 bp, Glycine max
taacccaccatcttttcattttataataccgacaatgtgtccaccatcacaattatcgtctcctttttcatcattggggggaccacttgggctgccaaataccaccaccttttggcgtattctttgaaggatccatgctcctttttgcacatgttctataagtggatcctatctagagccatattagaattgtactgacacggcctaacgaaggcgaccattatgtccttccatgaatggactccggaaggttacaagttaatgtaccaggtaacagctaccccaataagactttcttggaaggaatgtatacagcattcctcatcatttgcgtatgccccacatctttgacaataca

SEQ ID NO: 170654 - DNA, 389 bp, Glycine max
  unsure (1)..(389): unsure at all n locations
tctcgattcattctatgtacccgtagtggtccacattgttgtttttgcattntgattctcgntttgcttactttttataccccctgttgacgtgcttacgccatgttacttaagtcgtttctcgcttaacttaaaaataaaataaatttccaccgaacgtttgaattgtattatccattagcttcagttaaaataaattccgaccgttcggtcatgccgtaaccacgttggaaatcaaaaagaggtaaagaataatataataatccaaaagacatcttttagtaaaataaagcggaaaatcaatcggacgttttctctttgggatttctcattcttaaccgaattgattaataactaaagtgaaactaaggctaaaatcaactcgccta

SEQ ID NO: 170655 - DNA, 346 bp, Glycine max
tgagctgcactttcgtaacggattctttttcaccggcccaagaccaccaaggaaccccagttcactcaacacatcgacggcggtattcaaccgaaaggaactttcctccgaggccattttcggaattcaccccactcccaatgacgtacgaagatcttctgccatccctcatcgccaatcatttggccgtggtaactcccggaagggtcctcgaaccccctttctcgaagtggtatgaccctaacgcaacttgcaagtaccatgggggtgtcccggggcattccgtcgaaaaatgctcggcccttaaatacaaggtccaacatttaatggatgctggatggctgac

SEQ ID NO: 170656 - DNA, 502 bp, Glycine max
  unsure (1)..(502): unsure at all n locations
atagaaactaccgcttaagcatnggagccactaaaaccttctctctaacttcatttttgtacttcaatacgctcccataggtcgatgcgtacatcacagagaggaaaaagatagcaaaagcaagtggaagccagccaccctcaacgattttggataggacaacagacaagtaaattaactccactgaaccaaataccagagcgaaagagaatgccacaaactagttagtctgccaaattaaaaccattacaagttgaggtagttggtcacccaaggtggtgctaaccatcatgacaacaacttcaacaatgcctgcaacaatgataatgaaatgcatctagtatagatatactacaaatgttctttaatataaggcatatgtgatgtatgaaactttttacacatataatataaatccatttatgtgtcttcacctagcaacttaaactattgagatattggctagtacattgggtcacactccagcccaaacgcatacatg

SEQ ID NO: 170657 - DNA, 471 bp, Glycine max
  unsure (1)..(471): unsure at all n locations
cggaccttaagcgactgagctgcagctcatttaacaccggatatttngtatttgtgccgacgccaccaacaaggaaattgcatataagaacatggtcaaaaaataattacatcatgagtaattttaaaattctattttttctttttcttttaacacaaattagagggagaaatcttagaatttacatgaaactattgatagtcagcaatttataaatatattttatttggatctcccccgcgattcttgttcaagttcttggctaagcttttattggtggggtaaaggattaggatttcacaggattttaaaaagatttttttttatatatatataaaaaaatcttgcgatatttaattaagacttttaaatagtataaataagtctcgtgatattcaattaagacttttaagaatctctaatgacacgcataaagattgatgatattcattaaatttctttatcacctat

SEQ ID NO: 170658 - DNA, 362 bp, Glycine max
aagcattaatgccatatgttatcgtcttacaatccaattcaagcacaacgtacattgtcaagattcatctctgatgcccaattaactgcttgaagtagtccccatgcctcacccaattctggttctgggatgcctgattgagcttgtgtttttgctgctataaacgtttctcggtcattgtgaattatcatacccactccaaagctctgattgtcattgaaaatggtggcgtcaacattacgtttgattcaacctgcttcacgtttcgtccaacatattatctgccaagatgaaagcttgttgccttgatatcggatcgctatttgcttgcgctgcactccattcatcacaagtgctgatat

SEQ ID NO: 170659 - DNA, 365 bp, Glycine max
tgccacagatgtattgttttccctgagaagccactatccctgaagatagctattctctgatacccattgtgggaatcaacgatcctgtgcgccctgcggctagggaagctgctaaaacttgtttagctgccggaataactgtccgcctggtaaccggtgataacataaatacagctcacgctatagctagagaatgtggcattcttacacaagatggtgtggccatccaacgacctcactttcaggacttgtctatagagcaaatgaagagtattatcccaagaattcacgttgtgatatcattgcaagtactgtgatttctactagtcattcacgatgcctgtctttcttatgtgctcaacatg

SEQ ID NO: 170660 - DNA, 235 bp, Glycine max
ccaaacattcaaatcactcagaataaacttcaaacattccaattccaatatacaacggcaaagtcttgaaatcttaaaaaacaccaaataaaaaagaagtgttaattttgaaacaaaaagagctaataaaaaatcccatccccgacagtgataatttatgtcgctttcgaccctaaaaatgtacccttagcccccaaaagtgtcaactttgtaacaagctcagacaccatttgtg

SEQ ID NO: 170661 - DNA, 487 bp, Glycine max
atacctgctacaataataaatcatttctaatttttatcttaactccggcttcctcctacccatatcaactatgcagcttgcgatcaacatgaatggccttcctaatattacaagaatgtcagtatcttcacagatatccattaccacaaaatgtgtcgagaagataaaatgtttcactctgaccaacacatcttcaattactccatatggcctggtaatggagcgatcagctagctgtaaagtcattctagttggcattatctccaattcttccaatcttctgcacatggagagtggcattagattaatgttggctcccacgtcaataagtgtttttcccacagtgacttctccaattgaataacgaatagttacactcctacgatctttatgctcgcgtagaacggatctttgaatcactgcactacaatctccttccactacgatgttatcctggtgaatatacttatgctctcctgcaacatat

SEQ ID NO: 170662 - DNA, 362 bp, Glycine max
agcttgaagcacaaaaccacaaatccattttatatttatgatgggttgacgtgacgatgcaaatatttattctttgtaaaatccgagcaaacagatggccttattaacttcttttaatcactcattaagacaccgcgactttgataccatgtcatattctattagttatcagacaaacctattaaatcagtttcatgtattataataacacaaattcattcaaacattgatcattcacactcaaaagacttaaaacgtttaggtagtaaggataaataatatttgaaaagttaaaatcaacatttatttgatcattaacactcctaaatggcatcgtcatccatacatcttcttcggaaaca

SEQ ID NO: 170663 - DNA, 431 bp, Glycine max
  unsure (1)..(431): unsure at all n locations
tgagctcattgttgctgccccacacagctccactatatttgttctaccatgctcttccttgcgagccctcttggtttcttgttcaagggctcttgcggcagctgcattttcttcttgtaacccagcacactctttccgaacgtctgtatcgaccaacttgaatttttctttggcaagccttgcttttnctagttcggcttttagagctcggacttcttcactctcttctggagcttcgaagttctcttcgtcgataatctttaacttggagagccaatctaaccctcatgtacgaactttcagccattcatgataaccaccgatgatgccattacgaatgcccctaagttctttatctttccttaacaagctcttccacgccttatggaatctttgtataatcttgaaactttgcgcacgaaatctctcac

SEQ ID NO: 170664 - DNA, 324 bp, Glycine max
cagaaaacaaaggagtgctatatgttatcattctcttctctctttgccaaaaagaattcaacaaagactaatcgcctgaattctctttgtgtctctcttctcccttctccaagaattcaaaaggacacaatctgagaattattttgatccttccctcttccttaaacaaaagatttcaaaggagtaaccgcctgagatgtcttttgtttcccctttacaaagtttcaaaggactaaccacctgagaaatctttgtcttaacacattggagggtacatcctttgtggtacaagtagagggtacatcaactcgggttgttgtactg

SEQ ID NO: 170665 - DNA, 308 bp, Glycine max
ttcttcgaagcgagggcacatattttttgcctaccaaactcaatatttttacacttctatgtatgatggttggccacctccacatgtaactcaccaattccttttactatgcctggacattgcctctctacaacttttctatttctttggcttcttttgacccttttgtgggaacaggggttattgtgcggcccaattgtgtcttgatggtaaaaagctgttgctatataacttattgcacccttgaaattctcagttctctttgagtatgtcatggatgcgaggcacctcatcaatggaatacccct

SEQ ID NO: 170666 - DNA, 379 bp, Glycine max
agcttgtgcattcaatgagcttagcttctgaactgtttcatatcctggcactctaagtacatcaagttagtccaagacacaatcaatgctattgagaacattaagttggcagcctaccaagatattttacagcctgacagagttcggaaaccaacaggttatctgcaacttcatcaattcaatgcattgttaaataataaattacatgacaaatattctgattcatagacctaatagagaagcaatagctcatttatgtttaatattcaaatctgttactgaccttggaaaagtgattgttaatgttctttatattgaccagtattaagagctcgtgaataagtgtgtggagtcatcattccaatgatgaatcgttaat

SEQ ID NO: 170667 - DNA, 327 bp, Glycine max
  unsure (1)..(327): unsure at all n locations
cctgcaccattatatcggtgccctttgccttgcttacaattcacgatatgtgccatgtgcatattgagctngcaagatgactgacaactctagtccattcaacacagatttaggacttgttatgataactgctttattgcctttaaacacgtcttcccgacaagaaactcgaaagtatacagcttccctttgactcatgctttttataataatcaacaagaaatggtcgctaggaaatcactttaaaagtgcgagtaatcgtccaggagaaaacttaaatttcatcccatattctttccctctcttttcctcgcataccatgtgaat

SEQ ID NO: 170668 - DNA, 365 bp, Glycine max
  unsure (1)..(365): unsure at all n locations
tcattgatntgcacactcttcagtctactattatttttttgaacaactccgactcgattttaagctaaataccttgctaatgattctaggtgatttatataaatttcaaagtggtaagatataaagacctatgtaatgcatgtaaccttacatcaaagactttcaaattcaaatattaacctatacaatttatttagagttaacaccaaaaaggtactttataaatttgctctaaaatacctaataccatttatataaaggggtgtgtgacaccaaatgaaagaaattgagggctaagtccagggccactacgaatcaacctttgcagcatgaatgaagtttatgatgctacaccacactatatg

SEQ ID NO: 170669 - DNA, 366 bp, Glycine max
attttttttatcaaaggcttaaaattatactttaaaatattccattaaactttgatatttcctttgtctcatttttttttatcttattaattctatttatgacttcttcttttcacaagacttgcctcctaactttaacgaaatatcatcacttaattatatatgtttctcatttataaaattcaaaattaagatcttattttaaaaaaaaaaatttaggaccactagtactctatatcaaatgcgagggtctttgcctaatatttactttggccttatataataaataaatattttgaatgtataaattatataatctgaatcataaaaataaatatttgaaactaccaattacattgtgataaa

SEQ ID NO: 170670 - DNA, 462 bp, Glycine max
  unsure (1)..(462): unsure at all n locations
ttgggagtgtcagctctacggcccagacctaaatcctcctactttcattcaccctcttcatcattntcttcagccacttcgtcatcctccaaaatcgcagtaacatctncattttgtaagccatctgcatcaactatgtcaagctcctcaccccaatcaccatcagcagcctcatactcttcttcatcagcaactccccgacctgtattgtcaagcaccccatcaaacatgcctcgcatgaccctgagaagaggccaatcacttccacacatgacaggtgatggaggcatcacgagagaaggcacttttcctgcaggcaaagatggaacattatctcccaattcagctgcaagccgttctgcaacatcatgtagcccatggactgatgcagtgatgtaagcaagaggcaaatggcccacattcttcaatatncttacacgttctcgaacatcacccatatat

SEQ ID NO: 170671 - DNA, 420 bp, Glycine max
  unsure (1)..(420): unsure at all n locations
gtcacctgcgggcatgcaagctaacaacagtcaagcgtggatcatatacacctcctctccaatctacttgaaccatgttccttctgaggttacatccaagccattttctggcatcattcgtatagcggctntgcctgattctgattccaagtatgtggaaactcttgacaagttcagttcttgttaccctgtgtctggtgatgcagcactcaagaaaccattcagtgttgagtataaatggcaaaagaaacgttctggggacttgctcatgctggctcaccctcttcatgctaagcttctgtcatatgatcgtgatgttactgtgctgaatgatttaagtatagaagcattgatggtgaccttgttggtgttgttggagaatcatgggtgttggaaaccaatcctattcctgtgacatgg

SEQ ID NO: 170672 - DNA, 421 bp, Glycine max
tgtccatgttaagagccaacaccaagttgcagactgttttattttatcacttccaggcccgattcttggtaaattcattgccaagttgggaatgattaacatctatttgccaacttgagggggtatcacgattaagcagttgcagttagttacaagaacttatttgagtagttagttggttatggtaattagttggctactagaagttaattaaatcgttcgttggttatggcagttagttactacaagttatttgagtaatttagttggttactcaagttagctattctctgtctttgtataaataaaccaactttgtaatactttgatgaatgaatcctcaaactgtttttcatctatctttcatttctgataaagattttgatgaatttcatcaactttttagtccaagacatctatc

SEQ ID NO: 170673 - DNA, 120 bp, Glycine max
  unsure (1)..(120): unsure at all n locations
caanaagaggcacgaaaggggggaaaatttaacgggaaccacaacaaaaagcagcaccagcaacgacaaagaagaaaacaaaccgcggggataaccgcaaggcaaaaaccgaacaagggg

SEQ ID NO: 170674 - DNA, 352 bp, Glycine max
  unsure (1)..(352): unsure at all n locations
gcgggcaccacatctgggagataggagaaagactaataagtgtgaaagaaagaggcggatgatgatgatgatgatgggaaaaggaaagtaccttgtgatgaggacagacgcaaacgaagccttgatggtgaaagacttggagagatttgtgggggaagaaccgatccattctttcaatgttatggtcttattggacacagatgaagatgtttccatgcccacattaaggagctgaagtgccaccaaaaccttgatgacgttccagtctccagggagctctttgtcgaatctcanaactaaactcaccaatggactgtgaccacgtaccagattacacctctaattggcatga

SEQ ID NO: 170675 - DNA, 402 bp, Glycine max
  unsure (1)..(402): unsure at all n locations
taatctcagaacaaatgttctaatatgatcttcaatatagatttatcaaattcgccttttattatcgacttaattcatcgagactcatgaaatgtgggcaacagttatttcgtatcatatatatttcatggtttttaacaaggtctagatatcggatagtcctgttttggaatagcttggaatatgttatctntaaaaacaaattaatgtacatagaaaataagtaactaattgtcaaaataaattcgaatattattcatgactgaatatagaagattgatcaagttcccttttactttgacccttatgggttaggcaaaatataatagatgatgctttctgtctcaggattagacaaagtcaacatatatattattatctgaaaatagacatattaaaagt

SEQ ID NO: 170676 - DNA, 212 bp, Glycine max
ggataattagtaatatatgctattacctttttatcttaagttagttttagttagaaatgatcaattaaatttaattcgataattatcgttctatacagtacatttatttttagatctagttttaaataatattaggtctacgtttagcatgttattatttgtgtcataagaaacattagatttagttgatttgttaatattattagtctgag

SEQ ID NO: 170677 - DNA, 298 bp, Glycine max
accgctcggaaaagcaccctgctgcattcggtaattgacggatcttctcgacatttaatctacacgttgatatgacagatgtccatgatctgaccattgcaatatgcgatatgtcttcacgcgtgtgacaaacgcttctctctccacgaccagaagcacttaagcgtttcacggtttgtattctgtgtagccttggaaaacaaccatcactttgtccttccttctgtcaaaaccactttccactttacaagctccttctccatcacgcacccacacggaccgcccgtgtttgtcattg

SEQ ID NO: 170678 - DNA, 384 bp, Glycine max
gactgcggctgcaacatgtctcgaattttccatttcttttacacgcttagaacaatcaacttggccttctcttaattgtctttgggcttggccaccaccatcaacaaactacttccgcgccctactatatgttgacttgaccaacgctgttattggaatgctgcgacaatctttccacaccttattcacacattctgataagcacggtgtcatgtgaccatcatcgcccccacatgtatcgtacgccatgctccatttattcttcgagattcgaccaatccatcttgctatggctggactcaattgatgaaatttttataagttttgatcaaacacatgcttgcaaggagtgcacgctacatcaatttgtactctcaatgctga

SEQ ID NO: 170679 - DNA, 370 bp, Glycine max
  unsure (1)..(370): unsure at all n locations
gaatccgctttatgttcattttcttaaccgnctctnttactcttattgggtaaaacgaacctttcacaagtctaaaatcaactctacgcataactctcttgcttntaaaaaactacgtaggtctgagttcctcatcgcacttaacgatacgtacgaggaagggcaacactcttgtcgacccccaccgattaaaaacactccaaggaaaataaatcaatattgaagtcatgactntgcacactcgattaaaggctatcgtcccttgtgacgaacgcgtgggatgctaatacctttcccgcacgtaaacaactcttgaacccttattcttaagattcgtacacccctctttggttgtttctaacgctgtcct

SEQ ID NO: 170680 - DNA, 264 bp, Glycine max
tgggcctactggattcctaattttcaacttacctatttggatgtgacatcatggatgaaaggccccaactcttccacgtggattcgacacaaaacatacttcaataagttggactcgtcaactacgggattttagattctatctccacttggttctgggaagcaccatctcagggtttggatataaacctctctcataatcatatccgcggtgagcttgcgactacaataaaaaatccaatatctattctaacatggtgatcta

SEQ ID NO: 170681 - DNA, 174 bp, Glycine max
  unsure (1)..(174): unsure at all n locations
tacttaagcttggatggataacncatggatgtgcttggaagagaactnatgnttattattttaccgcccatgggttggtaatgcacgggacaactatgtctacgaggaatggctcgcatactctgcatactactatcatcagcggtacccgtatcggtctactgtctgactttt

SEQ ID NO: 170682 - DNA, 402 bp, Glycine max
  unsure (1)..(402): unsure at all n locations
catgcagcttgagtgagcttggctacaaaattattgtgtttttatgatcanacgcttagattctaagaagcacaaatcctacacttatcccaatggtctttttaatataattggcttgctcactagcttttcactttcacttgctcttgaccttgttacatcaacacactttttctttttttttaacgcacaacttatgtgatgtgtgtgttgatgctctatctctttctttgcatcccaattagttccacctcccccacatttggggtaaattttccttgaatcatatgctctcctagaatctaaacaagatatctggagataattatntaagttcagggttcaaattattgacaatatcattcagctccaaaaaagggtgcagaaatataattatattga

SEQ ID NO: 170683 - DNA, 505 bp, Glycine max
  unsure (1)..(505): unsure at all n locations
tctaatgtatggaaaatatatagcaacatcactatacacttattttatataataataagagtacatattttgagatgtaagaattcgaattcatgaatcacaaattgattcctaaactaaacttaaggaagtacatatatatcatatatgaaattgcaacctaaaacaaatggatgcaattgcgtcaataaataaatatatttatattacaaatcaggatcgtatctatatattgaaaacatatatgcatatatgatatatcactacttttatttcaatgcaactacaaggaattctagcacgagaaatttggccatgagaatttgaaccctgtaattcaaatcaaagcacaatttcaatcgatagaagattnttgccaaatttatctaaaaaaattgcacattctaattctcagcggattggttctatgtatagtacccatcttcacgaacatcacaaaaatttcagagtcaaatgtcataatgggtaaaacacttatagacat

SEQ ID NO: 170684 - DNA, 393 bp, Glycine max
acccattaattgagtgaatcttcacgcttgagaagtgaaaatgagaatggggtaattctggagtaaattctcatctccaacaagtatataacattaatttacacttgctcaaagtgattttaaggcgaaaactctaccgattcaagatttgacccctcaacacccaatttaccctagaaatgactcttgctttcacatttgtcactcatttatctcatttgctctgcccaagctctcctacaagtcctaattgacattttaaactaggatcaactcactttagactccaattaccactaaccccaaatttagcttttcaaaccctcaaaatctcacactgttccacctacatcactaccattctcacattaacgctaggtaactctcccatca

SEQ ID NO: 170685 - DNA, 388 bp, Glycine max
actaagctaaagaggaaacttcatggaggaagagaatgagagagttatgttgtgcatgggaattgaacgagattacgaagagaagttgaactttgaagcgtgtctcacaagtttctcattcatcaaagttaccacaagtgttacacatgcttctatctatagcctacgaagcttccttgagaagcttcattgagaagctagtgttacacccctctaatagctaagctcaccctcaagggaacacacacgcctccaatagctaagctcacccccaagggaacacacacgctctcaatagctaagctcacccgcccccacaaaaaatataatacatgaaaaatacaagagagtccctactacaaagactactccaaatgcgctgaaatac

SEQ ID NO: 170686 - DNA, 473 bp, Glycine max
  unsure (1)..(473): unsure at all n locations
gtcacctgcggctgcaagctttgcaagctgaaattatttattcatctccgacaaccaacgggtgagtcccgtccaagtattcccgacaaaaaccggcctcatcgtgataaaaaatgagaagaaggagctaattcctactagtgtgcagaacaattgaagagtctgcctcgactatatgaggctgaactaggttaccaaaaaggaccatnttcccctgccattcattgaacagatgcttgaacgcctggcaggtaaatctcactactgtatccttgatggtttttctggttatatgcaaatcactattgctcccgaggatcaggaaaagaccacattcacctgccccttcggcactttngtctataagaggatgcctctcggcctgtgccatgccnctggtaccttccagcggtgcatgaacaatatntttagtgatgttttaaaaaatgcctacatgtgttatggatgattca

SEQ ID NO: 170687 - DNA, 419 bp, Glycine max
  unsure (1)..(419): unsure at all n locations
tgaagaggatgctctaatggaggaacagattatatataattgggagcacgacattgaaggaatcacacaaggagagaaatggaactctcaagtgtatctcataagactttcattcatcaaagcttcaacaagtgttacacatgcttctatttatagactatgtagcctccttgagaagctttcttaagaaaacttccttgagaagcttctttgagaaaaccttcttgagaagctagagcttatctacacacacccatctaaaaactaagctcacctccctgagaagcttccttgagaagctagagcttagctacacacacccctctaataactaagctcacctccttgagaaacaagctagagcttagctacacaccctataatagctnagctcaccgccctgacagaatacatgacaa

SEQ ID NO: 170688 - DNA, 370 bp, Glycine max
  unsure (1)..(370): unsure at all n locations
ctttatccacttgcatcctgtctttacattgctcataattgtttctttgttcaattctttgattgtcactttgccttttctggagtgtcaggtgagttccagtttcttggagaagctcttgttgactaccttttctagctttggtataagtaaacaagcaacatttctgtggaaatataaagtttatgctacagtttggtgcatttggctattaacgcatcttttaagtaaacaagctctttgaatgaagtaatgtcttagtcatttgatttccacttgatgtaacactttatgcttttgatcattctagagggactgggaacctctattganttttcctcttttttctcccangaggaagcccttttct

SEQ ID NO: 170689 - DNA, 317 bp, Glycine max
  unsure (1)..(317): unsure at all n locations
catagatactaagctctcaaacaacttgcttcctttcatgtatcacaatatatttctattaacttaactttacgtaacactataatatgtgtctttaatgtcctttcaaagacacgccttgtcatcttactataacaataatgtataccatataatgtgaatggcataagtcacagaaacataactataattgaattcacaagtgtcatgcaatacgagcattactaccataatgtgtgtgtgcacacccacacacacacacacatntcattacatcgttaacaacgacttatccattacagcacttcttatcacat

SEQ ID NO: 170690 - DNA, 385 bp, Glycine max
  unsure (1)..(385): unsure at all n locations
aacctttcacattttaagccaaagtacccgcaaattcaaatctacccatattttgtattcaattacaacttcagtaggcttaatgattggaattcttctaagcattactattctttagtntttttataaagatgtattgcgtgttggttcaaaccttcatagtgcttaattgtgtgtgacttacaacagagttacctccttaaaaatttcatccacccaaacttttagaggagagtatacggatctaccaacanaaactaattggaaataagagccgtccagttcattgattgattgaagcagaattacagccaaatatttatattttgttcataattactanatagaatcaatttatcctcaaataaaaccaacttttttttac

SEQ ID NO: 170691 - DNA, 417 bp, Glycine max
  unsure (1)..(417): unsure at all n locations
tagaatantaagcttgaagaggatgctntaatggaggacaagaaagattttatgttgtatcacacaattgaacgaataaaagagggaaagaagtggaactctgaattgtatctcataagactttcattcatcaaagttaccacaagtgttacacatgcttctatttatagactacgtagcttccttgagaatatttcttgagaaaacttccttgagaagcttctttgagaaaacttccttgagaagctagagcttagctacacacacccctctcataactaagctcacctccttgagaagcttccttaagaagattcctaaagaagctagagcttagctacacatacctctctaatagctaagctcacctccttgagatgagaagctagaacttatctacacaccccctataatagc

SEQ ID NO: 170692 - DNA, 446 bp, Glycine max
agcttcaccaagtgttcttgagcccttctttataagcttaggtaaacgaccttcattctcaactctaagcttgattttcacttcattttcttgctctattctcacttgtcggttcaaaatcttatttttgcactcttgaaggttggaaaattgaatctaaaatccctcattcttccttataaatttcatggagactgtaagaggtaaggggggtctctccaactcttgaaccctgtgtttgttgttaaacttccttgaacatgtctgcttgaaattatcgtgcttgctaccctgttctggatctttgtgatcaggctctatcctacatcttttgatgcagacaatgagttctttgagtgtaaaacattggctagccttaaacttacttaaattggagttcttagccaagttatgaataaaccagtttacaacatttaccaataaat

SEQ ID NO: 170693 - DNA, 465 bp, Glycine max
  unsure (1)..(465): unsure at all n locations
tggttctagaagcctaatccaaaacccctttgtgttcttatttatccaagngatctctctctctctatccattggaagagaagatggcatcaaaaccagtttccctttcacatttactccttttaaccttgtttcttgccaccatccaactctcagagcagttagagttttctcagtctcaaacactactcaaggttcagcaacttcttggctatccatcagcactaggtactctcagcagcaccacagacttttgcaacattgaacctacctcatatttgacactagtctgctatgaggatagcttgacacagctgcatgttgttggcaacaatgagtataatccactgcctcaaaacttnctctcagatactctatttgctacactacgcactctttcaagcttgaaagtcatttccttagtttctcttggactctggcggaacttacctgaaagcattgctc

SEQ ID NO: 170694 - DNA, 430 bp, Glycine max
atccttaagtgacctgagctgcaacttgaacacagatttggtattctcttttgtgtgctcagcatggggggaatcttttcgctgattacagggagaccgggatgtagtggattccgatctttctcaactgctgaacaggttatcgaaggaattgatgcccgcaacctcactgcaatcatcacaggtctgttttttgtactttgaattactattattccttgctttttacttggtttcatagtacacacaagccttcggtgaatacattttatttgttcctgttatgcatgttattcaaagttaaattgtgttctagatagagaaattaaaattctgataattaaaattttttattaaaattattattttaaaattttgcgttgaataaaaacgttaacatttgagggtgaaaaaataatgaaaaaaaatt

SEQ ID NO: 170695 - DNA, 476 bp, Glycine max
  unsure (1)..(476): unsure at all n locations
acacatagaaactaagctgagcttacgatatcttgaaccttcagctgtgggttttataacgagaagaacatcacaattaaacagaagattatctcatattactttgtacagctgtagagcctattatccttttctctatttcgttcttattcataactgcattntgttactacgattcagaatttgctgaggtgtatattttctgctattcctttctgtatctttttttttcaaagggtatatatatgtacgtctccctcttcaatatgagataaggaaaaccaattccattcttctgtcttttatagccttgtgttttcttttaaataggttatactctgatttactgagttacaaaaagtgggtcgtttgtcctgtcccatgaaatctgttctgtcatgtgctgcaatcatntntacagaacaaatccgacatcaattgatctcgtatgtcctgcgccctttatattttatcta

SEQ ID NO: 170696 - DNA, 377 bp, Glycine max
gcagcatcaacctttgaaaacgttggtttattgagtaaaacaaactgaagatggagttgcactctatcttcttatctacagttgtgaaagatacttacaacactgattggagtctacaaatggacgggaccttcccattgttcagaatggaggacaagtgaataacgtgctaagaagttcttgaccttcatatatttgatgcactttttccatttctaagaatataataagtgattctttgcgttcatcccataacgaaaatcaaggttcatgatgcctccattatttttctactagcggcgaaccccttttgaatctttgtttataccttgacccgaaaaaagaccctgctgaaaacaaaaatattaactcttgaa

SEQ ID NO: 170697 - DNA, 428 bp, Glycine max
  unsure (1)..(428): unsure at all n locations
gacctataaaactaagcttagcctcacatttaagagcggatgtttatctttattcatactttgcgnccgaaatctgtcttgtacaaacattctcctccgatttattgaaatcatatgaagtataaatgaagcccaagatctgaaagtgttgatctccattaaaagacgcgttatgttgtgcacacctactctgatgggtgagacatgactttctaatgaagtgtacaacacacaagtcaataagagtggactctttacatgaagaagggacacacatttatgcaagcattaaatgcccccatgaccattatcatcatatgaagatcaagtgaagaatccaattattatgagacaacagatactcgaagatgaaatctatcaatactagacgctctaaagaagaagatacatgaaagttagactaccac

SEQ ID NO: 170698 - DNA, 210 bp, Glycine max
tttttttggacaaaaaattgttttaatccttgttacatacctatatcattatttttgagactaattttgatggggcggactttatccaagtcggttaggagaccaaattaggtgataatgacgtaatttcattactgcaaatatttttacttacttcgcacttatatacagtattctactcaaccttcaccattaaactaaactctctct

SEQ ID NO: 170699 - DNA, 418 bp, Glycine max
tctaaatttacacagcgtacgtcactctttatagttctattttctcagaacctttgtgaattcaactcaaacctttttaattccactacctcccaatggaatcttactatgttgttgaatgccaataactagtttttatcactatatatgcagctagccaatgaaaacaatgatgtgcaatttgttgactttcttgaaagcgagtttttggttggtcacgtaaatcaatgtccagtagtgtgattctttctattgctgtcaagagtagttgagtagcatgggagaaacattgatctcattaatttctttttgtcgcttaaggtggaagacattaaaaagatctcagaatatgtggcccacctaataagaatgggaaaaggacatggtataatatattgttactacttgcatcttataa

SEQ ID NO: 170700 - DNA, 349 bp, Glycine max
agcttcttttggaccttgaacaggcaactttctcctctttcaaaaccatgctatgtgctcgcgactggtccctttcttcccttcgcaacttgagttcactattgctaccccatagagctccgcgaaatttgttccagccatactcttccttgcgagccctcttggtctcttgttcaagggctcttgcggtaattgcattctcttcccgtaacccggcacactccttccgaacgtgtgtagcggccaacttgaacttctccttggcaagttttgcctttcctaactcgcttttgagagcttggacttcttcgtcctcttccggtgcttcaaaattctcttcgctgacgac

SEQ ID NO: 170701 - DNA, 436 bp, Glycine max
  unsure (1)..(436): unsure at all n locations
tgtgcanatcanatcactcctacattntatctctagcatgcatngcatgtnggnctcttcctttgtcacgggaagccggaaggtccatatcaccttcttaattgtacacatggggcactgcgcccccaaatgcgcaagtaagaagagataattttccgggttctcgtgtccgcaaaatgcattcatatcatgcatcgcataagcatctcttcataacatcataatggacatatcctgcatttgtccgttatcatattccaacctcacattttgcatgagtcatggcatcatcatgcatatgcgttcaacaaactctntgatttgcaaaattgcataccatttgttttcatgtttgctcatccttacgtnttcctctacaaaacaaaaacaaaaagggggaagcgtgaaacttcacactacattcttagtttcatgt

SEQ ID NO: 170702 - DNA, 358 bp, Glycine max
  unsure (1)..(358): unsure at all n locations
ggtgatacgtgtgtccatccctgcagatcatgaatccatggcatctttactacaatccaacgagttgtagaagcgaagacattttgatggtttgatgatgccaaaggatcatgcgcttctcaagttttattcaagacaagaatccaagaaattcaagatatatgatcaagataatctctagaaacttaggaagggaattccaagttgaaacaagaagaggtttggccaaagaacttaagctaaaatgtttttacaaaagatttactctctggtaatcgattaccagatgttggatcaagtggcctcggaataattaagaagggnggttagataattattaatgtgccttgactaatta

SEQ ID NO: 170703 - DNA, 399 bp, Glycine max
  unsure (1)..(399): unsure at all n locations
cacccctctatgaactaaattaacctccttgaaaataattacagataaaataatcaaacattaaatataattactatatatatatatatcagggtgttacaattttaaaacacgtaaatttcaattgtaaatgaaaactttgttaatttgtttatgaaatatgagaagtaaattttcgtgatacactttcatcaaacaatgcacaaatacttaatcaaatatgtatatatatatatatatatatatatatatatatatatatatatatatatattaaccaagtatacatcattcgtgtgacggaagatanattangtcatacatatatttaaatctgtgattacatccccaataaaaagaatatggaccatctcagagagtgattaaaaaacacactct

SEQ ID NO: 170704 - DNA, 303 bp, Glycine max
accactgaaaccagagctaaacagacacttttaatgccaggggcaccttgcaagcagaacacaagcgatctcctcaaatttagctagcccgcatcaataaaccttgcacctatgcttcaggtcctacaatgctcaatggaataccctggggcccctccatgataagcacatggtgcatctgagtcggatcctcagaaaaatggagggtgaagaaccttggctggggttatggctaccattgaattatcgagcagatatgggagcaagtcaacacaggacacccatatcggggtgaattctaca

SEQ ID NO: 170705 - DNA, 385 bp, Glycine max
  unsure (1)..(385): unsure at all n locations
agatactaagctacacatcattcgagcgcgcgaatattacngtctcaatcagacatccgagtaaaaagatattgtcgtttgaattggctcacagcttcaacattcaatttcgagcggtttgatatattaccggcctcaatcagacatgcgaagtaaaagatattggcgattgaattggctcagaacttcaacattcaattttgagcgtctcgatatgtgacgagagtcgatcagaccatctcttaaaaagtgattgccttctgaattggcttagagcttcaacattcaaattcgagcgtctcgatatgtgacgagagtcaatcagacatccgagtaagatgttattggcgttgaattggctaaagctttacattctatttcgagc

SEQ ID NO: 170706 - DNA, 356 bp, Glycine max
  unsure (1)..(356): unsure at all n locations
ggccacccagcncgcccaggcgagcagggatgtttcctttataagcaacagccatctggaggaatcttctggagggcccacatgggccaagtttctatttgcacccccatttttactcaatacaccccctgccttttctggtgactctttctgtcgtaaaggtacggatactcacgaattttggaacgatacttgttttcttgttccgaaaagttacagaaccttgcggatcacataatcatcccctttctgacttacagaacttacggaacctcactaattgggccacgatgcctccatttgaactctggtgagtcacggaaccttaccgattgagcatcaatagttctctttga

SEQ ID NO: 170707 - DNA, 453 bp, Glycine max
  unsure (1)..(453): unsure at all n locations
tatcaacatcaaacttggagaaagagttcttgttgtcaatacatgagaagcaatcaagtataatgttacttccttcactaaagcggcgatctatctccacacatattntatcaatagcaacataaaaaatctttgcacggtaatgatgaagattagtgatagtcctcccttctgctcttgaacgaccccgaaccggtatttcgtcatccatatttggtaccggaatacttttagctacacaaaatccttggacatcggcaaaaaaattattccagccactctctctcattgtgcccaaccgagctttgacaacatcaactaattccatggcattcacaatattaagatcttttctttgcacatacattgaaagctcgttggtgataccaaacaactntaacattaacctcaaaatanaagcanatgtaaagctctccttttttctacaaacct

SEQ ID NO: 170708 - DNA, 386 bp, Glycine max
  unsure (1)..(386): unsure at all n locations
agctaatatctttaaatttctatgaaaacccttgatntatgcttgacatcaaaataaataattgaattatcttacaagtcataaaaaaatcagttttaattagctaattgtgcatctattaaactcaaataacaattagttaatgaaatggactctaaagatcgttccatcaattcatgagaaaattatagcattgtttcaattttttcgatggaatatgggtataacatcctcatatttttatgtggcctatctattctattgataatctatcatccgtcattttattgattacaccaacatcttagaacctctttatttctaatattctttatgttggacaataatttctttactacccaagatatataattattagtgatctc

SEQ ID NO: 170709 - DNA, 419 bp, Glycine max
actcagcttaacatcagaccacttccaggtgctgggctacttacatggacttgatggggcctatgcaagttgaaagcctatgaggaaagaggtatgcctatgttgttgtggatgatttctccagatttacctgggtcaactttatcagagagaaatcagacaccttcgaagtattcaaagagttgagtctaagacttcaaagagaaaaagactgtgtcatcaagagaattaggagtgaccatggcagagagtttgaaaacagcaagtttactgaattctgcacatctgaaggcatcactcatgagttctctgcagccatcacaccacaacaaaatggcatagttgataggaaaaacaggactttgcaagaagctgctagggtcatgctccatgccaaagaaccttcctataatttctgg

SEQ ID NO: 170710 - DNA, 379 bp, Glycine max
  unsure (1)..(379): unsure at all n locations
tctanattctttgtattcaaaatacaatagagtgagattatgccatttattaacttctacttcagaaccaaataaattacaaattacataaacgcacaagctaattgaatgaaaaatcgaacaaaggtgatgataaatgcgtaaatngatacctgtgcagattcctgaacttcttcattagtgttaaagaaacttgatgccatgaatacatatggtcacttcaaatttcgaataataatcacaataatgttaaaaattgagataattaatgaaccgatgtataaaaccctaattgagtgaatttctgttgcagtcaccaattcagattaagaaaaacgttcnagagagagagagagagagaagcgagagaaagagagag

SEQ ID NO: 170711 - DNA, 306 bp, Glycine max
gaaaaatctaagggcactgtgtatgttcctctttttccaaagcaacaatgagatcatgctcaaatctgcgtgaagtgaaaaatccatgagataaacataatgcaatgaaatggcacgaagaccctaaactgcatgttaatcttattggttcaacatgtaaaattcaagtgcaaaaatggtttcagcatgaaatatttatttgcaacatgactgtcataccctaatttccgtcggtgacaatcgttcgttgatcttttatccttgcctagggacttacgctgttgaaagcagttacaatgcaagcaa

SEQ ID NO: 170712 - DNA, 401 bp, Glycine max
  unsure (1)..(401): unsure at all n locations
actcagcttaacattcaatatcgagcatttcgatatatacgggtcttgttcattcantccggtaaaaagttactatagtttgaagttgctcagagcttcaacattcaatatcgagcgttatgatatattacgggactgaatcagacatcagagtaaaaagttaatgtcgcttgaattatctcaaagcttccgtattccattttgagcgtttcgatatattacggaactcattcagacatccgagaataaagttactgtcgtttgaatttgctcaaagcttctataatcaatttcgagtgtctcaatatattacgcgactcattcagacaaccgaattaaaagttattgtcgtttgaattatctcatagcttccgatttcatttcgagccgctcgatatatt

SEQ ID NO: 170713 - DNA, 472 bp, Glycine max
  unsure (1)..(472): unsure at all n locations
cctttatttagtccctctgctctacagatcttgattatatattttaaaattcatcanatgttacagtattgaatttttttggtacagatgatgttatctttttgtttaattgctagaaacgaagctaactttntatatatattcaacataatcaaagatggcacctagttattacgtaccgtgtttttgttaaaaatttaaaaatgttgacagaaaggacaactttgcatccattctaaaaattaaaagactaaatttaattntttaataaaaggactaaattaataatttagtctttaataaattactaggagaaatagactctacatcttttannaaataaaagacaagaaagaaagagtaaatgttaaatagaaaataagaatgaatgtaagaaagtagtgagtaatttttataataattatttagaaatatatntaaataaactttaattaattaataatatataaaa

SEQ ID NO: 170714 - DNA, 263 bp, Glycine max
cttaaacctccattaattttgtttctttaccttctctttcatatttggttcttcaattttctccatggaactcctcacatgtcttgttctaaatggttttaacatgatatcttaagaggttccaaccgattaatacttgctatagaagttagatttgattttctatgggtcaaaattcttgtctttgtcttgaccatgaattgtgttgagttacgtcctttgagttttgcttgtattttgggctgaacctaaccataaatcta

SEQ ID NO: 170715 - DNA, 454 bp, Glycine max
  unsure (1)..(454): unsure at all n locations
ntggtagaaattcgacatcataacattgtgtttttatattgggtttgntctcattcacaattcttatttttggtgtatgagttatcggaaaagggaagcatgaataagattttaaaagataatgaacaagcaattgcattcgattggaattggaggatcaaagccaataaaggtgtaacaagtgctttatgctatatgcatcatgactattcacctctgttagtgcttagcactactgagtttaaaaaggttggctaagattttgttaaaacataagcacttatacaatgaaggaaagctggagttgctgcacatgatgtccaacgttatgtcaaggaataagatcgggctgcataatgcacaaggcaagatatagtgtcaagtgatgaattgaagttgaaggatccacgatgtcggatacaatgtcctgacatcctgctcgagaatactggaa

SEQ ID NO: 170716 - DNA, 443 bp, Glycine max
  unsure (1)..(443): unsure at all n locations
tgtacttctataccacggatgtagtctaatanattcttttggaccaacgaaaaccaacgaggacaaaactgtgtcacggttgagacaacggacaagccatttttctcaagtacgggagtacctatcttctgacaatgtacagagacattcatcttcaaattggtgatgaattatgcaattgtgcggcaatgctaagaaacctaaggggttaatgttacgtatgatggcggttttattagccaattttcccagttgaggtcctcccaaagacacatcacgtgcagtttcaaaggaaacgtgtacaaatgaaaatgtgctcccttgtattctactatgcaaattacttagcaaagtgagatgtccaagtatgaataatgagcttattccacttcgcgtctaacacttacattgcgtctgtatggtgataatacaataaaaaaaaa

SEQ ID NO: 170717 - DNA, 371 bp, Glycine max
  unsure (1)..(371): unsure at all n locations
ntacagcagaatttagtaatgaccagtaacctagaattattataacttaatgccattaacctatggaattaaaaaaaaaacttaatggctaagtgtaactgaaattgtggcaaccaaaagtcaccccctaaaattacgtaacggtttttgcatgaatctttgaatatggaatgaatgcatgaattcgaaaaggaagaaggccatgttttgattgaatgagccacttagccaaaaggcttaccttgtgaatgaacaatntatcccttgtacccagtttgagctgaaagtaggattgtttgattgaaccttgagcctgtacaggttatctccttctaccttgtcttatgttgtaagagaacatcattcataaa

SEQ ID NO: 170718 - DNA, 423 bp, Glycine max
cgacaataactggtttctcggatgttcaatagattcttcttaaatatcgagacactccaaattgaaattggaagctcgtatcaaattcaaacgacattatactttgacttggatgtccgattgagtcccgtaatatatcgagacgctccaaattgaaacagaagctcttagacaattcaaacgacaataactttttattcggatgtccgattgagtccccgaatatatcgagacgctccaaattgaaaacggaagctcgtatcacattcaaacgacaataacttttttctcggatgtccaattgagtctcgttatatatcgagacgctccaaattgaaattggaacctcgtataaaattcaaacgacattaaactttaactcggatgtccgaatgagtccccgaatatatttagacgctccaa

SEQ ID NO: 170719 - DNA, 452 bp, Glycine max
  unsure (1)..(452): unsure at all n locations
tagtgaattatctatacactctaatgaactcactggaccattcccagcttccataggcaacttggtcaatatggactccatgctccttcatgaaaataaactctctgggtcaattcctttcaccattggaaatttgtcaaagcttagtgtattatctttatccttgaatgaattcactggaccaatcccagcttccataggcaacttggtccatttggacttcttggtccttgatgaaaataaactctctgggtccattcctttcaccatttggaaattgccaaagcttagtgtattatctatatccttaaatgaactcactggatcaattccttcaactattggaaatttatcanatgtcacggaattatatttttttggaaatgaacttggtggcaagatccaatagaaatgagcatgcttactgctctgggaagttgcagctagcttac

SEQ ID NO: 170720 - DNA, 409 bp, Glycine max
  unsure (1)..(409): unsure at all n locations
atgttctagagagagaaaggttcatgttccaaagagttctgagagatnttgttgtgtgaagatctgcagagatgcgagttcgaagcgaaagccgttctgagaacttgagatgagtttgtgagtgattgttagatcctagaggtgaaggagacatcctcaccacctgtgtttttgcagaccttcatcttgttcttctctttgttgtaaaggaggttttcggactatggaaagcttaatcctctgttggatcttccctgtaggtacctgatgtaaatatatctctatctatgtaatgatgtnttatgtgttctctgtgctatcatgctttcattccagcgngctttttaccctgatcacgtagatgcatgctttgttagggtcattcaacagtgggaactggtctgattct

SEQ ID NO: 170721 - DNA, 459 bp, Glycine max
tgctagcctaatccaaaattgaaaaattagagatattgcgcttacattacgggcacgcttagcgcacacaaaaccaaaaaattctaagtgtctaagaacacattactcccttaacgcacagacgtgcttagcgagttcataagcaattgaactttcaaccaaagaagatgaacgcgcttagcgggacatggccacgcttagcgagttcatctggaaatccagatgttcaacgaaaatgatgaactcgcttagcgcagcaagacgcttagcgcgctcatcgcgatttccagaaaaagcaggggcttctcatccctccacttaggcccctataaggccatttaaccctaatcaaaacaagcacattgtatccacaataaatccctgatcaagtctaacgaacaaataacctaatagaactaagtattaacagaaattcaacctaacactactaaaataact

SEQ ID NO: 170722 - DNA, 263 bp, Glycine max
acaccccgcaaagaagcacagagaaaaccacccacaccaagcgcccaaaagccgaaagggggcaagacaaccaccacaagccccgccggagaaagggcaaaaaaacacacccaccagaccaaagaccaaagggaagacgacacacaccgccaaggccaggaacagagccaacccccgaaaaacagaagggaaggacccccggcaggaaagggcaaagcaaccaccaccaaaagacaccccaggaaaaagcaagcaccccccag

SEQ ID NO: 170723 - DNA, 389 bp, Glycine max
tcatgtcttcattgtaactttgtgcttctgcgtacgtgctctttgcgctcacttctctttgaagcatgtttatgttcccattgtaatttgttcttatgaaaactagttggttatagattgatagttagttcgctaattaattactactactaaggtttggaatgcagctagttggttatagattagctagattattaattatagtgtcgaagcttaaataaaagatatacagaccatgttttgcggttgaaggcctatatctctggacacccaaagaagcaagggtgtagttagctctcctacaggcgattacaggagcaagattcatacaagctctcatggcagattcttgttacgaatatgtacctgaagtgataatatttataaca

SEQ ID NO: 170724 - DNA, 428 bp, Glycine max
  unsure (1)..(428): unsure at all n locations
tatgctgcanacatctacaatagacctccttatcctcagcagctaaatcagccacaacagaacaattatgacctctccagcaacaggtacaatcccgggtggaggaatcatcccaaccttagatggtcgaatccttcacaacagcaacaacaacaaccttattttcagaatgttgctagcccaagcagaccatacgttcctccaccaatccaacaacaacaacaacaacaacaacaacagcaacagccctagaaacaacaaacagttgaggctcctccgtaaccttcccttgaagaacttgtgaggcanatgactatgcaaaacatgcagtttcaacaagagaccagagcctttcattagagcttaactaatcagatgggacaantggctacacagttaaatcaacaacagtcccagaataatgacaa

SEQ ID NO: 170725 - DNA, 400 bp, Glycine max
  unsure (1)..(400): unsure at all n locations
ntgagccaaaatcctgactcaccataaaccttgacccattgtgagaatgccaatccttaccctcggaagccaaaaataggagagagagagagagagaagataaggataatttccgatcaaaggaaaaaggagaaggaaaatttccaatcaaaggaaaaaggagaggaaattcccaatcaaagagtgggggaaagcaaaaagaacagaaagaaaattcccaatcaaagaatgggagaaagaaaaaaagagagaagtataaaagaagaaatctcctggtcagagaaaccagaaaaaatgtgccgagaggtccttggaccatacaatatctgaacaatacagaattgtcaccaaatgaataataaagaggaaaggacaccacgacctaaaatgggcttcccct

SEQ ID NO: 170726 - DNA, 470 bp, Glycine max
  unsure (1)..(470): unsure at all n locations
tggattaattcggcctgacgagggatcgagggtgtagttatttatgctacaacatagaacacaagagcacaattgattagagaaatatatttctatgcattagcttgtttgttagaaagacccaacatttctacctactgctgtcattttatttaccttgcattttatagtttttagcataaaagtttagtttaaattctgtttgaaattatcactcatacatgttctctcaacaatgcttcaattctgaactcaattcaggctaacattagttccctatgttcgatactcagattcatccattttaattgtaaatacttgacgatcccggtcattttccggtaaaaccccattgaaatttccttgatgcataaatgaataaaaagtaactgcattgtggaaacaacaggtaggcataacatgggttcctcctttcttctcattctcctatnttctcaggcttctatcat

SEQ ID NO: 170727 - DNA, 388 bp, Glycine max
  unsure (1)..(388): unsure at all n locations
actcagcttaccacttccgactaaacttncagctggagctcatataccctcttgtgcttggcctggnacgtataattcttcaaaaaaatgctgtctggctttttggttgcatatcctggttttaactggcatgttcttttcttctgtaactgccaaaaaatatttacttgttgaggggcttctaactttaataatctttaacaatttttaattaaggaatgaagcccattgctgattgcatgaacaaatgacattgaatccttccaatcctttgaataacttctcatgctatcatgcatgaggaatatagtgcaattntattcatatgccgacatatatataatcttgacccaatcaaatatgttattaacttattatctattaatat

SEQ ID NO: 170728 - DNA, 419 bp, Glycine max
  unsure (1)..(419): unsure at all n locations
acgtcgctctttcactctccctcgtgcttagcgcgagtaagtggattngagtttagcaccaggtatgcgcttagcttggctaaagacaaccatcgcgcttagcgcgtggccttgatatagatgctctacctgattcttttgtcgcgctaagcacgctgaagctgcgcttagcattggatgtgcgctgagcccaaatggtgagttgagcgcaactgctccctttagcacctcaagattttagtcttttttgacctaaaattgtgcaatgttatcattaaatcacatgggagatactctacagacaactattaacaataaaacaagattatttactaatccctacaaattactataaattgtggaagctatacaacgtttggaaaatgtttctatatcaaagtagtcgtgtagatgactac

SEQ ID NO: 170729 - DNA, 319 bp, Glycine max
  unsure (1)..(319): unsure at all n locations
ntanaattngaattaaaacgttcaacaactgctggtaatctattaccatatatgtgtaatcgattacacagtgcaaatttttgaattcaattttaatagttgttgtaaatcatttntggccactgtgaatcgattacatcctctggtaatcgattatcagagagtaaatctcttgaaaaagacttntaacttagatttcttggccaaaccttttgctacttcaattacgaattccccttctatttatatacccttcctaagactctagagactggcttgatcatccatcttgaatatccttaatttctttggcctggat

SEQ ID NO: 170730 - DNA, 357 bp, Glycine max
tgagatgaggaagtgtagaagggtgaactttctgcttttattcgttgaccacagagtggtacctggagatatgtcgcgggggtcatgagaccttggggacgttaagcggggtgctattgcccaaaaccaagcttgaccaattccgacccaacccgggcatagtcagtcagtgagaacctgtgatgtacctaaacaggcgagctcctgacagtcaacagataaaagatacaaagaccacaaagcaaggaggcttgtggtggctggccagctgtgaattttgtgtgatatatggttgtggcctctggtaatcgattaccaagggtgggttatcgattaccaggcttcaaaatgaagaca

SEQ ID NO: 170731 - DNA, 319 bp, Glycine max
tcaacattcaataccgagcgtctcgatatactacgggactctattatacatccgagtaaaaagttattgtgcgttgaatttgctcagagcttccgcattcacagtcgagcggctcgatatattacgggacttaatcagacaaccgagtaaaaaagttattgtgcgttgaagttgctcataggttatgaatttcaagcgtgccaatatattacggtactgagtcagacatccgagcaaaaagttactgtcgggtgatttgctcagagctacgataatcaatttcgaggggctgaatatattacacgactgaggcagacaa

SEQ ID NO: 170732 - DNA, 414 bp, Glycine max
  unsure (1)..(414): unsure at all n locations
tccatccaacanagtgttttccaacttcatgtcccggtgacacacttccttcatgagaagacatattatgatacataagactcatacatcacattggacataatactcaagattgacacattgcctatactatattctcacataggttaaatacaatttatattagatagtgagggagaaagagagcagttaccattgcatgacaatagctgacccccgatatgagttgttgaaaaaagaaacgagcctgtggcatagcaatgggttaatagttacataggaaatagagacctagcagaagaaaaagttaacaatttatgtaagaacctcaccctcattaaaatgtcctgcattgcagaatttctcanatagttcttcaccagatgcatattccattactatggccagatgagt

SEQ ID NO: 170733 - DNA, 377 bp, Glycine max
tgctttacgtgacactataaaactcagcttgtgaatcgattacacatatttggtaatcgattaccattgtttgtttctgaaaaatctaaagatgtaactcttcaaaaaggttttgactttttcaaatgggttttaagtttttctaaaagttataactcttctgaatggccttcttgaccagacatgaagagtctataaaagcaaggctttgttttgcattttctaatcagtctttctatgaattctatacaatcctttacaagccttgaatctctttgaacttcttcttcttctttgaccaaaagttttctgaagttttctggttttctaaaccttgaaaacttgtgctattcatcctttttcattctcttctccct

SEQ ID NO: 170734 - DNA, 346 bp, Glycine max
  unsure (1)..(346): unsure at all n locations
tgaaggtgtgtaacccaccattntccatagtagaacacttgttacgtgtctactatcattgtcatcattttttcgtcattgaggtgccacttgagctgccaggttctccacctttgggcgtattctttgaaagatccgtgcccccttttttgcacatgttttgtagttgcgtcctatccgaagccattataccgacactgtctaacgaaggcaaccattatgtccttccacgaatggactcgggaaggttccaagttagtgtaccaggtgacaactaccccagtaagacttcttggaaagaatgatcaacaattcctcacttttacgttgccccatcttcgacata

SEQ ID NO: 170735 - DNA, 333 bp, Glycine max
  unsure (1)..(333): unsure at all n locations
taaccgaagttgtggttcggccgacaccggcatgttttatattgctctttaaggaatccattagctcacctcagaaaaaacttgattcaccgaaactgatcgaaaaatatgctatccgacgtcagttaggaaagatgaccgaacgaattttaaaatagaagcatcattgggtgacgccgatcgaacatttcctaatagacctcatccaattattagtcagggattgaatagaaaatacaatagccgacatcggtcttttgaaagccgtgactgatatttttcaatcgacattggtgcaatttttntacaaactgctggtcgataataattttt

SEQ ID NO: 170736 - DNA, 407 bp, Glycine max
actcagctttggttaaagctggctttgaagatggtcaggaagaattctatctgttcaaaatgggtcatggtcacttgatgatatcctatgaatccatagaaatcagaggtctgtctatccagccagtatagttagggtcatcagatcctgggtggtttgtacagagtgcatgtcgccattactatctaacatgtgccaagtatgctctagttcatccttccatcttacaccaaaagacctactcacttcaccataaggctacatttaaaggaaatgaatataagcaatattgacgtgctatatcatgtcttggttattagagaataggcttgaaattcctaatctgatccattatatgcattatggtgaacatttcctcttggtatttttttgacatcttcatcatt

SEQ ID NO: 170737 - DNA, 417 bp, Glycine max
  unsure (1)..(417): unsure at all n locations
tcttcacagggaggaattagccagatgacagagcattttatcgctatttctcccattagcatgtcatgtaaggttntttgcatcatctccattagcaaacagacgcttaaaccttggaatgatccaaatataccacaacaccttcgctggggggcccttctttgagttttcatcatccttcactttgtaccgtgataccccacacctagggcatttgggcatttcttcaaactcatgtctatataatatgcaatcattagggcaagcatgaatcttctgatactccatacccattggacgcaatatcttcttcgcctgatagtaactnttaggcaacgtgttttccgccggaagcataccgagcactacttatagcagtgaactatagctttttcactcaaccctatctggcttata

SEQ ID NO: 170738 - DNA, 317 bp, Glycine max
atatctatcattctctcctccctttgcccaaaagaattcgcaaggactaaccgctaaaactttttgccctctatctccctttccaaaagaaacaggacaaaggccgaatctttgggctcccttcccctttgaagaaataaaatgacacagctagaagctttgaacttccatttccttaacaaagattcaaagactaaccgctgaatatcttatgttccctcacaagttcaagactaccgctgaaacttgctgacaatggaggacatcttgggacaagaaggtctaactggtattgaagaaacaaaaggacacctgga

SEQ ID NO: 170739 - DNA, 203 bp, Glycine max
agtatgacagtcaccgctctatgtagcgtagcacaccagcagcgcttctaagccatcaagggatggtcgtttctccgggagcgacgcgtccagctcatggacgatgagtatactgattttcatgaagaaatatggcgcctgcggtgggcaccactggttactcctatggccaaatttgaccaaaaaaaatccttgattttacg

SEQ ID NO: 170740 - DNA, 272 bp, Glycine max
  unsure (1)..(272): unsure at all n locations
ataaagcatgggtaacacttggtggaactttgatgattgagaggcttgtgagacacaactcanaggtcaacttctctccctttttcttgcttcaattccgtgctcccccctctctttttctctccctctttcttttccttcattgaagcatcctctccaagcttcttatccaaggcaattcttggtggtgaagctccttctttcttggcttattccctagtggatggtgcctnncctctccccttcttctttgcctttcgctgcatctccat

SEQ ID NO: 170741 - DNA, 398 bp, Glycine max
  unsure (1)..(398): unsure at all n locations
tgatgcanaagctgtaaagngtgtgttcattggctatcctgaaagagttaattggtacaagntgtgcaaattggaacctggtgagtcaaagtgcattatcagtagggatgttacctttgatgagagcagaatggcaatgctaagtaaggatcaaaaggacaacaactctattaatgagagtactcacagtgaggtggagccttcagagacatcagatcatggtagtgaagatattgttgatcacactgatcaagcagtaactggtgataataaaaatttggctactcaacatgacttgtccaattatcaattggttagagatagagataanagggttataaagcctacaaagaagtatggtcatgctgacattatctgctatgcattgaatgttgctg

SEQ ID NO: 170742 - DNA, 394 bp, Glycine max
  unsure (1)..(394): unsure at all n locations
tcaacaccagaatcttnctccgaatagcgcgagaacttaatcccagctatgcatgaaccacaaccacgaaggcgatgatcacaccttaatccacgtgtcatctaaacatatcctccatgatagcaacaaccgagcagatccttaaccctaatacccctttgtggcgaacattgacagagtgtgtgacaagaacaaacacattaagtcacattcaaagcacaactctcttcctcttaatttaccatatacgacgtcgctgctctatttctccctgcctataaattctaattttcaacccaaataatatctgctgattatgtttaaaaatataaaattccatttcttatttgaaatccgcactcatacttatagtacacgtggcatcacaggtaac

SEQ ID NO: 170743 - DNA, 307 bp, Glycine max
tcgtggccagccagaggatggaggacaatgctgtgattgtgtatctgatgcgcgggattcataatcatgaaatggccaagtcattattaggacctccatatgctgcgccaattgactaaagctgaatagacacttattggtgatatgaccaaatcaatggtgaatcaaataagcattctgcatactctgaaggagcataatgccaataattgtacgagcatcaaacaaatattctatgcaagaagtgcatacccgttcttccataagaggaagtgactattgaatgccacatctatgaaacttcttg

SEQ ID NO: 170744 - DNA, 381 bp, Glycine max
  unsure (1)..(381): unsure at all n locations
cgatatgaggaagcgttgaagggagaaactttctgcttttattgttgaccacagagtggtacctgtagatatgtcgcgggggtcaagaaaccttggggacgtcatgtggggtgctattgcccaaaaccaagcttgaccaatcccgacccaacccgggcatattctgtcagtgagaacctgngatgtacctaagcatgcgagctccttgcagtcaacagataaaaggaaaacaagaccacaaagcaaggaggcttgtggtggctggccagctgtgaattttgtgtaatatgtgagatatggcctctggtaatcgattaccaagggtgggttatctattacaaggcttaataatgaagacaggaagctaagatggtctctggt

SEQ ID NO: 170745 - DNA, 310 bp, Glycine max
  unsure (1)..(310): unsure at all n locations
ttgagaaacatgngatcctttggcatcatcataacattcagcttgatcctttgnctacattttatactagttcgacaacaactcgtgactacatccagtccccaagcgacctacggtacttgagatttcttttcaatcttgtaaaatcctttacaagcaaagatccacaagggatgtacccttccttgttctctttgaacaaccaagtggatgtactctccacttgaacttatccacaagagatgtaccctctcttattctcagttacaacaacccaagtagatgtaccctctacttgtaccacaaagga

SEQ ID NO: 170746 - DNA, 332 bp, Glycine max
  unsure (1)..(332): unsure at all n locations
tatgcgcatacttcttcacgaacgttcacttgcacaatacattcttataactaagaaaaatgcacccatatacaatcaaggcaccttcgttacctagattatttacatgtacttccaaggtgtatttgttaccttcatcacacacatttcctttgctagattcacatacatgcatactctaaacactttggctnatcaaaattgcatacgtgcacatcttggtatttctaatacctatacatacacaaacttcatgatgaatcttgactatctacacaataaggtgctacatttcatgctctcccctttttttttcaagtgttttactacct

SEQ ID NO: 170747 - DNA, 365 bp, Glycine max
  unsure (1)..(365): unsure at all n locations
nntgaaatggaacttatggccgttcatcttanattgttgcaggtactcttccttcttcaaatactgttccttctttctagtatggngtactatatgatgatgtaaataggataatggtttctgaatttggcagtttttatacccattttttttgtttatgttcaacataatgctgcaattaaccaaatgcaaccgatggaaacctgataacatgaccaaataaaagtcacaaacacaacttccgaacacgctaagaatttcataaaacaaaatcagcttaaatgagacagcaaataatgaacttattaggaaaattatgaataacaacaaacacttttgacatcattcacgtagccatcatgatc

SEQ ID NO: 170748 - DNA, 392 bp, Glycine max
  unsure (1)..(392): unsure at all n locations
tagtgacctataaaactcaagctttatggacganagtgtaaaacccctatttgttggtacgatgatggagaagcagtacttcttggacctgaaatgctacaacagattaacgaacaagtgaagttgattcgagagaagataaaagcatctcaggataggcagaagagctattacgatagaaggaggaaaccactagattttcaggaaggagaacatgtngttttgaaggtttctcccgtaaccggagttggaagagctctcaaggctaggaagttgacacccaagtatctaggtccgtatcagattttgaagaagattgggcctgtagcttatcatatcgccttaccttcgagtntatcngaattgcatcctgtgtttcatgtctctcaact

SEQ ID NO: 170749 - DNA, 394 bp, Glycine max
  unsure (1)..(394): unsure at all n locations
tggttccaaacanatntgtcccaaatttgnggaagtaattatcaaggtaaatttgttccaaatttgggggagatactgggtaagaattgaaatggtcaaagtaaatagcatacatacactattcctgtatatacacatactatttatgtattgtgttaaaaaaataataactgtaagtacaaatgaaattaataagtgtgtatgttgcaaaataatgaaatgaagctgagtgcctaaataaaaggcaagtatggggtaggaatgaatgaaaaagtgaaggtttatctatggatgaaggctctcctagaacctaagcttttgaatcctagaaaaaccatgatttgttggtagcctaaccccattacaagcttaaataatacttcacattcaattt

SEQ ID NO: 170750 - DNA, 411 bp, Glycine max
ttcctaccttttacccacatgtcatagtttaattattgtgtattaaatgttcatcctcgcgaattaaatgattctttatacttgctttcataaataaatacaaaattcatatttattgtctatataatatttattttaatatattgacatattgcatatacatataaatgtgtaaaagaaaattaaaatttgttcatgtcgaataaagtcaaaaataatttatttaagtgagaagataataaaaaataatgaataattgcttagaaaacaaatttggacgctaattttgcgtggaaaaaataatagcgattgtgttgatatttgattgtttatgtaattaaatatatattaattatgtaatataaatattaactttgattgaaaaatatttagtaatatattttagccttc

SEQ ID NO: 170751 - DNA, 105 bp, Glycine max
aaatcttttgatgttaaacccaagaaaagtttgccctggcatcatcaccttataaagaaaagatttagctattgtcaccagtactataatttctttgaaacccat

SEQ ID NO: 170752 - DNA, 406 bp, Glycine max
  unsure (1)..(406): unsure at all n locations
tcaacaagtatggcctcatctgactacttgtttcccgagggaaattctataaatagacctcccatctttaatggagtgggttaccactattggaaaacccgcatgcaaatctttatagaggcaatagatttaaatatttgggaagccagaaaacaaggacctaatgttccctctatagtggccggaagtgcaacaatataaaaacctacagcatattggattgaggaagaaagaagattagtacaatataatttaaaggccaaaaatattattacatctgccctaggaataaatgaatactttannggttcaaaattgaaaaatgctaacgatatgtgggataccctacaagtaacacatgaatgcacaacaaatgctataagatctaggattaacacattaactc

SEQ ID NO: 170753 - DNA, 368 bp, Glycine max
  unsure (1)..(368): unsure at all n locations
gggctttcataatctntttgttaactagatcatgatgtgtatttctatagntaattntttttaatgtcaatgatgattanggttggacctattattccacaaaagggactttgttagtgggatacattatcttatttgtttattttatgtgttgaaggactgtctgtgtccattaaagatgctgagagaagaggtgatttgcatggagtgaaaatttgtaatgaagctcatattattacccatttgctttctgtccaaggaataacaagttgtgatagttttttcactttttttctctcctttggaattgtgtcaaggtgacgttnttgttaagggtgacaaacgagccaaggcggtatgaaaatcct

SEQ ID NO: 170754 - DNA, 385 bp, Glycine max
cgcttggagtttccaagtgccaattcggcgtcttctttagtccattcttcttctggcttcaattcatcagtgggctttccttctgtgtccagcatcttgggatgtttccagcctttgatgacagctttccagggtctgctatccagtgatttgagaaaggccaccatccttgctttccagtattcatagttggtcccatccagaattggtggtctgttcactggtccgccttctttctccatgttcatcagaatttatcttcctagatctcactcagtgatttcgagtgcctgctctgataccaattgaaattctgatactggggacagatgtcgtacaggatgtcacgacatcacgcctcagaacatgcaaattgtctttgact

SEQ ID NO: 170755 - DNA, 413 bp, Glycine max
tgtaggattatggggtacccatcacatgtggtactaggtggcggtcgggcgatggtgcacaacaagtttttccacatccacaatgcgcgcataaacccaccatcccctgttgcccacctccaactgagctcacgtactcacacgtagcccatattctcgtttctctcaacaccgggtccccatcaatccttccaagcttccacaacatccaagcaaaacaacattcacacagcacaagctatcacagtctagcaaaacagagcaaaggcagaaaactctgccaaaacaccaaccaaaaatcacagcttttgccactcaaagaccccagtaacaattccttcgatccaattcgttaaccgttggatcgactccaaaattttactggaagctatagtgcataagcctacattttg

SEQ ID NO: 170756 - DNA, 396 bp, Glycine max
tgctgatatcaactaggcattaatcttcatctaataacttaagcttctagctgggttgatttggtcctctgatggtttttgtgtatattgactgactgccctaagatgttgaacatggttagtatatatacatttccatttgatatgaccctacctcacttaaattaaagggattaccattcaatcttctcactaactattaaaccttaactttgtaattaacatagagaaatatgataatattaactgctacgcatgttgcgttcttcatacctaactaaccgtgtgacctaagacttagtagtatccaaacgaaaacataatgttaatgtaaatattattttatgcctacacattattaaacaacatatgtttcaatttctatataagagacac

SEQ ID NO: 170757 - DNA, 440 bp, Glycine max
cttataaaggctgggatcatgcttaataaataggcttgtgatgggtaataggcctgagtttgggctatagaaatataaaacgggttaagccaggcttatgtaaggtctgaccagcccaatccatttccaccccttaacgaagggaactataagattccaatccctaggcattttgaaatcatcataatcaataaatatgtccttgattggataataggcactttgaaatgtgtaaacttcatttctagctgccttgcaaagtctaatgtcaatattattcacagccaataaagaaatttgagtaatagcctccacatcccattgagaaaatatccaccaaatgaaatcttaattcctggtccctgtctccgaatcaataatattcacaactttcaacgttctaaaactttagtagtaagagtaatgatataagtgtgttt

SEQ ID NO: 170758 - DNA, 429 bp, Glycine max
  unsure (1)..(429): unsure at all n locations
gacactataaaactaagcttgtttacttgctctcaaggttngaagatgttgaagactgataatagcacttgaatcatcaaatccaccagtgatgaattctcccttcagattaaggtcaatgacatgtccttcatggtcacaagttacaccatttcaattatagcaatcaatattcctttgattccacatcttcaagttgttggaatttttttcacgcttgaatgtgaagttgttctttagttgaagcaacaccaattgttgattctcgagacatttgccagtggtgacagaaaaatggatactaagatatatccagtggtagcagagaaagaaagaaagcaatgaaacgaatgtagttctcattggtaactacacaacacaacgctgaanaagagaagaaacanatgatgtctaataaagtttaaaata

SEQ ID NO: 170759 - DNA, 333 bp, Glycine max
  unsure (1)..(333): unsure at all n locations
tactcagcttatgatgatgaatcacgattgattcaggagctctgatgattacctttatgatgacanaaagccccagagaatgagttcaagattgagttcagaacacttcaagaatccagagaaatttaatttcaagattcaggattcaagcttcaagaatcaagaatcgagaataatccagatcctgattcaagactcaagattccggaattccggataaggacaaaaaagtgtttcacaacattgaggagcacatgaagttttcacacaagcttttaccaaagagtttctactctctggtaatcaattaccaggttactgggatcgattacc

SEQ ID NO: 170760 - DNA, 381 bp, Glycine max
  unsure (1)..(381): unsure at all n locations
gcacggcggaaacgcggtggcactgcattnttattganggtgaanaaatgggcggngcgccgccgtgaatgttagctccggcgagctcggagcccgagaaaaacagttagaggaaacgtgagactgctacggtgattccgatatgtcgccgacagttattgattgattgcggcaaaaaataaatgctttgtgttttttttcttttcaatttgattgtatgagaccgttaatggcttttgggttttttatagtgcaacgcagccgggtccattcaacggaataactgtcatgaccttattgtccatttgtttggcgtctatctacgaaaaatgccactgtattgggtcccaccggcggttgaactgttaactccgcatgtgc

SEQ ID NO: 170761 - DNA, 469 bp, Glycine max
tatatatgcatttatgcttgctgaagtgggaaaggtgtcagactcattcttgtaagttcatttaaactttgatattatttgattgtaagtactgccaagcactactgaaatccttgaaaactggtcgtgctggaaaaccatgaattgtggaagcaattatcaatatctcttgaggagaagattaaaatttaccaacaggtacttccatgtcccttattaaatattcattattttggtagtcttgatacttatcatgtttttatttattcagtgttcatggaggatatgctgcaaatttaactcctacaaaattagttggcaaattgctcaacttatttgatagcactgcacatagagtcgttggtggtttacgaccgcctgccccttgatcatcccagggaactattcatggaagtgaacatgtatactcaaatatggcacccagagtatcttctagccaatcaacaat

SEQ ID NO: 170762 - DNA, 407 bp, Glycine max
  unsure (1)..(407): unsure at all n locations
tctaacttgtaacttacatttataaatgtctatagcttataagttaattctaccaaacatgtctttgattttgtcttaattatttactccaaacaacaacttttttcacctttaaaataatgcaggaagggtaaaagttcggcctgtaagctatgattgacattatgtaatgtacatgatctctgatattcaattatgtatcatgtgtgcctccaaatttcttgacacaaaagtgcattntgcataaagtatcagtgcatttcttttacttaaccctctcctttctccaatttatataatatatttctttaattcacaatatgtcttaaacctgtgcggatcacatttttttttgcaaaatatatacattgcacgtcatcactattgttggtttaatacttataaca

SEQ ID NO: 170763 - DNA, 390 bp, Glycine max
tatcaaggaagctatctagtgctataagagaagcatgtattacacttggtggaactttgatgaatgaaagtcttatgagatacacttcaaaggtccacttctctccttcttttattccttcaatttcgttctacccctttctctctttcttttcctccattaaagcatcctcttcaagcttcttatccatggaaatttttggtggtgaagctccttcttccttggcttattccctagtggatggtgcctcccctctcctcttctccttttccttccgctgtatctcaatggtggaaaatcaccattaaaggaccccattgaagctcaaagatccaaccttcatagaagccctacaatcaagcttccatcaagtggtatcagagcacaaga

SEQ ID NO: 170764 - DNA, 443 bp, Glycine max
tcttttggaccttgaacaagcaactaactcctctttcataaccatgctatgtactcgcgactagtccctctcttcccttcacagcttgagttcactattgctaccccatagagctctgcgaaatttattccggccatactcttccttgcgagccctcttggtctcttgttcaagggctcttgcggtaattgcattctcttcccgtaacccggcacactccttccgaatgtgtgtagcggccaacttgaacttctccttggcaagtttcgcctttcctaactcgcttttgagagcttggacttcttcgtcctctttcggtgcttcataactctcttcgctgacgacgtttaactttggcgagccaatctaaaccttcgatatgaactttcagccattcgtgtacccaccaatgatgcattacgaatgccctaagctcttgactt

SEQ ID NO: 170765 - DNA, 361 bp, Glycine max
  unsure (1)..(361): unsure at all n locations
tggactcatgagtggtaagttgaggtctaagtggattgatccttttgttgttactaatgtttttccttatggtacagttgagatcaaaagtgactccacaaacaagagcttcaaggtcaatggacaccgacttaagccattcctcacaaacccttctttagtggacgtagtggtggaagagacttccttactccacactactcttcctccaccatgacttaaggagtttttcttttcctatctccttctttacttttattacatttgtccgattctaattgatggtttaattgcttttaatcttttaattgtgctacattgaggacaatgtgttgtttaagtatggngagggagtgttctt

SEQ ID NO: 170766 - DNA, 371 bp, Glycine max
tatccttatggcttgcctccggacttcactccccgtgccaccccggaagatttaagccaagcccctactttcgaggggcaactcccaccttatgacgattatcccgggcaagacaatgaggaaggagatacccatctcggtcccctgctccacctcaaagatccgtccccgcatgaactaccccaaccaaacatagtccgccatatcccggcttcacccacacccgtaaaagaatctgttcccttcgtggaagataagggaaagattgaggcgcttcaagagaggctgagagcagtcgagggcctcggcaattacccattctcaaatctagtggacttatgtctagtacccaatatcgtcattccttccaa

SEQ ID NO: 170767 - DNA, 348 bp, Glycine max
ctgatggtgttgagaagaaatcacatgtttgtcatcttctataagggggagaatgtgaatgtatgtatacatgatctcgatgatgtcccaagacgaaatataccaagctcattttgcttcagattaatacaccactgtgtcaacaaacaaagccttgatttaagatttcttcaagatcaagccttgcctcacactgaatggcttcaagtcattctaggcacatgtaatcgattaccaatacatgttatcgattaccaatggtttgaaagcgtgtaatcgattactcatcatatgtaatctattaccagagactctgaacgttgcggaattaaattctcaatgaatggt

SEQ ID NO: 170768 - DNA, 375 bp, Glycine max
gattggatgaaataaaaactggataaaataatatcagattggatgaaataaaatccagaggaaataaaatctggataagataaagatttgataaaataaaattgtttgctctcttcaagtctaagcccaattctggattcaagcccaattgcttataattctcctgaaattaaattaaaaacacaaaattagtcaagtaggcccaaatgataaaactgtataattaatttgacaattaaggctaatcagtaattaaaatggtgacaaaagggctaagaaataagagaaaataatgacacatcaaatccccctacacttatccttttgcactcctgagcaaaatcaaaaagcaaagcaagttacaaatccagagac

SEQ ID NO: 170769 - DNA, 359 bp, Glycine max
  unsure (1)..(359): unsure at all n locations
acccagtgctctgttggacttctctgggtccactgngtgtctgggaggcgtgatccttgcccattgatcgatgatatctgagatcaattgggccatatgaacactcacctgagtcaagatggcatagaccaactggcacttcggcaggggaaggtcagaattatgatcgctggggaggatgttgctgagcagcaatgtcatccagatctgtgtcaaggtggtcatgctggtgcacatgatcctcacccgtctncctggcactctctgtgcgaagtcctatcctggaacgcatagcagctggcctatgtgcctctcatcanatcccgaggccttggctctcctgtgactaaactcgcatc

SEQ ID NO: 170770 - DNA, 348 bp, Glycine max
aaggcgctgctacaatatgagctggaggaggagctgctgatgttaaaagagcctcaactggccttgcccttggtcttctagcccccctgataataattgttggatcattaggttccacaatcctccttatgacgccaaattaatgaccgggctcagacgttcaaagacaaaactgtcagaggcaactcctctggtcctgcataaaactgtgataagagcaggaaacctgagtcttgaggagttagactgggccatagaagtgatctgcctagcaatgagggctttgacattcatgtccagctgagtaactaggacaaagattaacctatctcgatccatattcatatc

SEQ ID NO: 170771 - DNA, 283 bp, Glycine max
tttggtcaacaggtttatgaatgatcctagagaccacacttgattgcaggtcaaggaatcatgacgcctatgagatgaacactcagatatggccttttgtgttctcatcacactaatggagatgatagcctacaccttgtagcctactctgattgtgactggtgaggtgatctaatggacataaagagcaccatgggacaagttttcctgctgtcagggtctcgcatattctggagttctaagaagccgacaataatagcattgtacacttgtgaagccgaat

SEQ ID NO: 170772 - DNA, 315 bp, Glycine max
  unsure (1)..(315): unsure at all n locations
actatttttctttggaaaaataaatccctattgctggctttttctgattcctaggattgcaaataaactaggcatatccaactatgacttaagaaacatgagtgaataaataacaagcagaaatttaaaaggtgctaagctacctcctactagcgtgtctttaacgtcttgagccgggcgtgggatgataatcttttgatcacgggcctagtgcctactcgtacctttgctttggtgtggtatcgaccaaatctttgcttatcctccgactcacaagatgacacanatgcatatgcatgcatgctcatgattccg

SEQ ID NO: 170773 - DNA, 400 bp, Glycine max
ttcttctgctctctgaaaactggttcccaaacgacaacagggtgtgaagatttctgaaaaccctagcattgcaactagtcctagggaagtagacccggagatggataagaagatccgcagtattgtgagtagcattctgaaatacgcctctgttcctgatgctggtgaagatgttccaacattctccaccccgaatgtttctgtgcctgatgttgataaagatgttccaacatcttccaccccaaatgctgaagtcctcccttcacccagtgaagaggaatcaacagaggaagatgatcaagcgacaaaggagacccctgcaccaagggcaccagaactgctccagtgacctcattgactggaagaatagaattcgatgagaaccattgccacagtggca

SEQ ID NO: 170774 - DNA, 382 bp, Glycine max
tgttgaccttgatgacctactttagccgacctctgacactctaatacaggaatgtgacgaaacggtttgcactattatctatgcaacacatatatttgatggccttgagattggcaccaacattgtcccctatgctccattcctagcactttttatgtcaatgtgctaccatagtccttcatcattcataatgcctttttatccaggctattgtagcccatgggaagctgcaactaacaatgcctatggactaagtcaaaaattaacaaatcgtccctaatggtcagggctatacattatgttgagatctatacaaatttgatccattagttataccccacttactgcatcacacgggaaagaaattaacaaattattctat

SEQ ID NO: 170775 - DNA, 307 bp, Glycine max
ctttcctcctctagttgtttcatggagacaatcaacaccatcctcggtatagctcggctcgtcttcctcactcgccgagtatttacttctgtctccttcactaaagccagccaatgaaagggtttggtcacagttctgcatggttcccattgtaagtggaaaaccatcatgaacggcggaatgtacagaagacccttgccgcggatgagtttgatgttgatgcatggaatggggatgttgtgcttgatgctgaacccgaattgattccggcaaatcaaagccaccaaaagaaagcccaccttgaatt

SEQ ID NO: 170776 - DNA, 457 bp, Glycine max
acattaaggaacattttatccacaagatattaatatctaatgacatgaattgttgaaatggatgtttcttaactcgattttcaaacaacttttcttgatatcataaaacagctatagaggaagattgccttagacatgggatccacaatcccataattacaacaatggaggaacaatttgcatgacatttataaaccttctaagtcccgtaacattgatttgcatagtcacattgaaaatgttgcgatgaccattgttttgagctaataaatcccctgaaaagtactaaatgatgaacatattagcacaaggtcaagtgatcagaagaaaaaccatactacttataacccaaaggcactagacatttaagacagagaacacttaaacttgtaaagatccatttgtaacttctaccagatagtacacacacactataggactattgttatctgatcaa

SEQ ID NO: 170777 - DNA, 356 bp, Glycine max
gagtcaaaaaagtcgaccttagcactcttctctttgaatcgctgagaaaattagtcccttaaaaaatacacgccgaggcgcttccggatcattctgtcagaaataacgctgagattcttgaccgttcttcaacgttcatcattcgctcttcgttatctccagtcttcaacgggagagtacctcaaaccgagctttacaattcattctatgtacccgaggcggtccacattttgtttcatggattattattctcggttcatctacttgtatacccccttttgactgcctaagccattttttaaatcatatccgcttaatctaaattaaataaattcaccgatcgtcgaatagatcat

SEQ ID NO: 170778 - DNA, 295 bp, Glycine max
cccctcgtacactaagctcacttgctcgataagcttcattgcgaagttcccctagatgctagagcctagctacactcaccccgatttatagctgagctcacccctgccacgagacacgaatagtcgggaaagggcttactacaaagactactcggaatgcggagctataaccctatactactacaatggccaaaatacaatgccgcaacgaacgaaagacctattctaatatttacaaagataagcgggctcatacttagtccatgggcttgacatataccctaacgcgtatgag

SEQ ID NO: 170779 - DNA, 410 bp, Glycine max
  unsure (1)..(410): unsure at all n locations
ccttacacacatacatacttaagatattttccgctaactaagaaatacacatacgtgtagtcaagtacattatttttttgctacccaatttaatatacaaattaacaaggtattttgctaattatctcagcaaggcattttgctaataacattaataaggtatctttgctacctaaattaattgaattaacaaggtattcttgctacctaaattaattaaattaataaggtatttttgctacctaaattaattaaattaacaaatgcatttttgctacctaaattaattaaattaacaaggtattnttgctaccttagttaattaaattaacgaggtattnttgctacctaaattaattaaattaagaaagattttcgctacctaagttaagtgaggtatttcgctacct

SEQ ID NO: 170780 - DNA, 456 bp, Glycine max
  unsure (1)..(456): unsure at all n locations
tgccgcccagctggaccaggcgagcaaggttgcttcctctanaagttacagccttctggaggaatcttctggagggcccaggtgggcttggttgctatttacacccccctttttactaaatgcacccccccttttctatttttttttgtaattctttttccgtaacgttacgaaactttatgaatntcgtaacgatacttattttccttccgcaaggttacgaatccttacagattatgtatttactcttttttggctttcaaagaagttacggaaactcacggattgcgcaaaaatacctcttttctatttccgccacattacggaatttcacggattacgcaagcctgcttccttttggatttctgagacgtctcgggacttcatttattgcatgtcatcaagtaataatccccggacaaaattatggtatgacaacacacaccaattattata

SEQ ID NO: 170781 - DNA, 360 bp, Glycine max
gacatgaaagggatgagaccctaagttttgaatgcttgaatgccatccaaactttcagcagaaaagaaatccctatctatgaacttagggccgatagtggaacgagatgagaaaaggtttgagtaccgtatctgatgttcttcggaagaaaatagtgtggaataggataatgagggtggaattggtgttgtggatgcgctggtggctccggaacgatgagctcttgaagccgaagcggaggtggatgaacccttacatttctttgatgattctgccatatgatggagtttctgcagattgcaatcggtgaaatcaaacgaaaaatgaaaacagaagaagattgcaagttacgagagtcaa

SEQ ID NO: 170782 - DNA, 374 bp, Glycine max
  unsure (1)..(374): unsure at all n locations
ngccatatcttattaatcgaacaccgcacaaaaaaaattctatgaaatcacccagatctaaaagattcaacccaagagaaatagcacggctggattatagaacttgcgttggtgcttttagtatgttaatgtacattgttgaattattgctagaaatacttagagcttgatttctagtttcctagatttggatcttgccttctggatttagagtcaattagagatttaaatactttcagaattagctgaaattgtattgaaaacatgtttatgttgagaaagaaaataatgagacatgggttgaattccatgtgtctaaatgacacagcatagcacatatttttgtagagtgaaaaatacaagggtaattacca

SEQ ID NO: 170783 - DNA, 399 bp, Glycine max
  unsure (1)..(399): unsure at all n locations
ggggcagaatcactctcattaattcagttttatcaacaaagtgtaccataattctatttaatggatatccacgtagggagtgtttgtagcctatagggtgtctatacagggtatgtctatacaggatatgaagcataaggtggaccttgtgtgtattcaagaaacaaaaaaggagtctnttgataagctcatctgccaatctatgtggggagattcctatgtttcttggaaatttgttccttcaattcaggcatcaggtggattgttgtgcttgtggaataactcataatttcaggtggagaggagggttaagggtataaattttctaatgctggaagggaagtgggtaaaagagaatcagcggattcgaatngttaatgtctatgcaccttgtgactt

SEQ ID NO: 170784 - DNA, 450 bp, Glycine max
tgaagtgagatagcgtggaagagtcagtcttcctacttttatttgttgaccatagagtggtacctggagatatgtcgtgggggttaggagaccttggggacgtcaggtggagtgctatttcccaaaaccaagcttgatcaatcccgacccaacccgggcatagtcagtcagcgagaacctgtgatgtacctaaataggtgagctcctggcagtcaaccaataaaagaacaaagaccataaagcaaggaggcttgtgtggtggctggccagctatggatcttgagtggtatctggaatttggcctctggtaatcgattaccaagggggtgtaatcgattacaaggcttaaaaatgaagacaagaagttaagatggcctctggtaatcaattaccaaaggtgtgtaatcgatttcaggcttaaaatggagacaggaagttagatggctctgg

SEQ ID NO: 170785 - DNA, 407 bp, Glycine max
  unsure (1)..(407): unsure at all n locations
tctcttctctctcccctatttntcgtctttgagtttttctttgagatattttttccgtttgcaattccagtagcataaaatttcgttcttcaatttataagtttggtatctattgattaatggaaggctaagtccccagtgttgctttctcttgaggatcaagcgaagttctccttgaggttctattattactcttaaattctgtttagtttttcctcttcactaattactctaaatttgttgctattaattcatgcatgcttagtgcttgattaattgtctctgcgcttaatttacgttcatgcttaatgatcgtttatgagtaattggtgtacgtgttgcttaatcacataatgaatgccttatgttaaatctcgcttagtaatttaatttagggttggattaag

SEQ ID NO: 170786 - DNA, 433 bp, Glycine max
  unsure (1)..(433): unsure at all n locations
ttatgttgctcattgactccagattgctgcanagaatgtcatagatctgtatggtgatctatagaagaacatagaccatagactcttgcaacaggtgtagacttctgattcatggcaagttgagttactaggttgaccaaggcatcgagttttccttcaagctttttattttcagtagatgaagatgaattcatggccacctcatggactcctctaagaacaatagcatcatttcttgcactaaattgttaggagttgaaagccatcttctcaatcaaattcctagcttcatcagggctcatatcaccaagagctccaccactggcagcatcaatcatactcctctccatgttgctaagtccctcatagaaatattgaagaaggagttgctcagaaatctggtggtgagggcagcttgcacacaatttcttga

SEQ ID NO: 170787 - DNA, 352 bp, Glycine max
gactaatcttgaaggaaagattactcgccatctaaatggtagtgggaaagtcaattgttggtcttattgacgaattcaacaagttgattcttgacattgaagatcaagcaatcatctttcttagctctttgtctgactcctatgagcattttgtagacataattatgtttggaacaaagtcattgacaatggatgaagtccaaacaaccttggtctctaaggagctgaccatgaaggttgatccaaaagaaacaaatgttgaaagtcttttatcacgaggacatacagaaaagaagaattcccaaaagaagggcaaatcaagatccatgtcacaacaaaagcaatagaacaa

SEQ ID NO: 170788 - DNA, 340 bp, Glycine max
  unsure (1)..(340): unsure at all n locations
tctcacttgacctgtttaagccagcctgtggatttttggcctgaggttcccccatggtatgcgcaggtcgcgctanggttatacacatttggaaacggtgactggaagatctttcccggaaccaccacgaccaatcggttggcaatgagagatggcaagagttccccatacgtcactgggatcggggcaaaaatttgtgcctgccttggcgaaaagttccttgccatgttggcgccaaagtgagcattgttggctgggtgaggccgagtctgagccggagcctgaagagcccccccccccccctatgggggtgtgggcacccttggtatggtgagcgctg

SEQ ID NO: 170789 - DNA, 330 bp, Glycine max
cctcgaagaaattagatttatctgtgtatttctacaaataaagaactggaaatctctttctctctcttttcttgcattatcactctcttgaggctctattcggatccttcatgatccaaacgacttaaatctcatagttgccaagcgattgaagtaaaaatcaaatatgttatctctactttttgaacaattcttgataactgctaaatatgaactatcttttataataaaaatatattgaatatatctttaaaaatattgatttagtacttatttttggcttaaatgttaggaattgatatttttcttatttatgacttgcagatatga

SEQ ID NO: 170790 - DNA, 319 bp, Glycine max
gaagttcataaggtctacacacatacgtttcttccacatggggacaccggccgcaaccctcacccttggcgggcttgaaagactgccacttttgacatgtcaaatgcatctatcgaccatatcaataactgtctgcctaacaagcaccatagccttcaagaggactcgaaggtcaagtaggtaccagaacactcccacagacttctaaaaaagattacagtcccacttgccagctctatctccaaaacatttggaggttcgggaaaatccctgtacgtaagccacactgaacggaggagataatggaacagaccacctt

SEQ ID NO: 170791 - DNA, 381 bp, Glycine max
  unsure (1)..(381): unsure at all n locations
ccccctctgcttctccttccgctgccattcatctcccaagaagcaaaggaatccattgatgaggaagactctaggcctacaagctccaatggagcttacatcatgtggtatcagaagcatcttcatctaggagatggtcttttgcttcctctatctttttgctcggagaatactctttaattccttgttcttcatcttattctccatgtatatcctccattgtcttgtggtttggtgctgcttaaagtagattaaaaaaaataaaccgattaaatcttagatctacactggttcttgcatttctatggttcaaattttgtagatctattctcgactcttgttctcgtgtagattntanggtctaccatttttcattcataa

SEQ ID NO: 170792 - DNA, 372 bp, Glycine max
gtgagtttgatatactcgagtcaatgctgtgttctatgttgcatgcttcatatgtgagagtacttttgaccatttatgcttcaatagattgaaacaaaaaataacaaagatgtggtacttgtaacgagagaataaaatcgtgcaacacacttagtggttgagattcaacgaaaatggtgagtcctatatgcatatatactacctgttgaataaaaggggggcaattttatttttgagtttaataaatagagaaggtttttgaattaattttcaaaatggggtaagttgtaatgattcttactattgtaaaataaaaagcttgacaattttttgcgacttctatctatctttttttttattttcaatgaagtc

SEQ ID NO: 170793 - DNA, 355 bp, Glycine max
gcactataaaggggagttttttttgatcccattttagctagggaaaacattcacgtcttttttaaaagtatgtcttctaatcttttgaaaaagcccattaattgatataattcttttgaacgtaccttttattaaaaaacactttttctttaaaaaactcctacagacagataatttattaacatggcaaggaatattatttattgcttccatgttgctgagccacaatacaaggtcaaaagtaaccatgagtaatatctaaggctcaccaatcaacttggcatgagcaaccaaaaacattaggagaattagaaattcaagagatgccgtttattcatgttattccaaaagcagg

SEQ ID NO: 170794 - DNA, 420 bp, Glycine max
  unsure (1)..(420): unsure at all n locations
ggaccttgaaactaagctgaggattatgaaaaaatgttcttgctctgaattttaagatctctgccttggaggaactctancacctaagtttgtgaaacttatcaacataaagtctatgtaagtaattgcttgttacttggtggaattgactttgtagctcctttactccgtgacttatatattggcattcattcttataattagagggtgaatatgctacaatattttgaggaaaactctttctctgggaccatccctgaaggatttgtacagttaaaagaactggtggtcttggatttgggatacaacaacttcagtggacatctacttgttgatctagggagtaatatctcactagcaatcatgtatgatgatgatgatactcttaagaaagtccagcttcactctctttttttttta

SEQ ID NO: 170795 - DNA, 401 bp, Glycine max
tactgggaattattgtttggtttggtatatgataaattttcacatggcaaaatggggtgacatgaatggaggctgcatgtcttcttttctgtctactcttatggcggggtccttagggataatatttctaaagcatgagttaatgggctttacaaaaggatttttattttatcagcaaaagtaatttgtattataataataagattagtacaagtggtactgttatatttacactgttgccatactatgtgtagacctatggagtcctaatacaagctgtattccaagaattaagcatccataggtcttggattatctagacacccctccagaagaagtaacctatagagcaattcctccgagtacaaaacccgacccttatattgctagcccatgaatga

SEQ ID NO: 170796 - DNA, 332 bp, Glycine max
  unsure (1)..(332): unsure at all n locations
tgtaacgcattctataatattatgtctctgcttcgactgagaanagggtcggaaccggaaaagggtccgagcccgagttctgagccaaaggttttaagcgaagacgagacacaagatgataagaataataagaagaataagaagaagagagatgaggtgggggagaagaagaagaacaaatggtcatgcttcgatagctgttgttggtgggtggggtgcatttgcacattgtggtggtttcttctgtttctgtatcagatgatgccttcttcgattcctcagtatgtgaccgaggccttcactgngcccatgccggacccaccgggcctcaa

SEQ ID NO: 170797 - DNA, 314 bp, Glycine max
gcttctacattcaatttcaagcacttcgatttgttacgggactcattcagacatccgagaaaaaagttattgtcgtttgaattatctcagacgttcacattcaattcgatcgtttcgatttgttacgggactcaatcatacatccgagtataaagtaatgttattgaattggcaaagaggtcaacattctattccagcgtctctaatgtacggggctaattagacatccgagtaaaattgattgtcgttgaatttcgtataattcaaatttattttagcgtcttattgtacggacttatcatactcattaaaag

SEQ ID NO: 170798 - DNA, 418 bp, Glycine max
acactataaaactaagctttagccaattatacaacaataacttgttactcggatgtcttattgagtcccgtaatatatcgagacgctcgaaattgaatgttgaacctctgagcaaactcaaacgacaataatcttttactcggatgtctgattgagtcccgtaatatatcgagactctcgaaattgaatgttgaatctctgagccaattcaaacgacaataaatttttaatcggatgtttgattgagtcccgtaatatatcgagacgctcgaaattgaatgtggaatctctgagccaattcaacgaccatatctttttactcggatgtttgattgagctccgcaatatatcgagacgctcgaaattgaatgttgaaggcctaagctaattcaaacgacaataacttttttctcggatg

SEQ ID NO: 170799 - DNA, 316 bp, Glycine max
aacatattgtcgtaacgtgcctatcgcgggcgatcataggcgaggcttacgggtgctcttttcttatgaggaaagatgctcggagatgtcaccaacgtctatttgtggaaaacgtttaaatatccgaacgagaccggccataataaaaattctaagttcgggagttgtatttacgcttgaggaaggtattaccactctcttacgtgtgtctcgaaagacaacagcctacttcttagaattgcggaaattgtgttaccttaactctcatttcttgttattctttgaggtcgacaaatgcggtgcttctgcttctacg

SEQ ID NO: 170800 - DNA, 281 bp, Glycine max
tgttgttaaatgagttccacatacgtggaaaagctatatgcgttctcggcttcagcttttgtgtcataaggaaaatccagtaaatcgaaatgacctgaactatggtagaaaataacgatgccatgcatagatttctttaacatggcccccatattctatatccacagatcaaacaacatatgcatgtgaatgctaaaggaaagggtatttcttatgttccatagagcatgtgtacatacaaaatctttttatgctcaaaaagggtagaggattcatatttg

SEQ ID NO: 170801 - DNA, 281 bp, Glycine max
tatattatactatattataacagcaaggccgtcagggcttatatattctgggaataaaaaatgaagtagaaaaacaaggttaaacttatatgtgaaactcgttagggaatccatccccccaaaaaaacttaaactttaatccctataagggtgcatattggaactaaaacataacaacagggaccaatgtttactaataaaggtgtatggggattaatatataagcttcttcatacatgaactaattcctaaatgagtgtaacctatatggaccaaatggt

SEQ ID NO: 170802 - DNA, 245 bp, Glycine max
ggcacaaacatagccgctacgcccataaaaacagtgcccggaccgaatatctaaattccacaccataataagggtggatcataaacaaaacaacgttaggcgccgcccatcctgcggactacgacacgaggacgaaattgacaagccccggttcctaaatgtcaaaacaattagactgtgtgaaccacgcaagcttccttcagcagctaccatactaacttatcatgcgtcggactaactattat

SEQ ID NO: 170803 - DNA, 411 bp, Glycine max
  unsure (1)..(411): unsure at all n locations
ctgtgaataacttatagttcaaattgacacaatggtgccattcttagtntgagttggattccgagaatcatatgaaagttggtatcaaaactttatggcagaagacggtaattttaacttcttttccccacaagaatcaagacatgaagacatggagagaagaaagcattaacctaagaatccagtacaagtgcatcaatatttctgtttcctccagggcctttggtataccatgatgaaacatagtctccataaacaacatcacggtatttagccggcgatgagtcgtttatcagttcagaagcaggggagatcttggctgtcttagcagggtcatgaaatgttcgcacagagagccttgctctatcaggattagtattgccctatgtcacagctcctgtctttcattgg

SEQ ID NO: 170804 - DNA, 419 bp, Glycine max
cagcatgcagcttataattaggactcgcccacgtatgtttattcatcctcaggaatgaccgccgcaataataaaatgcggttcaaactgcctcccgctccatttccaaatttaagggggcatatatggatctctatggaagccttttcctcaaactgcaaatgcgtgtccacatgaatatttccaaatcacctttgatagtcaatatcttccccagaatatttatccttttctacctttatatgttgaaacacggacagatgtgaattatcttttttcacaacatattagtctcttcctccacggacatgttacatgctctgtatgtgctatactgctgaaccaaaactacttcctttattctccataaaatcggctaattccttactctctcacagacgtgacgtattcaattattct

SEQ ID NO: 170805 - DNA, 387 bp, Glycine max
  unsure (1)..(387): unsure at all n locations
tgcttgtggggcttctatggaggctggatctttgagctttaatgatgtcctttaatggtgattttccaccatggagatgcagcggaagacaaaggagaagaagtgagaggaggcgccatccactatggaataagccatggaagaaggagcttcaccaccaagatgagccttggataaaaagctcggaaaggatgcttcaatggaggaaaagaacgagggagagaaagagagaggggggagcacgaaattgaaggaataaaagagggagagaagtggaactttgaagtatgtctcacaagactctcattcatcaaagttacaacaagtattacacatgcttctatttatagactangtagcttccctgagaagctctcttgagaaaac

SEQ ID NO: 170806 - DNA, 423 bp, Glycine max
  unsure (1)..(423): unsure at all n locations
agcttgaaaggaaacactattgctctttttaacaatggatccatttggaaaaataaaacctaatgtggagttcacaactgtctgacttcttgtctctcccaagaatgccatagttttttgtaagagttgggttacgactggaacttatggttttttatagtgttaggttgtgtcatatatatagatgagttttaatatcagtgctgcattttttaaagattaaaaatatgcatgcacatgctttctgtatgtgttgtcaactacaccaatgacgtgacatactttagcttgcatcanatctgcatgtgtagtcatgttgtgcaaggtgctttcacgcgctctatgttaatgcagacaacaatttatcatacacgttttttcacaatgtgtngtccactcagacaatgatatatcatacatgct

SEQ ID NO: 170807 - DNA, 455 bp, Glycine max
  unsure (1)..(455): unsure at all n locations
gggttcgaggtacttacccgttgaagatcgaagaacgatgaagaacgaatgaagaacgtcgaagaacggttgaaacctttgcgagattcctcacggaaaacgttacggaaacgtttcggaagcgcctcggcttagattttcttcacggaaacaatttttccaagcaaattcgaaagagagagaagtgcctaaggggctgaaccccttccttcttgccttcctcccctatttatagcaaaataagggaggtggttgccgcccagctcgcccaggcgagctcagctcgcccaggcgagcagggttgcttcctccagaagcaaccgccttctggaggaatattccatagggcccaagtgggcctgggtgctattngcacccccatatttactaagtacacccccctctgctgtttntggtgattcttttttcgtaaagttacggacacttacgaattt

SEQ ID NO: 170808 - DNA, 415 bp, Glycine max
  unsure (1)..(415): unsure at all n locations
aactcatttccttgcagccagaactgagggtcattgagctaaacgccactcatggcagctaagctcaattctttgtggcctagactgggtttatcaagctaagtgccactcatgccagccaagcccaaatccttgcaacaatgtcagcgctaagcaatcccttttccgttgagcgcatgctcctctatactcaagatgcatcattttagctaagcgaagtcatcttttgaggatgaacactcatcctcttactgaaaatacatgtggctaagcgaggctgattcgctaagcccaggtaacttagtcaaatnttttgttataagccgtgcgctatgccaagcgtacctgagctaagcgcatttcttttncgcaaccgttgggctaagcgagccttgctcgctaaattgccatactt

SEQ ID NO: 170809 - DNA, 367 bp, Glycine max
  unsure (1)..(367): unsure at all n locations
nttaatgtcaatacaatgaagcatgacttacgcctatgtatctaagtttcggatttgaatgtgaaaaggcatgaatattatgacatgtttgagaggtcgttattaaaatttaaatatggctgccccatgaggaatactttgcacctatgtcgcatggaaaataccttgcaactgtctgtatatatgtgaatatatatatagcatggaaatgcctcgcataatgtctaatataatgccttgcgacatatgaatacatatttcatgaaaatgccttgcctaatatgaatatatatagcatgaagtgccttacaaagtgtcggatgggtagcgtcaaagtgttgttgaaatatagtatctgtaggaggtc

SEQ ID NO: 170810 - DNA, 337 bp, Glycine max
  unsure (1)..(337): unsure at all n locations
tcatgactgtntgaagcatatnttagctgttttttggttcatctttgtggttggtttttcctttgtattagccacaaaggacttgttttgtagttattttttatcatggcactacttttgctgctatcttaatatatgatgttccttttgcttattaaaaaaaagttggagtatgtatctcacaagctacataaatgtcacaaaaaaaaaattaattaaaataattattgttcataaattttaatttgaccaaataaattacaaaacttacaattaaaacacaaaattaggaaatagtcagatcaaatatatcataacagagggaacaaattacaaa

SEQ ID NO: 170811 - DNA, 285 bp, Glycine max
tcatttacaacctggcttcttggttgtgcctcaagcaaaaggacctaattatgtctatgaagatagccgggcccagaccacccggaaatgaccttggtggggatcttttctccttgattgaagacctgacaaaattgtgggtaaaagggggtgatgtgtatgatgggaatgctcatgagttcttcaggttgggagctatgattttctgcacaaattatgactttccagcatatgggaatttgagtggatatagtgtgaaagccaccttgcttgtcccatttgtga

SEQ ID NO: 170812 - DNA, 465 bp, Glycine max
acaatgacattgactgggctagagatgaagatgatcagaaaagtactagtggatatatgtttttcatgggaaatacaaccttcacttggatgtcaaaaaagtagtcgatatatagtcattcttttgacttgtaagccaaaatacgtagcagttgcttcatgcatttgtcatgcaatatggctcaagaatttgttaaaagagttgggcatgtcacaagaagagttgaccaagatctttgtcgataattaataagtcagtcattgctctagcaaagaatccaatgttccatgatcgaagcaaacatattgatacccgttaccactacataaaggagagcacaacaagaaaggatgtacatgcacgatatgtgaagtctcaagaccaagtagttgacatcttcaccaagccgctcaagcaagaagactttatcaagttaaaaagcttacttggaatgataaatcaagt

SEQ ID NO: 170813 - DNA, 384 bp, Glycine max
  unsure (1)..(384): unsure at all n locations
cgggttgacccatttaaaatccaatgatgaagcttgcagggtagaccagccggataattctaggccaaaaaataaataaacattttttttaatggttgaatcccacctaaaagcctacacantaaaagattgggtcggggaattaaatattaatttgaaaaaaatattttttttataaaaagtaattttaaaaaagtgaaaaatgtttatttaatataaaatctatcaaattaaaatatataaaccttttaaatataataaattaacattaataacctaaataaatatcaaatcttaaatacagaatacaatactacatattgacttagacaataaaatatatggccgcaagcttgcagataaacccgtgagtcatgagttaat

SEQ ID NO: 170814 - DNA, 349 bp, Glycine max
  unsure (1)..(349): unsure at all n locations
caatagtaataataaaacctcaaagagtgttgtgcttgatcctcaagaganaacaacgctggagacttagtcttccattaatcagtagaaaatgaaattgcagattgaagcataaaacgaaatttcagattgaagcagaaaacgaattttattgctatgtgaatagtaaaaactggaattgcaaaacctaaaattattctctctccccaaaatgaaaaagggtccctaaactaaaaccttggtgttgttatataggttctcagccccaaagcttacaaatctgtttaagtccaagtccattaataaaataaaatctggacaagataagataagatttgataaaataaaa

SEQ ID NO: 170815 - DNA, 364 bp, Glycine max
  unsure (1)..(364): unsure at all n locations
aaatttgaaaattggaaaattggaatttcgaaaagttggtaattgattaccactttgtcttgaaatcgattaccacgtacgatattacaaaagttcaaattgagaagtcatgactcgtcattacataactatgtaatcgattaccaaagagttgtaatcgattaccagtgagaaaattttaaaagttactctaaaaagtcacaccccttcataatgttttgaaaagccaccaagggcttataaatatgtgacttatctacgaaaatntttagagttttttcagaaccttattgtcttatcttctcaaaaacaaatcattggccaaacacttgcaaatcaataaggattcttctaagaacttatc

SEQ ID NO: 170816 - DNA, 356 bp, Glycine max
cgcgcgggcctgggagacgaaggtcaagtggtctctatatacgaagatgatgttccgttactttttatttggtacgaccatgccctcctgatttccagctgggaaattggcgagtggaggaacgccccgacatttacgcagcgagcataatgtaaacctttacgggtttaaaagctctatagttgggcctaggctctagagcttttcttttggttaaagctttgtgtatcttgtttgttttaatacaaggatctttcttcatttgtgactaccgttctacccattctcatccatttgcatgtttacttctttatttctgaaatcgcagatccgattgacagtttccccaaagtact

SEQ ID NO: 170817 - DNA, 395 bp, Glycine max
  unsure (1)..(395): unsure at all n locations
gaaaaaaatttaaaatgcgattttattcaaatcacgtaaacaaatccacgtcaggtaaaaggtcacattcgtttcactactatccaataaaacttattaaaacatctccgacctaaaataaggtcgtccaagtttacaaaagaactcaagttaagcagtggaataaaatagtaaaataacatgttcagaacatcatgcaattgaaacagaaacccatgtatcattgttacatcctatcaaagcattgtgtcccagtgtcctctacacgaggttttttataaacatccaactagtcatctgctcccacgaacacaaggttcaagatcatcataagatccacacacaaacaataataaggagtgagtatcacatttctaataacnacaaataacaaa

SEQ ID NO: 170818 - DNA, 475 bp, Glycine max
  unsure (1)..(475): unsure at all n locations
tgcataagctncttcaactgcacaaggctcttaatatttgaagagtatccttgtggaaccttcacctttcgaagacactgacaaaaacttatcttctccttcttggacaaagtatggcaggctgggggcaagtaaattttcttcccatcagaccttggatgcaactgtgatcttatacccatatcaattagatcttgacgggtattcaagtcatccttcttcttgccttgaatgttaaggagcatcccaatcacactgtcaaaaacattnttctccacatgcataacatcaatacaatgtctaacgtcaagatcacaccagtacggaagatcaaagaaaatggacctcttcttccatatgcaactatgactcttatccttcttttgggtcttcccaaatacagtgttcacgtgttgaacccgctgatatacttgctcaccagtgaacggtatccgcgcaatatatgctcttgact

SEQ ID NO: 170819 - DNA, 313 bp, Glycine max
gctgctgtgatgttactaccttcttcccataattattgataagaaatatttaatggatgtaatatatatatatataatctttttaatatctcattattagttaaaataattatctatagtagttattaaacaagtgtataattgaaaaaaaaatagactttgattttctaaaatatcagttgttttttaagcaattctaaaatatcaattgttgtgaaataaaaatgggttaaaacatttgtaattatgggaagtaatctatttctaagttgcattgcgttgaactggtggagtaatctattacttattgata

SEQ ID NO: 170820 - DNA, 391 bp, Glycine max
tcttgcagcattacatacaaataaaagagaatataatgtggaaattactttgtattttcacccattagagttgacagggaaggcttgaacatgcgttccctcaatgcttctatcaaagcactagctgataaaaatggtagcaattgaaacagaaaattagcatcattacaaaatgaagaagaaatatggccatttcaaacacttaaatattgataaagctagacaataagaaactaacaatttacagaagcacgactgacaaaagagacctcaaaatacatggcaaccacttatatcagttttgaagaaacataaacaatatattttaaaagacacattaaatgcctaaacagaatttttaatgcacttctattaacagtatttggtttgc

SEQ ID NO: 170821 - DNA, 326 bp, Glycine max
  unsure (1)..(326): unsure at all n locations
ttttttgttttcaaacaccttgttaccctgagagaaaatgtggatcatgcggccctcaacatattaaagaaggggggtgaattaattattcatacacctttaccattaaaaaattactcttttaaggcttttactaaattgttaagagaatgaggagtagaagagaatcttaacagaaagtaaaagcggaaattaaatgcacagcggaaagtaatagagtagggaagaagaaaacaaacacacaagagtntttatactggttcggaaacaacccgtgcctacatccaatccccaagcgacctgcggtccttgaaaattctttcaac

SEQ ID NO: 170822 - DNA, 346 bp, Glycine max
  unsure (1)..(346): unsure at all n locations
tgaagaactacttnattcacttgaagcgcatgagcagtgatttatatataggaatcctgagaagcacaatgatcaagccttacaagctcaaacaagcagaaagtttgacaagcaacgagacaaatccaaaaagaacaaacgaaagtggcgtgatgagaagtggacaaagactgaagattcaaaatgtggtgattctggatcatcttcacagaaagctgtgtcaaatccaagaagccaattctcagagaaaaagaaatggatcgacaagaagaaggtgcagtgttacaactgctggaactttggccattttgcagctgattgtaaaatcagtaaaggctctcatgtg

SEQ ID NO: 170823 - DNA, 302 bp, Glycine max
gcttgaaaaaatctacaagcttcgtatggtctgaaacaggtaaaagggcatggtataaggaaattgacagttattttctaaaaagaaggttttaagaagagtgaaaatgaagtcactttatatgtgaagtgataaaaaaatgaagtgcaactcattgtttccttatatgttgatgatttattctttatatatagggaatcaaattccttaaaccaattcaagaatagtggaaccttggagaatctttatgatagatacaattaatgtataagaaaatgatggagagcttccatgtcgaagat

SEQ ID NO: 170824 - DNA, 454 bp, Glycine max
  unsure (1)..(454): unsure at all n locations
tcaagatgaagcaaccagctcgcctgngcgagctgtgtttcaatttcctccccccattttcctataaataagcgtggggggctgaggggaaggggtttaacatccttagtaagcatatttcactgaaattagtgagaagaaggagaaaaaagaagaaaaatcaaggtcgaggcgcttccgtaactctttcgtaatgttttcgtgattaattccatggacgttcttcgtcgttcttcgttcgttcttcgatcttcaaccagttagttttcaattttgaagctttgaattcattctatgcacccttaggggtccattcttgctttgtatgtcttcatcttcattcttctaccatcggtattatttttctttgttttaagtgagtctcgaccgatcatttaagtcgtaatctcacttaatcaatgtcaaaatgaatttcaaccgatcgtttgcatcg

SEQ ID NO: 170825 - DNA, 396 bp, Glycine max
  unsure (1)..(396): unsure at all n locations
aaaattggtgcggcagcttccatgcttagggggtcattctttctttgtcaatttccaccttttcgtggctatgggtagntaatttcaacttccattgaaatttaatgtaattggatctattttgatgtaattacaacataaaaatgaatgtcatggattcaagtgaggctgttttaggaaataaaagtagcattcaatataataaagaggtttccctctataagtataagagattagaacataagaaagaaatggagataattaggtgtgtaggctacaaattaatagatgacactacaacttatggagaactgatacggtctaattttggcaaagaggtcttgtatgagggaataaagatgatattgatattataatttcacaagttctttaaat

SEQ ID NO: 170826 - DNA, 381 bp, Glycine max
  unsure (1)..(381): unsure at all n locations
ntatagttcaacatgaacctttatctttgagtgtctattcaagaggttctaggacttcatttagttgatcatctaatggcatgtagtttccatgttctacgatgtcccaaagaaattcaagttatgaagtgaagtagagaagtgaaatacaaaaagaagtaacaaagtgaaagcgatattctatagtaatcattagacaatacataatacactagaaatagttttatcctttgcttagaaaagttatcttgtgtattcaagcttattgtttatccactctttcagtgtgtgaatctttatattcaatcaaacaatctatttgtgaaagccaggagtggcttgatgacaaaacaatacttgggtgtgtctagattcagggga

SEQ ID NO: 170827 - DNA, 283 bp, Glycine max
atattttaaattactagacttgtttcaaccatgtttggtatataatacttggataattaatattctttattccatggttgattgacaatatgaatatgtttatgactatgggttttataattgactattcagttcttgttcagatggttatatctcatgttgactacaagataatataatgatgtttatcttgtaccacttgcttttgtgatccaaagggaaaaatggaataaacaaaacccataatataacttattcagtaagctaactcaaacaaagggga

SEQ ID NO: 170828 - DNA, 320 bp, Glycine max
acacttggccttctatatcacgggacgctcttcctctaatggtgaggaaagatgcttctaatggtactcaccacctatagagtacgacgccgaggctcgctatttcaagacctggccaaaatattattcatagcggctgcgtggcttctaactgaggtctcgactgcgacacttaatcaacgatggcatgcattgctcatcacatgatattgatgaactcataatctgaccactaagtatctacgttaaagaacgcacttgaggggatggttcacacacggattaagccattaatgccaccgttgaatcgggctccaact

SEQ ID NO: 170829 - DNA, 287 bp, Glycine max
  unsure (1)..(287): unsure at all n locations
accctggggggggtgccctactctgggccaattaaacacattcattagtggactaaaaaaccacaatacgggtagggatgcaattgtaaaatatgcacataaataattgattacaaataatggaatatgatatacattactttctaatttgatgcaattacattggaatgttctcccttaaacattcatcatgatcattatgaattacatgtacatcatcgacctcatgttctntatttatggaaggcattcatngggagaaagcaggcatctcagaaatatctagt

SEQ ID NO: 170830 - DNA, 369 bp, Glycine max
tgattgcttctacaatctccccttattgacgatgacaacttctgatatcaagaaacacacacacacatcttttttttagtcaatcactcacataaatttcaattctccccctttgttttttaatttatgcttctcttaaaatcaagccgattactcatgtgagttcttgatataatccctatttctgtccctctttggcattaacaaacagccaaagtgcataacaagtttgaatcatacaaatacaccatggaaaaatataagccaaatcatgaagcatgaaccatgaagctagaacactgaatagatcaaatataaaatccacatagtcaaataacataactaatttttgtttaaacataccgtgca

SEQ ID NO: 170831 - DNA, 359 bp, Glycine max
  unsure (1)..(359): unsure at all n locations
ttttttttgggggggaataaagtttttcttattccctgccaaatgccgtttaacatttactggtcaaggaaaattttgcactctatgctcaaatactctgatggtgtcatctttccactggagagaagatctctgtgaaatcaatccttgtttttgttgaaaccctttcaccacaagtctcgccttgtatcttcttctatcgncagattcttcctttagcctatagacccacctattctgtaacgccttctttccttctggcaattcagttaaagaccacgtcttattcttccgaaaggatgtcatctcattcttcatcgctagctcccactcaatagtgtcattcccctgtgtagcct

SEQ ID NO: 170832 - DNA, 273 bp, Glycine max
ttctaatggttgtctcgaccagacatgacgagtttataaaatcaatgctttgtttcgcatctcaataatcttgaatactgtttgaatcaatttcctacaatcctttacacaccttgaacctctttgaacttgttcttcttctttgaacccaaatactttctagagctttatggctttttaacccttgaaaacttgtgctatcatactttcattcccttctccctctgccaactagaatctgccaacgacaacccgcctgaatctctcttgcgt

SEQ ID NO: 170833 - DNA, 240 bp, Glycine max
aaataacctacccttagatggtcgaatcctttacaacaacagcaaccacaacaacagccttattttaaaaagctagtggtccaagcaaaccatacgttcttcaccaatccaacagcaacaacagcaacatccccagaaacaacaaacagttgaggctcctccgcaacctctccttgaagaacttgtgagacaaatgactatgcaaaacatgcagtttcaacaagagactaaagcctccat

SEQ ID NO: 170834 - DNA, 347 bp, Glycine max
catgtatatatcttcctcgagagcgccactgctattctcattgtcgacatcacagctgttgaagaggccagctgcaagatatatccccagaatcgatcaacctactagtcacaaatctttattcgtattgatcggactatgagttaatacaacacgatccccgcccgagaatcaaccacaccaccttgacatatagagagacagagaatgagagagagctctagagggagagaaagagagacaatgtggttgaatcagataaacaaagtgtgggtgatagagggatcctaacacatctatcctctatataggcctggcgcacaatctgcgaagacatcgacagtatg

SEQ ID NO: 170835 - DNA, 350 bp, Glycine max
  unsure (1)..(350): unsure at all n locations
ggtcacaagaaatataacaatcttttcaaacaagggccaaacaacacttctcatggcacgagtgtcaacatgcactttataaaaaaatcattttggggtcatgcttttttatgacacaatacttttngcacacataaataatttgtatgaagcattttacgacacctatccatgcatatatttntttttgtttgacaaaccttttcatgctacatcctatatatatacacacattttttttggaaggcttcttttgttacctactcacaaatacacatattttgaaaaacactnttacgctacccattcaacactttgtgaggcacttcatgctatatatattcatatta

SEQ ID NO: 170836 - DNA, 426 bp, Glycine max
gacgcttcaatggaggacaagaaagagggagagaaagagagaggtgggatcacgaatttgttcgatgaacaagagagagacgttgaactttgagctgtgtcttacaagactctcattcatcaaagttacaacacgtgttacacatgcttctatttatagactacgtagcttccttgacaagctttcttgacaaaacttccttgagaagcttctttgagaaaacttccttgagaagctagagcttagctacacacaccctataatagctaagctcacccccatgacaaaatacatgacaatacaaaaaaaaaaaagttcctactacaaagactactcaaaatgctcttaaatacaaggctaaaaccctattctactagaatggcctaaaacaagcgcccaaataaggaaaaaatctattctatatta

SEQ ID NO: 170837 - DNA, 275 bp, Glycine max
  unsure (1)..(275): unsure at all n locations
acaaccccctcacatcatgccctcattacaaataaaactacatccatttttttccaagataataaactgctgtactaccataccataaaaaacaagccaaactgttcaaaatgcttcaggatgagcaaactaattacccataaataaaactaccagtatatgtagatataacagatatactatacgaaaaccanaattataataataatatatcaaagatcatgtgactggccctgtgtgtcctttgactgaccatccccctcatctgtcagctg

SEQ ID NO: 170838 - DNA, 407 bp, Glycine max
tgggcaaatcttatcactcctacatagcatctctagcttgcattttctctgtctacccactcctcacgttaggtctttagggaaaacaccataactaaacgcgccgcacgggatccttatcgcaccagatccacatctacaacgatgggtgatcaagaggagacacaagaacagatgaaagccgacatgtccgctctgcaagaacaaatggcctccatgatggacgccacgttacgcatgaagtcactcatggagaagaacgcggcccctgccgtcgctgtcggttcggctgccgaagcacaccgaccctcttggcactacgcatcaccctccccaaacatatcagaccgtgaaggaccccggggcacgatgcagcctcacctggatacaccgagcggcttccctat

SEQ ID NO: 170839 - DNA, 447 bp, Glycine max
  unsure (1)..(447): unsure at all n locations
ctgcagcttgaccttgagcccgctatgtttattaccctagnagcaactctgtatctagggttntctttgacccaagacaatgttggttctgtgggttccagcgacgacaatgtgggttttccggcagtgtatggggttctgtgggttcaaccaatgacaatgtgggtgtccacgaagcggtttccggcagatttctggcgagaggagaaagagaacagcaatttcaggcagaaggatgacaaagagaagaggtagggcaaggttttcaaacgcgcggcttctgaaatctctatttttttaaacttataaacacaataacaatcggtttttatggataactgatgttaactaaatatacttaacatcggttttgtaagaaccgatgttacatcaaatacattacatcggttttataacaaaccgatgttaaaatcaactccttaacat

SEQ ID NO: 170840 - DNA, 427 bp, Glycine max
  unsure (1)..(427): unsure at all n locations
tcttggtttattctgctgtagatgaattcgtggctactttatgcactcctctaatgactatagcatcatttctggcactaaactgttgggagttggaagccatcttctcaattaaacttttggcttcagcaggggtcatgtctccaagggctccaccactggcaacatctatcatacttttgtccatgttactgagtccttcataaaaatattggagaagaagctgctccgaaatctgatggtgaaggcaactggcacatagtnttttaaatctctcccagtattcatataggctctctccactgagttgtctaatacctgaaatatcctttctgatggtcgcggtcttggaagctgggaacattttttctaagaatactctcttgaggtcatcccaactcgtgatggaccttngagcaaggaatac

SEQ ID NO: 170841 - DNA, 375 bp, Glycine max
  unsure (1)..(375): unsure at all n locations
agctnttatgcatgccatgtgcattacttttgggaaaantgnaagttaattactcatctctctctatctctaattaatatatatgatgatgtatattgataggacaaaacttcggtattgctcttcgatcataattgaaatttcatttatcttagaattctatatatgctgaagtttaatgcaaatttatttgtcgattgagagtgtaacgtacgtactataagtttttgcacaaatatattattgatatggcgtttgtttgtttgtttcacttattaagctttatgctatggacattaatattaatgatggatgtgtgatttgaaaggtggcaagtgtggaagcgcctctgttgttactttccattcataatgc

SEQ ID NO: 170842 - DNA, 442 bp, Glycine max
  unsure (1)..(442): unsure at all n locations
tgataacctctatgaactgtnttagagatcaaatgtctattagtatagcaataaacactcaagataaaaccacaagaatgttaattcaaaaattgaaggccaaaaaagtatgtgtttaattaggaccaaataacttgcctcttcatgctcaattgtgtgggctagtggaagaataacctgacccccaaaacctccgggtcgggcccctggcaagctacaaggaccagctttaatggcagcagctgagtaagcatcaatactgctatctgcccattctgatcggtgctcccgcaagaatctaagaagaattgctggagggacattctaccaggacagaaagagagcatgagacaacttaatacaatgaaagtatatggtaattggaaaggaaaacattatccacatgattgtgtttaattgctaccctgacaacatggatgct

SEQ ID NO: 170843 - DNA, 382 bp, Glycine max
  unsure (1)..(382): unsure at all n locations
cctcattntgtacatgaccatcttggatgaatcaatggggtgtatgctggggcaacatgacgaatccgggaagaaagagcgcgctgtttactacctaagtaagaagttcacgacctgtgagatgaattactccttgctcgaaagaacgtgttgtgctttagtatgggcatcccatcgcctaaggcagtacatgctgagccatactacctggttgatatccaaaatggacccagttaagtacatctttgaaaagccagctctcacgggacgaatcgcccggtggcatgtcctgctatccgagnttgatatagtctacgtcacccaaaaggcgataaaaggaagcgccttancagaatatttggctcaacagcctcttaacgac

SEQ ID NO: 170844 - DNA, 434 bp, Glycine max
tgtatgattatggagtacccatcacatgtggtactatgtggcggtcgggcgatggtgcaaaacaattctccacatccacaaatcacatataaacccaccatcccctgttgcccactttcaactgagctcacgtactcccacgtagcccttatcctcgtttctttcaacactgggtccccatcaatcctcccaagcttccacaacatccaagtaattccacatccaatcatcatgaactaacaaaaccaagcaaaataggcaaaggcagaaaactctgcccacaacacaaaccaatatcacagcttttcacatacaaataccccagtaacattctcttcgttcaattcgttaaccgctggatcgactcgaaacatttactggaagtctctagcacataaatctacattatgaccgttgggatctgctagaaacgt

SEQ ID NO: 170845 - DNA, 409 bp, Glycine max
  unsure (1)..(409): unsure at all n locations
gcatgatcactggctgacatattctcaatcaatcagttgcttcttccgaggtcttcagctttatttttcccccaccagaagcatctagcagttgcttggtttgtggtctcagcccatctatgaacaaatncaattgaattggcttgaaaaacccatgggtgggagtctttctcaataatcctctgaacctttccaatgcttcactcagagattcatcagggaactgatgaaatgaagagattgcagctttcccttttgcagtcttggactcttnggaaatattctttagaaatttttcaacaacttcttcccaggacttaagactgttacccttaaatgagtgaagccacctctnggcctctcctgctaatgagaatgagaatagtgttagtcgatgaatatgactaac

SEQ ID NO: 170846 - DNA, 435 bp, Glycine max
  unsure (1)..(435): unsure at all n locations
tgtatgattatggggtacccatcacatgttgtactatgttggcggcgggcgatggcgcacaacaagttttccacatccacaaatcgcgcataaacccaccatcccctgttgcccacctccaactgagctcacgtactcccacgtagcccatatcatcgtttctctcaacaccgggtccccatcaatcctcccaagcttcccaacatccaattaattcaacatccaatcatcatggactaacaaaaccaagcaaaacagggcaaaggcagaaaactctgcccaaaacacaactcaaaatcacagcttttctcacttaaagaccccagtaacaattccttctttccaattccttaaccgttggatcgactcgaaaatttactggaagtctctagtacataagcctacattntgaccgtgggatctactattaaacat

SEQ ID NO: 170847 - DNA, 421 bp, Glycine max
  unsure (1)..(421): unsure at all n locations
ngcntgtatggaactaggcatgagtgcttgattagtcttagttntcatatattcatccttagtgttaatcaaacatgatagatagatagattgatctcaaagtttcttagaagcaattagtccaacaatgtatagtcgattacaaggtttagtaatcaattatcgattattagagaaagcaacaaaaatcactttacttttaaatttggcaagaagcatcaaattaatagattacttgtttcagtaatcgattacataagccagtttcaaaagaaggaaaactctatggctcgagataattgatttctgatgtgtagtaatcaattatattgcgttngcaaactcaaggaactctctatgtgacaaaataattgattactacatttgataataaattattccagaacctagaagcttggga

SEQ ID NO: 170848 - DNA, 327 bp, Glycine max
  unsure (1)..(327): unsure at all n locations
ctatanaagataatgctacggcggccgctttcaatacagctagggaagcggaactggtgctacatcccgcaataaacttgggccgagacagaaacgcgacgggttttaatcggaggtatagttctcaagcctacccttatggtttgcctccagactttactccccgtaccgctccagatgatttgagccaagcccctaccttcgaggggcagctccctcctcatgccgactatcctctgcaagaagatgatgaaggagatgcccatttaggccctctacttcccctcaaggaaccatccccccatgagttgccccaaccaaacatag

SEQ ID NO: 170849 - DNA, 299 bp, Glycine max
  unsure (1)..(299): unsure at all n locations
tttttttttttgtttctcgcgcgggtctttccacagaagatcctcctaacttctagctttcatggtgattcaactttttttggccctaaaatggggaatgtcctcaaaatgttggggcaatanttggtttcgctattcttgccttgatggagttggattgcgggtttgtatgggatggcccttagcctatcatgcattttgaaacaatgggacatgccacattgtccccgttctcttgctattgatgcctatacgcgcgcccaccaactgttcggtgaaatgcctcaatggccttagcc

SEQ ID NO: 170850 - DNA, 154 bp, Glycine max
ttgctggtgatgaacacatttcttatacggaatcataaccacgctttttggatgaccctacggctcgctactcttctatcccgtgggtatggctcttgaaacgggggacatgaagtctttgaatgcactatcactccgtctttcggcattctta

SEQ ID NO: 170851 - DNA, 255 bp, Glycine max
gatttccaagatgaaaatacggcgccgacggaggacatcactgggtaccctcatggccaagttcgatccagaaatattccttgagttttatgccaatgctcggccaacagaggagggcgtgcgtgacatgaggtcctgggtaaggggtcagaggatcccgtttgatgtcgatgctatcggccagctcttagatattctgtggtgttggaagagggccagtagtgctagtattggccgaggatgaaccggtctgat

SEQ ID NO: 170852 - DNA, 358 bp, Glycine max
ctataaaatcaagctttggattttacacggaccactatttattttaacagaagcccctctactcaacgttctatgagaccatacaacgtttcctaaccattctatgtgggccattaagtctaccatatgctgacaatatccagaagccatgaatctccttcgcggcggagtacgtgtctgtcatagtcttgggcttggctaacaatcgtcgaagtttttgactcccgttctatgtaagagcaaaccgattcatccacatggttgcctcttggtgtaaagagaccatcaccctgtctctagcctatctttcgcatatacttgggcatactcatccgcgattctatgcttcagggccctg

SEQ ID NO: 170853 - DNA, 457 bp, Glycine max
  unsure (1)..(457): unsure at all n locations
gcaagcttcatttacaacagtgagaagagattatgtttatngaaganatacaagtngtggggatgtctcctccacctctagaaacctcacaatctctcataatctcatccaaagctccgcaagatggcttccttgtcaagctcatctctctcttagtctctccatagccaaaaactctcaaaaaactcaacaacctttccaaaattgagatttcagctgtaaataggcattcctgttggtgggcgtgcgcttagtggaagatgagctcgcttagcgcacgtaagtgacttctggcttagcgctagtcttctcgcttagcctaagggttaaaggcggcgcgcttagcgagttcacacttgctcaacgcctctatacagctcatccttcttccagattcttctgcgcgcttagccggaggatggtgcacttagcggatggctcgcccagcacgtggcgt

SEQ ID NO: 170854 - DNA, 382 bp, Glycine max
  unsure (1)..(382): unsure at all n locations
ntgagggtgcgcaacccaccattgttttccatagtagatcaccggtcatgtgtctactatcattgtgataatctctttctctgtttttgggggtgctacttgagttgccaagtctctccatctttgggcgtattctttgaaagattcgtgccccctttttgcacactttttgtagttgcatcctatccggagccatatcagaattgtactgacactgcctaatgaaggcaaccattaggtccttccaagaatggactcaagaaggttcctaagttagtataccaggtgacagttgtcctagtaagactttctcacgaaaaatgtatcagcagtttctcatcttttgcgtatgcccccatcttccgacagtacatctttagat

SEQ ID NO: 170855 - DNA, 348 bp, Glycine max
gcttgagctcaatcctgattatcttattttgcccaggtgagaatgcaatcttaccctcgaagcaaaaaaaagagagaagaaaatttccatcaaggaaaaaggaaagataatttcatcaagagaagcaaaaaggaaaaagaaattccttcaaggaaaagaaagaaagaatcccatcaagaaggaaaagcaaaaaaaaaaaaaatcccatcaaaatgggaaaaaaaaagaaacaaaagaaaagctctgtcaaaaacaaaaaaggccagagcctgaccgacaattgacatcaaatgcccatgacaaaaagaagaccccacaaatggttccctatgcacaaattgcgttcat

SEQ ID NO: 170856 - DNA, 435 bp, Glycine max
tgaactataaatactcaacttgcacccatctctcccaggcgagctaggttgcttcctctataaggcaccgccttctgaaagaactgcttgaaaggcccaagtgggccatgttgctattagcaccccctatttactaaatacacgcctacctttatttgctgattctctttccgcaatgtgatggaactttacgaatttcgtaaccatactcgatttccttacgcaatgttaccgaaccttatggattatgtaatcatactttcttttggctttcagaatgttacagaacctcacggattgtgcaacaatgctatcttttgatatccggcatgttatggaacttcccggatcgtgcaacaatgctctcttttgacttctggcacgttatggaactacgcatattgtgctacaatgggtgcatagtactcaaagcgg

SEQ ID NO: 170857 - DNA, 255 bp, Glycine max
ttgcagcggttattttttctcgacgcaggggagtcgtcagtatccaaaaactgcctacggataaatgaaagggactgttctctcggtgcgacattggaagtgttgattagagtaccagtaccaaagacctttcctgcttcatgccaaagctgacccgcagaaaccactcgttctgaggttctggaagcaatactatcccgagtcggagaccatactcccttgatttgtatgagacctcgctggcagctgacctca

SEQ ID NO: 170858 - DNA, 449 bp, Glycine max
  unsure (1)..(449): unsure at all n locations
tagcttcattgattcanaacacaacatgtgaatcatgtattttagcaaagcaacctaaaaaaggttttactacatgtattgaaagataaactaacttgcttgaataggttcatagcgatgcatgtgatagtaatgatgcgttaacacgtggtggcaaaagacactctattactctcattgatgattcctctaaatatcgctatgtgtatctagttaatcacaaaagtgaggtgtttgataagttcaaagtatgtaaaatacaagttcaaaatcaattagagagagaaattaacattctatgttctaatagaggtggagaatacacatctttacacatgagcaatttttgcgaaatgcatggttatctcatgaagtgacatctacatatgcttctcaatctaatgtcactgtggaaagaaagaatcataccttgcttgatatggagaatc

SEQ ID NO: 170859 - DNA, 407 bp, Glycine max
  unsure (1)..(407): unsure at all n locations
gtattctaaanncattagcaccaaatgatcgtgcgtattatcttttccctgaagtatgaaaatcctaataaattggttgattcagaaactaattgagagtgttttttttatgcataaaacaaatattaaatcagaaaagaaggaactagcagtgcctaataaagaaagtgcccatttcaataactaattgaaagtaaaagaatattatgattgatctttcagaacctcccaacctgattatcctatatatagtttcattaaacgattgcagtatgatcattaattaatcgatcaactaacaatacgtcaataattagattgtgggagtctaaagatggggaataaagctctctataacccttaaagagttacgagtgaagtgcgaaatataaacctagctcgcatca

SEQ ID NO: 170860 - DNA, 437 bp, Glycine max
  unsure (1)..(437): unsure at all n locations
tagtgaagatgatgattctgtagttgaagttcacaaacttttgctagtgtataaaagggctggagagaggtttggtatggctgcagcaatgaaagcaaggactgaaatatctcctggtaagtgaaaaaattcacttataactttgaatgattaattaataatatgtgtaaatgctaatgcatatgaattgcattttacagctgagtggtggaaattgtatggaggaaaaacaccacacttgcaaaccattgccattaaagttctaagtttgacttgtagctcaccaggatgtgagcgtaattggagtacctttgagcatgtaagtaactaacattcatgtttttntaaattatgaaactttagaagctgaaattgaaactaagtaactaacattcatgttttgtaaattattatagattcactcanagaagagaagt

SEQ ID NO: 170861 - DNA, 378 bp, Glycine max
  unsure (1)..(378): unsure at all n locations
atgagaaatcttctttggaaaacatcttaaattcccgcaataagggttaaacacctagaaaaacataaatagttgactgattaaaattatcactctctctctcttgtgtatcactccatctctcaagtgtatcactattcctttntttattcctctgtggcgcctcactattggctatctcttgatctctcttttctctccttctgatttggccatcacacacttctctgagggattgaggtttaagaataattttctggtcatggtgctggaaagaaatcttgtagtgaagccatatgcacttgtttgctgcctcttaatgttggctctcactagtgcatctccatctccttgtcctaacaatcaaactttcctgga

SEQ ID NO: 170862 - DNA, 386 bp, Glycine max
ttgattcacaatctctccctttgtggattggataatgtgaaacctatatgatatgtgttgatgtttttcttctcaatgtacatgttccacatcatgcttagcaaacacattagtagcatcttttcaatcaaagcaattagttacaatacaattaaacaacacaaacaatcatatctttctgccctttttggcatcacagccaaaaaatgtgtatcaaatgagaaaaacaagttaaagcaagacacataaggtaggaaatagaaagatatcatatatttcattcattaaaaagaaacattacaaccatgattaatcatatcagacaatatccaaaacatagtaacatagtagaaaacacattataaagcccagactatgtcctagag

SEQ ID NO: 170863 - DNA, 330 bp, Glycine max
cagactcagagggctcctaaacttttaatttcactttccttcccttcatggatccttcattttctccatgatctcgcacatgcttgggctaaagtgtaacacggtcaatttttgtcttgtcttgaaccctaattggtgagttaagtccttgagttcgcttgtatttttgggctgaacctaaccataaattttaaaataacattaagtaaaaaaactcaaaactaagtgactgtccctatgaatttgcataaactcagctatctgaacttgcaaaaattcttagtggtgaattatttctgtctttgctactcattgccatatgataaatct

SEQ ID NO: 170864 - DNA, 372 bp, Glycine max
  unsure (1)..(372): unsure at all n locations
gacaacttgcgtaatcgattatgataagggctgattaaattaaaatagagagtcttgccttctgaagaaattntctaactntagaaattctcttctcactacaaatgcaacatacaaatgcctacatgatgcataagaaatatgatatggactaagatgcaacatacaagataacaatcaatacaaattccactcaagagagttgggcatgtaaaagacaaaacatcttcaagctctccttcaagcttcaagcttaagtcttcatgttgctcatgttgctccccctatctctaataggtcccttcatattctgtacaatatgacattaagcttttcgtncaagcatctttaaggcatgcacagatgtgttgg

SEQ ID NO: 170865 - DNA, 278 bp, Glycine max
ttttttttcaaaagggaaggggatgtgttctgatttgagcgcacaaaatcacaggctttcaatgtagctcgctcagaatatctgatgctcacaacaagcctgttcagatcactaagaccatcttgctaaacaagtgcttcaactgcagtcggaatattccgaaggatcataccaaagacgggtggaatctgtgaaatttgattgatttcactgatcataccttgtggacattcacccggactgaatcaatcaagctacctcaaatatgtgatgttcca

SEQ ID NO: 170866 - DNA, 267 bp, Glycine max
  unsure (1)..(267): unsure at all n locations
catctcaaaatttttaaatatttttgcagcatatttcttttgacaaataaaactccatcatcttcttggtgaatntctattccaagaaaatgatgtagcaagcccaaatcattcatctcatatctcatcatcatttcttttctaaaatcttcaatcaacttcaaattatttccagtaaagattaaatcatccacataaagtgcaataattaaaatatcagtcataccttgccttttgacatacaaagtangatcattcttgctcttt

SEQ ID NO: 170867 - DNA, 366 bp, Glycine max
acgtgatcaatacattcattggcatagaatgaaggatgaagttgtggtgcgtgatctattttggtgtcaccctgatgcagtaaagttatgcaatgcatgttatctggtgttttttatagacagtacctaccaaacaaacaagtacagactcccactacttgactctgttggggtgacaccaacggcgatgacattctctgttggatttgcatatctggaggctgagcgtgttaatattattgtatgggctttggaacgatttcgaggtctatttttaagaaacgatcgcctccctgttgttattgtcactgacagagacctagcactgatgaatgcagcgaaaactgtgttctcggagtgtacaaa

SEQ ID NO: 170868 - DNA, 365 bp, Glycine max
  unsure (1)..(365): unsure at all n locations
gtggattctgatcaaatacacagtgaacaatttaaggaaaagagaatttttttgcccctttattaaagacatantagcccagatacatttatctaactgaaaagagaagggaatataaagtgagagaacaagggtaatgttataccttcacctgccattgaagaagtcctaattgtgattcatcaactcgtttgttgtggagaaacttgtattggtaggaagaacaaatggtacatggttttataataaaaacaaatattggtacttgagcaattacgtcaggaaactgtataacaacattagcgtgtatatcaattggcaatgggaatagctaatgtcccgaatgacatactgcattgtgcttc

SEQ ID NO: 170869 - DNA, 305 bp, Glycine max
gaatacatgtccaaccgaagcctggactactttatatttgcgtggacacgttcaaattaattatatatatcaagcacactcttcttattgcttaggcgtagtctatagaattattgagacaaaaactgctatcctaatatgtgcttgtattcaactagatgaagcccaaaggaagttgttagattggcgcaagcatcttaatattatttgtggcagcgcccagggacttctatatcttcatcaagactcacagcttatgattattcacagagatctaaaaactactaacactctactagacacta

SEQ ID NO: 170870 - DNA, 267 bp, Glycine max
taatactagctcaccaccattcaaccgcggaggggcctttctcaatggaagggcgaacctacctaagcctgacgaacatataatatgaaagcggggcaagagcaagaggaataaccagcaaaacggcacgaatgcgaacttactcaaagcctgctccccatggaggtcttaaaatcatccataggaaaaagtgaacattctgtcgctaccacaatgaaccaacatcctataatgacagcgagattgtgtggttgactggatcaagta

SEQ ID NO: 170871 - DNA, 349 bp, Glycine max
gacgcaaatttaatcatcctgcttggacgaatgagaaaaactggggccaatggagaggatgagaatgaaggaggaacccatgctgcgactgtcgttcctacatggccaagttttccaccaatccaacaatgtcattactcaaccaataacaaccattctccttatccaccacccagttatccacaaaggccatccttaaatcaaccacaaaacccacctaccacataaccaatgcccaaacaccacccttagcgaaaaccaaaaaggaatgttgcagcaaaaagcctatgggattcaccccaaatttcggtgtcctatgctaacttgctccattatctacttgatactg

SEQ ID NO: 170872 - DNA, 433 bp, Glycine max
  unsure (1)..(433): unsure at all n locations
taacctaactaagtaagtaactcacttactcggtttcttcgaagtgagaccaatctctntgttgccaacgtaaatgcgaaagccccgctggcagtccttgattcggaagttccagctagctgggaaggtccaactcattggaacaaactcgacgaagagtctgcttcaatatggaagagattcaacaagaggtgctacgtgcgcgtaactagggttcaagaagaagcaagaggtcctgcgtgcgtgcgactagggttcaagaagaagcaagaggtcctgcgtgcgcgagactagggttagaaaaaggaaggttcagtgcgaaaggagagaagttgggacgagcgagggtcgctgctgtgtttagtttgttttcctgaattaagacggctnttttataaaactcgtcgtaaatctaattatatataacattcta

SEQ ID NO: 170873 - DNA, 326 bp, Glycine max
tcgctaagcgcaccgcttcagttcattcgctatgcgagaaaggcgcactcaagccaaaatcactaacgtgtgctaagcggtccatacgtgtgctaagcgcacgagcatgaacaaggccacctatttaagtctgaaatcacattatgtgaagagagtttggactgggattcaaagctttgcatgtctagggtttctagagagagaaagggccaagttctagagtggtttgagagggttgctgtgtgaagatctacacagaccagagcttgaagcagaagctcggattcaaaacttaccattgaagaacgaagaacaacgaaaacggg

SEQ ID NO: 170874 - DNA, 396 bp, Glycine max
  unsure (1)..(396): unsure at all n locations
tgtacggttcaccccaaattctgttgtcatatgctaatcttgatcccatatctacttgataattcaatggtagccataaccctagccaaggttcatcaacctccatttcttcgagaatacgactcgaacgcaacgtgtgcttgttacggagaagcctcggngcgttccattgagcatggtagggctctgaagcgtaaggtgcaaggtctaattgatgcgggctggctgaaatttgaggagaattgcgtgtaaattctgacattgacaagagatgccacacatggggcaattttgaaagttgtggttaggtgtccctaatgactcatcanggctttcaagtntatgccattattgtaaaccacagctaccatgttaaatgaaatggataaagttgat

SEQ ID NO: 170875 - DNA, 374 bp, Glycine max
  unsure (1)..(374): unsure at all n locations
ccaacagacaccatcttagagaaacctactagttcaagaaatggaccacaaatcaacgactctctataaattttgcctgaacatgttgaagaactaatcatacatgaaacgatcttgtactcaataccaatataatacggatataaagaattntcatacacctcatgaacacaatgagttagacaaagaaacaagaataataaacattcccacaccataagaaatcttatgtgacaagtttcatgactagacatgacttttatgacaaaactacaataggtgaacaagtcactcctattctttgaagtgttctccaccttaatgttttgaacaatttttggttatgtttacccaccaatactatacaaactcat

SEQ ID NO: 170876 - DNA, 443 bp, Glycine max
  unsure (1)..(443): unsure at all n locations
cagctatccttatggcttgcctncggacttactccccggtctctccggaagatttaagccaagcccctacttctgaggggcaactcccgccttatgacgactatcccgggcaagatgatgaggaaggagatacccatctcggccccctgctccacctcaaagatccatccccacatgaactaccccaaccaaacatagtccgccatattccggcctcacccacacccgtaaaagaatctgttcccttcgcggaagataagggaaagatagaggcgcttgaaaagaggttaagagcagttgagggccttggcaattacccattctcggatttagcggatntatgtctcgtgcccaatatcgtcattcctcccaagttcaaagtgtcggactttgataagtacaaacggacgacatgtacgaatgggcatcttcggatgtattgc

SEQ ID NO: 170877 - DNA, 187 bp, Glycine max
tcaattaactcgggagacaggacatcttttactccgatccaacaaatggggagtttttaccaatcctgaagagtgaccttggcacaggatccttgtcggtctacaagaaaaaagcgacccatttcaaagcatgccttcatgtgctgcagaatacatgtatactctgtgtccgtataatacatgattt

SEQ ID NO: 170878 - DNA, 380 bp, Glycine max
tgcgtatcgacaattcaatccaagttggcacggagttgggcttccaaggttcttcagatgataagattgcaataattcacagcaactttgattcaaagtcaaactttggaaaaaaacaagaggtggattcttttaattctctgtcttgtttccatttattctactggttaagatgggcgtgatcaacttatgtagggaatacatttcacggagtatctgcagaatttgaattggatcctttcagcaacatactcccttatcctggtgctgggaatggttagtgatattgatgattctgtaaataatttaatattctttgtatcgctgaaaagatgattatctgtactttttttttctactgtagttcataaatttaaacc

SEQ ID NO: 170879 - DNA, 457 bp, Glycine max
  unsure (1)..(457): unsure at all n locations
ttttggtttacaatctcacccagacccacaccttcatcacctgccttatcttcctcaacagaaaatacagatctttcagactctaaaattgtgacattattcactgtatttaaaccgttttgtcgaccacgcttctttggcctcgcaatctcacccaggactgcaccttcatcaacagctttaaagacagaccctgaaactgtgacactactgatcccatttgttcctcctttaacattttcaccaacactctgtctgttcaaggtggtgtgaaactgtttatccttattcttggaacctttaggcctacccctcctagccactggcctgaaggctacaccttttgcctcttcactgctggcaagtcctncatctaacaatcggtccattccctcttcaacaccaagaacaagcatcttgctatctgatgcattatccccatggtgcctgctatttg

SEQ ID NO: 170880 - DNA, 354 bp, Glycine max
ctgcagcttaacatagacttttttttgttctggaactacctcacatgggattgatggggcctatgcaagtgaaagccttggaggaaagaggtatgcctatgttgttgtggatgaattcttcagatttacctgggttaactttatcagagagaaatcagaaacctttgaagtattcaaggagttgagtctaagactttcaagagaaaaggactgtgtcatcaagagaatcaggagtgaccatggcagaaagcttgaaaacagcaggttcactgaattctgcacatctgaaggcattcctcatgagttctctgctgccattacaccagaacagaatggcttattgaaaggaaaaac

SEQ ID NO: 170881 - DNA, 420 bp, Glycine max
  unsure (1)..(420): unsure at all n locations
nggagttgtgccaactttcagcaacagacttagttgttaaagcacataaaagactcaatatggtagagttggtctaagatttgagtgataaaaggaaacaaaggataagaaaagggttttggatctttttggcagaggatcttcagagcactgaggctagatctaacgatgagaaaatgaaaagagatctaaatttcagttaaagagatctaaaaagaaaaggcaatgcggtgaaatcacaagagacatttgattttggttagaatgattgtagatgaaaaggcaatgcggtgaaatggctcgttagggattangaagagagagcaacatcgtaataaggcgttataatgatttccgcttttgagagaataaataattcttttaaatttaccaaagtataacttatctctttttcaatgc

SEQ ID NO: 170882 - DNA, 399 bp, Glycine max
  unsure (1)..(399): unsure at all n locations
gtagctacacactccttataatagctaagctcatcccctctacanaaaacatgaaaatacacaaaatagtccttactacatagactactcaaaatgccccgaaatacaaggctaaaaccctatactactagaatggccaaaatacaaggcccagacgaaggaaatacctattcaaatatttacaaagataagcgggctcatacttagcccatgggctcgaaatctaccctaaggctcatgagaaccctatggccttcccttggatctctagcccaatctacttggaagtttctacccaatgcccttgcggcgtaggattgcatcacatagcatgcccgttggcgtgtcgttccaaacagtctcatggacttcctcaactgtggtccgctcatgaaaaac

SEQ ID NO: 170883 - DNA, 247 bp, Glycine max
  unsure (1)..(247): unsure at all n locations
aaaccaactcncaaggtttaagtcaagacctcacccatttaaatttaacccggccacaaaaaataaagtatctacctcacaaagccatctacttcctacactcaaataaagctatatctaatgcacatcccatcagagcgtggcgtacccggcctaaacatgaagtcctcaagtcatcacctatcatatgctccccgacacaagtgcaagatcatcaaagatccaacaagacaataaccggaggagt

SEQ ID NO: 170884 - DNA, 416 bp, Glycine max
gacctataaaactcagctttccaattctccttttcaaacgttttcttttgtataaacaaagtgtgctatatcttcttattctcttcttcctttgccacacagaattcaacaaggactaatcgcctgaattctctctgcgcctctcttcttcctttaccaaacgaacaaaggactcaacgcctgagatatcttctgtctctcccttcacaaagattcaaaggactaaccgcctaagaactttgtcttaacacattggagggtgcatcctttgtggtacaagtatacggtacatctacttgggttgttgtaactgagaacaagagagggtacatctcttgtggatcagttcaagtggaaggtacatccacttgattgttcaaagagaacaacggacggcacattccttgtggatcttt

SEQ ID NO: 170885 - DNA, 78 bp, Glycine max
gggggttttttttttcaaagaagcgtagtagtagtataaacctcacttccacaattatttgggacttagctcattcag

SEQ ID NO: 170886 - DNA, 437 bp, Glycine max
  unsure (1)..(437): unsure at all n locations
tgtccatggtttagacatgattggtacatgatttgggacttgtaggattcaattcgnggaaaattggatgagggaaaaagtggttttcgaaatctgcactttatgcagaattttgtataagtgcagaaaaatgcttgtgtatggctggttgtgaaaagggtagtacatatggggttctggacattttctagcagatcccaacggtcaaaatgtagacttatgtactagagacttccagtaaaattttcgagtcgatccaacggttaacaaattggaacgaagaaaatgttactggggtatttgtatgtgaaaagttgtgactttgagttgtgttctgggcagagtttctgcctttgccctggcttgcttggttttgttagtccatgatgattggatgtggaattaactggatgttgtggaagcttgggaggattgat

SEQ ID NO: 170887 - DNA, 290 bp, Glycine max
aaatgggggaaaattttcttggttgactctcatcgtaggtttttaccacgcgattatgcatttatgaggaacaaaaatgctttcaaataaagggaagtatataaggatgagccacgacctatgtggacatctacacaagtttgacgtagggttacggatttgcccaaaatcatataaacttggttgccaccaccaacagttcacatatatggtgagtgacctcattggacaaaagaacattttttgaatcttccgtattgaaagatacatttttggacacaatctctatg

SEQ ID NO: 170888 - DNA, 219 bp, Glycine max
tccacacagaaaacccatgacactaccacaaatgtcaaatgatgctctctaggtgcaacccacacaccttaaattcctacactcagcaaacaggtcataagttcaacaaaacacgaactttttttcccctaaccctacatactaaaaatgaggtttcaaggtctaggtttaacactaaagagtacttatgctgagctgaaacttactgttctagtaccc

SEQ ID NO: 170889 - DNA, 419 bp, Glycine max
  unsure (1)..(419): unsure at all n locations
cctccatatatctttccagaactggagtcttaacccatcacccaccttccatctnaaattattaatgatgttgttgctgtgatgttggtgaaaaacagacctcaagtccttccaccattgagagaaatgagcactgtccctaccagaacatagggtattccaccctccatatttagataacaagactctagcccagagctgatnttggttgtttgccaattcccagccccatttaccaagcaaggcttcattgaacttggataggtctttaatccctagcccccctttgctcttgggaagacacacagtgtcccaacttacccatgcaatcctggctgcctcagcacctcgtccacatagaaaattcctctggatagatactaccttatggaccacttttttggngaatttaaagaaag

SEQ ID NO: 170890 - DNA, 404 bp, Glycine max
  unsure (1)..(404): unsure at all n locations
ctttaatggggatctttcaccatggagatgcagcggaagacaaacgaaaatatgtgagaggaggcgccntccattaaggaataagccatggaagaaggagctctccacaccaagattaagccttggattaaaagctaggagaagatgcttcaatggatgacaagaaagatggagagaataagagaggggggagcacgaaattgaaggaataaaagaggtatataagtggaaccttgaagtatgtctcacaagactctcattcttaaagttcaacaagtgtacacatgcttctatttatgactaggtagctatcttagaagctttttgagaaacttcttgagaacttctttgaaaaacttcttagaactaagcttactccacccccttatactaactcacctctc

SEQ ID NO: 170891 - DNA, 332 bp, Glycine max
  unsure (1)..(332): unsure at all n locations
caagatcacatcaacagacagtttcatgtagaaaaggccagcgaaacctgcaaaaaccaccaaaacacagcttctacaatacaaaaccccagaaacatttncctcggtccaattcgntaaccggcggaacgactcgaaaactctactggaagtccctagcacttaagcctaaatagagaccggtgggatctactagcaaacatccagaactcattctgnactacaatttccacagccaatcacacacaagcattgttttgcacttgtgcaaaattctgctgcacaatttcacagcaaaaatctagacaaagtgcagatttcgaaaaccacac

SEQ ID NO: 170892 - DNA, 401 bp, Glycine max
  unsure (1)..(401): unsure at all n locations
agcttcacctacgatggtctctcttgatcttttatcttagttctcgagtattgcttgcgattacacatattgtattcctctcatgattatgagagactagaaaatttgctgttggggctcgatgcctaaatactctcgtgtaattattcctactatctattaaatgttatttaatctcattgttattgccttctttcatatattattgncatgtttacggatcgatcactcatatgcatgcgttatggcatgattgacattggaaaatgctttactacttaaaattgaatgaaggcttttcatgaactcatatccacatggaatgatgtttgttagctttgttttaaccctttctttgtccaaacacttggctaacttactaggaatatgaattagtaagt

SEQ ID NO: 170893 - DNA, 159 bp, Glycine max
aaaaccaccgcacacattttcacgcttcactttataaagagtaaaatcgacttacacagcaaaagatatgtgaataatccattaaaatataaaggcttggaaagggaaaaatacaactctacttaatttatgcaaagaagaaaatatcagtcccccccc

SEQ ID NO: 170894 - DNA, 359 bp, Glycine max
  unsure (1)..(359): unsure at all n locations
gacacaatcgaacatccgaggaagaagntattatcattgtgaatttctacgagcatccngtttcaattacgagcgtcttgatatactacgggacataatcggatatttgagtaaaaagatattgtcatttcaattttctaagagcttctattttcaatattgagtgtctcgatatattacgggaatcaatcggcatctgagttaagagatattgtcatttgaattagctacaagcatatgttctcagttacaagcgtctcgatataccacgggacacaatcgaacatccgagtaaaaagttattggaccttgaatttgcacagagcttcttgtttacagttcgagcgttccgaatatta

SEQ ID NO: 170895 - DNA, 433 bp, Glycine max
  unsure (1)..(433): unsure at all n locations
cttgagcanatncaaacgacaataacgtttcatcttgntgtctgtctgagncccgnaatatatcgagacgctcgaaattgantatcgaatgctctgatcaaattcaaacgacaataattntttactcggatttctgatttagtcctgtaatatatcgagtttctcgaaatcgaataccgaagctctgagcaaattcaaacgacaataactttttactcggatgtctgatagagtcccgtaatatatcgagttgctcgaaatggaattccgaagctctgagcaaattcaaacgacaataattttttactcggatgtctgattgagtccccgaatatatcgaggtgctcaaaatggaattccgaagctctgagcatattcaacgacaataattttttactcggatgtctgattgagtcccgtaatatatcgagtt

SEQ ID NO: 170896 - DNA, 345 bp, Glycine max
gcgagacacttatttacttgtcacataatcacttaaccgaaagcatacattatcacttaactaatcaaaacacacggtgagtatcaaaacaagaagctaaaaacgtcaaatgactcaaaacaaatacataacacattgaaaaaacatataatatgaaaaaatattgaatatcatacccgaaatcaacgacgtgtaggaactacgaacacggatagcaataataatccttgagaaactacaaatcagaaagctggacttcgacttcaaggacagtgatactaattacaaaggtgaaccatcaatgttcaaatagaaataacatactctatatatttcaagaacgaa

SEQ ID NO: 170897 - DNA, 340 bp, Glycine max
  unsure (1)..(340): unsure at all n locations
ccctcaattagtcaatatatttctagattaatggcttgagccacccagatagcaagtttcaaatattattacctaggaataagactatagaacaagatattattatcattagagtttatttcagattcagaaaaatattatgcaagataagaatatcaagatagacctgtttatcattgaagaaactaccaatgaaattagaaactgaagcattagaacttgcctcagttaaacatacaaggctgccagatggagtaagaggaccaacgacatcgagtgggggatcctntggagatgataagncagaactatcaaaaggtgatagcgagacacactcatc

SEQ ID NO: 170898 - DNA, 266 bp, Glycine max
  unsure (1)..(266): unsure at all n locations
agttattgtcatttgactgttcatagagcttncggtgtcattatgagtggctcgatatcctacgagactcaatcggacatccgtgtcaaaagttattgtcgcctgatattgctaagagctttcgtttcaattacgagcgtctcgaatattacgagactatatcggacatccgagtcacaagatattgccgttagacttttcttagagcttccgatttcaatttcgagcgtctcgatatattacagggctcaatcggacatcccagt

SEQ ID NO: 170899 - DNA, 385 bp, Glycine max
  unsure (1)..(385): unsure at all n locations
ttgagcaaattcaaacgacaataactgttgactcgaatgttcgattgtgtcccgnaagatatcgagacacttgnaattgaaaacggaagctctgagaaaaatcaaacgacaataactcttaactcggatgtccgattgcgccctttaatatatcgagacgctcgaaattgaaaacagaagctctcagaaaagtcaaacgacaataacttttaactcggaagtccgattgatgtcccgaatatatcgagaggctctgaatttgatacagaagctctgagcacattcaaacgacaataacttttcactcggatatccaattggagcccagaggatatctagacgctcgtaattgaaaatggaagctctgacaaaaatcaaacgacat

SEQ ID NO: 170900 - DNA, 395 bp, Glycine max
  unsure (1)..(395): unsure at all n locations
agcttggcaatgaaaaggtgaacaaaatcatatgtgttatagagcgcaatcgccacttgagactggccataaccaanagctccatcctctgaactgttttgggcttaaacaagaaccttgactcgatcacttgcaggtccaaaagaagtggcacttttctttcttccatttttgctgctagagcaagacaagccactgataacagctgcagaggccatgctttatctggctgcacaagcatgccactttgttaaaaaacaaaaattgcatgttatatttcaccaaataaaccaatttgaattcaagtaataccgtcaagtgtgtgacaagagaaaacgattgaagtaatctacagatagatatgctgtctcgggtttgacaacgtagtaagcatg

SEQ ID NO: 170901 - DNA, 346 bp, Glycine max
  unsure (1)..(346): unsure at all n locations
agctcgagctggaaagactcaagagtcaagagagatttattttcatanncctgntagnaatctaatgtggtatcatgtactggaggattcattatccaactacattaacatcaatagttcagctacagctacatatatcgngnttatttttctctttttctaatcaacgtcatgggggtatcatttctcctgatgggactgaattatttattaggtatagagcaagtttcactggtatagatgatccatatgaaccaccgagtagttgagaagtagagatttgnagctttgagcctggaggcattatttccttaccatttttacacatgctaaataatgcctcaat

SEQ ID NO: 170902 - DNA, 394 bp, Glycine max
  unsure (1)..(394): unsure at all n locations
agcaagctgtancaaattctaacgacaattacatctctctcttaagtcctatcgagacccgtaatatatctggacgctggaactttaaaaccgaagctcgtagcaaattctaacgacaataacatttcactcggaagtctgattgagtcccgtaatatatcgtgacgctcgaattttaaaaccgaagctcgtagcaaagtcgaacgacaataacatttcactcggaagacctattgagtcccgtaaaatatcgagacgctcgaatttaaaaccgaagctcgcagctaattctaacgacaataactattcactcggaagtccgactgagtcccgtaatatatcgagacgctcggaatattaaatcgaagctcggagtaaatctaacaacataact

SEQ ID NO: 170903 - DNA, 335 bp, Glycine max
  unsure (1)..(335): unsure at all n locations
gaactatgaaactcagctntggnttaaattncgagcgnctcgatatattacaggtctcaatcggactnccgagagaaaagttattgtcgttagaattagctgcgagcttcagttttaaatttcgagcgtctcgatatattacaggactcaatcggacttccgagagaaatgttattgtcgttcgaatttgctacgagcttctgtttttaatttcgagcgtctcgatatgttacgggactcaatcggacttccgagagaaatagtattgtcgttagcatttgctgagagcttcagttttaaaattcgagcgtctcgatatattacaggactcaatc

SEQ ID NO: 170904 - DNA, 408 bp, Glycine max
  unsure (1)..(408): unsure at all n locations
agcttgtatgagtactgggatatatcaataaattatgtgctagctgctctcaccactagatttctaagcaactccttcttcaatatttctatgagggacttancaacatggagaggagtatgattgatgctgccaatggtggagcactaggtgatatgacccctgctgaggctaggaatttgattgagaagatggcttccaactcccaacaattcaatgcaagaaataatgctattgttcttagaggagtccatgaagtggccacagattgatcttcatctactgaaaataaaaagctttgaaggaaacttgatgccttggtcaaccttgtaactcagcttgccatgaatcataaatctacacctgttgcaagagtctatggtctatgttcttctgcagatcacatac

SEQ ID NO: 170905 - DNA, 356 bp, Glycine max
  unsure (1)..(356): unsure at all n locations
tgatgtgagatagagtggaagattcagncttcctacttttgtttgnngaccatagagcggnacctggagatatgtcgcgggggtcatgagatcttggggatgtcaagtggggtgctattagccaaaaccaagcttgaccaatcccgacctaacccgggcatagtcagncagagagaacctgagacgtacctaaacaggtgagctcttggcagncaacccataaaagaactaagaccacaaagcaaagatgtttgagtggtggctggccagctatgaatcttgagtaggatctggaatttggcctctaggaatcgattaccaaaggagtagaatcaattacaaagcttaaaaatgga

SEQ ID NO: 170906 - DNA, 394 bp, Glycine max
agacttacctttacaaacacatatacacatttttccattaaagcatcacacggtactctatttgaaaatggatcttttactctgtgcctgcaaggactgctgacccttccacctgatagttcatcgcatcaaatagacaaaatatatcataagatataagtctcaaagttcataaatagagagagccacacagtcaaaataagcaaactaaccatgaatgcaaaaacaaatattgaaataaataataccactattatgtgtagtgcagctctccaacttttgtacctaactgaaggagacttgtcaatcacttgagagcctgtagcagatgcaatactgtaattaatgaagcttattgtgagaactgggtaaaacctatatgacagacattagt

SEQ ID NO: 170907 - DNA, 382 bp, Glycine max
  unsure (1)..(382): unsure at all n locations
nctatagctcttcttcatctatactaggtgctatctcagatcttnnatgnnngnagnctaagattttgcatacacctcccttcaagagaagagtgtagcttctctccattatttgaccaatgcttagaatattttcttttaagctgggaactagtaagacatcatggatgagtcgcatacctttatctagctccaccatgacagagcctttgccttttgattcaaccacacttncatttcccagncgaactttgactttgacagactcgncaatgcttttgaaaatagtctcatccttggccatgtgattgctacatccactatccaagtaccatgcttctcccttttcttttattgagtcttgagtggcatagaacgtaca

SEQ ID NO: 170908 - DNA, 475 bp, Glycine max
  unsure (1)..(475): unsure at all n locations
agtcacctgaggcatgcaagcttaaagtatgcccgagtcattcatccctatgagatgttgttgaagtattggcgatcagaattgccattccttggattatagggttgaaccaagctcatgcttttacaaaaaggttcatcaagtcaagttgaaatatggaagtaaccgtcttgcaaaattggggcaaaagatgaatcgagtcacatcactgcttcatctactgccaaacatatctaggattattgatgtccttgttacttccagtttcaccttgacaaagatgtcatggaccatgttgaaaatctaaattgattcaaccccatatcttgcgtaaaaattcgcaatacttcaattgtacatcattcgcatngcatccatgctttctattggtgcattgctcgttgcattctctccttgtaaaataaaataaaatgaacttaatcattgttatataaaagaaagggacacgctttac

SEQ ID NO: 170909 - DNA, 289 bp, Glycine max
  unsure (1)..(289): unsure at all n locations
taattgataagaaccttcggacattgccaccgnactgattaaaaacttaataagaagatcaacaaactaaggtagagctcataccttgttaactggcagcgtagaaagctttgagctttgagcacccatgactgttccaagatcagagtaaggttttctttgacccacagttccaacagcaatgtaaggttttcttcgactcttctttgataagaagttctgagggttccagtgagcggnttccgacagtattgaaatgaatgtggagcaatgtgggtgtcaaccgagc

SEQ ID NO: 170910 - DNA, 280 bp, Glycine max
taatgggcgctccttaaaccttcattacttgtcagggttaccttctcctgcattgttgacccttcattatactccatgtatatcctcacatgtctagtgctagaggctggtaacatgattccttagacgtttcaccgattaagctggactattaagctagatcttattatctatggttcaaattgcttgtgcttgtccttgaaacatgaagtgtgtccagtgtacgttcaatggagcatagactagtttccctggtgggtgaaacctaaccataaattct

SEQ ID NO: 170911 - DNA, 377 bp, Glycine max
  unsure (1)..(377): unsure at all n locations
tttttatatgttttatttatnnagctattttataccctcattcaattcttcaacttcatcctgaagtttaatatggtagatataaatgtttgaatggactataattattcttgaggtcctatatttttgtaaagaaattgtttcttttcatgatttcacttaaactttgatagttttgcctacatgatgcctaaaagattcatttcttgttacaaagttgatcccttcaggtctaagtgagtaactgttattgtgtgtgtcagcaaattaagagaaagatgaaaggaagagaaagccttaccataagggcatgcaagaaagatatgaaatggagagaaagaaactgaaggaatacaaaacaaaagttggatggggga

SEQ ID NO: 170912 - DNA, 375 bp, Glycine max
  unsure (1)..(375): unsure at all n locations
nncataattccttatatccgccatcctgtccctctcctgtctcgctntgnctaactgctctataagcactcctagccgaatagcttccatttggttctgctgtccatctccattggtcacttaaatctgggctgattgagatcccttcaatttcttgtatgaatgcgaccgccaactctatctcactatcaaacaacgacctcctccactggaaatgccattcccacccttcttctttgaaagctcctaatagctgaatgagatgatgtttttgagccgatatggagtacagtcttcgatatttcactgataattggctttctccatctatccacttgtcctcccagaatttgaacttatccccgcacccgacca

SEQ ID NO: 170913 - DNA, 382 bp, Glycine max
tgcttcaaatatacaagaaagaaactatttttggtgaatgatattggaagaagatgatgagaatgtcttctccaacctctaaaccctaaatctcttttttttcctaagctaagctctctttgctgctcacaactcattctctacctactatctactggttctctctgaaactctgccaacttcagtgttttaaaggatcttggactcttcaacttccgaagactcgctcagcgagcatgtctcactgagtgcaagttagtgaattctcacttagcgagcatgggcgcgttaagcgtgagaaaagacaacatcctcgctgggtgggctggctgcacgctgggcgtgcaaatctctagcttgtcctcttttagggtctcccatc

SEQ ID NO: 170914 - DNA, 213 bp, Glycine max
  unsure (1)..(213): unsure at all n locations
gactcactcagccgctgcttttggntttagcatgtaaacttctgttaatgatgatgcttaaagcacgttattttcagcagaactaattttaatagaattaattgtaaattattactccattcattctattataattatcatataagataaaaaatnatcttaaaataactattattntaatgctttagaggatcattaatcattattcttatt

SEQ ID NO: 170915 - DNA, 459 bp, Glycine max
agcttctgttttcaattacgtgcgtcttgattattactgtacgctatcggacatctgagtaaaaagttattgtcgttagaatatgctcagagcttctgttttcaattatgagcgccttgatatattacgggactcaatcggacatccgagttaaaagctattgtcggttgaattcgctcacagcttctgttttcaatttcgagcgtcttgatatactacaggacacaatcggacaccccagttaaaagttattgtcgtttgaatttgctcagagcttctgttttaattatcagcggttttatatattactggacttaatcggacattcgagtcaatagttattgtcgtatgaagtagctcaatgcttctgttttcaattacgagcggctcgatatattacgggactcaatcggacatctagtaaatagttatgtcgttgaatatctcacgctttggttt

SEQ ID NO: 170916 - DNA, 341 bp, Glycine max
  unsure (1)..(341): unsure at all n locations
ntgagcanatncaaacgacaataactcttgactcggatgtcctattgtgtcccgnannatatcgagacgctcgaaattgaaaactgaagctctgagaaaaatcaaacgacaataactttttactcggatgtccgattgagtcccgtaatatatcgagacgctcgtaatagaaaacagaagctctgagcaaattcaaacgacaataacttttgactcggatgtccgattgagtcccgtaatatatcgagacgctcngaattgaaaacagaagctctgagcaaattcaaacgacaataacttttaactcgggagtccgacagagcnccagtgtatatcgagac

SEQ ID NO: 170917 - DNA, 455 bp, Glycine max
  unsure (1)..(455): unsure at all n locations
agctcgtatatcttacactgagtcatctattatactaatcaacatcactgcttgcatcaccaatgctgctgacaaaatgaacaacacgggcactcttctatgtcatatttcggctccaacaaagaagataaacagctcaccacaacatggatgtaaaataatgtctctactcaagataatggtcacctttcccagaaaccaatgtttagaaataacgaaggactaattacacaattaataaacaggagtgttttcggtacatacgcaaacctgaaccaaacacaatngtgtatggcgcctgtttgtatgtgtaccgcgtgcactttactaagatatactaaacgtctgctgagtccaaatagcaactcgtggttgccttgaattaaccttgtaacaggttcttggtcactcatcattggtttccttatgctatataacaaaagatgcaacctaac

SEQ ID NO: 170918 - DNA, 324 bp, Glycine max
  unsure (1)..(324): unsure at all n locations
aaanatggcatatattagctactatgactnaatacttggatactacgattaagccaaagatgaaacgactgatctattatgtgatcctgaatattacgagccctgcgagagtgctctctctacctctatgatcgtcacctcgcagatttctacatgggtatattctctctctctttaatttgaatttgagcttcaactctcaatctatctatgattaagccaattcactttttggagatcaataagagctatatatcgccccagcaagagactattattaaaaatcacgatgaaaagacaagctaaatcagcctttatagcatt

SEQ ID NO: 170919 - DNA, 323 bp, Glycine max
agcttacaagttcaaggacggccaagttacttgtttcatatatgtccaccacagatcttactcgtctaggagtaaactctggagatgatagtactcgaacttgacgatgcggcggaggtggaagaggtacaactgcggcttcttcctcatcttcttcatgaggaaggtgagcgggtataagaaacgtcttctccacttgttcttcataccaactctatgaagcatattcatcaacgttaacatctcgactgatgacgagtttcttagtatgcaagttggagacacggcagcccttaagatattgctatacccaaggaagatac

SEQ ID NO: 170920 - DNA, 316 bp, Glycine max
  unsure (1)..(316): unsure at all n locations
aggaagtgactntatggagggaattactagtaatatctgcttttgatgncnnnnnagngacctttnagattgattctgagtcnttaatcgcctaaaaaaatgatncattgcaagaaaaatgctaagttgcttagctggaaaatgctctggaagcatccgatccatagtcaagccccctgagcgacctgtaatagcttcttatggagagagcttctctgattccccttcattcgttgcatattctttgaatctaaggaaagttctctgatgcaagcctttatccctaaaatctattcagctagctctaattattttg

SEQ ID NO: 170921 - DNA, 351 bp, Glycine max
tagcttataccgacatgtgagcctgtatctatatgatgtcactctccatgtgcagaagattgggagagttggaaataatgcccacttgaatgactttacaattagctgacagctccattaccaggtcatatagagtaatagaagatgtttagtgcaaagtaaaacatcttttcttcccgacagactttgtgggaatggatatctctgaatatactgacatccctgtaatattgggaaggccattcatgctgattggaggctgcatagttgatatggggaagaggaagctatagctatgatttgaagatcacaaaattgattttgatttatatgtgaagacaagcctacttc

SEQ ID NO: 170922 - DNA, 368 bp, Glycine max
  unsure (1)..(368): unsure at all n locations
agcaactgtgtagcccatcatnnttcatagnagaacactgttaatgtgtctactatcatagntatcatctcccatttcgtcattgggggcgccacctgagatgccagatctctccacctttgggcgtattctttgaaagattcatgctccttttttgcacatattttagagttgcatcctatccggagccatatcagaattgtactgatactgcctaacgaatgcaaccattaagtccttccaagaatggactcgagaaggttccaagttagtgtaccaagtaacagctaccctagtaagactttcttgggagaaatgtatcggagggttctcatcctttgtgtatgcccncatcctccgacaataca

SEQ ID NO: 170923 - DNA, 293 bp, Glycine max
ttaattgctgagtttctaaggagtgaacacatatttatagatgtttttatttgttgatactacaacgttttgagaataggaactgtaaatgagatgtacatgcaatcttacctattaagccaccttattatactcaggctacaagctttatcgttaacgagaagtaatagtctggcctaaaggttaaaaatttactaaacatgtttttctaatatttaattttaccaaactgtagcaaccttagagataattttaagatgttgctagctttataaaaatattattaagcccgt

SEQ ID NO: 170924 - DNA, 351 bp, Glycine max
ctactcttcaaacaaaaatagcatacaacctcctccaataaacacaaacatcaatgttaatgtaaagcaaactcatgcacatacttctttacgaacgttcacttgcacaagacattcttataactaagaataatgcacctatgtgaaatcaaggcaccttcgctacctagattatttatatgtacttccaaggcatattttgtacctacatctcatgcactttcttggctaatattacttacatgagtactcaaagcatttgggataccaaaaattgcacatgtgcacattccggtatatctaatatttatgtctatacaaactctgagatgatacttgctatctacacat

SEQ ID NO: 170925 - DNA, 252 bp, Glycine max
  unsure (1)..(252): unsure at all n locations
cangaggccaatggggggaaaagagctctggaagcagcatgatgatcctcttttgcagagatacctaagntttagaatctcattattggtagggggtcttctggaatggctggctaaacacccttgntgagaattcctaaagaacaattgatgtaattactttaatatctaattgactgtgtttcttgagttcaatgcttcttttagtgcttaaatcttcgatgctcttggcctgatcacccatttgtgtgc

SEQ ID NO: 170926 - DNA, 373 bp, Glycine max
ctgcagctgtagagtaccccaattccgttgttatatgctaaacttgatcccatatctacgtgataattcaatgggtgccataaccctagccaaggttcatcaacctccatttctccgagaatacgactcgaacgcaacgtgtgcttgtcacggagaagccccggggcgttccattgagcattgtagggctctgaagcgtaggtgcaaggtctaattgatacgggctggctgaaatttgaggagaatcgctttttgaatcctaacattaacaagcaacaccatacatggggcaattctggaagctgttgttatgactcatcacgattttaatgttatgccataaaccacagatacaatggtcaatgatatagat

SEQ ID NO: 170927 - DNA, 307 bp, Glycine max
  unsure (1)..(307): unsure at all n locations
gaaaatcgctaatttctttgatgcantgatgnctggactccccactcacaaagaagattttgctgggtactcttttcttctactataactaattattcaaaagnttatctagatccgccattattgcagagggattttgtttttcaaaatttttcttgatcctattttcagatgtattataatctcctgcttgccttgctctagaatgtggaattcaaacagntattaatgaatcagtatcttaaatgatattattttctgcacacatgggcattgaatagcattgatgtcaagcatgtaactttaa

SEQ ID NO: 170928 - DNA, 374 bp, Glycine max
tgcactagctgaaattcataactttcacctagagcaaaacgccacatgaaaactagacctcccagcaacatgtcatcccgatggagaatcacccaccttaatggtcaatcctcacaacatagcacaacacacacaccttattttaaaatgttgtggcccaaaaaaaccaactttcctccacaatccgcaacacaacaacacgcccagaaacacaaacagggaggcatttcgcaccttcattgaaacactggaggctaagatatcaaacatgcgttcaacaaaaccaaccctccttagacttactaatagatggacaggggctaacgtaaatcaaaccgccataattgaaaaaacctccatctgcctacccaaaa

SEQ ID NO: 170929 - DNA, 370 bp, Glycine max
  unsure (1)..(370): unsure at all n locations
cagcatatttaaaaccaaaactaatccgcagatcccccatttatgactaatgttcaattctacttcattcaagttctaaagcaacagtacatttcccaatgctaaagtcacctaaccaggcacacaaatggttgatcagaccaagagcatacagaatttaagcactgaaagaagcattgaacacaagacacacaatcaattagatattaaagtaattacatcagntggtctttagaaatacccaacaaaggagtttagccaaccattacagaaaaaccctaataataataatgagattaccaaacctaagtatctcttcaaaagctgctcctcttgctgcctccagagctctttctccgaaataggcact

SEQ ID NO: 170930 - DNA, 265 bp, Glycine max
aacgggcaacaaagatcacaccagcccgtgagcactcgcgacatgaccacaagatccaaccagcccgagagtcgctattgcgcagaaccaaagtagtcacccaaaactaaagatcacaaccagctcggaatccccgtcctggagaaaatacctggtgcactctaacacagttcctaaattcataggtggaccagacatagaacgacactgaaacacctacctatctaaatttgcaggggcagactatatcgacccaaagggaaag

SEQ ID NO: 170931 - DNA, 419 bp, Glycine max
  unsure (1)..(419): unsure at all n locations
agctncacttgctaagctcccaacatggcatatctttggctaagcgtagcctacccttggctaagcgcanatccatgcggctgaccttaggcttaacgggctcctctccagctaagccaattttgcagacactacaccatagaaatttccgctaagcggcacacctgtgtcgctaaactcaatgttgttatgtgtgaaacccgctaagtgacccatgtttcgccaagcgggggtgtgcctttatacataatgccgctaagcgataattgtctcgctaagcggccattgattattttagagttattttctagtttttctctcttaattattaataaatagagtcctgatcaacagtgtgattcctttgtctgtagatgtcttcaaggaaaagaaagagcgtcagttcaaggcccactact

SEQ ID NO: 170932 - DNA, 364 bp, Glycine max
  unsure (1)..(364): unsure at all n locations
tttagaagctntgggattaatctcaagctttcttattcaagcttcttatgccatacccaatgatgctctttagataaagagnaagcatgacaccttttgattggacaaatcacagtgtagagttgtacttgctctagatgatacacatatccttggtaaaggagagattgtatccactatcacataattgacttatgctcaacagattgagcttcaatcccttaacaagtaaaaattatctatagaaagatatggagagatgcatactttacctacaccagttatcaaacccttctgattccctctgaaagtgaccaccccaccagacatatgtcttatggattggaacatagactttttgcct

SEQ ID NO: 170933 - DNA, 438 bp, Glycine max
  unsure (1)..(438): unsure at all n locations
tgaagatnatcttgaagatatntagtctgttacatgcctttctccttagagtggcattnatatatggttttatatagaatggtgcatcttagttcatatcatatctgtagagtgtcatgcatcatcacaagtaagtgagaattttttttcctgaagttagaaaatctcttcaaaaggcaaaactctctattttaattgaatacagncatatcngaatcgattacacaagttgtcttaaccttgcatagctatgtcatgtatcggnttaatcaattacagncatattagaatcaattacacaattgtttttgagacaatgactaatttattctggagtctctgctttaatcaattaccatgtgatataatcaattacttctatttctataagagttncataagtgaaccagaatactttaatagattactttgagtacc

SEQ ID NO: 170934 - DNA, 303 bp, Glycine max
  unsure (1)..(303): unsure at all n locations
atgattgattcatgatttgtgacttgtaagatttgatttgggcaagattggatgaggggaagtgtggttttcgaaatctgcantttgtgcagatntttgctgcgaaattgtgcagcaggattttgcacaagtgcagaaaaatactatgcatttgctggttgtggaaagagcagcgcaaaatgagttctggatgtttgctagtagatcccaacggtcaaaatgtaggcttatgtactagagacttccagtaaaaatttggagtcgatccaacggttaacgaattggaacgaacgaattgttact

SEQ ID NO: 170935 - DNA, 424 bp, Glycine max
  unsure (1)..(424): unsure at all n locations
atgaatcgattaaaccaatacaagacataactctgcatgcttaaaacaatnagaggaatcgattacgataaggctntaattgattaaaacagagagtggtgccttctgaagaaattttcttctcactcacacatgatgatgcatgatgcacaaatgatatgatatagactaagatgcaacattcaatataacaaccaatacaaatgccactcaagagagtaggacatgtaaaagacaaaacttcttcaagctcttcttcaagcttcaagattaagtcttcatgttgctcatgttgctccccctatctctaacacctccaaagtcgcacttttgtttcaatagcttcacattctcatcgctgcttcctctaattcccttctcaaaagcctaagtcgntgcagctctcaccatggcagntatgtgc

SEQ ID NO: 170936 - DNA, 373 bp, Glycine max
  unsure (1)..(373): unsure at all n locations
agcttataactgtanattagtactattttttttactaatacttgaatgtacatgtaatagaggaactatgtcggtctgattgattactataacatatgatacacttatggctaggtataaaattcatgtatgacctttgagtactatgataagcaaagctttatccttatatgcccaaatggatatgggtaggtcattgatcatatctaatgggcaccttttctttaaatgctgcaagggtcgtgctctttgtcatctactactcagagtcgtttatatagctaggtgagttaggcaattgccttatgcctactgaagtaatattaaaataaatatacttcacatctctttacaaactatcaatgaatatctc

SEQ ID NO: 170937 - DNA, 394 bp, Glycine max
  unsure (1)..(394): unsure at all n locations
gttctttctcaatcaatctatctactgactaacaattctttctgcnngcncacatncttgggctttctttgtctaacatacacacttgctcaaactcatgaaaagaaacacaaacgccatcaaaatcatgcattcaattcaaaataaagacatacacccattttcacaaaaagataaaagtgcttcactaccatgtcatcaaagtcaagtcaaactattcaaaaagctttagaataagccaaccaactacccataaacaaaactaacaaaaaagagtttctatactaaaaccataattaanataataataaaccaaaaagcaaaaagtggcatcaagaatcaacaatgncaacatgtgctaaactggggaattagtgagatagcacagcttctc

SEQ ID NO: 170938 - DNA, 289 bp, Glycine max
  unsure (1)..(289): unsure at all n locations
ctagaaactcaacccgtagagccctgaatnnngaagcagcatacgacagcatctttttgcatctacagacatncnctaagccttgataccttaaggaaatcaagatctgaatgacagtacttgtttccactttatcgctatgtgcatagcgcttttcaatttcaacaaagaattgtttggcactaagtattatcatcgatacagtgcccctaaagacctcatgaatgccacgctcaatgatcatcagactgttgcgattggagcgatcccacttctcaagaatcatact

SEQ ID NO: 170939 - DNA, 366 bp, Glycine max
  unsure (1)..(366): unsure at all n locations
agctntagcaattaatacaatggttatttttcactagttataagatgttaagttataaattggaagattttaactgatttattaatgattcagtgggtgtgcctagaatctttgctgtcaattccttcatgtgctttcaagaatgggtgttaattggaggaaaaccctacattcttctcagatgacactctaaaatgcatttttggtgatcttgttgagaggtaagtagcaggatgatctatacgcaattgtgcatgcatgcaagtgttgtacagataggcttatttgtgaattacaccacagacatgatgaatatccttaatttgtttcaatgccatgggtattctttacatatgttggccatat

SEQ ID NO: 170940 - DNA, 374 bp, Glycine max
  unsure (1)..(374): unsure at all n locations
tagcacaagtgcattacacagagcctgcttcagttgatttaatcttgnncagcgncagcattccagagaaaggagtctttagttaagagatctgtgatgggagctgcgagtgatgaatatccttttatgaaccttctgtaaaatcccgacaaccctatgaagcctcgtaaggctcgagtggatcggggaacaggccaattctggacttgctcaatcttagctgacactggttccactccccggcaagacgcaatgtgaccaagatattccacctgagaagttgcaaaagaacactttgaaagcttaaaaaaaaattagtgcaagctaaagatttcaaaagcctttgcaaggagctccaagtgttctgggaatga

SEQ ID NO: 170941 - DNA, 433 bp, Glycine max
  unsure (1)..(433): unsure at all n locations
agcttgaaagaagaagaaagtgtttctgcatcaacttcttttattatgtttccaacaacatagataatcgacaaagccatcaaagtcactgtgttgctgtgccatcggaggtgagggcgtcttttgatgagtgtttatgtgggtgagggaagaatggttacattgagagaaaaatgagaagagagaacaccctttaatgaggaattttacatcacttataatataatggatgtagaacaatggtctctacatcggttataattataaccaatgcaaaaagttgaaaaatatgccaatgtcaacataagcatacatgtangcttggatgtaggttcggccccaagccaaaagttacatgagtgaaaaatnttgtaggaacgagatttaaacattttgattttacaggaacaaaaatatatttaacctaaatatt

SEQ ID NO: 170942 - DNA, 437 bp, Glycine max
  unsure (1)..(437): unsure at all n locations
tcagcaatcacattaatgtacacattttataaaatgaatttaaaagagattaaaatgcatgtntattcataatagattttaaggagtcataatttctctctaaatcaaatacagcataagtgtatgttaatttattttatttaaaacttggttagaaatacttcaagatatataatataagattcatcataacatgtatagnatgagaaaaatataataattgaaattaaaataatgtattgaaaacaattgatctaaaaataaaaattataagattttaaaattaattaaaaattatgattataattatctcaaaatatatttatcaataaaataaaataaatatttttttttataaaatatcttataaacatattcatatttatcatttatatttagnagntactttaatatataattntactaaatatttatat

SEQ ID NO: 170943 - DNA, 333 bp, Glycine max
actttttctacttttgtttgagactcacagggaatctcaacactctatacatcacttccctttctgttgttttaatctctgcttccacaattaattttacgatggatatccagctcctatatatgtagcaagagctacaatgataccactcttattggacatctctttcttgttctaagactggatgtacagaccatttatgtattcatcatatctgtatatgcatggaattcatataaatgtgacattagctaccctatacccatcaaattgatggctgacaaagaaaatgtacacaaccctattttctcctaaattttataatgatcgcct

SEQ ID NO: 170944 - DNA, 318 bp, Glycine max
  unsure (1)..(318): unsure at all n locations
ctacctgctcttcaactttgaaagactgcaagtttcccgagtacctcatgcttgaccctgagggaactgagtctgaaggatgttcacttatgaaagtttgcccatatacatattgntctcttaatggccatggncatggtcattctcctttgcctncattgaagagcttcatgtcagcaaagaggcatcttttggagactcagaagaatataaaggcggaagttgcgatccctcaaatatggaaagagcccccctgagatacaaaaaaagactcttatagagagcagattgtctttcatggaaaacctgcatgtgatg

SEQ ID NO: 170945 - DNA, 424 bp, Glycine max
  unsure (1)..(424): unsure at all n locations
gcttgtcgagaagtctgaaacggtaaggtttttatgaaaactctctgttttaatgtcaacgcctctgattaattaattggttaactatgcccatataatattgttatatatgcaagttgaattaagtcaaaaactagcaactagcttaaatagctatgagctatgcattatagggtctagtaaatgaaaacaaagggaggggaaaacaacgatagattaagaaccagtatagagtgtgaaagcttgaaaaggagccaatttaactatacaatatgcttgaatgcttgaggatgtaaattatatntgagtaaattaatttgaacactgcagtttactttcacactctcacaattagaanaatagatgttgaacaatataagactaaacttataattatatgtaataactttctgtctattgacta

SEQ ID NO: 170946 - DNA, 350 bp, Glycine max
  unsure (1)..(350): unsure at all n locations
gttgaatactnactactcccatgcatgtggaagcttctttggctaggtatagnaacaagcaaggcaatgatacaaatcttctagaatgccatatttttattattaattaagactagatcaatcttacattaattgaatttaccgaggagatcatgtgcgngtatttgagagatctagctagagaatgttttataccaaactgaatgatcaaagagtttaagtaatatccaatagattagttttatctttaatatagtcatccctagactttattctatcattagncttacattgatatattaatgatcagaggaatatcgattaacacaaaagcatctatttattgaccc

SEQ ID NO: 170947 - DNA, 404 bp, Glycine max
gctgttgttctccattgcgctaaagatctttatatctcgccttttggttgttcatctccaacttacctaggtacgttttgtgtacatgtgttagtttcgagaacccgtggttaacccacataggttttttggtttctgctgccagtgtcgtggtgacctgatgtatgtttcactgccagtgccatagtgacctaatgtacatttcactgccagtgtcgctaccattgtcgctgatgggttcgaggtaagaatgatgtcttcattgtctaatagtcagtgtatttttctcttaattagtcgctggataggtttgttcactggaatctcttaattagtcacaggatttttctgattttgcttcctgctagttttgtggcttctgctgacagagtcgtggtgacctg

SEQ ID NO: 170948 - DNA, 402 bp, Glycine max
  unsure (1)..(402): unsure at all n locations
ctcagctctaacctttcaagatgaagctagatacccttgtttataagggnctccatatcttaagaagagggaaaggtgaatcaatatcacaacttttcctaataaaaaatctattttgatttaacccaaatcccaagattcctttcaaaatgaactcctaaataattatgcaaattaatcttactgaatagaagcaataagcaataatcaataaaagagtttaaaggaagaaagattgcaaactcagatttatactggttcggccacacccttgagcctacgtccagtccccaagcaagccgcttaagagttccactatcttgcaaaagccctttacaagttttgaaccacacaaagacaacccttccattgagttcagattgctttacaacaagagaccct

SEQ ID NO: 170949 - DNA, 367 bp, Glycine max
agcttatcacttatcgtggtggaatccgttctgtttcctgatgattcgaacactaaacagccaacaacacaaaatcggtggtgaacatatcaacgaaggggtgtcaatagcaattcaaatctacgcccttccgacacattatgcaagacgggttgctcaaagaagacgaaactgggcggaaagctcctccacgctcttgtgaaaaatggtgtacagggcttccataatgcttccctcaaatattctaaaaccttgggtcaacataattcacttattattggcgacaggcatgagaatacaagatgaaaatctaatctaatatacttgcgtcaggcatccgtaactattctgtaagtacaaaaggggg

SEQ ID NO: 170950 - DNA, 237 bp, Glycine max
cactggtatttcttcccgcgatgcttcttttcatgttcgctgaagggccatagcctaaaccatactggcacagattccttgagtatttatcaagctagggatgccgccgttgtctcttgctaaacccatgccggggtcataaccgttccccaacatatctcgggccatcattaccgctgcatcggacagacaaagctgcccctagatggagtccacggaggaaatgctgaccacctc

SEQ ID NO: 170951 - DNA, 403 bp, Glycine max
agcctaaactcaaaaacaaagggggagaatatgtgtaattaagtgagtgattggcttggaaaaagaatgtgtatgtgtttcttgatttcaggtttgtcatcatcaaaaagggggagattgtataagcaagcttcatgatgatgaatcaagttgattcgagtagttttgatgataacaaagatgatgacaaaaagcccaagagaatgatttcaagattgagtcaacaagtttcaagaatcaacagaagtttgatttcaagattcaagataagatgaattcaagattcacgagaagaaatcaagaagacttcacaagggaagtattgaaaagtgttttcaaaaaacaaacgtagcacaatgtttgttttcaaaagtctgattatcagtttcctgtaatcgattac

SEQ ID NO: 170952 - DNA, 146 bp, Glycine max
  unsure (1)..(146): unsure at all n locations
cttagaaactaagctctaagataatgaataaaatgaaaatgatacacacattatcttatgtgacattnattatctcaaaagcatagnnaaagaagaaatggagatgatccaaacccatcatatataagctgaatatgaagaacatg

SEQ ID NO: 170953 - DNA, 278 bp, Glycine max
  unsure (1)..(278): unsure at all n locations
agtcacctgaggctgcggcgggatatactacaatattagcttttggttactaacatcagagtaaattgagcgcgttatataacctaagctcttctttaatagtgcccatgaactacacgtgtatccactcttctgttgcttctagagctgctcaatttctggacaaaatttgcttgcaatatcacgttcaagcaaaacggtgaaacttctgaatagttgaccattagtttttcttgccaaaagcactacagntcatgacatttatcattgctttatga

SEQ ID NO: 170954 - DNA, 391 bp, Glycine max
  unsure (1)..(391): unsure at all n locations
ctacaattctgcatacctgtctcctccaaaatatcaagagcatacttcctctgtgagatcacgacatcatcttctgattgagcaacctcaataccaagaaaatacttcagatatcccaaatctttggtctggaagtgactaaacaagtgttctttaagtggggcaatcttagtagtatcatttcctgttatcactatatcatcaacatatacaattagataaacatacttctcaggagatgtatgacaataaaaaacagaatgatcagcttcacttcatttcaacccaatatgtgtacggtatgactaaatntacccaaccacgctcgagggattgcttcaacccctagagagatcgatgttactacatacgagaatactgcccctgagca

SEQ ID NO: 170955 - DNA, 395 bp, Glycine max
  unsure (1)..(395): unsure at all n locations
tcaaccttaggagctcatttctgccccatatcgtgtttagtgatcatnnncagagncgagaagagcgtggctaccagtgggacttcnaaaattcaagtttgggtggacttctttctctcttaaatttcgtgggtatggggttttgggagatatgatgggtagctctgttagttttctgcttcatgatgattatttgtgaagactcttgttgaaagcttgtagaaattgccatgtttggatgagttaaacatacccattctgttttaaggcttttgagatgatgtttgagatgtttatatgctgaaattgctgatggaaatctgttagagacgaaaggtagaactaacctatggctagataatgagaatgtgatgttatgagtggaaaaagagcga

SEQ ID NO: 170956 - DNA, 346 bp, Glycine max
  unsure (1)..(346): unsure at all n locations
tgcangctngaagatgttcatgttaaatgatttttatcatatgagaatatnctgagacgaaacanacaagtactgtaacattgttggtccattggacgaaagaaactttagcgaattgattgaatcttatctctgctaagatagtgagtgtcattatattcgagcttactatgtaaacactctttaagtgattagaatccattttctatcatacatatattgtttgtgaaagccaagagtgacttaatgacaaagaatacttgagtcttaatctcaaggaagattaagcctagtaccaggagtgacctagagagtactcattgtagccaaaagtgacatagagaat

SEQ ID NO: 170957 - DNA, 400 bp, Glycine max
  unsure (1)..(400): unsure at all n locations
agggctatgatttttctaagntctgtaacaagcttatttctatatattnatccttcatttaataggctttgggctaggcgaccacaattaacaaagtactttcgacacctactatatgttgatttcaccaacgctgttatgggtatgttgcgacaatccttcaaaaccttatttatacattctgagatggtggntgncatgtggccatatcaacatccttctttatcataagtcatggtccatttttcctttgaaatacgatcaatccatgttgctatggctagactcagctgacgaaatgtttctaaattttgatcaaaaatatgtttgcaaggaatatagcctgcatgaaattagctagcaagaacaatcntaagtatatatgaaacttgaattagcg

SEQ ID NO: 170958 - DNA, 328 bp, Glycine max
cgcagcatgcaagcttgtgcaaatcaaatcactcctactatttatctctagcatgcatcgtatgatggccacgacctttgtcacgggaagccggaaggtccatatcaccttcttaattgaacacatggggcactgcgcccccaaatgcgcaagtaagaagagataattttctaggctctcgtgcccgcagaatgcattcatatcatgcataccataagcatctcttcataacaacataatggacatatcctgcatttgtccgttttcataatccagcctcacattttgcatgaggcatggcatcatcatgcatatgcgcacaacaaac

SEQ ID NO: 170959 - DNA, 298 bp, Glycine max
  unsure (1)..(298): unsure at all n locations
gaacagataatcgnggaaacaaaaccaaacccccatcattattactaacactnnncncgnactctcaatcaagctcagacaagacactcactattcgctacccattacaactctctcaactgcaatcaactctgcccctgccccgccgctcgaagagttttacctcgcttattattattattaataaacaaagctttcgtatcatcattcgagcatctcccatcttataaccaattctttgtatccccaacgactttagtttaaatccaatagacaagagaatttataatcaatgata

SEQ ID NO: 170960 - DNA, 349 bp, Glycine max
agcttgacgccatataagaggaacctattatggaatgtgatgacaacatgcttgcagcactgccccttagtgttgctggacagtgatggttgtgttgcccttcatatgttgtgatcacgattgttgggtcctggaatgatctctccacccttttctttacaccgaacttctgactcgcgcatctataatagctcctgaattatatataaagaatcaatgttacattcatacgtgaaatgtgcaattaattgatgagaagtatataacttcttgatgaactaatacattcttgggattgttgaatatatatacataagtgtaatattatggccattattactatatatat

SEQ ID NO: 170961 - DNA, 350 bp, Glycine max
  unsure (1)..(350): unsure at all n locations
cttntaatcagnnntataaagttatattagagtctctatactttatggnnnagaatcnaatcaatccttattctcctcattattctaaataaaaactaaatttcagcacctgcaatttgaaataatcggttcattgncatgtataaataaaagttcaatttcagcgtaatttataatcgnaggttctctgacatgtcaaatgagaattaatctgtaagcttagaatatattagncaaatatcatttttatcaaagnatctctgaatctttctaacccattttctgaagattaaataattcctcttaacatttggagagtccgcaagatattgattacgctnttttttatt

SEQ ID NO: 170962 - DNA, 372 bp, Glycine max
cttcttgggtagagatccttagtagctgagtttctaaagagtgaacaaattctaaagatgctataattgattatactacacgtttttataattggatctgaaaatgagaggtacatgaaatctaacctattaggccaccttaatatactctggctacaggctttatcgctaatgagaagtaatatcaaggcctaagggtaaaaaatttactaaacatgttgttttaattatttaattataccaactgtagcaactttaagaaaattttaagatgtagcaccttttaagaaaatatatgtaacgcccgtggagttctggactgtatcaccgtatcttctgcttcattaataattaactcggatttctcgaaca

SEQ ID NO: 170963 - DNA, 377 bp, Glycine max
  unsure (1)..(377): unsure at all n locations
nctngaagggaaatcccgtccaactaattttctatatcttcatacatatagactactttntatagcatcgnaaatggaaaatgctctggtcaatagnnnattatgaaagcatatctgctagttcacagttcattggagtagaggcactcatccacaagctggcagaagttgggattctccaaggcagcagcgactctttctttatcatttaactgcttattgactgcacgaagaagatttgcagtatttttagaagctcatattgcaagataaaaagaatccaaaagatagtgtagtttcccattgaagtagatgggcaaagtgaaaaggtgtcatgaataagtgagcatactagctntggagggtatatgatcata

SEQ ID NO: 170964 - DNA, 389 bp, Glycine max
  unsure (1)..(389): unsure at all n locations
agcttacagattggtataccatgctacagnttacttcttccaagctggctngaaagaaaaggaccaacaacttttcgtccgcagaatacgcccccatttttcggcaatacattcgaagatgccctttcggacatgtcgtccctttgtacttatcaaagtctggtactttgaacttgggagggatgacgatattgggtacgagacataagtccgctagatccgaaaatgggtaattgccgaggccctcgactgctctcaacctactcttaagcgcctgaatctttcccttatcttccacgaagggaacagattcntttacgggtgtgggtgaagtcgggatatggcggactatgtctggttggggtagttcatggggggaccgatctttg

SEQ ID NO: 170965 - DNA, 419 bp, Glycine max
atggaactcctaatatttctacactttttggggtgggccattcttgaatggtcttgattatctcagggtccacttggaccacatttctaccaactacaaaacctaagaaaactatattatctacacaaaaggtacacttctctatatttgcatagagggtgtttttcctaaagactgaaagaacttgtctgagatgtcctaagtgatcatctaggctcctactatacactaaaatatcatcaaaataaacaattacaaatctacctatgaaaatccttaagacatggtgcataagcctcataaaggtgctcggtgcattagtgagcccaaaaggcatcactagccattcatacaaacaaacttgttccgagagcagttccactcatcacctcttcatcctgattggagataaccacttt

SEQ ID NO: 170966 - DNA, 348 bp, Glycine max
  unsure (1)..(348): unsure at all n locations
caaccacttatgatagncgctgataatgccattgctacttcccctaagctccttatgctttcttcctactttattccacgctttatggattttctaaagtatcttcgcattggcttcaatgaaacctcgcgcgatgaaaggcatgatgattccctctaatggaatacctctcataaggtagcctaactgtcttatggccagcatgggattataattaatacaacccctcatccccatcaaagggacatttggggatccctcacatgagcataacactcctacccctncttctttccatcgagggaaccaactaatggacgctcccgtcatgcctagcaagagttcttc

SEQ ID NO: 170967 - DNA, 454 bp, Glycine max
ggatcttaagtcacctgcggcatgcaagcttcatccgcagatccctcatgtaagactctttctgatttagatagccctcttaggtttagactaacttaaactgagtttcttccgcagatccctcatgtaagactaaactcagctcaagtagcttacaaaagtttagcctaatttagcctaagcttcgtccgcagatccctcatgttagactagacctaaactaaacaacattattgtaatagcataattaaaaccaaaacttaacctacagattcctcatgtagggctaagtttcgatcctgcttcaatcaagttctaaggcaacagtacatttcccaatgctaaagtcacctaactgtgcacacaagtgggtgatcaaaccaaagcatacaaacattaacatcgaatgaagcttgaacatagaaacacattcatagatatatgttttacatcg

SEQ ID NO: 170968 - DNA, 212 bp, Glycine max
attaaacttgtcaactgatgacccataattcaccgataaaattgactctcaacccaaattaccctaaaatggtgttgtcatttgcattagtttcttctagcacaacaaccttttataagcctaatgcttcaagctagataactattaacttaaactaccatctaatggcttcagttcaaatcatttttcatataaataatttaccttaacta

SEQ ID NO: 170969 - DNA, 454 bp, Glycine max
  unsure (1)..(454): unsure at all n locations
ttaagtcacctgcagcatgcaagcttcactggctaagctcccaacatggcatatctcttggctagcgtaacctacccttggctaagcgcaaatccatgcggctgaccttatgcttagcgggctcctcgccagctaagccaattgtgcagacactataccatataaatttccgctaagcggcacacctgtgtcgctaagctcaatgttgtttatagtgaaacccgctaagtgacccatgtgtcgccaagcgggggtgtgcctctttacataatgccgctaagcgataattgtctcgctcagcggccattgtttatnttagtgtgatcatctagctattctcttcttaattttaatacactgagtgccgcatcaatggttgaatcctctgtctgtagatgtcttcacgaaaagaaaagcggcgtccaaggcccactactcatatgatacataagat

SEQ ID NO: 170970 - DNA, 341 bp, Glycine max
  unsure (1)..(341): unsure at all n locations
ctaagctatggaggcttnaaagctntgggattatgccaagttttctttccnagctncttatgccatacccaatgatgctcttttgataaagatgaagcatgacaccttttgattggacaaatcacagtgaagagttgnacttgtcctagatgatacacatatccttggtaaaggagagatagtatccactatcacataattgacttatgctcaacagattgagcttcaatcccttaacaaggaaaaattatctatagaaagatatggagagatgcatactttacctacaccagntatcaaacctttctgagttcctctgaaagggaccaccccaccagaca

SEQ ID NO: 170971 - DNA, 294 bp, Glycine max
  unsure (1)..(294): unsure at all n locations
cgctcgcctgtccgacgtancaggaatgatgtgttcttgttatggtgaggaacagtcaccaaccctgacagggtntaagcaaatacaacaacggcatgactaacctcataaacgcccaaggaaatcgtgggaagcatgggttaagctataaccccactcatgcagatataaaaagaacaatcgcgggaatgaagagcggcaatcaaaccccgcggacgagacaaaaacgtgaaggaagcccctcctgccacataagtagaagctttataagcgcgggcctgtgggacgaaggtc

SEQ ID NO: 170972 - DNA, 323 bp, Glycine max
  unsure (1)..(323): unsure at all n locations
gaaggggggcgcncganaanagaacgcacccccgagggagacacccaccacctccgagcagagncccacaagacgnctcatggcaccaagaggcaccacacagagatacacacgcccctattactacccacgcagcccccccgagaaacccccgcgacgaagccccctcagaagcctccccgagaaaacgcctagaaaagcctctgagagagagccccctagagacagcagagctcagccacacacaccccactaacaaccaagcccacctccctgagaagccccttgagaagactctagagaaccagagccaacacacatac

SEQ ID NO: 170973 - DNA, 408 bp, Glycine max
  unsure (1)..(408): unsure at all n locations
agcttcctcagtgccatttcctgcgattgttaatatttgtgaagctacgtttaccaagaaatgctattcttaaaacgaaaatggcatacaacctcccccaataacacaaacatcaatgttaatttagagcgaactcatgcacatacttcctttcgaacattcactcgcacaagatattctcctaactaaaaaaaatgcacccaggcacaaataaggcaccttcgttacctagatcacttatatgtacttccaaggtgtatatgctacctacatcacatgcactatctttgctaaatntacatacatgcatactcacagcatttggctaccaaaaattgcatacgtgcacactttggtattctaataactatacatatacaaacttgtgatgaatctggctatctacac

SEQ ID NO: 170974 - DNA, 391 bp, Glycine max
  unsure (1)..(391): unsure at all n locations
aggncatgagnagattntaactttgattgcactcattttctttcaaactcattaaaagatgactagcaaagtaaatgaccagntaaaactttattctacattgataaactgagattacggcataaacgatcggntgaaattctattttacattgataaagngagattaaagtgcaaatgatcgnttcaaattttattttacagagataaagtgagattagagcgcaaacgatcgaagaacggcatagaacggagtagaaatcagtcacagaagcgattcggaagcgcctcgacctcgttttttcttcttctttctccttcttttcaccaatttcactaagatccgctcaatatatgatgttgaacccctaccttcagccccttcatgccta

SEQ ID NO: 170975 - DNA, 392 bp, Glycine max
  unsure (1)..(392): unsure at all n locations
agctngagaatatctatgcatcaaagtcacttctattcgcctttgtttgaagatggagatgggaggagatctccatgaccacatcaacaaattcaatcggctggtaagtcaactgctgaatgcagatgataaactttctaatgaggagcaaacgctgttattgttggcctcactaccaaggtccttgaaagctttggttcaaactttacttgtgggaagatcaactttgaatttggatgaggtgactatcgctntatagaaaatgagagaatgatgagaactgaaaatgttgatgatgaacacaatacaatatctatggtggaatctgatcgagggatgaatcattcaaggagacatgatggttcaagaagaagatcaaaatcgtaatcgtg

SEQ ID NO: 170976 - DNA, 267 bp, Glycine max
  unsure (1)..(267): unsure at all n locations
agcaccttgctaannnnnaggggtgcacaaatgactctctttcatgttagnnnatacggatnttcttgagagttaagttgggcatgctgttgcaagacatggagctgaagggattaccaagaactcgtggtttactattctacaggagatactctatcaatttgttacagctgatattgtccacacaatgtcatccctttttttgcgcctacctttctccaggcgggatgctttattcactgtcactctttcttaccgattaatttt

SEQ ID NO: 170977 - DNA, 368 bp, Glycine max
  unsure (1)..(368): unsure at all n locations
agcttaagaacccaagctnttagtttctatgtattgaaacatggcttatgtctaaaaatctgaatttttggttttaaaagtagaaaggcatggaagttatgatatgcttgtgagagtttttacccgaatttggctgccccatgaggggtactttgcacctaggtagcatggaaaatatctctcaatggaatgtaaatatgtgtgtacatatgggtagcatggaaaacacccttcaatggtgtgtatatatgtgaatatatggcataaaattccttgcatagtgtgaatgagtagcataaaaatgtcttttacatatgcgtatttgaagaaaggtagcattaggagccttttaaacaatgtgtccatgt

SEQ ID NO: 170978 - DNA, 383 bp, Glycine max
  unsure (1)..(383): unsure at all n locations
ntgaacaatatactaggccttcatttaactggcttctcttcttgcggccacgctcaacaaagnactttcgacacctactgtacgttgatttgaccaaagctgntatgggaatgttgcgacaatccttcaaaaccttattgatacattctgaaaggctggntagcatgtggtcatatcgaccgccttctctatcataagccatagnccatcttttctttgaaattcgatcaatccatgtggctatagctggactcagttcacgaaatttttctaaattttgatcaaaaatgtgcttgccaagagtgtaagctgcataaaaacagctgatgatatacaattttaagnataatgacagcaaattaatgtgaccaccaatatgaatc

SEQ ID NO: 170979 - DNA, 443 bp, Glycine max
  unsure (1)..(443): unsure at all n locations
agctnggatccctanattcttatctatgaatgacaatatttgaggtgaatacctcttcaacgctatcaactctcttttcggatattgtgggntatgatcttccatctctccttcttaatacaattattttcttttcaatttcttgaatatcatctatcctaaacaagaacatgtatgcacatgtctctttctagtaatcatgtcatcactaaataactgttaatcataaccatcaatacggtgtgattatatgaccaagatttgtagctcccatattcttaaagtattgaccgatagattattatattgattgaccattgcaactaataaatctactgattcctgaaccgattatcaacctttatntcattcaaattcttatgctttatgaaatgaaatcgtatagtgtttatcaaagccactgataattattgaccccgccc

SEQ ID NO: 170980 - DNA, 369 bp, Glycine max
  unsure (1)..(369): unsure at all n locations
tcatacaatnaatatagaacctatatccttatgtcacatttcttcggagcgncgagtncccgtgtcttctagcatgagattcttcatagtcatccacctattcatctgctcccccgaacacaagttcaagatcatcacaggatccaaacacaacaacacacagggagtgagttatcacattcctagctaattgagaaacaagacaattaaatatacatattatataaatgagataccacttgcttaaacatagctcacgtaacttcaccacttcatcattcaaaattcacttttcaattatcaatcacattacacaagaatctcacacttcgatcaagatataataacacatcaattaacaagcatatg

SEQ ID NO: 170981 - DNA, 414 bp, Glycine max
tgtgctcgaatgcctgcattatttgctctcagcatatatgcatttcgaaagcacgtctagaagactatgaacatatatttattttattgtaacgggcaatattaattaataatatatgattttttattaggaggaaatcaaacttctaacctttctcaaacacgtttaagagactatgaacatatattcatttcaaaagcacaaatggtatctgttaatgcactggaatgtctaatgtagttgctgaaatttcatatgggtatttattttttatgctttatgcacagtaaaagtgtgtgtacaacaagtgtgttgactagtactaggtggactatgtattaagcttgctatctatgatgggtagatgggctattaagcttgatagatagaacttactactgctctattttgtga

SEQ ID NO: 170982 - DNA, 319 bp, Glycine max
cgcagcatgcagctccaacaaaataaaacacaaccttttttttaactacagccgaagaaccggctacttaacatacatacatgcaagggcgctaatcaactatatataaggatatgtgcgagatacgctcctctctggaggaagtagaaacaccgctaacactggggagcacttacgcaaaccatacatgacatcccgtctaccggatccaacatgaacataacccatatttgggaaactgttgaacatatgcacaggtaagccttgcgaagctgacaacttaaattacactagcacagccgcaccgggctcaaccttt

SEQ ID NO: 170983 - DNA, 399 bp, Glycine max
  unsure (1)..(399): unsure at all n locations
agcttnatcagaggacaatatattatcatgctcattctatgagagttggctcacaacaggccaaacatacctttggagtactttcttgagtaagtagctnggcctgaagctcaactatcattggtgagatccaacaaggctactcctcatgatcccacccctgcacggagtgaactagtgccagctgatccacaatctccggtggtgaatccatcttcttttcctgagcttgaagcagctcccccatctccacctctgattatcatttctgattcccatatggagaaactactgccccctctgattcaccagctggagaagcagctgaccaccctgactccacagttggaggagctgctaatctttctgattccccatccggagaagatgctgctctca

SEQ ID NO: 170984 - DNA, 220 bp, Glycine max
attctgcacatacacaaaacacagataacacaccatcccctgttggccacctacaactagactctacgactcccaaggaaccgctaacctcgatcctattaacaccgggttcccatcaatcctgccgagcttacacaacattcaggtgattccacatccaatcatcctggactaaaaaaatcaagcacatagggccaaagcacgaaactcttgccaaaac

SEQ ID NO: 170985 - DNA, 425 bp, Glycine max
  unsure (1)..(425): unsure at all n locations
nagaagnnccttacccgaactcttaacaacatgaactgctacttcacaatcccaaggctcagcaactttggcaagtgcccagttgaagagctgnctgctatagccatcaattctaatcccaaccaaaacaattctcttttcaacagtcattgcgttttgcccttatagtatcaatcacctcaccttgnagagcgaaccatctcatcctctgcaaaacagaggtactaatattactatcatggctggaattgaaacttgaacataatgtcccaacacttggctcacctattcgnatagttgaatattaaatagcagcatccattgacagagacgacgtcgcattaaaaaaatccatatatttatggcggctagagaggaaagggaggaanacaaacattaaaaatcacatgacctattggatgaaa

SEQ ID NO: 170986 - DNA, 402 bp, Glycine max
  unsure (1)..(402): unsure at all n locations
tacttatatacatgagtattgatttataatattctcataactagaaggatgagaaacatatacttcctcttcaatgtatccgtctagaaaagaactttcccatccatctcggcaccagatttaaatctataatgcaagcaaatgcaaccaacaatctcacaacttctaatctaactatcggagcataggtctcaccaaagactatatcttgttgttggttataaccctcgactactagcctcgctttgttactaattaataagccatgttcatctagcttattgtttaaaacccattttgtacctataatgatagtgttactaagcctaggtactaggtcccacaattcatntctcttaaactaattaagttcatcatgcatagctatatcccaatgttcat

SEQ ID NO: 170987 - DNA, 351 bp, Glycine max
  unsure (1)..(351): unsure at all n locations
agctnagatatcaacccattattagttctcttaatgattagatcatccacataaagcaagatgagaactatacccgatggagacttgaggaagacaagagaataaccatactgaccttgcgtgaatgagaaattaacaagcgttgtacgacacttctctaaccaagctagaggagcttgttcaaccccatacatacaacgtcgaaactaccaacactcattaggaaagtaagaaggcactcccgatggaagcttcatgtagacttactctttgagatcaccgcgaagaaagacattctcacatccatgtgagcaacgggcagagtagaatcccaacggcaggagggcgaac

SEQ ID NO: 170988 - DNA, 370 bp, Glycine max
  unsure (1)..(370): unsure at all n locations
agcttcatgatgatgaaccaagcaattttgatgatgccaaaagcccaagttattgattcaagacttcaagatcaagcatcaagaatccaatccaagattcaagagaagaaatcaagaagcaaaaagtcacgacttcatatagtataagtattaaaagattttttttttcaaaaaccaaatagcacagttttgttttacaaaagaatgttctcaaattttctaagttaccagaggggttactctctggtaatcgattaccagttggcagtaatcgattaccagtgaccagtttggttntcaaatgttttcaaatggtttacaatgttccaaaataattttcaaatagtgtgatcgattacactatattagt

SEQ ID NO: 170989 - DNA, 323 bp, Glycine max
  unsure (1)..(323): unsure at all n locations
nttcgncttacagaatgccnaaaggttatacggatttcctcctcggtatttccggccgncagcgtgactctaaagtcagtatgacagatcctgcgagcacggaagatgacgtaaatctctgcgagtcaacgggcttgtcgatcgcgattgaccaaagccgcanaagacgacgttagtctctacgtgctatcaagcttttctgcttacagacagcagaaagnttataccgataaccactcgggtattttccgccgtcagcgtgactcaaaagtcagtatgacagatcttatgagcgcggaagattacgtaaatttccccgtgtc

SEQ ID NO: 170990 - DNA, 398 bp, Glycine max
agcttatgaacctaaacttttttatcttctgttcatgaaaacatactcatgactaggaacccaaaatatggtttgtagaatttgaacagcatgaaaatatggacttgtttgaagaatttgggctgcccaatgattggtactttgcacctaagtaacgtgggaaatgcttttcaatggtgtgtagatatgtgtgtaaatataaggggcataaaaatcctcaccaagtatgaacaagttgctttcctaaatgaatgtatgatagcatggaatgccctttttaatgcaaatgagtgcaggatgtaattagctttccgaatgcatataaataatatgatagagacataaaaattgtatgggtactcaaagtatgtagtagttgtgaagcaaatgttatgtat

SEQ ID NO: 170991 - DNA, 351 bp, Glycine max
ggaccttaagcgacgcagctgcagcttggtcgaggcccaagacattatccccaatggaaaaagccaacgggcggacatgacattcagaggatgtggcggaacattgacattgtacgtgcatgcctgacatttatgacattatcttacatgggcacaacaatcgctttccataatgagccatgaataaccggctctaaggatcttcctggccatagcatgcccattggcatgtgtcccaaatgaaaccccgtggatttcctcaatcatgtaggtcgcctctttggcatctacacatcgtacgagggtcatgtcgtggtttctctggtacaggatggtaccactcacaaagaa

SEQ ID NO: 170992 - DNA, 323 bp, Glycine max
  unsure (1)..(323): unsure at all n locations
nacaatnactaatgactcccacttgtggctcttctacatttgctctacatnaagntantacaacccaacattttttgtcctaccaggccattattggctcttgataaatcgntataggattgagtttgaactctaactggtgnaccattttattttgntttagcttaatttctttattaaagcttatgggcatgtgttaagtgtgaacaatcgagcaagataatcgctaaactgagaaaagatctaaaagagaagataaaagatgaagttcagagcatcttcaaagaacacagcctgtgttgcaccctcacgtcatgccattc

SEQ ID NO: 170993 - DNA, 422 bp, Glycine max
agcttcatacaattaatatagaacatatattctaatgtcacatcctatcagagcgttgtgttttcgtgtcctctagtatgaggttcttcatagtcatccacctattcatctgctcccccgaacacaaagttcaagatcatcacaggatccaaacacaaacaacacacagggagtgagttatcacattcctaactaatggagagaaacaagataacatgtaggtataaatatcatataaacaaaatacaacttacttaagcatcactcacattatttcaccactttttcgcacaacattacatcacaacaccacacatttcgtttattttcacaacattctcgtactcaaggatcgaaacacaatatcatcaagtcaatcaatatcgatcaatacacaagcgttatgcaacatatacactaag

SEQ ID NO: 170994 - DNA, 428 bp, Glycine max
  unsure (1)..(428): unsure at all n locations
gctaacaaacttagaaatcaagagagcattgtattccgaaatataaggggagaaaacggatgcacattttatctataaacaattagttgntgctagcttgaatcttgatttcaagtattgtattgtcatcatcaaaaaaggggagatcgtaaatgcaattggctttgatgttttgatgatgatcatgataatgtgttgcaatagatgcaaatgggcttttcaagattaaaattcaagacaatacttcaagattacaaggcacaacatcaagatgatcactagaatattaagaaaggaattcctaattgaattagcaaaagtttggccaagagatttaaaataaaaagagtttntcaaaagctttactctctaggaatcgactaccagaagatgtaatcgattaccagtggccaaatacattttataac

SEQ ID NO: 170995 - DNA, 296 bp, Glycine max
atgcgtcaaccatgcacatggttgtaaactatctattaaaaggaaaatcactccagtcctgatgtattaagacaagtatacaacacgttggtcttcctattaggtgcctgatggtaaaagaaattctctaccctacaacgttcctgtgtactatgttgcctccaggactactaaaccccgatgtctggcgcatgtatagcctaatcctagtcaaccatcaccctctgacggctctttttggactaaacctaacctggaccgcattacgacataacgtgaccacaactatactatct

SEQ ID NO: 170996 - DNA, 285 bp, Glycine max
ctctgacacggacttaagcacgagagcacttgtttataagacacatttttacagaaggatccgactttgagcatatgcctcacacctgaatcatcaaaactctttgaaacaaacttgatccatcgtgaaactcgcttctacagggacctaacaaaacactcactatccaatgggaaaattgcctataaaattacacacaatggaagattggtatcctattggaggcatccaacacacatccaaagaaaggccttcttggtacaaaatttgaaagcaatgaacgtg

SEQ ID NO: 170997 - DNA, 329 bp, Glycine max
  unsure (1)..(329): unsure at all n locations
agaaacataacatcnattgcaagtaccaccgntatcttatctntatnnnnnatcacnnnnctccatagcatcctaaaataaccaataagataattcaccatgtaatacgcattctagaatcggncataaagaaaatggaaaaccaagacaattgaaataaaaaatagtatgcaagatcaaaccatgaaagcatacgcagaaatggacccntaaatatatatttttatcaaaaagagttttcctatgaatagntgacagatcttgcatatagtaaacccttaagaaaatcaaaaatatatatataaaatcaaaacaccgnctaacactca

SEQ ID NO: 170998 - DNA, 349 bp, Glycine max
agcttgtgtggattgcattgtaggtgtttgtttccttagatgatgttctgcattgggtgcaatctgttgctcatgaaattggatttgttgtactaattatgaggtcatacataaacactggtatgagaggaatgacttcattagtcttaattggtcgtgaaagaagtgatcagcgtacgtctatgaagatagattttgtaataagagatactggcagctgaaaatgtgtgtgtccctttaactgtgtgggaaaccactaattggaggccaacgatggatggtgatattaatgtgtgggatcacaatcattaaatgacatagtctttattggacatccattcattggtcg

SEQ ID NO: 170999 - DNA, 390 bp, Glycine max
  unsure (1)..(390): unsure at all n locations
agcgctnntataaatnatataataatgatcccgcatctcttggnnnnaacacaaannncatgttgctatntatgttagatgctcaacatactgaatagcagctgaacttcaacaatgtcacactcatatgcttatccaatgtcaagaaatctggatttaaaaggaaacaatagctttatttgaagataaatttatcattccctgcaaacataggtaagtaaaagcttagcttataacattacaccagactatcttaatatatataggattactataggagtaacgcataattagcaatatattgctagntattgagccataagatatgnnntaagcattcagcagctagnttagaacacatttatatntcaattctcctattctcatgca

SEQ ID NO: 171000 - DNA, 350 bp, Glycine max
  unsure (1)..(350): unsure at all n locations
gatccttatagtnacctgcggcatgcaactttatagaaagctcatgtttctttcttgtaaaaacgcttcctagccgtcataagccgttggatcttccacaatactggtctgcaactctacatgacacttgtccataattcaaccgttgggatctttgagaagaaatctatagtgtgctataagcctctctatgaagtctctagaggaagcttcttaatgaaactcttatagaatactacatgaagctgcctcggtaaaaacgctactcatccttctttaaccgtcggatctactctaaatttggtctgcaactatacaagacaatcgccaatgatctgaccgttgggatc

SEQ ID NO: 171001 - DNA, 387 bp, Glycine max
  unsure (1)..(387): unsure at all n locations
ntgagctntgagcacccacgagagcntcatctccctagttcctcgcggaaaagtgacaaacgcaaactatttcagcaccctagtacctagcagaagagtgtatgtaaggttttcttcaagccacagttccaagatcagagtaaggttttcttcgagttttctttgataaggggttctaggggttagagcgagcggtttccagcagnattgaaaacaatgtgggacaatgtgggtgtcgagaaagcagtttccggcagatttcaagcggaaagagaaagagaagagcgagtgcaaggttttcgagtgcgcaggttgtgaaatttcaacgttttaacttataaacataacaacatcgagtttttaaagatacccaatagtaattgaata

SEQ ID NO: 171002 - DNA, 175 bp, Glycine max
gtcacaatgcccgccaatgggttttcacaatctacaacaaacctaacttattcacctcattcctataactacaagggccatgcctatcatcactcaccaagactgacttccgttcttctatgacgaacaccctttcagctcatccataagacatcacataatgatttggcagcat

SEQ ID NO: 171003 - DNA, 296 bp, Glycine max
aactacttttacactacaaaataaccataaattgggagaggttgatacaatttataatagttttatacacaaaaattagtcatgtttatagactaacaatggctcatgatgatgagtggtgatgaagctatgatattgttgatagtaagaggatttatgtcttatgacaaagaataataatcgtaacacataataaaatgattattatgtgagagaaatataattatatgagagtaagagaatatatggacttatattttaatgaagaacaagagttaagaatgagatcagtaaaa

SEQ ID NO: 171004 - DNA, 245 bp, Glycine max
taaagaagctatagatatctggcattttcattagggtcatccttcatatgatagaatgcaattgttgaaacaaacttaccctatgtagacttgagataaaacctttgttagagatactttccatagagcaaaacagagaaaactcccatttcccaatagagactcttatgcttctagtcctttctctttgatacatgtagacatttgggagccttgtgccacaacagctttgaatggacataagt

SEQ ID NO: 171005 - DNA, 320 bp, Glycine max
atccttagagtcacctgctgcatgcaagcttgagatgaggaagtgtttattggtgtatacttcctgctttattgttgaccacagagtggtacctggagatatgtcgcgggggtcacgaaaccttggggacatcaggaggggtgctattgcccaaaaccaatcttgaccaattccgacccacccctggcatagtccgtcagtgagaacctgtgatgtacctaaacaggcgagctcctggctgtcaacagataaaaggaacaaagaccacaaagcacagacgcttgtggtggctggccaactgtgaactttgattgatatgt

SEQ ID NO: 171006 - DNA, 223 bp, Glycine max
  unsure (1)..(223): unsure at all n locations
gaatactnaagctttgagtaatcgattaccagagataggttctttataaaatttttagatgnaactcttcaaaaagttttagactttttcaaattggntttaagtttttctaaaagntataactcttctaaatgggcctcttggctagacatgaagattctataaatgcaaggctttgatttgcttttcaatacactttnacacttattcaatcaatccttta

SEQ ID NO: 171007 - DNA, 373 bp, Glycine max
  unsure (1)..(373): unsure at all n locations
acataccaccttcagactgatggtctttctgaacggaccatncagncactggaggaccttcagacttatgaatagttttcaccctaccattggcatggctccctatgaagctctatatggcagaaagtataagacacccccatgctgactagacctcggagaaaacctcaccttaagacctgaagtggtacaaccaaccactgagaatgtcaagtagatccaagagaggatgaagactgctcagagtaagctgaaaagctattaagacaagattaggaaagacctagagtttgaagttggagatcatgtattcttgagagtcactccatagactgaagcattgaaatcctgaaaactcacacctcagtttatc

SEQ ID NO: 171008 - DNA, 433 bp, Glycine max
  unsure (1)..(433): unsure at all n locations
ccgctnaggagatnnngggcgcgnnataagtatctaaaggttcatttaattcatnagaagagagaaaatgaaaagaggcatgtcccatgtttatataccgacaaagaaactctgctaagaaacacttccataacaaggaccagattttgtattaccatgaaaatgagcttctattgccataagaaatttcgaaaaaacaaatttagaagtcattaacagctgtgtgagcatgtgatggataagttaccttcttcaattcaacttttggaggataggccttgtagaaacttggcattggagtggctttgaaagtcatggtcttcctcaattgcttgatctcagcctcctaggtttcctgcccgataatcaggagaaaaaaatgggaaataaatatagagatcacctggcaatgagaactcaaatcccatggaac

SEQ ID NO: 171009 - DNA, 405 bp, Glycine max
  unsure (1)..(405): unsure at all n locations
agctagaactatctgtgattccacatctattatgtttcctcgaaaaatagttcatgtcattaataaatatagcaaaaacattgaatttcacccaaaaaattggacttttcttcaacttaaataggctttgtacatataaaagaaggatttatgagaaattgaatctaaccaccccccgaaatataaagtatcaacactgtaattatattctaattacccaaaatagttgaggacctcaattatttgatctgctaaatcttcagcagaaggaataggatcctccgcacaatttgcaggtgctcccaacttcaagaactcttgtggaagtntcagagggaaaactatatgaataataattattcattctacatgcaataaaaaatacattctaatcaaccaacttac

SEQ ID NO: 171010 - DNA, 283 bp, Glycine max
  unsure (1)..(283): unsure at all n locations
gcatcagagcgggttccgccagccgttgttgtctttctccgccgtcatcttctccggagagaccagagttaagatcgctggaaaagcgcgatccaaaccctgcaaaacgcgccagcatcagagcttcacgcgccttcacgcgcgggtacaacttcgagtctcttctagcgcgtgtagntcacgcgccgccgtgccagcatcggaatcttgtccgagttgctccagcagcctcgtcagcacctcgaggctgcattccaagagagaggtttctgttttgacaagc

SEQ ID NO: 171011 - DNA, 358 bp, Glycine max
agctcagggcatggttcggtgtatggatttctctagccttaatccatacaccatgtaaaggataaacatgctgaatgccaacattacattcaaacatgggtgaaggatgtccaacgagaggtctacctagaagcttacgtgaatcagtaagtataatttatgaaatgactttaaaaaatgatccacctactatgtacctaattattgtcgaatacagggcccattggcagctacatgctctgtgtcttgagaatgatgttgtcgactcgttctattcgttgtgtgagaagcatgatattcatattaaaggtgaagttaacaagctaagtttagttcataattgattactacaaaagaa

SEQ ID NO: 171012 - DNA, 320 bp, Glycine max
  unsure (1)..(320): unsure at all n locations
tagactctntctttgtagagttgtgaagattcataagctgtcagncgcagntcttccaactccaacagttgaatattcctgtgttccctggatgccttctcatcaaaattcagaaattttagagcccaatatgctttgagttccatttcaactggcaaatgacatgattttccatacaccagttgaaaaagagataagcccattggggtcttgtatgaagctctgtaagcccacagagcatcttccaatttgggtgaccaatcttttctagtagacgccactggtttctctaatatcctctctaattntctattagacac

SEQ ID NO: 171013 - DNA, 380 bp, Glycine max
gcaagctttaagccatgcaacattattctagtctttcttctctgcggctgctccgaggatttcgtggtcctactggattctatcgacgattcgacaagaattatgcccacatcgcacagccactcactcgcctattgtgaaaagaccaatttgtgtggtcttccgaggcacaatcaaccttttacgacttgaaagcatgctatgaccaccactcatgttctatccctcccggacttcacgatttcgtttgtagtggaaaccgatgcctcatggacaggcatgggcgccgattagatgcagcgcgaccatccattgcctactttagtaagcattctgccccaattgcttatttttctctacatccggaattgcacacatta

SEQ ID NO: 171014 - DNA, 249 bp, Glycine max
ctttgatatacacttcctgcctagatgggagaatggtcgacacatcattcatgcattgcatctcctgactgatgccgtgaagcacgtggctctttccttactgagcctccctagcgtgactgtcactgagccctttgaccgacttaaaccagtgagacccccactgccatctccattttacgatggtgaatgagggctgatgggactcattttaataacaggctgtagtctgactagacagatatacac

SEQ ID NO: 171015 - DNA, 356 bp, Glycine max
agcttgctctaaataacattgatgtttgttttatgggaggaggttatatgccattttttctttaagagtagtgtcccactggtaaaattaactttccaaatgtttgccttcgcaggaatggccccgaggaagcttgcctcatataggtccatgaatgacaaggcggccgaaggaactagttccgctccggagtacgacagtcaccgctttaggagcgctgtacaccagcagcgcttcgaagccatcaatggatggtctgttcttcgggagcgacgcgttcagctcatggacgacgagtatactgtatttcatgaggaaatatggcgccggcggtgggcaccactggttacttctat

SEQ ID NO: 171016 - DNA, 437 bp, Glycine max
  unsure (1)..(437): unsure at all n locations
agctttttnggaccttgaacaagcaatcaactcttctttcagaaccatgctatgtgctcgcgactgggccctttcttcccttcgcaacttgagttcattattgctaccccataaagctccgcgaaattcgtaccggccatactcttccttgcgagccctcttggtctcttgttcaagggctcttgcggtaattgcattctcttcccgtaacccggcacactccttccgaacgtgtgtagcagccaacttgaacttctccttggcgagtgttgcctttactaactcgcttttgagagactggacttcttcgtcctctgacggtgcgttaaaattctctctcctgacgactttgaacttggcgagccaatctaaacctcgtatgcgaactctcattcattcgtggcacccaccaaggatgccattacgaatgcctctat

SEQ ID NO: 171017 - DNA, 500 bp, Glycine max
  unsure (1)..(500): unsure at all n locations
ctagtgcgcatatttccgtacgaacgttgactcgcacaagacattctatcaactattattaatgcacccatatacaatcaaggtagcttccttacctagattatttacatgtacttccgaagtgtattggccatttacatcatacacgccatcttgtcagaagttacacacatgcatactcaaagcatgtcgaggtaccaaaaatggcacatgcgctcatcttggtatttctaatatctatacatatacatacttcatgatgaatcttgactatctacacaatacagtgctacattgcatgccattatttttcaagattttgctacctatagccgcatggcaatacaagcatattttgctttgctaactaaaaatggatatatatatgtcttctggaatatgttctctttcattcaacatatntatatatatgttttgtgagacattctgactaccaaaagatatatatacatacattcaagtatgtcgctattcatacc

SEQ ID NO: 171018 - DNA, 436 bp, Glycine max
agctcgaaattgagcaacagaagctctcgagaaatttatatggtcataacttgtcacacgaagtccgatccaggcgcataatatatcgacaagcttgaaattgaacaacagaagctctcgagaaattcaaatggtcataacttgtcacacgaagtccgattcaggcgcataatatatcgagaagcttgaaattgaacaacagaagctctcgagaaattcaaatggtcataacttgtcacacggaagtccgattcaggcgcataatatatcgagacgctcgaaattgaacaacggaagcactcaagaaattcaaatggtcataacttatcacacggaagttcgattcagacgcataatatatcgagaagcttgaaattgacaacggaagctgccgataaattcacatggtcatatactatcacacggaagtccgatt

SEQ ID NO: 171019 - DNA, 339 bp, Glycine max
  unsure (1)..(339): unsure at all n locations
ggcatntggaattgcgaaaagcccactccatcattaggagtatttctctgacatctcanacaaacaaatcaaacgtaacaagacaattatagttgttgtttgaatacctcacccactcaagtgtatcacacaattatggcttttctctaatgaaacactcttgccttttaccactctaattccccttgagttcttaggcaattcaagagattatggccacaacaaagaacaattcaccaatatgtgtcaggtaaggctagagagacaaggaaaaggttaaccaagataaaggctaacaatgtattgaataatatttggatgatgtccattangaaatgt

SEQ ID NO: 171020 - DNA, 241 bp, Glycine max
ctgcggcatgcaagccttcgctgtgcagatggttcggcgcaatgatattatccaaatttgacgcctaccggcagcactttttctaattctgcggcatccgggcaattaactcaaacaggtgctgagtcagcggcacaatcattttttgcgattcggcaaagttaatgaaggcatccgggggaatttctcccgcgacaggatgccgccagcgtagcagtactttcaggcccgttactcgcaa

SEQ ID NO: 171021 - DNA, 238 bp, Glycine max
ctcaagccttgcgagtaacgggcctggaagtactgctacgctggctgtattctgtcgcggtataaatacctccggatgccttcattaacattgccgaatcgcataagacgatagtgccgctgactcgagcacctgtttgagttaattgcccgcgatgccgcagaattaaaaaaagtgctgccgggaggcgtctaaattgggattaacattgcgccggaccatctgcacagcgaaagct

SEQ ID NO: 171022 - DNA, 437 bp, Glycine max
  unsure (1)..(437): unsure at all n locations
agctnttaggtgaaaggtcacagtgttgaagtgtgttttgtgtgggcaatgcacaggcccacacttccatcttaaatttaactttttctattacagtgacaagcaccgaactacttggtcatagaatgttacaatgttaaggaccaactttgctaaaagcttgagataggtgaaggctaatgaatgtttttatatctatcaaaaggaacatgaaagattacgtataagatatcctccatatcaaaattaaaaagaaaagatataagatgcatcaaaagacatcaaaactcaaaactaaagagcacgacagttttccctttgtatatcttccaaaggaattccgcagcagaaaccatgttctgaattccataatgctgcaatgaaattaaaaaacatcctcaaaatttcttttaaatattgattcaatggttgtctaa

SEQ ID NO: 171023 - DNA, 337 bp, Glycine max
cttgctcttctgctcactggatcgggttccaggaattcaagggtatgttcaaattgtgttgtgttgatctgcaccaagatgcttaatttgcgttgaaaaatccattcatttgcgagacttagcttcggagatgaaccagttagttgaaagctcaatgaatactcaaagggtctctagagttcaagctccactggtaagtccaattcactccaattttgttatcagcataatagttgtttttctctctattgaatcgtataactttttctccatttcttagttgcagctcgttgtgtgtgtgttgataaaaggttcgatttgccaactcgagttccta

SEQ ID NO: 171024 - DNA, 336 bp, Glycine max
  unsure (1)..(336): unsure at all n locations
cttcaacatagaacacaagaacatgatccattagagaaatatcttcatatgcatcaacttggttgttagaaagacccaacgtttttttacctattgttgtcaaatttttaattacttgcatttagtgctttttaatgtagaatctagtttacttttgtttatattatcaattgncaatgttgttcacacgatgccctatttctgaataaaactctgtctaataagcaagtttcctatgttcgatactcggatcattcttgtttaattntaaatacttggcgacccggtgcgcttgccgatatatcactttcccattgatataagtgtttgtaaatt

SEQ ID NO: 171025 - DNA, 413 bp, Glycine max
agcttgtgggagtgacgatatcccttttctgagggcaatgttgggtagtccacccttcttttttgtgtaccgctgtttctttgatgttctgggtttggttctccccttgagggattttgagattttgtgcctcttcatcaatatttgacccagtgtgctagtgcttttgtacattttttagatgaagttgacagacaagataggctgggtttccttgaacactctgtccaagaagttgtttgagtttgacttgaaaatattttgccacttcaaggaccatttcttcaaggccttggctactgacatcatggttgatggattgccattgatgttcaacagggacagggagcctcgcttccattctaccgacagttgaccccccaggttcaagttttcgagaggatctattgccc

SEQ ID NO: 171026 - DNA, 336 bp, Glycine max
  unsure (1)..(336): unsure at all n locations
actcttagaggtgactctgagcgtttgttatggaggagtccgagtcaatttctgattatttttctcgagtattggccgtagtcaatcaacttaaaagaaatggtgaagatgttgatgaggtgaaggtcatggaaaaaatacttcgaactctaaatccaagttttgacttcattggtaccaacattgaagaaaacaagggattanagaccatgactatngagcaactcatgggtccttacaagcatatgaagaaaaacaaaagagaaaaattaaacaaaaggaggctacggagcaactactacaactcaacgtaaaggaagcaaactatgcaaatta

SEQ ID NO: 171027 - DNA, 422 bp, Glycine max
  unsure (1)..(422): unsure at all n locations
agcttcgatttacatattgaatttcatccaattttttgacaagtcattgttacttccatgaatattgatattgtatcatgcttaattatatgcatttgattattctgatcattgngtgttgngtgattatttcttccatgcaggtacatgattcctatttgttgtgagagtgaaatgatgggcagcatcaccaactgaggtgagtttatatttccttntttttgtctttatctttgttagttcgntatatagtttttattctatatgtttgagttttaaatgtgtaaaaaatagaaatagaaaggtctggtgattgcttangaattccttgttgtttcatggcatttcctttgaacctcaaaaggtgcttatgaatggccttggttaaatttctgattatatgtattgcggtccttgtgctg

SEQ ID NO: 171028 - DNA, 432 bp, Glycine max
gtccccagctgtacatgtttgtctgggtgcttttgtaaagtttctagagtggacatactattggttgtacagacgaggtctaacatgtcaagtgaagaaagcctctgtatttgataactctgccctttttcgactggtggagaatgcattgaagacaaatgttacattttgtccattgatgcaagcgtgtgcggcacatgcgcgttactcttgcatacatgtaactcatagagcccataatagagatatgatgtgtgggtgagtggggttgagtcatggtgcacaaaattatggcaccactttggatcttgccatctaccgaagagcccgtcttgttctaaatggagtgaacatttgatttgtagccttttttgaccttcaccttctttgaccttcatggattcctctttgataatctcatttgttgctgac

SEQ ID NO: 171029 - DNA, 403 bp, Glycine max
agctatatgaaagtttttggtttttcataccttgaatactagcgctattcatcttttcattatcttctccctttgccaaaaagaatacgccaaggactaaccacctgaattctttttgtgtctttcttctcccttttccaaaagaacaaaggactaaccacctgaattcttttgtgtcttccttctcccttgtcaaagaattcaaaacgacacacgctgagaattcttttgattctttccattccctaatacaaaagtgttcaaaggattaaccgcctgagaattcttttgtatccgcattcacaaagtatcaaaggtttaacagcctgagatctttgtcttaacacattggagggtacatcctttgtggacaagtagagggacatctacttgggtttgactg

SEQ ID NO: 171030 - DNA, 396 bp, Glycine max
  unsure (1)..(396): unsure at all n locations
ntataagtgcgggtctgggagacgaatgtcatttgttcgcgatatgtgaagatgatgntccaagtactttggatntggtccgaccatgccctcctgatttccagctgggaaattggcgagtggaggaacgccccggcatntacgcaacatgcataatgtaaacctttacggttataaaagctctatagttgggcctaggctttagagtattcactttggtaaagctttgtgtctttctgctttgaatttataatacaaggatctttcttcatctggtcctagtctctacccattctcattcatttgcatgtttacttctttttctaaaacggcatattctatgacgagttccccgaatgtactaatacctgtgactcgtctatcatcttcgagcaa

SEQ ID NO: 171031 - DNA, 411 bp, Glycine max
  unsure (1)..(411): unsure at all n locations
agcttctaagttctaataaggtgataaagagcataattggtgaatgtgaaccacaagtatagagttactataatacactaaagctccattaaaaactgaaccatgagtacataatatactacattgcaactgcattaaacatgttattgttattaaccaatttcaggacctagaggaccctttcccttatttgtgagaaaactagcttaatataatctagttctataattaactaaggagttaagagaagctatcccaaaaacgcaatatcaccttcttatngtttgtcacaaagttgaatttggaattaactaagtgataaggaagggattccacaaattcattcatcctctaaggtgcttcgactnttatgaattctcttttgtactacataatcaggacatagctttt

SEQ ID NO: 171032 - DNA, 210 bp, Glycine max
gcctttaacgaccataagacgggtcattttgttcgaactgctcatatttccatgtttggggagaattgaaccaggatatactatcatcttgtgagatattgcagataccgctaacttctcttgcacaaagagcacaatgaatatctacttgtggcacacttatcgagcattattcgctgagcgatgggcattcgagtaccgaggaattaa

SEQ ID NO: 171033 - DNA, 438 bp, Glycine max
agcttatgatagttgaccctttgacaagggattatcgcccaagacatttatagaacatgttgaaagtatgggcattattgttattgatgatcattaagtgtaatttaccttatgtaattttgctgacactctgagctcaattatgatatgtttctgattacctgttctctatgtttgcatgcatgtttgtgttaaagtaatgttaacaggttttgtcttgaatgaagacattatgttggaccaattatgtactcctaactaatggtcatattaaggagaagactaatttgtagtacatggaagagactatgtcgattagatgatgtacaaccgccatgactcgaattggttcctattcttaatcatgaaattatgatgtacccaatgtataaaacaatatagtcaatatttaatgcgcattatgttagttaatctatt

SEQ ID NO: 171034 - DNA, 380 bp, Glycine max
  unsure (1)..(380): unsure at all n locations
tataagtaattatgcgttcatattctacangaatctattacaaatntaccaaatgaaagtaatcaaatgttaatataataattataactttgataatcttcacagcctaattaaacacttagtgttaatgctataatcgtgttgattaattctatgttgtggtaatgactactttgcacgtggccggtatgattaacttattttgttcatgctntnttttttctcacttatttgtaagatngggaaaaattagtagggtatttataataaccatcgaataatgactttntagtcaaatntacttatcttgtaggtagttaattntatgtatattcacacgtgtacanccgatttataatatgagagctatatatagcttt

SEQ ID NO: 171035 - DNA, 433 bp, Glycine max
  unsure (1)..(433): unsure at all n locations
agtcttgaggaaattcaaaatgaaaatacctttttattcggatattcgatggagncccgaaatatatcgagacactcgaaatagaatactgaagttctgagcaaattcaaacgtcaataactttttactcggatgtccgattgggtcatgtaatatatccagatgctcgaaattcaatacagaagcgttgagcaaattcaaacgaaaataacttttaactcaaatgtctgatcgagtcccacaatgcatcgagaggcacgaaatagaatacagaagctgtgagcaaattctatcgacaataactttttaccctgatgtccaattgagtcgcgttatattcgagacgctcgaaattgaatacagaagctgtgagcatattctaacgacaataatattatactcggatgcccgactgagtcacgtaatatatcga

SEQ ID NO: 171036 - DNA, 356 bp, Glycine max
  unsure (1)..(356): unsure at all n locations
agcttgcttctacaacttccatttgtgtgtaataattataggcaattttcccttaggatagtgagtgttntgttgggaaccttaaatgtggtcatccatacactcctaggatctgcctagttttcatttcttgcactttaatttcttgcttactttcataggcttttttttctttactagtcacacctagtttatcttgtaattacgtaatactttcttcttgcttatcacacttatcttgagttcttttgaaccctaacttttaccttttacaaacccccaacaagaaagaacacaacttatgaaccagcatgagtcatcatttatctagtgttaacggtgagggtacttgtcat

SEQ ID NO: 171037 - DNA, 399 bp, Glycine max
  unsure (1)..(399): unsure at all n locations
tgccaacatgaagtaactaactaactaaccaactaacttccaccaatatagacaattactactaagaaggaagggatgagccttgattatgctcatctaatccacctaattaaactaattacacaaagcaaagaccaaattctgcccaattattcaagtgcagagatnttgacttctaagctcaatttgaccctcgaaatggcagaattggtccaagattatttttgacaaaattaaagataattttcttatctttccagcgactactgacatgctccattnggagttctacagtgtcatataggccctgcacaaggcagataggtcaagtaagcacaaaaatccaaaaataagccacaattatcgattaagcttaatcatttgccttagatcaaaact

SEQ ID NO: 171038 - DNA, 477 bp, Glycine max
  unsure (1)..(477): unsure at all n locations
tcgcagaagaacaagcgtacganagaagggctctagatacctttttcgaanagcngagtgagagtgagagagacaatgataaagataaaactgatattatngcccagaaggtaaaaacccacagagttagatacaacagaggtatttaaagagttctgacttgagaaactaaccacaaccaactcttactaactctaactaattctaactaacttctaacagaatgtaaactaactctaactacctctaactaacttctaacaaaatgtaactacttgtgtgcagtttagtgtaaactaacagcccttacaacatatacactgctgtctaatatgaaacaaaactgtttacacagttatgtatttacatactccaatagtcacattgtccacttatcaggataagtcatggtcatcatatatatacactccagttctttccctagctgccactacctcacttttataaaaaagccta

SEQ ID NO: 171039 - DNA, 428 bp, Glycine max
  unsure (1)..(428): unsure at all n locations
agctnntgcggattggtctttgccagtgaaaggatctatgtgggtctggaaaaaggcaaatttagtcatccggcttggacgaatgagaaaattggggcaaatgaagagggtgaggatgaaggagaagcccgtgctgtgactgccattccaatatagccaagtttcccaccaacccaacaatgtcattactcagccaataacaaaccttctccttacccaccgcccagttatccacaaaggccatccctaaaatcaaccacaaagcctacctaccgcacttccaatgacaaacaccacctttagcgtaaaccaaaacaccaaccaagaaatgaattttgcagcgagaaagccttataattcaccccgattccagtgtcctatgctgacttgctcccatatctacttgataattcaatgatagccataac

SEQ ID NO: 171040 - DNA, 473 bp, Glycine max
  unsure (1)..(473): unsure at all n locations
acccaactatcctngaataaaaaatctgcacctgtcgccagactctgtggtttatgctcctctgccgaccaccacactagaccttgcccttctcaaccttatgctacaaacatctacaatagacctcctcaacctcagcagcaatatcaaccacaacagaancaatatgacctctccagcaacaggtacaatcacnggaggaggaatcatcccaaccttatatggtcgagtccttcacaacagcagcaacaacaacagcctttatttcagaatgttgttggcccaagaagaccatacgttcctccaccaatctagcagcaacaacaacaacaacagcaacagcctcagatacagcagacagntgatgcttctccgcaaccttccgttgaagaacttgtgatgcatatgaactatgcaaaacatgcagttcaacaagaggtcagagccctcattcagagcttaactaatcagat

SEQ ID NO: 171041 - DNA, 421 bp, Glycine max
agcttctagccaaatggacttatcttgaattaattcctttgatagcccttttgagccttctttccctttccttgttttgaagctcactacaagccttaagtgaaaaaccatgatattaccatatccttaaggaattttggagctttggaattgttttgggaataagtgtggggggtttttgtttcattggacaacttgttttgttgactatgcttcatgatgtattttgggccatacttgatgtacattgtatattgggtaaatgttggacatgctgaatgaaatgttgtttctcaaaggaaaaaaaaaaatttcgaaaaaaatatgaatactctatgagaaacctcaacaggacacgctctaaagttgagtgaataagatcttaaatggcacaagaatgatgaaactcttggttctactc

SEQ ID NO: 171042 - DNA, 420 bp, Glycine max
  unsure (1)..(420): unsure at all n locations
agcttccatcaaaaagtcttgttattctctttcaagaccttggtatttgacattattggattactttccttcactaaaccttcatggagaagtatgtatggcaaaactttattactgttattcaacacataaaaattagcttgttgcaaatcttatacacttggagtgataacatgcagtcctcttgaacccttacctcccactcttttgtcatgccaagactctggaagcccaacaagttttgctttttcaatgtactctgaacaaaattcaatggcttcttctgcaatgtacctttccacaatagatgtttctgaacggtgcaaattcttggtataccctttcaagatcttcatgtaccgctcaaccgggtacatccactgcaaataaataggaccacaacattngatttctctgact

SEQ ID NO: 171043 - DNA, 502 bp, Glycine max
  unsure (1)..(502): unsure at all n locations
tacggacctatgatactcagcttagaattatangaagaaccactatggtgtatnggatgtttactttanacattataaacaagtttgtaatatatagacaattatttgagaaataatagaatatttgttgacatggttttgtctacaccaatggccttggactangggtggaaataggtcaggtcggcctacaggggcctacgagctggcctacataaagcctgacctgaacttggcctattaattaanaggttaggctcatgctttnttaaaagcctattaaattaaatagataccaatatataatattatttcttggatacaacttagttttttcttaaactatcagactttgattacacattattgntccataacttctattcctataatcaaggactttaattacaatttaggtgtgagtcatgtgtccttttatattcctcattattntgattgactntccttttttttaactttcctattacgttcctactgcata

SEQ ID NO: 171044 - DNA, 398 bp, Glycine max
cgctttagagactgcgattcactattacactcaatatttacggagttaaatcgtcatgcgtttaacataaagaaagacacactctaccaagaattatatatggtccaaaaggttctctgcaaccactgatctactcatcataggagaaataagcttactaacaacatacacacatgatgataggaggttcgttggcacattatcaatcaataccaagactacttgcgtcatccaatggcatgtcataatgtccaaccgcacttccaaattattaagatggccaatctcataactcatgacctaacagtgaattgatggtatatctaacattaaggatgcagggcacatacaagccttattaatattgtctatatcattatgtatgagaaaatacaaat

SEQ ID NO: 171045 - DNA, 431 bp, Glycine max
cttgtacttaccattgatcatgagacaactatgatatataaataatgacgttactcataacattattaaaagacaagacaacactaagatttcttttcaagcaccacctatagatcatactctataacctcaagaagtgtcattaagaagatccactacagaaaggataaatgtaatttgatatgattatgtcattattatttaagaacatgaatatgacattaagttgactaataaagtctaattgaccttagtcaagtcatgttgtgttttaactctcaagcggattgatgtcataaatgatgtaataacaccgatggctgaacatgacatttggaatatcgtcaaatgctcgaaattatgaactcataagttgtagattaatatctatagttgaaagggattcaatggttattcttgagatatataaa

SEQ ID NO: 171046 - DNA, 460 bp, Glycine max
  unsure (1)..(460): unsure at all n locations
ntcaaaggatctgngtgaaagtttgtgatattactacttgatcttgagcttagaacatttaatatttcttgtgcacttacattgttccttttagaactattatgttactgagaaatgaagtgaattgtgtgttgtgagtgacttgaaggaagacaggataatcaaagttgatggttatctgtatgatcctattatgatatattataatgccattcttgtttaaaaatctttatagagaaaattaatgattattaatattgttttttcaatttttttatgttttaaggctataaaatgattgtatattaacaaaatatttgcaaatttaattataaatttagtgtttattatataatattattaatcacnaaaatagcgtcattgcataataagtgaattttttatattgatgaagatatataacttacatattactactaattaataattataacagagc

SEQ ID NO: 171047 - DNA, 417 bp, Glycine max
  unsure (1)..(417): unsure at all n locations
gcttttcgcaaagcttacggtanaatctgggacttatccatggtagaagtctctacagaggccattgcctccctcgcccagtattatgatcagccgttgtggtgcttcacctttggggacttccagctgtcacccatggtggaagaatttgaagagatcctaggatgccctctaggggggaggaaaccatacctcttcacagggttctatccctcattagctagaatttccaatatagtccaaatctcggcgcaggaattagaccacaggaagcaagtcaaaaatggggtggtcggaataccgagaaaatatttggaggtaaaagcaagaatcttggcagttaaaggcgagtgggccccgttcatagatattctcgcattgttgattttcgggggagtcctctttccgaatgtggat

SEQ ID NO: 171048 - DNA, 397 bp, Glycine max
gctcttatctacgtccaaggaatgtggtagttagattcataaagaaggatgttatttgtcgatacggactccccaagaagatcattactgataatggcaccaatctaaacaataagatgatgcatgagatgtgcgaagacttcaagatccagcatcataactctaccccttatcggccaaagatgaatggggctgtagaggctgcgaataagaatatcaagaagattgttcaaaagatgacggtgtcatacaaggattggcatgagatgttgcctttcgccctacacggatacagaacctcggtacgaacttctactggggcaacaccgtattctttggtttatgggatggaggcagtactcccatttgaggtagaagttccttctcagaggataat

SEQ ID NO: 171049 - DNA, 322 bp, Glycine max
ccccggcattgatgacacaaaatatcatgttctacaagatcccacttgataaatatttttaaccatagctctattgattctctataacactttctcacaccatccatggtataaatataatgagcacaagcccatgcacattctaaaatcctgtatatattaagataatactaattgattggtaatctttctgatacaaagtccagagacagaatagatcccatcttgtttgtcaagaatgtcaaatatattgccttgcatcccatgcaacctgatggagaaactcactcacactcacattggccttcaaaaatccagaggc

SEQ ID NO: 171050 - DNA, 424 bp, Glycine max
agcttccttttagagtgtcacgtttaaaaccgagctcgatggtggtgcaagcctttgattgttctcggcgggaagtaatgggggaaatcgacattcccattcagataggcccccacacttgcaatgtggtgtttcaagtaatggatataaatcctgcctatagctgcctcttgggaagactgtggattcatgccctgggagtggtcccttcgacgcttcaccagaaattgaagttcgcggtgggtggacttttagtgatagtgtcgggtgaagaggacatgttagtgagctgcccctcctccgcaccatacgtagaagcggcggaagaatcattggaaacggctttccaatcctttgaggtggtgagctgcgcctctgtggaaccaacttcgtcgctaccttctctctccaaagcggccataat

SEQ ID NO: 171051 - DNA, 445 bp, Glycine max
aagtcgtatctagtcaaggtctgagagaccatacaagtttcctaacgatttctaattatgtgggccattaagtctatcatatgctgacaatagccgagaagcccatgaatctcttcggtggcggagtaggtgtctgccatcgccttggccttggctaacatgcggggaagttcttgactcccgttcaaggtaagagcaaaccgatccatccacatggttgcctcttggtgtaaagagtcgatcacccttcctctagcctctttttccgcgtatacttgagcatactcgtccgcgattctatgctcgtgggccgtggctagacctaactcttcttggtacttggcgatgatagctagcatgttggtctccgtctcgcataaacgctgagacaagcttcttttggaccttgaacaagcaactaactcctctttcagaaccatgctat

SEQ ID NO: 171052 - DNA, 426 bp, Glycine max
agctttatatggacgaaagtgcaaaactcctatttattggtatgatgatggagaagcagtacttcttggacctgaaatgctacaacagattaacgaacaagtgaagatgattcgagagaagacaaaagcatctcaggataggcagaagagctattatgatagaaggaggaagccactagattttcaggaaggagagcatgtgtttttgaaggtttctcccgtaaccggggtcggaagagctctcaaggctaggaagttgacacccaagtatctaggtccgtatcagattttgaagaagattgggcccctagcttatcatatcgccctacctccgagtttatcgaatttgcatcctgtgtttcatgtctctcaactgagacggtacaacccagatccatcacatatacttgcagtggacgaggtaca

SEQ ID NO: 171053 - DNA, 478 bp, Glycine max
  unsure (1)..(478): unsure at all n locations
actaagctggagggttaaagtctcacgattgtcacgtgttgattcaacatttgttagtcgtggctatacgagacatcttgccaaacaaagtcaggttagccataactcgcctgtgctntttcttccatgccatatgtagcaaagttgttgatcctgtcaagtttgatgaacttgaaaatgaggccgcaattatactgagccagttggagatgtattttccccctgctttctttgacatcatgattcacttgattgtgcatctggtcagagaaatcaaatgttgtggtcctgtttatttgcggtggacgtacctggttgagcaatacatgaagatctntaaagggtatacaaagaatctatatcatccagaagcatctattgttgagaggtacattacagaagaaaccattgaattnntgttggaatatattgagaaggctaaacctgttggccttnctgagtctcagcatgatgacat

SEQ ID NO: 171054 - DNA, 437 bp, Glycine max
agcttaaaaccctttgttcattactaaacaagctgaaattaatcataatgacaagcaagatgtcctaactacatgcaagagataagaatgcaaatataaaagggaaagaaaagctgggttgcctcccagtaagtgctaatttaccctaagcttcgtcctcaaatcccttttgttggactagacttaaaccaaacaacattattgtaacaacatatataaacccaagcttaatccgcaaatccctcttgtaagactaagttccaatcctgcttcaaccaagttctaaggcaataatacatttcccaatgctaaagtcacctaactatgcacacaaatgggtgatcagaccaagaacatacagaatttaagcactaaaagaagcattgaccacaagaaacacaatcaattagatattaaaataattacatcagctgttc

SEQ ID NO: 171055 - DNA, 464 bp, Glycine max
  unsure (1)..(464): unsure at all n locations
ctcaagctgatctttatgatgaagcagccatgaaagtattttcactatgtgaggctagctgcataaatcaaaagacaccattggtttctatcttcaactaaaccctatgccagtccatttagataaaatataaacataaaaaaaatccaggttttcatgcctactctagtcatgatgatgaggttttgggtaatgaaacacaaataactgttaaattntntgagagaactaaataagaaaaatcctaacaataaggggaaaaaagtaattaagaaaatcaagagatgtacacattacagatgtacaagaaagaaggataatgagacccctagatcaaccacaanaaggatatttagatttccaaatgtttgtattatagggtttaggagattcagaattcctaatggttgtgcccctgatgttattcctattgagtaccatggtngaagttacaatttgacatg

SEQ ID NO: 171056 - DNA, 378 bp, Glycine max
taagaccagtcttaaagcttctgcaaatatgcctgcgacctggtcaactgtactcgctatattaaaatgaatttccccttatgaggaaatgacaacccttacactgacctgcagcatgttcaagaacacatcacaccttgctttgtcaataccacacaagacagccataatgaaaggtgccaccggcactgaaataccatgtttaagaatgaaggaaattgtgtcgccctatagaataaactaatatttaaggaaattgccctcatattgtttgataaacatcacacatgtgaatgtcataataacatactctgagctgtgagcatctggataaaagccacggagatgtgcgagttggctgtgttaccaaacctgtac

SEQ ID NO: 171057 - DNA, 432 bp, Glycine max
  unsure (1)..(432): unsure at all n locations
gaggttaagccatgttctcagtataaatattagtaatggaatgctcaaaatccgaatattcagaatcaccctcaatagaatgctcagaatgctcaaaatgcacagaatgaccaggatgcacactatgcctaactaatctacganaggttctatctatttcaagatcaaagggttgtaaatcacctggatatctcctagtcatgcactatatgcagcanataatgtgtttctcaacaagcacctaacaagggggtaaaactatagctatactcaaacgatatcaaaatgagatgaaattttgtgaggcacaccctataattatgaanagatagcacanaaattntcaaacaaaaattcaagtctaactatganaactancctaataaaagttagaaaaataggacaataatactttgaaaatataaaaaactt

SEQ ID NO: 171058 - DNA, 421 bp, Glycine max
  unsure (1)..(421): unsure at all n locations
agcttatgaacccacacttgtagcgtcaatgcattgaaacatgcttatggctaggaatccaaaatttggttntagagttagaaaaacatgaaaattaggattngcttgtgagagtttttgctcgaatttgggctgccccatgtttgatactttacatagaggtagcgtggaaaacaccttgcaatagtgtgtatacataggtaaatataaggagcatgaaattcctagcaaagtatgaataattgttttcttaaatgaatgtatgatagtgtggaatgccctttttaaatgcaaatatgtgcaggatgtaattagctttccaatatgcatataaataaataggagtgaaacacgaaaaatttgtatggtgtacttcaaatgtacgtaagttagttgcgatagcaaatgtttaggatataaa

SEQ ID NO: 171059 - DNA, 459 bp, Glycine max
acattcaatttcgaacctctcgatatattacgggactctatctaacatccgaaaaaaaagttattgtcgtttgaattggctcatatgttcaacattaaatttcgagcgtctcgatatattactggacttaatcagaaattcgagtaaaaagttattgtcgtttgatttggcacagagcttcaacattcaagttcgagcgtctcgatatatgacaatactcaatcagacatccgagtaataagttattgtcgtttgaattggcttagaggttgaacattcaatattgagcgtgtcgatatattacgggactcaatcagacatactataaaatatttattgttcgttgaatttgctctgagcttcaacattcaattttgagcgtctggatatattaccggacttaatcagacatccgagtaaaaagctattgtcgtttgatttgctcataagttcacattc

SEQ ID NO: 171060 - DNA, 421 bp, Glycine max
  unsure (1)..(421): unsure at all n locations
agctgattatagaggtttgttcttataaactcattttcttagaaaaattaactttatggtatacttgttcttatgattttgtcaagttgtgcttctatctctccccctcctgttttacccacttgaggctttctaatttagcagatgcaaagaagaactataatttttttgttactttcatttttgtaatagtgtatatatggcactcggccatggtaattatggtttttggtcacacaaactaggcactatagctctgttatcattgagagaagaccaatatctcgtgtatgagtgtgtgtccccccaagaaatttaacaatgtttcaaagagcctctcgatctggtagtaggtgtagatggatatataaactatagtactgagcactatggttcanaaattcacattacctaacaaaca

SEQ ID NO: 171061 - DNA, 485 bp, Glycine max
gtgaagtgacgtgaatagcggtcgttaagggtctttatatataggggaatcgaaatgtaaaacgagggtttcttgttagtggtaaaatcgtaatttaagagtgtagaggcccaaaggttgaatgtcaatgagctaggttgtttgctttcagacccaatagaaattcagaggcccattgttgtcgtcatcaataatattattaaaactgttcaaccacgccacatgttttttaaatttatttatttaatttattcaattactcaatttattattcattattttactgtgttttttttctttgaaaatttgcacaatgcatgaaattcaatgctagttgttcacataacatgataaaagtggataatatggaaacaacgaaaaaatacttcgaaactaatccttttaaagagtagagagtattatagcaagtttttctttaataattattttttatacccaattggaagatagatattaattaacat

SEQ ID NO: 171062 - DNA, 378 bp, Glycine max
agcttaggaacccaaactttgttagcttcagtgtttgaaaacattcttatgactaggaacccaaaattgggttttagaatttgaaaagcatgaaaatatggacttgtttgaaataatttgggctgcccaatgattggtacttcgcacctaagtaacgtgggaaatgcttttcaatggtgtgtagatatgtgtgtaaatataaggggcataaaatccctcaccaagtatgaacaagttgttttcctatatgaatgtatgatagcatggaatgccctttttaatgcaaatgagtgcaggatgtaattagctttccgatatgcttataaataaatatgatagacacaataaaaatgtgtatggtgtacttcacatgtatgt

SEQ ID NO: 171063 - DNA, 389 bp, Glycine max
tctgatcttgcaagcaaattagacgtgtcttgtggatgatgtccttatatgtgacgactctgccctcttctgatcgttggaggatgcattgaagacaaatgtttcattttgtcttttgctacatgcgagtgcaacacacacgtattactcttgcatatgtgtcactcatggagtgggcatgtactgaagacgcaatacatgggtgagtggagctgcatcatggtttaaaaaattaaggcaccatttcagcttatgcaagttaccaaagagtcacgcctccactttaaatggagtgaaagtgtgatttttgatctgcaccattttcgaagttctgctttctctggatacaagtgtagtaacatttacaatgtttgatcgatatgttcatc

SEQ ID NO: 171064 - DNA, 406 bp, Glycine max
  unsure (1)..(406): unsure at all n locations
agcttgtagggttaaagtctctcgattgtcacattcttatgccacaattgttagccgtggctatacgagacatcttgccaaacaaagtcaggttaacgataactcacctgtgctttttcttccatgctatatgtagcaaagtcattgatccagtcatgtttgatgagttggaaaatgaggctgcaattatactgtgccagttggagatgtattntccccttgctttctttgacatcatgattcacttgattgtgcatatggtcagagaaatcaaatgttgtggtcctgtttatctacggtggatgtacccgattaagcgatacatgaagatcttataagggtatacaaagaatctatatcgtccagaagcatctatcngtgagaggtacattgcagaagaaaccat

SEQ ID NO: 171065 - DNA, 451 bp, Glycine max
  unsure (1)..(451): unsure at all n locations
ctaccattactggtgatgactttctaagagatggatcgtccattgaggtatgattatttatgacttattggtgtgttcataaactactgcatttagttgtatttatgattnttcacttcctactacttttacgcttgatgttgagataaatatcttacagattacattgcagctcaaagtggatgtgactgttgatcaaacacaaaaggtgtttgacaggatcctaacanagttatgtcatattgccccaccagctcttggattcgcatgcaaaaaggaggtaagatgctgcattttttataccatgcactctcataccttaggtttgtatggaggtttttngttttggcatcagagaatgagtaagaaagggaaatatgtataccttacgtgggccctccagagaattcgtactgatagctgggcatcgtctataagctggcaataagtc

SEQ ID NO: 171066 - DNA, 436 bp, Glycine max
  unsure (1)..(436): unsure at all n locations
tggtagtgagttgataagtntacacgttttaaaaatgacacgttaaggaggttgatcaaacatgttcaacccattctatcattcctatgatgatttggaattgtcaatcggttgcgttactagtccatggtttagctacttcgaggaatttgtatgtggtgtttaattagctaatagcatgttacttttgtgttagatataagagaatctagtacttgattttaatgataaccacaaatattataatttatatagatgaagattaatgactgatataaatgattcgtcttaagtaaaagcacatcgataaatctaacttattttatctatcaaaatattcaaaatctcatttatcacaagtcattgtctgataagataaccttatcactcgaagggtgcatgaagaccataagtttaattgtgtacatctgagtat

SEQ ID NO: 171067 - DNA, 409 bp, Glycine max
  unsure (1)..(409): unsure at all n locations
agcttcaacaatagaccactttcagggtgctggtatttacttacatggatncgaggggcctatgcaagtgaaagcctggggaaagagcatgcctaagaagataggatgatttctccacagttacctgggtaaactttatcagagagaaatcaaaaacctttgaagtattcaaagagctgagtctaagacttcaaagagagaaagactgtgtcatcaagagaatcaagagtgaccatggcagagaatttgaaaacagcaggttcactgaattctgcacatctgaaggcatcactcatgagttctctgcagccattacaccacaacaaaatgggatagttgagaggaaaaacaggaccttgcaagaggctgctcgggtcatgcttaatgccacagaacttccctataatct

SEQ ID NO: 171068 - DNA, 470 bp, Glycine max
  unsure (1)..(470): unsure at all n locations
cttgagcaaattcatccgacagtatcgttgtattcggatnttctattgagtaccgcaatatatcgagacgctcaatattgataacggatgctcgtagcatatgcagaccgcaataacttttaactcggatgtaggattgagtcccgtaatatatcgagacgctcgaaattgaaaacagaagctttgagcatattcaaacgacgataacttttaactcggatgtgcgattgagtctcggaatatatcgagatgctcgaaatatagaacagaaactctgagcaatatcagaccaaaataatgttatattccgatttgtgaatgaatcccgtaatatatcgagacgcacgaaattgagaacagaaactcagagcacattccacaaagataactttatattccgattccgattgagtccgtatatattatgacctccaatcanacagaactttagaaatgcaacgacataactt

SEQ ID NO: 171069 - DNA, 411 bp, Glycine max
  unsure (1)..(411): unsure at all n locations
ttgaaaaatctgcgatttattttatggtgtatgcagcaagctatatggatcctcatgatgcatgtgcagctattgcagagaagtcgtataaactatggttggaacttgagaacagaacagatgatataacaatcatcattgttcagatcaaaggtctttctaatgtatggattctttatattcctttagcttcatttgctattcattctagtttgtttatagaatttaaatttgtaatattatatgatcatcttatcccttgaaaaataataacaacaaactctcaatacataaagcggggtcagttatgaatngattaattgacaccattagactttatgaaaaactctttttttgtaaaatcacgccattggtcttctcacaagatgtaaaatctaaatcttgctactg

SEQ ID NO: 171070 - DNA, 407 bp, Glycine max
  unsure (1)..(407): unsure at all n locations
acagataggtatactatcttggtcatgaagatttctttagacgtctnggttcaattgcagtgctataactcttacagatggtttatactttntgttggcttttctgacaggcattatcagcctctntgaaatctgatatccttgtcatggttagtgagttactgagcgtgggtcttgatgcaaatgtaagtttggaagacctggacagaaaggaatgtattccacgatagcatggagttcagaatttgatgacattgtgtttcagaatgtgctcgtctgcagagtatcttcttaccacgatgcttcctatccctgttagatactgagtctgcaacattgcaacgttgatactacattanaattatatgtgcttcattcttactattctatttctgacaacagactta

SEQ ID NO: 171071 - DNA, 453 bp, Glycine max
tgcacgcatgcaagctttgcggatttggtcttcgctggcgaaaggatcaaagtgggtctttataaaggttaatctgatcatcctgctttgatgaatgcgaaaactggggcaaatgaagaggatgagaatgagggaaaaacccttgctatgactgccattcctacacggtcaaatttcccatcagcccaacaatgtcattactcagccaataatagtccctctcacccaatcatccacaaagcctgcctgtcgcacatccggtgccaaaacaccaaccaaaaaggaattttttagcaaaaagcctataggattcaccccaaattccggtgtcatatgctaacttgctcccatatctacttgataatgcaatggtagtcataacccctgccagggttcctcaaccaccatttttctgaggatacgactcgaacgcaacatgtgcatatcatggag

SEQ ID NO: 171072 - DNA, 334 bp, Glycine max
  unsure (1)..(334): unsure at all n locations
gcaaaaaaatggcactagtgagtcatagcaactaatcactcttattataactcagatctctctttatattcatttagttgttttcatataaaaaccaaaaacacaaaaatatttaaatcatctttttaatcatttttaccgttagtttaataaatttaactaattgaaaatacaactaattttttatattaagagtttcaagtccattgttactattgcgtaagacacacttacctttatgtgagcctaatatantttacccatcaaacttctaaattctatgactaaaaatttggaaactatataaataaagtgattctaataaagttgcaat

SEQ ID NO: 171073 - DNA, 396 bp, Glycine max
gctttgtacaaaaggtacctatctttaacattcactgttgtaaaattttaggtttatttgagtctttataattttgtccacaaatgtttggaaaggcaacaacagggacacagtcatttaaacattctaacaattcaaattagacatcctaatgcatatataaatcacaccaaatataatttcaatttacatacaaacgcaatttttaatagcaactaaataacacaaactagctaataatatgaacaaaatcaggtataatctaaaaaaagagcaaaaaaaaaacacaatacacagctaaacatgatccgcggaagaacttccgcaggatcttccacgagaagaaaatataccctgcggaagaagcttccgcaagttcttccgcgacaacaaaat

SEQ ID NO: 171074 - DNA, 504 bp, Glycine max
  unsure (1)..(504): unsure at all n locations
tctcttttcttgttaatgattatatattagttctaatccttgttattgggtatgnttttatgacatttaaatacttagtatttcttttattatttgattagtatgactgaacatgatgattatatttacttgttcttggttgtttactgttatgagttttaaactcaattattttgatgatatatgactagtggtatgcacttttatttggttactatgaatgactttctggattatatgacattctatgaagtattatatttttagtgtgatgaatggttatgatatcttgtttgattgttctctattctcatgtactttggctatattattatggtattcgaacaatntactatttccttattcgcatggtatggttgaacaagtatgttatttggctatgtggattctatagataatctatttatgattgttgcttcatgagtcttacttcatgactagtgtgatggttcttcataaatgctgtttgaatgtttagttata

SEQ ID NO: 171075 - DNA, 333 bp, Glycine max
  unsure (1)..(333): unsure at all n locations
agcttgttcgagttgtgttacacatctggtaagtatttaagtaacataccatcagaagagctatttatttgtgaaaatttataaaccttatataaactatgatgtcagagacttagagaagaggtgggaaaagtntgacaattcagatttgaacccagacatgatcaagatggggagaagatcacgaacccagtacagatatacaaccatttgaaatcgaccaattttattatgatacagattcatatggttaaataataaagtaaagccacatgggtagtattgttcagattcacaattctagtataacaaatgttaatggggggggggggg

SEQ ID NO: 171076 - DNA, 461 bp, Glycine max
  unsure (1)..(461): unsure at all n locations
ggctccctcacctcctctaatggcccataacagatcctcactcatggcttctctatcaagaagattacccttcacatcaactatgtgagcatcaatcacattatcagcagcaagaccgaacttacgcatcaagaatccatagccaccaccactgaaatggccaccagttcccacaggggggcacacacctgctggaaaccctagtgtnttgcttttctggctaatgctgtagtaaagttcaccaatggttgcaccagctagaacccatgcagtgctgttntctgcgtccacttcgatttttcgaaggtttatgaggtcaaggacgacaaatggatccttggcaacgtatgagagaccctcgtaatcgtggcctccacttcgggttcgaatctgcatgccatagcgttgggaacagattatggtggcttgaatgtgggaaacagtgagaggtgtcacaatca

SEQ ID NO: 171077 - DNA, 251 bp, Glycine max
gaagatttttataactccatgctaaattgacggcggttaacttaattattgaatgcggcattagttttgccatgaaatgcttaagtatgccaatgtccttatattaaaatgactattgttttataaaaaatttgaccaccaatgcaattatatggttggagaaattaaatgcaccgtaaatggaatgggttaagagagctaaaaaagggttttgctttgaagtaattgacttgttaaagagaagtatggaa

SEQ ID NO: 171078 - DNA, 392 bp, Glycine max
  unsure (1)..(392): unsure at all n locations
cacatgcatgagtagtatgaaagagaagtttgtgtaagatggatgcacatgctantcttacattatctcatgaagcatgcttatagggtctcttacatgaaatgatgtatcatacccatggaantttggcagacataaagctagtgaataataacttctcatcacggaccactaaaacaattaagtgtngtgtatattggactccacgttatgcataaatattatacaagttaagttatcggaagctaacacttcggcaaataaccaatacttgtgtcaaccatttctttacaccacctaactttcattcttctccattgttatgttcatccttctatccatttcttgtgttcttcattgtgaaccaatgacacatgcataacctaaaccaa

SEQ ID NO: 171079 - DNA, 422 bp, Glycine max
agcttgagttaagtttagccagcaacacatattctttaactgcattcaacatcagctgggctataaacatgatgggcatgtccgaatgtgtatgtgtgtaattaattggaaacgcacgaaaaattttaacaccttgctatttcttcattacaccattcacagaatatgttaccactattcatccaatgttgcgatgatctgattaccaaatgggaggaaatgctgtcttcacatggatcaagtgaaattgacgtatggccttatgttaagaattagactgctgatgttatttctcgaacagcatttggaagtacttatttagaagggagaagaatattgcaacttctaaaagagacaattgaacttacactgaaaatgagaggacagaggtaagactaatatgtatatttgattatctgata

SEQ ID NO: 171080 - DNA, 500 bp, Glycine max
  unsure (1)..(500): unsure at all n locations
tataatgtaataacaaaataacttcttaggttctaaatgtgtttatttactttcatttacatggttgtgtgttaatagtgtttgttaaattgtaacttggttattgaagagacaaagaaagaaaagtgacttcataaatatatagccaaatatgatattntttactggatacttcgtacgtctttagttccaacaatgcatgtgttatggacttaaaattttgcaaataatttaggaatctactgaaaaatttaactaatataatataataaaagttaaccatcttatcatacttaatatattatattaacataaagcgatcaattagctcaatagnttcaatctaatactntaagaaanatctttattgttcatagtgatactgactctagcaagattgcccaagctttggcaaagaatacttatggtatatgcaaaanaaaaaaaattataataaaggacgattataatactttatgcattcttcaaatagatcatat

SEQ ID NO: 171081 - DNA, 423 bp, Glycine max
  unsure (1)..(423): unsure at all n locations
agcttagggtccttgatccatctatcaggatgtttcttcttntaatccaaaagaacaacacaaatgcaccaattaattagaacccttgttaaataaatagtagtaataataataataataataaagttatatatagtacaatgtttaagtgcagggaataaatatggaaataccagagccatcttacgataagcgcatcgaatttcgtcgtcggtgcaatgtttgacaatcccaagctctgaataataacaaacggcaccgtttgactcgacggtgcccaacatatttgcaacaaggaaaatcaaaatgttcttgctatttcagttagtagtcagcagttggaagagtatataatgtaatgggaggaaccttttgatgcataaaatataatataatgtaatgtaatgggagctcgtgctggtt

SEQ ID NO: 171082 - DNA, 482 bp, Glycine max
tgaaccccttagctgttccagcgtatagcattattgcagctctgtgtatggaagaaaccagactatggtagacccttgtccttaaaccttgtgggctcatatggtcccaatatcccggttggaatagtggcagtacacacaaatgttgctaacgtcagtgcagaagaacatgtactgctactcagaaagaatgacaaaaagaatcagcctataatgtatgtattgtttcggacacctatacctaaaatgcagaatcagcctaatacatcatgtgttaacaaaatctaacatcatcgatcaccgcctcatcggtgataaatatttgccatatcatacacacttatgctcctaataaaacattgtttgtattttttaataattacgtgaagaattatataacatgatatattatttcctcggtctttaaaataaaactgtaaacaaagtgttgcacaaatcacacatatagtgtcatgtcataa

SEQ ID NO: 171083 - DNA, 423 bp, Glycine max
  unsure (1)..(423): unsure at all n locations
agcttgacaattccttagttacagaggaattttgtaacttaatgttaacaaaaaatgtagctaatcaaagatattaacacacaaagaattttgaaagcaaatttgacctttgcaatagttcaataatcgtgacgatccaaatcaaaaaggtccaaactccaaattaattgattgcatagcaatcctaataactaaaaaatattaaaaagaagcattcttgattctntaatcatcatcaagtgtaaaggtcgaggagactgaatgagtaacatccaatgtggctagtgagggaacaagttctgcaacataaagaaattattttagttgtcattcatgttatataataagtacataaaacaaccttaagagaagaaaaatcttgttacattcttcaattctttcaaactccaaaaattcatcatt

SEQ ID NO: 171084 - DNA, 456 bp, Glycine max
ctcaatagtttctaagaagcaataagttcaacattgtgtaatagactaccaagtttaagtaatcaattacaaagtgttagaacaagcaacaaaacttacatttcttgaaatattgacaagttctatcgaattaatcaattgccaaagtgttgtaatcgattacccaggccaacttcaaaagaaaagagtgtctttaactcaaaataattgattatcacatcttgtaatcgattagattgtgtcttgaaattatagattaacacatttgataatcgattattccaaaaactatagaagcttgagaagattaccccactctgtaatcaatcaccaagtttctagagatacagaataagatggatttgaaccaattaatcgattatctcattcgtcattaaatatattgttatggtaaactatattaccctccttgtcgtctcatgaagactttgttta

SEQ ID NO: 171085 - DNA, 421 bp, Glycine max
  unsure (1)..(421): unsure at all n locations
agcttctcccctattttgctatatataggggatgaagtgaaaaagaaaagggttcagccccttaggcacttctctctctctcgaaatagctgaggaaaattagttccgtgaagaaaatccaagccgaggcccttccgtaacgtttccgtaacgtttccgtgagtaattacgcgaagattctcgaccgttcttcaagatacatcattcgttcttcgttttcttcagtcttcaacgggtaagtacctcaaaccaagctnttcaattcattctatgtacccgtggtggtccatattttgtttcatgtatttttgttctcgttttcattcactttttatacccccttttgacgtgcttaagccatttatttaagtcatttatcgcctaatctaaaaataaaataaatttccaccgatcatttgaa

SEQ ID NO: 171086 - DNA, 458 bp, Glycine max
  unsure (1)..(458): unsure at all n locations
ngttggccgcgatagacacagggtgcagatgtctacgtttgtctccgcatgctatcatgcgctgagtcttagagatagcaaaagaatgtttatacggataaccacttatgtaattccgcctgccccctaacttcacgagatagtctcgacagatgttgtctgcgtggaatacgacgtaaatctccgcgtgtgaacaagcttgttggccgcgattgacaagggtgcacaagacgacgtttgtctccgcatgctatcatgcgttgagtcttagagatagcaaaagaatgtttatactgataaccacttatgtatttccgcctgccccctaacttcacgagttagtctcgacagaggttgtctgcgcggaagactacgtatatctccgcgtgtgaacgagcttngtggccgcgatcgacatagggtgcagaagacgacgttagtctctgcatgctatcatg

SEQ ID NO: 171087 - DNA, 330 bp, Glycine max
agcttcgaaaagagaagagattattaagacgcgttatattcagagggtttccgcttctggaaagagaagtaatatttgaacggtattggctactaaaccctacaccgtcaacaacgcaacacaccgttgtggattttattattgtctctctttctatctctacaattatcaggggtagggcctgggcctgggcccggaaatgaatgtatatatatgtgtggccttgaaaatcctgggtcggtaatagaacaactgggccactcaaacttgaaccgcgtggaccggggtggtcaacttcaaaccacgatagatttctacttattcttacct

SEQ ID NO: 171088 - DNA, 495 bp, Glycine max
  unsure (1)..(495): unsure at all n locations
agaaccctcgttgtagagcagacaaaccgatacacattcacctctattgttaccaaagcgatggaggtggtgaaaggtctggacgtgatacggtacatgggtctgtggtactagattgcgtgtttcccgtcgaggtttcatcccagtgacggcgtctacaccagagccacctacgctctcagagatgactgcaccgtcaacgtnctcaatgagacttggagtggcggcaaaagaagcttcattgagggcactgcttataatgccgatcccaacagtgacgaggcctagttgaaggtcatgttctgggtgccttcgttcttacccctttatcccgttactgtggattactgcgttttgtacattgaccaagaatatcagtttgctcttattgagcaacctatcatgaactatctttgggtatgcctatatctgtctcttcgtttctcaatatgaacatttctctctcgttcacaaatgtatgaaccataattatga

SEQ ID NO: 171089 - DNA, 498 bp, Glycine max
  unsure (1)..(498): unsure at all n locations
tactcaagctgtacaatatnttatggagagtgagagtattaatagaagattaaaagttatcgattataaatgtatagataaaatcgagaaacaactatgtagcttctaatttataagttatatgacatattttaagttagtagcattagcatgtggttgtagttttttaaaatatgttaaaattccattgtagtctcacaaatctaaaatatcttgttctggtctatcggttctagaaataatatagctaacaaaaaaaatacttttaaataatcatatcttagtttttaattaatcttgaactcttataatcttttaaaaaataaattttattaaaatataaataaattatgtaaataatggaataattaatatgaacagtataatattaaaattacttttaaataaaaatagtattatattataggagacaatatattagagtctttaataagtactntagtcataaaatctatccaggttcaactatttgttttt

SEQ ID NO: 171090 - DNA, 411 bp, Glycine max
  unsure (1)..(411): unsure at all n locations
agcttgncatattgaatatatgttggcattgagatttgattaggatcaattttgggttgtctaacagttgcctataaggtttttagtttttcaatatttatctttgaaaatataaaatataaaatcaaaacaaacatattttccaaatcttaaaaatttgaaaatgagaactatttttagaaaatgaaaacaaaaaatgttttctcaaatcaagtgccacctaaaattaatggtgtgcaaattaaaaattgcatgaatgaaaaattcacatcttaaagagacatttaaaaagtcaaatgttgaaatacatttagttgaatctatcaatgatcaattntttgttagattagggatgaaagggaagtattacatcaaaatggaaatgagcttttggctgcaactgagcttttc

SEQ ID NO: 171091 - DNA, 471 bp, Glycine max
  unsure (1)..(471): unsure at all n locations
ggcttctacaagaggtagttgcatcaatgattagatacttgattgtaaagcttatggagagcgagccttgaccgaaggtagtcataaggtctacataacctttggtctttactcgcttccctgtgaagccgaggagtggactgacataaggttggatggtgttaggtgaaacttcaagtctctagaatatcttccaatataaaatattagtggagctaccctggtcgatgaggagcttggacaccatgaagttggcaattatgatggagacaaccatggggtcgtcttcattgatgaggttgatacccttgaagtctttatctgtgaaattgataaaaggaagacttcgtggtgatggtgtatcgacatagttgatgtctatgtccaggatgacttggaggtggcatntgtgggactggctggattgtcctccataggagaatcctcccgcaatattattgatcacccctc

SEQ ID NO: 171092 - DNA, 294 bp, Glycine max
ggttttattccattgaattggaagccactcaaaaaattttatcacgccataactcatattccataattagatcaggccacaactcatatgcaataattagatcaggccaaaactcacaaaactcatgaatgtgtcttcttgacttgtttaactagatctctgccacttgagtttgtcatttaaattaagataatcaaccaattttgtgtctggccaaaatgggattaatattaatatatatcaccgactaatatagattactttttacatgcgaactatgtacaagtatcgatg

SEQ ID NO: 171093 - DNA, 433 bp, Glycine max
  unsure (1)..(433): unsure at all n locations
agcttattaaaattaatataatcgattntcttgttttcttgctgtttttgaatatataaaantaagagcttttcatgcagggatttcccatatgtctaatgcatgatatatgatttttagtgacaatattgttgttgctctaagttccaagtagaataggagccttgcaagattgaccagccaagtattgagaagccttccaagcctttaggaggatgcattaaagtggtataagtcaacatcgaaattgtagttgatagtgattgttagcaatatgctcgaaacccatacaagcaagcccaagaggaatacggtgtgaaaacaaatcatatattaggcatgaaaatataaaaagcagtctccttttgctcgactatatatgtgtgtgtgatgaaaatttaaataatttcagaaaatatactttgattatttg

SEQ ID NO: 171094 - DNA, 291 bp, Glycine max
aacgactaaccacctgaattctttgagtgtgtctctgatcccttgtgcaaaacaacatatgactaactgccggtagtatctcgtgtctatcttctcccttgacagagactaaaaaacgacacagtctgagaatatttccgatatcttccgtatggtaacacatacgtggccaaggactaaccgtctgataatattgtagctccacatcacaaagtgtcataggctgcaacctgaatcttggctaacacattgacggacatcatctgattagacaaaacaaagaggacatct

SEQ ID NO: 171095 - DNA, 416 bp, Glycine max
agcttgcttgtgaagcttctatgggggctgaatttatgtgcttcaatgaggtcctttaatggtgattttccaccatggagatgtagcggaagacacatgagaagaggtgagaggaggtgccatccactaaggaataagccatggaagaaggaacttcaccaccaagatgagccttagataagaagcttggagatgatgcttcaatggaggaaaagaaagaaggagagaaagagagagggaggagcaagaaattgaaggaagaaaaagggtgagaagttgaactttgagttgtgtctcacaagactctcattcatcaaagttacaataagtgttacacatgtttctatatatagactaggtagcttccttgagaagctttcttgagaaaacttccttaagaagcttctttgagaaaa

SEQ ID NO: 171096 - DNA, 383 bp, Glycine max
  unsure (1)..(383): unsure at all n locations
ctgtcnttgcgccttgcggccacgctcaacatagtactntcgacacctactgtacgttgatttgaccaatgctgttatgggatatgttcgacaatccttcaaaaccttattgatacattctgaaaggttggttgtcatgtggccatatcgacgtccttctctatcataagccatcgtccatttttcctttgaaattcgatcaacccatgtggctatggctggactcagttcacgaaatttttgtaaattctgatcaaaaatgtgcttgcaaggagtgtatgctgcataaaaatagttatgaataacaattntaagtatataggaaacttaaataaacgtcaccaacaaataagaaatcttacccaattntttcaacatttctt

SEQ ID NO: 171097 - DNA, 438 bp, Glycine max
agcttggagaggatgcttcaatggaggaaaagaatgtagggagagaaagagagaggggggagcacgaaattgaaggaagaaaaagggagagaagttgaactttgagttgtgtctcacaagactctcattcatcaaagttacaacaagtgttacacatgcttctatttatagactaggtagcttccttgagaagctttcttgagaaaacttccttgagaagcttctttgagaaaacttccttgagaagctagagcttagctacgcacacccctctcataactaagctcacctccttgagaagcttccttaagaagattcctaaagaagctagagcttagctacacatacctctccaatagctaagctcacctccttgagatgagaagctagaacttagctacacaccccctataatagctaagctctaccccatgacaa

SEQ ID NO: 171098 - DNA, 445 bp, Glycine max
  unsure (1)..(445): unsure at all n locations
cagctntatagtacgggtctaagacacgaatgccaagtcgccacgatatgcaaggatgactccccgaggggatcagatttggtacggccatgtcctcctggtttctgactaggaaattggagagtggaggagcgcccggacgtttacgcgacaagcataatgtaaccctttgtagctttaaaactctacgaatgggcctaggctttagagtttccttatgttaaggaattatgtcttttgttcctgaatttataatataaagatctttcttcatcttttcctacgcctctacccattctcattcatttgcatgtttatttctttacgcttaataatgccagatccgacgacgagtccctcaaaggtactgatacctatgaccctgccgtcgatttcgaggaagaagcgggtcggacggagagtgaagaggacaangatgtgggac

SEQ ID NO: 171099 - DNA, 414 bp, Glycine max
  unsure (1)..(414): unsure at all n locations
agctttatgtgatgaacattggttaatggcaatgtttgattagtttattttatttaagagaaatgatgtatgggatttagctcctaaaccaacctctcacaagtcaatcggaaccaaatgggtgtttcgaaacaaacttgatgaatctgacatcacagtaaagaataaagcaagattggttgcaaaaggatacaaccaagaagaaggaatcggctatgatgaaacctatgctctagctgcaatgttagaagctataagattactactttcatttgcttgtattatgaatntcagacttttttagatggatgtaaaaaatgtcttcctcaatagatgcattgaagaagaagtgttgtacatcaaccacttggatttgtgcattatgaacatcctaaccatgtctacaaacagaca

SEQ ID NO: 171100 - DNA, 363 bp, Glycine max
  unsure (1)..(363): unsure at all n locations
tgcgtagcccacccatctttcatagtagagtatcgattatgtgtcttctatcacgaatatcgtctccctttccatcattggtggtaccacctgggccgccagatccctccaccttttgggcgtgttctttgaaagatccgtccccctttttgcacatgttctgtagttgcatcctatccgaaaccatatcaaaattgtactgatactgcctaacaaaggcaaccattatgtccttccaagaatggactcgggaaggttccaagttagtgtaccaggtaacaactaccccagtaagactttcttggaaggaatgtatcagcaattcctcatcttttgcgtattcccncatcttctgacaataca

SEQ ID NO: 171101 - DNA, 467 bp, Glycine max
  unsure (1)..(467): unsure at all n locations
cactccatcattaggattattacctgacatctcaaacaaacaaatcatacgtaacaagacaattatagttgttgtttgaatacctcacccactcaagtgtatcacacaattatggcttttctctaatgaaacactcttgccttttaccactctaattccccttgagttcttaggtaattcaagagattatggccacaacaaagaacaattcaccaatatgtgtaaggtaaggctagagagacaaggaaaaggttaaccaagaaaaaggctaacaatgtttttaggcacaaatgaaggaaataaaattcagaatttaggaattcaagtaacaatccttcatgcaaccaatatattaccttanagagaattttttttaagttcttcaagcatgaaccattcagcccaatnntttttttttttttaatttgcttatatgaaattctgcttcttttttttntatataacaa

SEQ ID NO: 171102 - DNA, 425 bp, Glycine max
agcttcaacatcagaccactttcttggtgctggttttacttcacatggacttgatggggcctatgcaagttgaaagccttggaggaaagaggtatgcctatgttgttgtggatgatttctccagatttacctgggtcaactttatcagagagaaatcagacacctttgaagtattcaaagagttgagtctaagacttcaaagagaaaaagactgtgtcatcaagagaattaggagtgaccatggcagagagtttgaaaacagcaagtttactaaattctgcacatctgaaggcatcactcatgagttctctgcagccatcacaccacaacaaaatggcatagttgaaaggaaaaacaggactttgcaagaagctgctagggtcatgcttcatgccaaagaacttccctataatctctgggctgaa

SEQ ID NO: 171103 - DNA, 380 bp, Glycine max
  unsure (1)..(380): unsure at all n locations
catctcttattgatgagatcaaatctctttaatcaatatttattatatgtatgtttatagtttggaacatatcttgaatctaataaaatattggtagcataattcttttgtatctaacaattgaatgtaatcagcatgagtcaacataataaatatagctatataagattctatattattctttaaagtcccaaaagtaaggaatgattataatgcaatcctaccctcaagggaattggatagaagattctaagaagattggaccagagctattgaagaagaccctatggttctcataagtctttgggtagacttttggtccatgggttaagtatgaactcacttatctntgtacatactagattagggtttcattattt

SEQ ID NO: 171104 - DNA, 411 bp, Glycine max
  unsure (1)..(411): unsure at all n locations
agctttgactccacacacgttattataattcagtctttttcttcattagtgctttctttctcttcgngaaagccaaatcacgatctctcccatttgggatgggctttaagattaattttgggcgtcccatgttctaaagcatatgcacatatatagaaattgatcaataaagcaaaacttggggtcatacgttggggatagagagatcaaatagacaactagttcatgaattgatcgaatgtttcggataagatgttgttctagaaatctaaaataaaaaataattcaacaaaaaagaaaatcatcacggatcaaagaagaatggttcaagtctaatctctcctctcatcaaggattaaagaattttatagaagaaaaagtaaactggttttgaataatagcaaaaatgaa

SEQ ID NO: 171105 - DNA, 466 bp, Glycine max
accatgtagctcttcctatctctatacaataccatttgattcacaatttgatgatggttcatatgaagatttgggtgtagttcaattgtcttcttcacagttaagaaaacacatcacaattgagtgactatccttcttggatgttttttgtaagatgttgaataaatataatggataaagtggatttatgtatggaaatggatgtttcttgcggtctaaaaccaattatgaattatgcaacaaagtgtgttcttttgaaagacatttatgaactcattttgcttagctggctagatttgtgttgtatctattggatgctttcacatacatctaatgtattatactatgtgataatcataccatcaattatccaacaatcttgtgtcgatggttacaccatgatggactcttaaagatagttctatatcaaaatccatcacaagctacttcaagtagacatatacta

SEQ ID NO: 171106 - DNA, 418 bp, Glycine max
agcttgccacccagctcgcccatgcaagctcagctcgcccaggcgagctaggttgcttcctccagaagcaaccgccttctagaggaatattctggaaggcccaagtggtcctggttgctatttgaacccccatttttactaaatacacccccttgctctttatggtgattctttttccgtaacgttacgaaattcgtaaaatttcataacgatgcttgttttgtttccataatgttatgaaaccttacagattatgcaatcatcccttttttgccttcagaaacgttatggaactttacggattgcgcactaacacttccttttaatttccggcatgtcacggaacttcacggattgtgctacaatgccttctcttgacttccggcatgtcacagaacttcatgaattgcctaacgat

SEQ ID NO: 171107 - DNA, 455 bp, Glycine max
  unsure (1)..(455): unsure at all n locations
ggaagggtactccttatcctcccattagagagccaggagagcctcatctttcctctaatggctgtgacagtcaagtcatgagtgtggatgataaatccctaataaagaccctggccgattacaaaaaaaactaagtggaattaagatgacatagtcaacgtagacccacatgatgacactattgatagatgcccaaaaccaatcgaagaactcgtcaagctacaacttggacccaaacttggacaatgcactcaactcagtagggacctcaccaatcacaaatacaaacatatagttgaaatcctatgaaggaatgcatatttattcgcatggtagccatctgatatgccaggtatccatcctagcatcatatgacacnaaatgggcatatgtccttaagccacaccagtctcatataaaaagagaaatatatgagaatagcgatgaataatggt

SEQ ID NO: 171108 - DNA, 419 bp, Glycine max
  unsure (1)..(419): unsure at all n locations
agcttcagtgtcatgaattttttaccacagctgtgttgaatttcatcatgggcgnagggcgccttttctaattgacactttttatattgtatctttaacactttttatcttttcacaaattttgagagaatcttgaggggttttgagagctttgaagcgtggtcaaacccgtgaggacggatcatgatcattattcctacctttttgatgtctatgtctacttgatatagaattatgggttgtgctctaatcatgaatggctagtcaccctattccggggttatgatgtaactattcaattgtattcctttccctattcttaatgaaatttctcaatattttatgttaattaactttattccttattcttattgggtatttagaaactgatgaatcctatgctcaatcgaatgtattat

SEQ ID NO: 171109 - DNA, 447 bp, Glycine max
  unsure (1)..(447): unsure at all n locations
tgacgggaaatcagcatgccatctcggtcagttcatccaccgccggaatgcatatcacgctaatggcgttgaaaattggcaagggcgatgaagtgattacgccttccctgacctgngtttcaaccctcaatatgatttccttgttgggtgcaacgccggtaatggtggatgtcgaccgcgatacgctgatggtcacgcctgaagctatcgagtcagccattacgccacgcactaaagccatcattccggtgcattatgccggtgcgccagcagatattgacgccattcgcgccattggcgaacgttacggcatcgcagttatcgaagatgctgcccatgccgtcggtacgtattacaaagggcgacatatnggcgcacagagtaccgctatttttatttatgccattaaaatatacctgtgctgaggcggcctgatgtactgatatg

SEQ ID NO: 171110 - DNA, 454 bp, Glycine max
  unsure (1)..(454): unsure at all n locations
atgactttgtattttattacaacagagaagctttgcctctaaagaaatatttctaacttagaaaatnttcttcacactaaccatgatgatacatgatgcaaaacagatatcaaatgtactaagatgcaacaattaagttaacaaccactataaatgccactcaaaggagttgggcatgtaaaagtcaaaacttctaaaacttcaagctctagccttaggttgttccatgttgcttatgttgttcccgttatctctaatagtattttattattatgattattgaatgatacaatttgcgaagtgtgaactccaacaattatatctatgacatngtgaatttatttctatatgtgtgtgtgtgtgtatgcatattgtcattntttatctgcacgcatcgtggtttgggtctggcgtggttgaccctcgacaaattattttttatgttgttagatag

SEQ ID NO: 171111 - DNA, 403 bp, Glycine max
  unsure (1)..(403): unsure at all n locations
caagcatgttctgtgtagctagaacataatagctttctgggctcatgaatctaaactcttacaagctccaatttaaatatttatcctttattattgaataaaggaggatgcggattggacttctttgtgttggtgttacgctaaaattaatagataagtgcataatgtgttgtgcgacccctcccatcttataaataaaaaataaaaagataatactatttatttgaaattaatcacgataccaaacattcataccaaaagattcaatcatctaaattaaacactttattaaactaatatagctcaaatatttcattttggtttatggcgcatctaagtgacttacatttaatcttaccacgacttacttgtgggcataaaattcaattattntatagctcta

SEQ ID NO: 171112 - DNA, 296 bp, Glycine max
  unsure (1)..(296): unsure at all n locations
tcatgtccttcacattgtattatggataattcatganacatttctgagaatgcaaaaagcaacaaccccaatttcaacgccataagagtccaacaccagtctctctcagcagcgaacatcttagcataagagtttctttttcccatggagattacatgggacgattacaactatcatacgcatgcatgttgctacacatacaaaggacctgcnntttatttcttggtccattgatctaaaattaaggccgaaggttactcttagtgtggatatgtcatatgtgtgagtgtgatatc

SEQ ID NO: 171113 - DNA, 416 bp, Glycine max
  unsure (1)..(416): unsure at all n locations
agcttgggatgaggtttgttgaacatgatnggattatggctggagagcctccaccagtaggaaacaaggatcaaatggatgaagaagtataagctgaagttccacaagagtttgcacatcaatggagcccttttgagtctcttataatttagaagacggatgccatgtttcacctccattatgagcacttagctgatgttcacaatactttagagaacatcacaactcggctggaaaatagaaactaggataacccttagtaacatccttaacccggatgaggatgaagcttagttatgtttcagcgctcgtttttgttggttaatggttcgttatgttttgttatactatttctattcgtttgtgtgataaaagttatgattttgtctaggactgctatgggtttatttcccttt

SEQ ID NO: 171114 - DNA, 498 bp, Glycine max
  unsure (1)..(498): unsure at all n locations
tccttgagaagctagagcttagctacacacccnctataatatctaagcttacttctatgacaaagaaacatgaanatacaaaanaaagtccttactacaaagactactcaaaatgccccgaaatacaaggctaataccctatactactagaatggccaaaatacaatgcccaaacgaaggaaaaacctattctaatatttacaaagataagcgggctcatacttagcccatgggctcgcaatctaccctaaggctcatgagaaccctagggccttcccttggatctctagcccaatctacttggagtctgctacccaatgcccttgcgggataggattgcatcactaaatttcataattaggttngatgcataatttgaagaaattaaatgatccctacaattcataattaggagtcatgcataatcggaagaaattaaatcattcttggagactcatanatgcataacacatgctctgataccgcatgtaaaaattc

SEQ ID NO: 171115 - DNA, 434 bp, Glycine max
  unsure (1)..(434): unsure at all n locations
agctngccacccagctcgcccaagcgagcaaggtttctttctccagaagcaacaaccttctggaggaatcttctggagggcccaagtgggcctggttgctattttcacccccatttttactaaatacaccccctgcccttttttggtgattcttttttcgtaaagttacggaaacttacgaatttcgtaacgatacttgttttctttccgtaatgttacggaaccttgcagattacataatcatccctttttggacttacggaatgttacggaacctcactaattgcgcaacgatgcttccttttgatttccggtgtgttacggaaccttacggattgtgcatcaatattttcttttgatttctagcacgtcacggaatttcacaaattgcctaatgatgggtgccaagcaccttataatgaccaaacacaagt

SEQ ID NO: 171116 - DNA, 467 bp, Glycine max
  unsure (1)..(467): unsure at all n locations
tctcnncctatttgctataaatagggggagaagtgaagaagataagggtctttctcttangcacttctctctctctcaatatagctgaggaaaattagttccgtgaagaaaatctaagccgaggcgcttccgtaacgtttccgtgagtaattacgcgaagattctcgaccgttcttcaagattcatcgttcgttcttcgttttcttcagtcttcaacgggtaagtacctcaaaccaagcttttcaattcattctatgtacccgtggtggtccacattttgtttcatgtatttttattctcgtttcatttacttttatacccccttttgacgtgcttaagccatntatttaagtcatttctcgcctaatttaaaaataaacataatttccaccgatcgtttgaattgtatcatccgctaaattggttaaaatgaattcgaccgtcggtctgctgaaccacgttggaat

SEQ ID NO: 171117 - DNA, 437 bp, Glycine max
  unsure (1)..(437): unsure at all n locations
acagcttgtatttatggtagtgtctattttgagggtttggattgggagagattgaaaatgtttgatgtggtaataaggcttccacaagtctctggggttgttacaattgattatcgctcacaataactaaagggtgacttacaatttgcaaagataattctaaagaagaactataaagaaaagtttggatttgtttagctngaagaatatagaaattaaaaaaaatacaaataaagaatattttttggactttcttttttagaaagtaaaaacgcaaaagaaatttaatttaattcaaatagagtatttaagcctatcttaaaatccatttaggataatttttaaatntttttggataatttgcattttaggtcctcgtgatttgatcgaatttgagtttgatctttcagcaatttcttaatttgttaaataatcaa

SEQ ID NO: 171118 - DNA, 464 bp, Glycine max
  unsure (1)..(464): unsure at all n locations
ttatgtagaaatgagtgacaaataatctgattgataaaaataactaaatgacatgccattcttaagtgacatccttaccaagatttttgtatatatcttcacattcttccaaagtcattaacttaatcccaagtgcaacagctagcattcctcctgttgatgtgccgcatattaaatcaaacaactcatgtattcgttntccagttcctttttcaatttcctttagcatttgtacagttgctagacctttcattcctcctccatccattgagagtatgcgaagtccttgcttacccacttgtcttccttttattgcacgcctcaggttttcattntctcctacaaaagtaaaaatgaataaccccattaagtaatcaggataaaacatcccgacatacatagatgaatntatatccgaacacaaccaagaattgcaaagcacgagctgcagcttatacacacgt

SEQ ID NO: 171119 - DNA, 435 bp, Glycine max
  unsure (1)..(435): unsure at all n locations
agctttacttcaatatnttccaaatcatcaagaatcttgttgaaatctgccaattgttcagtggcagttcttgactctgtcatcttgaagatgtacagttgttgcttcaagcatagccgatttgcaaggaactttgtcatatacaatgactccagtttcaaccacattgaggttgttgtcctttctcttgcaacttctcttaaagctttatctccaaggcatagaatgattgcacttctggctttagcaatcatctctaatttctcctttgagcttagagattctgacatcctttcttccccttcaagagcttctacacagccatgttgaatcaagattgctcccatcttgattctccataacccgaagtcattttcccctgaaaacttctcaatgtcgnactttgttgttcccatctttcttaacttgatcttg

SEQ ID NO: 171120 - DNA, 506 bp, Glycine max
  unsure (1)..(506): unsure at all n locations
tcaanacttatacaagaatgaagctctgataccacttgatagacaagtggctctagatatcttaagaaggggggttgaattaagatattccaaactatttcccctaattaaaaatctatttcactttttactcaagttatgaattcccttaatgacaatcttcttaaatatcaattcaaatgaaacaattagaatatgaatataaagcaataataaataaaggagattaagggaagagaaaatgcaaactcagttttatactggttcggccacactcttgtgcctacgtccagtccccaagcaacccgcttgagagttccactatcttgtaaattccttttacaagttctaaacacacaaggacaatccttcctttgtgtttagaattcctttacaacaagagactcacagtctcttaatcccttagagaatgagaagaagaagaagaacaaatctctctagaaagagatgggatttacagaatgagcactcanataattccttaa

SEQ ID NO: 171121 - DNA, 422 bp, Glycine max
  unsure (1)..(422): unsure at all n locations
agcttgatagaggtatccataggtgttgttgctgtcttacaacagatatatctanagtctgataaaagttccaaggcatattttcgttggttaaggactatgcctttggaggaccgtgcaatttctaaacccaaaatgaactttattgatttcagaaatgtcatttcctgctaacaaaacatcatcaacatatagtagtaaagctgtgaaggatgtctctatctccttggtatacaaggtgtgatcagcttgacttcgagaataaccaagaacttgcagggcatgtgaaatagtgttgaaccactgtcgactagcttgctttaacccatagggagatttctttaataaacagacctgataggcttgaaagtcgatagaccttgcggtaaagccatatagatntcttcttctagatgtgcatg

SEQ ID NO: 171122 - DNA, 374 bp, Glycine max
  unsure (1)..(374): unsure at all n locations
ttacaaacttttattcctttttctaaaaacaaaatatattatgatataagttcataaagagatacttcaaaatgaaaaactattatgagcttagaatgaaaatgcaagtagtttctaaaaaaagggttttcacaattcaaagctctattttcaaaggaattgtttacttaataagactttgatgaaaatgttcaattntaaattccttaaaacaaggtctttcagccttaacgatttccaaaaactagtccacacattaaattagtgcacatagaatatgagaaataagatgatgccattagtgtatttcaacaacttggccagcacataattgacttcacacctagccattgcgctgcttgaccaacgacatc

SEQ ID NO: 171123 - DNA, 260 bp, Glycine max
atattatggttattcgagagcctagctattttctgtagaggacatcaaccttgggcgagagagcgtaactctctaccgagatgagaaacttgaacgcatcaacctaaacatactgaccgaactctgagataacgagctaatttagctgaaaaattacatattacgttttagaaaaaattatggaatataaatgcgtcgacccgacttgaaatactcaattttgttttaaaaaagaatatactgtgaacaaaataagtaaa

SEQ ID NO: 171124 - DNA, 502 bp, Glycine max
  unsure (1)..(502): unsure at all n locations
gctgtatgagcttanaacanagaaagggaaacatatgctcatatggctatcaaagggattaattcaaggtaaatccatttggctagaggcttataagaacaaaattgcctaaatcatttccaaatatgcatgtgaattaggaagcatcagcaagaatcaagccaaggctattgtgcaagcaatcattgtggcaaaacacaccaaatgattatgatgatggctcanattctcacaaaggtaaacttatcacttccaaattgagctttcaaaactatcataagcgacttttattttcaaaacaattactcattacttgaacatatcctataattcaaagaanaatatgcaaagttgtacaagcaaacagaattgacctanaatattaaactagaaacccaacanaactaacaacattaacanaattaacacaactaacaaaatntaaaatactaacataactagcanaaccaaagaacactcctnccatacttaaacaacacat

SEQ ID NO: 171125 - DNA, 417 bp, Glycine max
  unsure (1)..(417): unsure at all n locations
agcttcttcactactaccctctactttattngagggactgggagttgtactaggtctatttccacacccaccattctccaaatttttactgtattcaactgcattaactctcctaggccgtggtgcttcgggtgatacatgcatttgtatggttttttctttttcatgacgtttgtgttgaagtgaagaaactgatgatgttggatgtttttgtaacttctttgacagatttgtgttccaatagttcttgatttcattgtctgttcgtccaggtagcctctttgcaatcaatgcccatctatataaattaagctcaaaattcagaatttcaattgtacgatcacattacatatatactatgatttttatgcatatatacatgagcaactaatgtatattaatgttttataataacac

SEQ ID NO: 171126 - DNA, 311 bp, Glycine max
  unsure (1)..(311): unsure at all n locations
tctntaatctcttatatagtatatcttatgtctagctcttttattgcattactntaagatcttatgatcatgttcaatatttaggggttgaggacaagactgttagaatttgccataatacacatcaatcaacatggttatgctgaaattaactctttcatcaagaaaaggaagaaaacaaanagcttgtaggtcagaaaccgtagcaaaacttaaaacaatatntatttgaatgttgttgaaacttaatacaaaacggtgaagacaaaacataaaacagatataagatttaactaatcatttagtgatag

SEQ ID NO: 171127 - DNA, 423 bp, Glycine max
  unsure (1)..(423): unsure at all n locations
agcttaaacagggtttgaaatatctgcaaaaaatatatacatttaattattgggacaattttaaaggatttatatctacaaggatttaaaaaattgtaactttaagaatcaaaatgagatgttttaaactataaagaataatcaaaagttattataactacagagatcaaaagactatataaacatattgttaaccttttgagccactagtctcaactgttaaaaacaagttgtaatctcggaagataggattagaaggaatcatccttatgaaattgttggaaaagatacagaataggctctcaattttgtttggggatgatagatgattggtaactcgttggcaagcgtatcaatgtgtcacaagtagtaaagataaaataaatccatatgaactntgtttgtaaatgagtagatgatacc

SEQ ID NO: 171128 - DNA, 459 bp, Glycine max
  unsure (1)..(459): unsure at all n locations
aagtgagaatgaggcttcattatatttgacctngttctgcagatngctgagagcctgaggttttattgtcaaagtagaccataaattgatttcagtgttggacttgtgagcaagttcatgagtgatcctagacaaccacatttgttagctgctaagagaatcttgagatatctaaagggaactctgggatatggaatcattttttcccatcaaatcaaggaggatgagagtctacatcttgaagcctattctgattctgattggtgtcgtgatttggttgataggaaaagcactatgggacaagtcttcctattgtctggatctcctatgtcctggagctcaaagaagcagacagtggtggcactatcaacttgtgaagcagaatacattgcagtcgtgtcagctgcttggtagacactatggttatcttccttgcttattgaattgatagtgtttgtt

SEQ ID NO: 171129 - DNA, 426 bp, Glycine max
  unsure (1)..(426): unsure at all n locations
agctggcctaattaacctgaaattgagagaaaatgtattttaatttcacaaaatgaaaacactaacgttttattaccaatacataatagaaaatacttataacattacaaaataaccataaattgggagagtttgatacaatttatacaagttttatacataaaagttagtcgttttcaccgactaacaattatacactcatttctcttaaaaaaactgattgaaaatcatgtgaacatggtacctaatgcatggttaactaggaaatgatggttcttcaggcatctcatgtcagtctcatttgccatgcatagcataagtatgccctagtcattcatctctatgatatgttgncaaagaattggcggtcaaaattgctattccttgggttatagggttgaaccaagcacatgtatttaaggaaag

SEQ ID NO: 171130 - DNA, 478 bp, Glycine max
  unsure (1)..(478): unsure at all n locations
ataaagcattctggtcatcttcctcaatgagcactccaaatctagtttcagaggtaaaatcaccttntgcttagtgaattacattgcacattattgtagcacaccttntaatgtagaaagaggttntattctttgacttccttcacttcaatagatcctatgaagaatatgctagtatactctacacaaaggataaaacaaatagagcattaactcagtcttaaatgcttaagatccagcttttgcttgctaccatttgatacatcatcctaaataaaaagacccaagtccatttgggtacatacctaaagataagataattcttgttcgagatatgcttgacaacatgaaagaaaccccaatatggtagtggctcctcataacactngacacgagagatgtctatngtccaagacctttgtcaaagaatggtggatcaagtgaatggtcctatagaatatatggggtagagaactca

SEQ ID NO: 171131 - DNA, 410 bp, Glycine max
  unsure (1)..(410): unsure at all n locations
cgctttaaaccttncagaaccagagtgcctagttgtgtttttagtttctatgcattatccacccctttgaatctcacaaacttgtatctacgaccacttctatttcggttccttacaatgtaaacctccctaaagccttcccacttgttgaactcaatccatagttccttttcacccatgttttctgggaaccttgtgaagtagagcgagatgatgtctagtgcatccttctagttttgtgccccttcccttcccccaactggtcacgatggccatcacaccgtgttgcacatgccccttcccaggtagttgagacatggcctatctctcacactctttctgtgtctctctccctcccactctttggttctctctctatctcactctcattctcaaattattgttatgat

SEQ ID NO: 171132 - DNA, 439 bp, Glycine max
  unsure (1)..(439): unsure at all n locations
tagtncagtaaataaagcctagaaatgcatgaataattaaggaaagcatttcttattgaggaaaatgggctaattaaggaaagaacacaaattgaggaaagaatggctaattgagggaaaaagactaattgagtaaagcaggaaagcacaataattaaggaaataagactatttaaggaaagactgactatttaacgaaatcagactaattcaaaaactcgctaatttgcacctattaaagaagaaagagaagaagaagaagaagaagaagaagaagaagacacaaaaattccaacaaaatacaattccttatataaggcaaaggctagaagaaggaacaacacgcaatgggagtcattccttcccttcattccctttcttatcttttccccatttactaaatattccttattagcagtgtaaagtctccatgacaatg

SEQ ID NO: 171133 - DNA, 450 bp, Glycine max
  unsure (1)..(450): unsure at all n locations
ctcagctgaacaaggcctagcttaagaggatttatgttaatagtgattgttangtttctagaggtggaggagacatccccaccactttgtaatcttaattntccctcaaaaaccttatcttggtgctgaaaggtgctaacttgcaatggaaggctaaatctcttgttggggatttctgctgagctttgatgtaaaactcttcactatctatttaaagntattnttatgtgttcattgcttctatctgtatntaattcttgcatgcttgtggcttgatcacccatttgtgtgtaaagttaggaattttagcattgngaagtactttaaatccttagaacttgatagagcaggctagagaactgtatgtttggacacagagtgcaaggatntagtttataatatgtcgtaatcttaatgcaattcatttaagctaagttcgacaagggatct

SEQ ID NO: 171134 - DNA, 415 bp, Glycine max
  unsure (1)..(415): unsure at all n locations
agcttctaaaccaatttgtgaactccatatgttgtttgtgtaggtaggttaacctcnaagcaagaaaatgtagaagaaagtttccaaataatgaagaaaaaaatagaagaaaaataaagtttcaaaaatgtgtaattccacgttagttaaaaaaaacacatcttaaaccatattatttatataaggctaaaatcatatttgcattcaatgtgtagttttgatttgaatactaaaatgatttagataccaaaattatgtaatgtgtaatgtgctctaatgaatttgccttcatagacaattaaggctaaaatcatatttgcattctacgtngtagtttaatttgtatactaaaatgatttggttactgaaattatgtaacatgtaatgtgctgcaaaaaaaanaaaatgtaacttg

SEQ ID NO: 171135 - DNA, 416 bp, Glycine max
  unsure (1)..(416): unsure at all n locations
ggaccttaaatctcagcttcctgtgctgagtccactttcatgcttgttgtntctaatgggaatatgctaagatgtctttagcatattcttagaatattccttttaagtgaatttcattttagttagtgacctgcgctataaatagaaacatgtgtaacacttgtcacaactttgatgaatgagaaacttgtgagacacacttcaaagttcaacttctcttcctattctccttcaatttccacaccactctctctctcattctcttcctccattgaaacttcctctctaagcttcttatccaagacactcttttggtggtgaagcttttccttccatggcttattctttagtggatgacacctcctctcacctcttctcctttatcttccgctgcaactccatggctgaanatcacc

SEQ ID NO: 171136 - DNA, 427 bp, Glycine max
  unsure (1)..(427): unsure at all n locations
agcttgagccaattcaaacgacaataactntttactcggatgtctgattgagtcccgtcatatatcgagacgctcgaaattgaatgttgaagctctgagccaattcaggcgacaatatctttttactcggatgtctgattgaggcctttaatatatcgagacgctcaaaattgaatgttgaacctctgagcaaattcaaacgacaataacttttttctcggatgtctgattgagtcctgtaatatatcgagacgctcgaaattgaatgttgaagctctgagccaattcaaacgacaataactttttactcggatgtctgattgaggcccgtcatatattgagacgctcgaaattgaatgtggaagctctgagccaatacaaacgacaataactctttactctgatgtctgattgaggcctgtgatat

SEQ ID NO: 171137 - DNA, 510 bp, Glycine max
  unsure (1)..(510): unsure at all n locations
gttttaagttcttcctcanaactgtcctaagcaaatttcccaaagttctattaacaacttccgtttgcccatcggtttgtgggtgacaagtggttgaaaataacaatttagtgcccaacttgctccacaaagtcctccaaaaatggcttatgaacttagagtccctatcactaacaatgctccttggcaaaccatggagtctcacaatctccttgaaaaacaaatcagccacatgggaagcatcatcaatttttntacatggaataaaatgagccattttagaaaacctatcaacaaccacaaaaatggaatctctaccattgcttgtttttggcagccccaaaacaaaatccatggataaatcaatccaaggatactccagaattggcaatggagtatacaatccatgaggctttaccttagactttgcctttntacatacaatgcaatgttcacaanatttctgcacatcctttttcatatgaaggccaataaaatgttcttgtaatg

SEQ ID NO: 171138 - DNA, 440 bp, Glycine max
  unsure (1)..(440): unsure at all n locations
agcttgttagcaatgacaaggaaattatctttgtttttctacatgaagaagacgccttctgtttccatctcttgtaaggcatgccttcaaaccgaaatggcttgttgagatcaacaataatggtaacatgcttagtagacatggcagaaaataaaacatcttaaaattgttactgcaaataccaaatacaaccagagaaatgaggttcagtctcgaatctaaaatgggcaccagtaagcagtctcatcattcccgagacaaaataaccctccaaaatgggacaagaccctctttgcacataagaaactctaacaaatcaacactcacaaagctaaaaaaaaaaaagctcgagaactcacaaaagggaaaagagtaaattactcaagccttccttcatgttttcacttattacactcaatatttctctgtttngaatccta

SEQ ID NO: 171139 - DNA, 487 bp, Glycine max
  unsure (1)..(487): unsure at all n locations
atgtctttntcaaactttattccacgttagtatcatttcatatattattggtgtcgccttttttggttgatgatgagcaatgagagcaataattgatgattggttttacttttctgttttctgatatcagatttttcattgaataatgttttgtgtacaatagtcacccagagagaataaactagattagagaaaaatataaatatataacaagtgatatgttgttataaaaaaatatatagaaaaataaaaagagtaatgatatttaacatcgattccaaatntttaaacttctaattaatattctgttnttttttatctctnttaattgtacatatatntttattcgtctttttatttctcgcttactatatatcaaataacatattgngtgtaaaanaacattgaggataacatactcaatgtaanatttaatgtttacacnaaatctcagtaatttactttaaataatctaaaatgtgaaatt

SEQ ID NO: 171140 - DNA, 425 bp, Glycine max
  unsure (1)..(425): unsure at all n locations
gcaagcttatgtttttaatgtcgagcctctatatatatgacgatactcaatcggacatctgataaaatagttattgccgctagaatttgcagagagcttccgtatttaatttcaagcctctctttatatattacaggactcaatcggacattctagtaaaaacttattgtcttttgaatttcttcaaatcattcgttnttaattccgagcgtctcgatatatttcgggactcaatcagacattccagtaaaatgttattgttgcttgaatttcctttatcatccgccttttatttcgagcgtctcaatatattgcgagactcaattatacatttgagtaaaaagttattgccgttcgaattatcttgggtcttcccgttttaatttggagtgtctccatatattacgagacttcactagacatct

SEQ ID NO: 171141 - DNA, 399 bp, Glycine max
  unsure (1)..(399): unsure at all n locations
tctcccncaatttctataaatagggggagaagtgaagtagataagagttcagtcccttatgcacttctctctctctcgaaattgctgaggaaaattagttccgtgaagaaaattcaagccgaggcgcttccgtaacgtttccgtaacgtttccgtgagaaattacgcgaagattctcgaccgttcatcattcgttcttcgttttcttcagtctttaacgggtaagtacctcataccgaggttntcaattcattctatgtacccgtggtggtccacattntgtttcatgtatttttattctcgttttcatttactttttatacccccttttgacgtgcttaagccatntatttaagtcatttctcgcttaatctaaataataaaataaattccaccgatc

SEQ ID NO: 171142 - DNA, 437 bp, Glycine max
agcttctctctaagtacccattcatgactactgttttgaacaaccagcccttgaaacatgaagattacataaagagcagtaagcatcagaataaagctatcatagagtctacaacaaaatgatgaagagcatgacttgaagacggaacttcaaaataaagttcaaaatgaccacctcagaatgattttcaagtgacaacattaagtcttccatatgatgccacaaatattgagggtacataagaagactgaggttgacatcacttcacctttcacatgctaccacacccaccgagggtgcatcagaaagttaatgttaattgcattagaagatgcaaacttgttgaaagttgaatatgttcataagaagctctaatgagaagcatcagaatataagtctgaatatactacacaatctaaccttggatacaacactaa

SEQ ID NO: 171143 - DNA, 323 bp, Glycine max
agcttatgctgctaatatttacaatagaactcctcaacctcaacagcttaatcaaccacaacagaacaattatgacctctttagcaatagatacaaccctggatggaggaatcaccctaatctcagatggtctagccctcagcaacaacaacagtagcctgctccttccttccaaaatgttgttggcccaagcagaccatacattcctccaccaatccaacaacagcaacagccccagaaacagccaacagttgagacccctccacaaccttccctcgaagaacttgtgaggcaaatgactatgcaaaacatgccagttcagc

SEQ ID NO: 171144 - DNA, 505 bp, Glycine max
  unsure (1)..(505): unsure at all n locations
gctagtgcagagtcttcatagacaaagggatgtaaaanatataatctaaataattaataatctaatagtattgataaaaaaaatatgcataaatcaagtgcaaacccttcaaaacaaagtaagatcaaataataattttaactgaaaagagagaaagaagcaaaaaaaaaaaggataagcaactaatgttagaagctaaatgtaagaacaaaaccaaaacccttgaaatttaaggtgtgtgagagagagctaaaccaaaggaattgtgacttttgaagaacaaatcaaagtaaagataaatagaagagtgtgattattttgaactaagaaatatatacttcgcagcatggtttntgcacaaccatatcataatcatcctctgagaccattgagaaatcgagatacatttgcaatttcataagatcaaagctaanattctggtgaaaccacatagtcgtcttgtggaatctaaatgcctcacgccaactcactttcaataacacgt

SEQ ID NO: 171145 - DNA, 268 bp, Glycine max
aatgattggttttatgcctcatccctgcggaggttcaaatctttgatgccgtatagtgacttcttattgtttggaggataaagatgtagaggacaagctggtttctacaagtgcccatacgtgacaataggactatgctctgttgtggtacattagaacgagactcttctcattagaaaacaaccattctgactttgtgaagtacacattgaatccttgatcacacaagtgactgatgctgatctagttggcagtcagtccctttacc

SEQ ID NO: 171146 - DNA, 394 bp, Glycine max
  unsure (1)..(394): unsure at all n locations
gatggaactctctccaaatgcaagctttccgcaagacttacggaaagatcttagagttgaccttagcagaggtatccatagaagccattgcatcactcacccaatactacgaccagcctttgagatgcttcacattcggagacttccaattagtaccaaccattgaagaanttgaggagattctaggatgtcctctcgggggaagaaaaccatatctttcatccgggtgtctcccctctttgagcagaattgcaactgtggtcaaggattcagcaagaggtttggaccacataaaacagactcggaacggcatagcgggcctaccacggaggtacctagaagtcaaggcaaggtgtatggccaatcaaggagattgngtcccgtttatggatgt

SEQ ID NO: 171147 - DNA, 376 bp, Glycine max
  unsure (1)..(376): unsure at all n locations
agcttgttccacctaaatagcatatgttcttcattggtaatcagcctaggctgtggntgntaatnngnttanctctcccacacccaggcttgtaccatatatataaagggtggctctaataattaattactgatccatattcttcttcacaatcaatatatactatcgtctttctcagacaaccaaaaaccattctgtatgacggctaaaactgtagggcacaaagctgatacttctaattcaaaaatcatacttttgaaaacatcgttctaactccaccctatgatagaatccattcattccaaacatgtgcaagggtagttcattcaccttgcacctccacttggaaaaaatcactacatccactatattatat

SEQ ID NO: 171148 - DNA, 450 bp, Glycine max
  unsure (1)..(450): unsure at all n locations
gcttcgccgagtgtccccattgaaaaacctttattcaaacctttcaaagttagtgataaagctaaacgaaaaattagggaacttagaaaaactaaatccttaattgaaggcgtaggtgacaatcatagcgaattactaaacaagattagtagttggcttaaggtcattccagatactccccaagcttcggaaaatacttccaaaatggtaacaagaagtacctccaaattaattaatgttattaatgaagatagtgaccaaaacttagataacacaactgagatatgatcagtgtcagataagaatataaatccattaaactccaaacactggaaaacctcctncanattatattatcaacgtccaactgcccctgaccttctattagaagagagaggtgagaacaatttaaaattttagtgcaataacatctatgaatggaacatagat

SEQ ID NO: 171149 - DNA, 422 bp, Glycine max
agcttgtagagttgagtctcgtattggtttaatcaattacatatatctcacaatacattacactgttatttgagacaatgactaatttagtcaagagtctctgctttaatcgattaccaagtggattaatcgattattatttctctctcattaagttgtttagatgttaacaagaacacattactacaaaagtcatttactacgacgtaccaacaaggacggtccacagaaaaatggcatagaatctttagattgtaagttcaaggacggttattttaaaaacccgcctttgaattggtatgtttttttctctctcttatcttatcttctcgggtacactactaacccttcattttcccctaacctttcattttcctctctcattgttgccttgtatctccctttctctttgtcgtttctat

SEQ ID NO: 171150 - DNA, 435 bp, Glycine max
  unsure (1)..(435): unsure at all n locations
tggtcttgctacattgtgagatatactgcaagttgtctataataatagttggtggaagtataatattaatttgaataatggataaatgaattacaaatctgtattaattgataccattagtgattgaactttgtgtttttcgctggaaaataattttcctacgcttccttcattcaacatatgtgtccatgagaagttagatttatgcaacaactggcttataattgtgaaacaaaatgaaaatcaaacgttgaaactaagttaaataagtagctgtagtggctgtgatttgaaatgataccaatattatagctatttggatgagcgagtaatgggatatgtatttgcaatttgaaaaccacaatagcataaaagaatacaaaaatttgtagcgaaacacgcattanatntcatactcgatgggttagtctagta

SEQ ID NO: 171151 - DNA, 408 bp, Glycine max
  unsure (1)..(408): unsure at all n locations
agcttcagcagttaggtgaatatacacatgaatgattntatattatttctctaacaattcaagctctataaggatgatctattcaatcacaggtgatacgatgatatacacggtttaatttcataatacccttatctagtaaatatttactgcttcatctaccttcaaatttcacacttacacatgtttatcatctatatatttataaaaactgtccaaggtcatggtaacaaatggaaaacaatcctcatagtatggcctaacaacaaaatataatacatttcatgtacctaagttattggcaataatgagtagcctcttccttcatcatggatcagagtaatacatccacagatcaaagtttatgaaagtatattttcagttcaatgtttattagagtagaagagt

SEQ ID NO: 171152 - DNA, 482 bp, Glycine max
catgtggtaaatataaatgaagaagttttcttaacacatcaccgtatattacaatttacaagcaaactaaggaatcagtacagcagacagcaatataacaacaaatcataaatccctccatcataaaaatccaaaacacaaggggctctaagctgaactgcatatgttgcaacaagagtgactcaactctctaaggcaagcaacagaaatcagtacacaaccaaacccagaggacaagcttctacagtctcattccaaatgtccccaaacatgagaaagacatttctaatgttttgtcttctgccttagatgcttccaaaaaccctttgagttcatgaaagccaaccattttccactttgagcaagtcaacaagaccatcccaataaactttataaatatgcatgttcaagtaaaacccaaaccaaaacgaaaccagaacattcagctaatggtcaagtgtagcaaaatccaacacaaaaca

SEQ ID NO: 171153 - DNA, 307 bp, Glycine max
agtgatgagttgatacgaaaatagataaaatgggaattttagcttaccttacgcttaaattaattttgaggaagaaatatctataaaagttgagatgaattgtaacaacccaaaatttcaaaggttagaaatttaataataataataataagggttaattaagtgtttattccttaaactatggaggggttgaattttttattcctaaattattttttaaagatatttggccttaaataatttttcttattatgaatagtccctatcgttaataatcttttggtagtgttaaattgtctacttaagt

SEQ ID NO: 171154 - DNA, 468 bp, Glycine max
  unsure (1)..(468): unsure at all n locations
cttctatggaggctggatctntgagcttctatgatgtcctttaatggtgattttccaccatggagatgcagtagaagacaaaggagaagaggtgagaggaggcgtcatccactatggaataagccatggaagaaggagcttcaccaccaagatgagccttggataagaagcttggagaggatgcttcaatggaggaaaagaaagagagagagatagaaagagggggagcacgaaattgaaggaataaaagagggagagaagtggaactttgaagtatgtctcacaagactctcattcatcaaagttacaacaggtgttagacatgcttctttntatagactaggtagcttccttgagaagctntcttgagaaaacttccctgagaagntagagcttatctacacacacccctctcataactaagctcacctccttgaaaagcttccttaagaagagtcctaaagaagc

SEQ ID NO: 171155 - DNA, 498 bp, Glycine max
  unsure (1)..(498): unsure at all n locations
cctttggagtagaaacatgggaccatactcatttatttcanaaaggaagtcatatctagtcaaggtctgagagaccatacaagtttcctaacgatttctaattatgtgggccattaagtttatcatatgctgacaatagccgagaagcccatgaatctcttcgggggcggagtaggtgtctgccatcgccttggccttggctaacaatcggggaagttcttgactcccgttcaaggtaagagcaaaccgatccatccacatggttgcctcttggtgtaaagagtcgatcacccttcctctagcctctttttccgcgtatacttgggcatactcatccgcgattctatgctcgtgggccgtggctagacctaaatcttcttggtacttggcgatgatagctaacatgttggtctctgtctcgcataaacgctgagacaaagcttcttttggaccttgaacaagcatcaactcctctttcagaaccatgctatgtgctcc

SEQ ID NO: 171156 - DNA, 383 bp, Glycine max
agcttaggagtctaaacttgtagcttccatgcattgttacatgtttatagctaggaatccaaaatttggttttaggattagaaaagcatgaaaatagggacttgtttgtaagaatttgggctgccccacgattggcattttgcacctaagtaacatgggagatgtttttcaagggtgtgtagatatatgtgtaaatatatatggcataaaaatgtgttgcaaagtgtgtgaatatatggcataaaaataccttgcaaagtgaatgaatagtaaataatgcatttcaaaatatgtatatttgtggataagtagcataagaagtctttcaaaaatgtacccgtgccaaagatggcacgagaatgcttcccaaatgaatatatgat

SEQ ID NO: 171157 - DNA, 457 bp, Glycine max
ctgcaagcctgcaaacttccttgagaaacttctttgagaaactaccttgatgaagattcctttataaattagaacatagctacacacccctctaatagctaagctcacctccttgagatgagaagctaaagcttaactacacacaacccctataatagctaaactcaccccatgccaaaatacatgaaaatacaaaaaagtccctactacaaagactactcaaaatgctctgaaatataaggctaaaaccctatactattagaatgacaaaaatacaaggtccaaaagaagaaaaaacatattctaatattttcaaagagtggacccaaccttgacccatgggctcagaaatctaccctgaggttcatgagaaccccaagatcttctttagcagctctagcccaatcctcttggagtcttctattccatacccttggggataggtttctaatccaag

SEQ ID NO: 171158 - DNA, 469 bp, Glycine max
  unsure (1)..(469): unsure at all n locations
tcctccagccattctcctgtaggtttgtaggaacccagagtgttctcccgtattatatgcatggaattccttcatcaatatagggatacaagaagatatggaggacagtaccaacctatctttatagaatagggagccatgcttcatactaaatacgggctgtgaggctggatccttctgcaaccctgctatcacttgtnttaaaaagggtcttgaaaaaactccttttgaacctgttgctcttgcatccaaactggaaatgaagtgatgttttgcagttctccatcttcatatatttgagacagtgagccatgcttcatactgaatccgggctgtgaggctggatccttctgcaaccctgntatcacttgttttaaaaaagggtcttgannaaacctcctgtggacctgctgctcttgcatccaaactggaaatgaagatgatgtttgagttctcgttcttcgtatat

SEQ ID NO: 171159 - DNA, 169 bp, Glycine max
aacactctatacccaacattggccatgcatatagccattgaacgatatgtcatacctcgcttagctcaaaaaattatataaatacccaccgatcgccgagaatggtattatccataaagtagcaggaagaatgaattcctagctgtcgttcagccgttccacggtgcaa

SEQ ID NO: 171160 - DNA, 317 bp, Glycine max
cggcagattgcgaatgcctctcacgcgacctcgtgaatgattatcttcatgcctcttacgtgcagacgtcctcatcttcgatgccatattctgactccatcttctttggcagatagagatgtcgaggacgaactgtgctcacgtggagcccatagaaacagcagagctctgatctgctgaccgtcaatacaactacactcttctcattagtcacaggtcatctgacattgtgagctgacactaaatccttatcacacaggaggctgggctgatcaaactgcactaatgccttcacatcctctctatctgagactacg

SEQ ID NO: 171161 - DNA, 483 bp, Glycine max
  unsure (1)..(483): unsure at all n locations
ctaagcttcatnanacgtcttcacaaagatctgtgtaccaaatgnatttgttacgaatataactctgtctattaatcagtcactccacaataactttaatgaaaaatagaatctattaaagatataatgaaagagataatcacacaaagtttcatatttgttcgtcttaacacgtgactatgatgagattcttttaagaataatgatgcttgattattaaacttttaattaatagtgagacaaaataattaagccaaaaaattatcttatcgatgcgtaaaaataatacttatacaaagataagtatatgctaagtagtagtgataagagacttatgtttggatgtcgaatctccagaggactaattgcattcccaattaattagtgttgtaagtaggcaatttaaagttatcaattgaagacatatggttctgatcaatttactctttgagacatataatgaaaattaaaccaaaagaattt

SEQ ID NO: 171162 - DNA, 409 bp, Glycine max
  unsure (1)..(409): unsure at all n locations
agcttgaaggtaaactanatgccttggttaacctgttaacccaactggccatgaataaaaaatctgcacttgtcgccagactctgtggtttatgctcctctgccgactaccacacagacctttgcccttctgtgcaacaatctgaagcaattgaatagcctgaagcttatgctgcaaacatctacaataaacctcctcaacctcaacagcaaaatcagccacaacataacaattatgacctctccagcaacaagtacaatcccgagtggaggaattatcccaaccttagatggtcgaatccttcacaacagcagcaacaacaacaacaacaaccttatttttagaatgttgctggccaagcagaccatacgttcctccaccaattcagcatcaacaatagcaacaacaa

SEQ ID NO: 171163 - DNA, 430 bp, Glycine max
  unsure (1)..(430): unsure at all n locations
tctcaggctctgaatacaataaaagaatctaagatctaacttatttacaganaaccaaaactaactctgagtgtattaatttcttaagtgaggagaggatcatacagatatttataggctagacaaagagtgctagagaagctactcagtgctgactcagcactgactagactcaataactaacttgagacacaaatcagttatagaagaaaaactagcctactgcaggtctactgttagacagttaaccttttaaaaaaagtttaaacatatactcgtataagaacaactacattacctgacagattacaacatcatcaggactagtattattgtgtaatttctggtgccattcctccatcattccacctttgcaatcattatntctcttcaagtcaaatagaaaatttgcaccgtagttagatcaatg

SEQ ID NO: 171164 - DNA, 425 bp, Glycine max
agcttgtgcttaacacttttctttacttgaaatgtatcggaaagatcgatatgtatgaggactcggaattaggataaaatctaagtatctgaatagcatcaccacattaacaaataatataaatgtcatgttatggagagcccgataaaaacaaaacaaattaatgaagcctacactaaaaaaaaagtcatgcatgattgcatgttataactattttgttataattatcttgataccatttaccaactgtcgctgttgtgcctaacaaccaagtgtcaattagtggctgtgaagatcaaccacacaacgaattaatgactaagaccttgcaacaagaaaaccaactgaaatgtttaaaaatgtgctcatttgatcttttaattagcgtttacaatttccattttcctacattatgaaatctgtac

SEQ ID NO: 171165 - DNA, 462 bp, Glycine max
  unsure (1)..(462): unsure at all n locations
tctcagctgaagctagtcttatgttctcccctattttaacaccnttctatagaatggagaactcaaaaagacctctcattggataacataattggagaaatatcaaaaggagtgtctactcgttctagaaatatagatggagccttgtgcagtaaacattggttgatgaatgatggctatgcataaagagttgaatcagtttaagagaaatgaagtgtgggactntgaatctaaaccaacctctcacaagtcaatcggaaccaagtgggtgtttcgaaataaacttgacgaatcaagcatcgtagtaagaaacaaacctggattggttgcaaagggtcaaccaagaagaaggttcgctatgatgaacctatgcccaattgaaggtagaaccattggttgctgctgttttcatgttatagattcagatatccaatggactgaaggcccttctcatggtacatg

SEQ ID NO: 171166 - DNA, 417 bp, Glycine max
  unsure (1)..(417): unsure at all n locations
agcttatgctgcaaacattaacaatagacctcctcaacctcagcagcaaaatcaaccacaacagaacaattatgacctctccagcaacagatacaaccctggatggaggaatcaccctaatctcagatggtctagccctcaacaacaacaacaacagcctgctccttctttccaaaatgctgctggcccaagtagaccatacattcctccatcaatccaacaacaacaacagccccagaaacagccaacagttgaggcccctccgcaaccttccctcgaagaacttgtgaggcaaatgactatgcaaaacatgcagtttcaacaagagaccagagcctccattcagagtttaactaatcagatgggacaatnggctacacaattaaatcaacaacagtcccagaattctgacaagct

SEQ ID NO: 171167 - DNA, 443 bp, Glycine max
  unsure (1)..(443): unsure at all n locations
gaccttatctcgctgtatcatacacacatactgaatcgattaccnaggagantttcagaanatattctcaacagtcaccatcttttgtgtggttctcgaatcgctatcaaaggcctatatatatgtgacttgagacacgaatttgctaagagtntttcagaacaaaaaggtcttatcctcttaaaaagcaaaatcgttttatcctcttacaaattccttggccaaaacacttgtgattcaataaggaattatttgagtgctcaaattgttcaatctatctctttcaagagagatttcttcttctcttcttcttcattctgaaaagggattaagagaccgagggtctcttgttgtaaaagaattcgtaacaaaaaggaaggattggtccttgtgtgttagaacttgtaaaatgaatntacaagataatggaactctcaagcggg

SEQ ID NO: 171168 - DNA, 414 bp, Glycine max
agcttttctttcataatcaatctgtctactgactaacaattcttattacaagttcacattctggttctttctttgtctaacatacacacttgctcaaactcatgataagaaacacaaactccatcacaatcatgcacttaattcaaaatgaaagcatacaaccattttcacaaaaagataaaagtgttttactgccatgtcatcaaaaacaagtcaaactgttcaaaatgctttaggataagcaaactgactacccataaataaaactagcagtgtatgtagacctaaggaaaatactgtctgaaaaccaaaattataatgataataataaatcaaaaagcaaaaagtatcatcaggaatcaaaattcctgtgactggttctggatattatgtgcctgaacatcctccttatct

SEQ ID NO: 171169 - DNA, 414 bp, Glycine max
  unsure (1)..(414): unsure at all n locations
ngagatgaggaagtgtagaaaggtgacactttctgctnttattcgttgaccacagagtggtacctggagatatgtcgcggtggtcatgagaccttgtggacgttaggtggggtgctattgcccaaaaccaagcttgaccaatcccgacccaacccaagcatagtcagtcagtgagaacctgtgatgtacctaaacaggcgagctcctggcagtcaacagataaaaggagcaaagactacaaagcaaggaggcttgtgtggtggctggccagctatgaactttgattgatatatgggatatggcctctggtaattgattaccaagggtgggtaattgattacaaggcttaaaaatgaagacaggagactaanatagtctctggtaatcgattaccaacgggtgtaatcgattact

SEQ ID NO: 171170 - DNA, 491 bp, Glycine max
  unsure (1)..(491): unsure at all n locations
tgcccagagaaggaatccacggaggaaatgcttaccacctctaaagactggaaagcggtttctaatgactcctctgtggcctccacataaggcatagaggatgggcagctcaccaagatgtcttcctcgcctgatacgatgaccagatgcccttccactacgaatttcaacttttggtggagtgtagagggaacaactcccactgagtggatccacggacgtcccaacagacagctgtagagggggttaatatccattatttggaaggtaacttggcatgtgtgagggcctatctgtactgtgaggtcgatctctcccctaacgtctcggcgggtgccgtcgaaggcacgaaccaccattgaactcngctttaggtgggaggcattgaatggtaanttctccaaagtgctcttaggcatcacgtntaaactggaaccattattgatgagcaccttggctacnatatggtccatacacttgactgatcatgc

SEQ ID NO: 171171 - DNA, 371 bp, Glycine max
tatagatactcaagctgagcctgaagaactggatattatgttatggtggtcaaactttatgctgctgtacgaaagcggggagatgcacacaaggctagagatatcgtaaatgacggtggactaacaaaactacctgctcacagtataatcgaggtcagagatatgtgaattgaatatgctcattgataatacaatgtctacttaactacatctgctacacacattgaaattctgcccaaatgagagtcactactgctgtaattatggaagaccctataaaatgtgagagggattcctttattggggaggaagtgcctacctctgtccaatattctaatcatgacggagggaaacgtccatgcttcaactat

SEQ ID NO: 171172 - DNA, 413 bp, Glycine max
agctttctatattctatgcacatacgccatcctgttactgttctagtaggagttagttcattttgatcattcttcactactatcattcctcctttttttggaacaacttgaataggactgacccatgagctatctgaaattggataaatgaggcccgcctctagtaatttgagcacctcttttcttacctcttccttcattataggattcaaccttctctgaggctgtcgcaccggtttaaaattggtttccagattgattttatgcatacaatatgatgggatgattcccttcagatctgaaatgtgccaaccaatagccgctttacgatgttttagaatctgcaccagttgatcctcttcttccttctttaaagagttactaattatgaccgatttagtctcgtcatcttc

SEQ ID NO: 171173 - DNA, 450 bp, Glycine max
ctggagtttccaagtgccaattcgtcttcttctttattccagtcttcttctggcttcaattcttcagtgggctttccttctgtgtccagcatcttgagatgttcccagcctctgatgacagctttccaggttctgttatccagtgatttgaggaaggccaccattcttgctttccaatattcatagttgcttccatcaagaattggtggactattcactggtccgccttctttctccatgttcatcagaatttatctccctagatctcactcagtgatttcgagtgcctgctctgataccaattgaaattctgataccaggggacagatgtcgtaccggatgtcacgacatcacgcttcataacatgcagattatatgtgtccgtatgaacagattaaacaacgttataacacaagagaattgtgacccagttcggtgcacctcactaca

SEQ ID NO: 171174 - DNA, 469 bp, Glycine max
  unsure (1)..(469): unsure at all n locations
gaatgtgttaagatgtcattcatcattaattaatcatattcagctctttcctgctgaacgttagtaatatattcattttcaattttgacagagaatctgaacctaattcatgggaagatacaatgaaagatgaattagaacgtgaaaaatatcctcgtatgccttggcatgatgttcattgtgccctttggggaccaccttgccgtgacattgctaggcactttgttcagcgatggaattatgccaaggttagtcttattttgcagttgcattgaagtcttgaagcattctggtcctattcctatattcccaaaataggaaataatattntttttattaacatcagaggaacaaagctccatatgagcaagcaattccattacttatgcctcagcatcatatggttattccacattacttgcgaagaagcagagagatacagattggcagtacgaacattgacaatcat

SEQ ID NO: 171175 - DNA, 336 bp, Glycine max
  unsure (1)..(336): unsure at all n locations
ctgaaggatattcattggggcttgttactgcccaccatacagctgaggaaacttggttacacagtgctaccctctggatcctggaaaccttctcgatccaattacataataatggggccagatgatccccctagctcaatcgcttttgaggatcaagactatcacttggacttccattcgcatggatggatatataagctgcagcgatgcatacttaacccaccaactcacctgcatgagagcccttctttcatattaagaaggaattgctccaccgagnctatacttttaaaaccactttaacccaacacaattgttacctctacctctaacact

SEQ ID NO: 171176 - DNA, 292 bp, Glycine max
  unsure (1)..(292): unsure at all n locations
acagtttgtatttggctcttgaatgactatctaagacctatatatatgtgacttgagacaccaatccgtgaagagtttttcagaacaaccagtgtttattctctcaaaaagaaaaatcagtctatctctctaagaatttcttggcccattcaattgccattcatttacgaatcattngagtgctcagactgtgcaatctatctctttcaagagagaatcattcttcttctctttctaattcactaagggattaagagaccgagggtctctctgtgtaaagaatttaaacaca

SEQ ID NO: 171177 - DNA, 465 bp, Glycine max
  unsure (1)..(465): unsure at all n locations
ctataaaactcagcttggtctctgggatcttcacagaaacaatctctattctcttgaaacttggacctttctctctctagaactctctagacatgcagaagcttcaagaaaaggccaaactccctcaaaaatctgatttcaggcttaaataggtggctttgttcgtgctcgtgcgcttagcacaattctgaaccgcttaacgcgcattagtgaatntcggcttagggcggctnttctcgctcagcggatggactgaagcggtgcgcttagtgggatggcccttcgctcaacgaacaagcacaactcatccttcttccagattcttcctcgcgcttagccgaggaatgttgcactcagcaaatggctcgctaagccagcatattggcttagcgagagggtgaaaactagcacttcaaaactttgctaattaacctgaaattgagagaaaatgattattaaactcac

SEQ ID NO: 171178 - DNA, 410 bp, Glycine max
taagacttcaagaactgaacctttcttccttgacaatttcttgtttgcttcttcaaggaagggaagtctttctcacttcttaaaccctaacattgttgtctttggaagctaggcttcattacatgttgtgatgattaaaatctcgtatatgctgccatgactggaactggatgatatgttggtttctggaagttttaacgctaaatgtgttttctttgagtgttaaaacatatatttagccttaaatggcacttatatcggcattttctagcaaaagttacgaataaaacaagttctagaacattttactggataaaatctgtcacaaaaataatctggcagtgagagctgtatggcctggtttttttaaagctttgacctcacaaatgaagttattatgtgtgaaaatg

SEQ ID NO: 171179 - DNA, 427 bp, Glycine max
tagctccatactcgaaggtggaggacacatgaacagtgctatgcaatgacattcaaggggcttcgaaaaaagtggagaatggaggattgcacttgagggtccacacttatgcaatcatgaagtatagctccaaactcgaagatggaggacacatgaacaacgctaggcaatgacattcatggggcttctaaaaaagtggagaatggaggattgcacttgagggtccacagttaggcaatcatgaagtatagctccaaactccaatgtggaggacacatgaacaacgctaggcaacgacattcaaggggctccgaaaaaagtggagaatggaggattccacttcagtgtccacactaaggcaatcatgaagcatatgcttcaactcgaagatggaggacacatgaacagcgctatgcaatgacattca

SEQ ID NO: 171180 - DNA, 269 bp, Glycine max
taacgaaattattgtggataactgctgtatgcagcttgtttcaaaacctgaacagtctgatcgtatggcatgtgtatttacattctattctggtttgccgctgtttatgcacctatgtcattttgtctaatgtatttatgcagtaagcacacacacccttgagttaataacttgtacaagagaaattagctgagaaatgagtatttgcaccaaagagagtgaaaagttataaccaaagctaacttgctttatgataaatcatggtggtc

SEQ ID NO: 171181 - DNA, 431 bp, Glycine max
agaaggctaaacgaaaaattatggaacttagaaaaactaaatccttaattgaaggcgtatgtgacaatcatagtgaattactaaataagattggttgtttacttaaggtcattccagatactccccacacctcgaaaaatacttccaatatggtaacaagaagtacctccaaattaattaatgttattaatgaagatagtggccaaaactcagataatgatcagtatcagaaaagaatataaatccaattaattccaaacactggaaaacaccctccaaattatattatcaacgtccgactgcccctgatcttttattagaagaaagaggtgacaaccaatttataaattgtagtgcatacaacatctatgaatggaacatagatgcacaaactaagtataacatcacgaatacactccaacatatgacca

SEQ ID NO: 171182 - DNA, 278 bp, Glycine max
taattccttatcattgtccctcacagagaacgaacttgcttcaactttctgacgactcgaaatcaagttacataatgaacaaaatctcacaagtcggatgagaatgaaggggattactctttgggccgatccgacttataaacatctactgatctgtggaatgaaaatcatgagccagtgtttgttcacagagtataacaccctaggtcgctgagttctgcgatcatatgtaggacccatgaggcgcacatggcctcattatgtcttgaggctattaa

SEQ ID NO: 171183 - DNA, 298 bp, Glycine max
aacgcctaacggctggttaaatttctcatcgttgaaacatgtttcgaaatactgggtcagattcagttgatttgccaccacacagtgcgattgctcgactcttttctcacaaacaaagcataactaccggggaacttttctattctgcttatataaaatagattgatgcacatgcattctcaagtcctgttatcttttgccttgataaaatcccgctgagcagaagatgcacaaacatcttagagctttcaattgagtctgtgatagcttgcatctacaacagcatcatgtgcccatg

SEQ ID NO: 171184 - DNA, 430 bp, Glycine max
tctagaggaagcctcttaatgaaacttctagagaaagctacatgaatctgcctcggtaaaaatgcttcccagccttcgttaaccgttggatcttctcgaaatttggtctgcaacttcaaaagacacttgttcattatctaaccgctgggatctttgagaaaatatctggagtgtgctagaagcttccgttcccgagagcatctcttatttaagcatttcagcctttgctttcttgtagcttaggaaaaatgccatttcttcttctttctttcttccaaatccatttctaaagttccaagtactttctccatcacccacatccaccattagccaccacaaaccatcattgttctctgttgaaaacccacaccgagaggaacccttcaaccgaagcagaattttcaacttggcttgcggtttccgtagagaa

SEQ ID NO: 171185 - DNA, 318 bp, Glycine max
aacacgcgattacctccgtctcgacgaactctattgaatcaatcaacactaacaacatatgaccctatcaatctcaaacagagtaaatctaacaagataccacctaagtaattctcaatcaactcaataaaatacaatgagctaatcatgtctaataaacaatgaaactacccgaattaacacaccacaccatagctccacaaatagaaatcaagtccataatacatattacaaaatcaaactcatgcataaccgctaattacacttaatcaaaacaaagagacctaactacatccaatgaataatctaaccactcac

SEQ ID NO: 171186 - DNA, 477 bp, Glycine max
  unsure (1)..(477): unsure at all n locations
tccaatgattaaatcttgatgaacaaattcctcataattatctntcgaaacagntaataggttcaccaaatgactcggatcttggattcctcagaagtgataatgcaaagaagtatgttaagcagctcccacatgtagaaaagcagtcctttgcagagcggtttcctgatgtgtccccattaacaattgatcttgctgagaaaatgttggtctttgatccctccaagcgcataactggtacgcctctttattttgctatacctttatttttggggtaaaaaatgtgttttaagtatgctaggatttggccaaaatcagttnttagttccaaatggtagttctggtcctcatatatatcaaatgtggtcacatttgtccttgactctatacttcattnttacttcaccagagatgaaatccactacatttcacgaatacaaggacaaaaaaataccgttttaanatgtatagacttaa

SEQ ID NO: 171187 - DNA, 374 bp, Glycine max
aactcacccatcgcgaacctcactaagacccacccattttttatccctcttagctctagactaacctaaaaagaaggtcatccatagatccctcacgtgagactagactcacctcaagaagcttacaaaagtgtagcctaatttagcctaagctacgttcgcagatgcctcatgtaagactaggcctaaactaaacaggattattgtaacaacataatttgaaccaaaacttaacccgcaaatccctcatgtaagattaagttttgatcctgcttcaatcaaggtctaagggaacagtacatttcctaatgctaaagccacctaactgtgcacaccaatgggtgatcagaccaaaagcctacaaacattaagca

SEQ ID NO: 171188 - DNA, 385 bp, Glycine max
  unsure (1)..(385): unsure at all n locations
cgcgcggcagccactcgacacagagcatncttatatacttctgtgaactngcccttgctcagaagtagacacgaccagctgagaagtctatagccccccacgtgagattgaaacttggattgcttttccatgttctgaacgagagctcctgcaaaagtcttcatgaacaccgttccacccaaggctttcacaatcacatcatcaacggctttcctcgatctaagatcatcgtaaatcgcaaccgttctgaatattatatcggtgagtaacgaagcgagctccgttgacatttctgccaaaaaaaaaaagaccaaaacgattatgttgaatgacaaacaaatcacgcattcagaccgtgcgatgcatgtctatcttgctaagcaat

SEQ ID NO: 171189 - DNA, 463 bp, Glycine max
tagggataagagcgatgaaagaggaatttcttcctttattatatgtagcattcacataaaattctgcaataaaccttagaaaatcacgctttagctccttccaaaagtgtttaataaacctgaagttaaacccatctggccccgggcttttgtcgctgccacaattccacactgcacaccttatctcctcttctttaaaaggctcaaccatcatctccctctgagtacgagacagaacattgaaatgaaccccattcaggttaggtctatacagatgaggttcattgaatctactctggatatgctgcaaaatttctgccttaatcaagttagggttttctacccaaataccatcaatcagcagccccctcaatgtgtttcctctcctgctatgattgactatttatgaaaataagaagttgtactgtccccctcttaatccattcgttcttgattttatcta

SEQ ID NO: 171190 - DNA, 321 bp, Glycine max
catctctctcattcttcaatgctgaacgataacaacccacgagatgaagatgtgagatgtgcggttctctgccgttgaacagataatatagacgaatattttcgacgggtcttaataaagcactattcaaaatgtagcatgcacagtcaacagctggagaccacctgtatcctggcagaggagtatcatctatgaaagcgctgaggaccacatccagagatatatatttccattcaacaacaccattactgtgaagggctcctggtgcagagcagaaatgctctatcccatgcttatctcgcttaatattcaaattctata

SEQ ID NO: 171191 - DNA, 434 bp, Glycine max
  unsure (1)..(434): unsure at all n locations
nttgaaagagaagtggagaacactgatgtaatgcttcatgaatttattgataagttgaagaacactggttgcacaattatgtctgatgggtggagagataaaaaaaaaggcgttcaatttgtaattttctggtgaacaatccaaaagggactgtatttctttattcattggatacctcagacatctcaaaaatagctgacaaagtgttgaagatgttgaatgatgtagtgaattttgttggagaggaaaatgtagtccaggtgataactgataatgctacaaattagaaacaactgaagaattgttgatgcagaaacgagagcatttgtatgagacctcatatgttgctcattgcattcattagactactataaagaatggaagaaggatcaccacctacatttatggtagaacaatgttgattagcatcatga

SEQ ID NO: 171192 - DNA, 392 bp, Glycine max
tgtgaaagaatgtggaaacctctagaatattctagagatgtgtggaaccttctggaaccttatgaaaggatatggaaaagagtagaagagtgtagagactcctagaatgtgtggagcattctatagaattaatctccaccctatgatacaagtaatctccaccattcattgtggaggtggagtagtataaataagggtaggagccttcattcctatccatccaagacaagagtgaatccacttcttagagtgagaaaaaacctctctgagagagaagataaatagcttgggaagtctctatcctcaagcttgagtaagtctctctgagagagaagataaatagcttgtgaagtctttatcctcaagcttgagtgagccaccatagagtgagt

SEQ ID NO: 171193 - DNA, 399 bp, Glycine max
  unsure (1)..(399): unsure at all n locations
accccaccatattttcatagtaaaacacttgttatatgtctactattattgggatcatctctttcttcgtcattggaggcgccacttgagctgtcaagtctctccacctttgggcgtattctttgaaagattcgtgcccctttttgcacatgttctgtagttgcatcctatccggagtcatatcagaattgtactgatactgtccaacgaaggcaaccattaggtctttccaagaatggacttgggaaggttccaagttagtgtaccacgtaacagctaccccagtaagactttcttggaagaaatgtatcagcagcttctcatcttttgtgtatgcccccatcttncgacaatacatctttatatggttcttgatgtaagtagtccccttgtacttgt

SEQ ID NO: 171194 - DNA, 319 bp, Glycine max
acataccggcagtggatctacggccaacaccctcaacaaacaaaatacacacacctagaaggttcacaggaaaaggtcaatagacactacaacaaaaacaaacacgccatgtatgacgaccaaggaaaacaacctgaagtgcacgccacaaaggcctcacaagtccctttgccgcgagagcctcaagccaaggagtgtgcctccaaacaagcttgccaatacagacagcatgaaccatgcttcccccaactgcaagctctacataccacaagtcgggatccatctgccagagcacaaatccaccagactctgcacacct

SEQ ID NO: 171195 - DNA, 431 bp, Glycine max
atgagaccactgagaatttctttcctcagcattcacttgctacaccccaccgaagattagcgattacttgctacactccattgccacatcacatagccacactttgcgtatgtccttcatgtgttacatgtcttatgacacctaagtacacttaaagaagaataacttgatttaagatgagtgggttgaaccataactaaaagacactactcataattagtgaaatcttggctccaaatttggctccacctattcaaattcaacattaagtgaaatttgaatatctattcaaatttccttacagatttgtgtgacattacgctataaaatagaagattagcgtgcgcattattttacactttaatcatttgagaattatacttcaaaagtcatacctcatttgacgcataaaatccatgctccttctctct

SEQ ID NO: 171196 - DNA, 372 bp, Glycine max
  unsure (1)..(372): unsure at all n locations
ggggctagncatatatatgttacaaaacaactaatgcctatttttttatcgactattgcagatacagaaatacttaaacaaacctggcaaataagggttttgcggctttttgcaaattccgcccatgtttctggatcaaggccatacttgactgtaggatcaaatatttgctgaccttcattgtcagcaaagaccaattttgaagtcaatgaagacttaaaatgcctccatcttgctgcaactgttgacatcacctttttttttgcattctcaccttcacggatatcaaaattgggctgcacaacaaaaggaggtatgtaacagtatgtaaatgaatcctttaaaagtaacttaacaacacaatcatgaata

SEQ ID NO: 171197 - DNA, 407 bp, Glycine max
  unsure (1)..(407): unsure at all n locations
actcagcttgtggattatggggtacccatcacatgtggtactatgtgtgttgtcggcgacagcgcacaacaagttttncacatccacaatgcgcgcataaacccaccatcccctgttgcccacctccatctgagctcacgtactcccacgtagcccatatcctcgtttctctcaacaccgggtccccatcaatcctctcaagcttgcacaacattcaagcaaaacaacattcaaacagcacaagctatcacagccaaacaaaacagggcaaaggcagaaaactctgccaaaacaccaaccaaatcacagcttgttttacttaaagaccccagtaacaattctttcgatccaattcgttaaccgctggatcgactccaaaattctactggaggtgtatagtacattat

SEQ ID NO: 171198 - DNA, 253 bp, Glycine max
actaagctggtcctgggctttagaaaaaatttttatttttctggacaggcctgctctcttaaactctgtgactgcgcatcttcacaaaggccaaacctctcaaaatatgtctcggcttaaaagtggcttgttttgctcggcgctttcacactactgaaccgattaaccgcattgtgaatacggctcaggcggttttctcctcacagaggactgaatctgggcttacgggacgcccctcctcaccaaaatccta

SEQ ID NO: 171199 - DNA, 446 bp, Glycine max
  unsure (1)..(446): unsure at all n locations
cgtgtgttatccgactaagggaaagtacaggcctttcactaaatatattgcagaacttggtgtgcaacatcaattaatctttcctcacacacaccattaaaatggtgtcgtggaagaaaacataagcacatagtggaaactcccttggcaatgttgtctgaggcttcaatacctcttgattattgggaccatgctattatttctactctatatctcatcaatcatcttccttcatcaataattcaacaagatgtaacacctcatttttcgtaaaataaattaaaaaggattttatgtaaaaatagagttttgagaaaataatgagattctctgtatgaaataaataacaagaaatagctttattaattaanataatgattctaacgcaataaaataaatatatgttcttataaaatacaaagaatagtttatttattcatttgata

SEQ ID NO: 171200 - DNA, 335 bp, Glycine max
ttttaatgatcttcaagcaaacatctattcctgtctgaagatcatgtggctgaacaaccctactgaaggcagctgaacaaagatattctgttacataatgccttccagccaagactgtatttagcacaatgggcaggttcttgttttcttcaaatccagtcctgtatgtgcaataatggatgagagcaaattatactcaaatacaatgcaagtctatttaaaatacctaaagagccagagtgaaaagccaaaattcagattccacaatatataaatactgagtcacaatcaccatgcaattagtttaaggcaacacatccaatagttgaccgctc

SEQ ID NO: 171201 - DNA, 450 bp, Glycine max
  unsure (1)..(450): unsure at all n locations
agatgcactttgtttgcatcattcccagagctaataatatcatccccaaaaccagcatcatctatggcctcaattatcttgtcaacattggtgaggttgggatcaaagtgcacttttgcctcctccaaagcaagaccaacaattgcctttttcaccccttcaacaatttgaagggcattctcaacagattcggagcagcttgtgcatgccattcctttaatcctcactcggcacactgctatgtcctgctcatgaagctcatttactcgaaacccactctcctctatgctttcttttatttgtttcacctacaaaaaaaatatcaccagacttttggtcagtgtaaatattgaagtacaccaaagacttatatttaatagttaatatacaacaatgtccttgataacggctacttgtattgatttagtnccgggaagttctaatttatac

SEQ ID NO: 171202 - DNA, 475 bp, Glycine max
tcaacaatgaaacaaggcacacttacagtgactgagtatttcacttgtctacgcgtaatttgggatgagattgagaactttagacccgatcccatctgttcctgtaatatcaggtgttcctgcaacgcattcaccattatcgcgcaacggaagctcgaggatagagccatgcagttcctacgaggcctgaacgaacagtatgcaaatattcgttctcatgttcttctcatggatcccatacccactatatccaaaatattctcctatgtagctcaacaggaaaggcaactactgggtaacaccggaccaggtattaacttcgaacccaaagatatctccattaacgctgctaagacccgttgcgatttctgtggacgcattggtcatgtggaaagtacgtgttataagaagcatggagtgccctctaattacgatgcaagaaataagagtaatggaagaaaagcatgcactcact

SEQ ID NO: 171203 - DNA, 434 bp, Glycine max
  unsure (1)..(434): unsure at all n locations
tggatttncttttagtagggaatctttccttcctaagattgagccatattcattcccctcattaagaactagctcctttcttcctctattgcccttagttaaatacacctttgtttggttctctatttgggtcttaaccctctcatgcaacttctttacaaactctgacctagattccccttctttatgtataaaagaagtgtcaagagggaggggaatgaggtctaatggtgttaaaggattgaacccatagacaacctcaaaaggggattgcttggtggttctatgaacccccctattgtaggcaaattctacatgaggaagatactcatcccaagacttatggttgccttttagaagagcccttacaagagtggataaagacctattcactacctctgcttgcccatcaattngtggatgacaagtggtag

SEQ ID NO: 171204 - DNA, 367 bp, Glycine max
  unsure (1)..(367): unsure at all n locations
ntgcctcactgaccttccttcataaaccctcccatgagcctcctcttcaatntttgacccaataaacaacagtttggggtcaatcagaagattctcatcaattgttagcagctcctcttctattgaaccattgttgtgactcactgattttgaatccaatcctctagtagtactgttctcatattccttctcttctcctttccctttggttctttctctggaactcatgctgcacccttaaactataaccaagtccctcattttaatacctaccaagaattagaaagaaaaaaaaactcttaaaacaaaaaataaacccacctcccctgaatctttcttccaacataaacaacaactcccaagtaaa

SEQ ID NO: 171205 - DNA, 346 bp, Glycine max
tgcctcacagagttccaagaaagataaagcggttgaatgttctatttccgctcctgagtatgacaatcaccgttttatgagcgtggtacaccaccagcgcttctaggccatcaagggatggtccgttctctgggagcgacgcgtccacctcatggacgacgagtatactgatttccaccaggaaatatggcgcccgcggtggacatcactggttactcccatggccaagttcgatccagaaatagtccttgagttttatgccaatgcttggccaacagaagacggcgtgccaagagtgcgatgcaaatgctatccgtcagctcctgcgatatccgctagtgatgga

SEQ ID NO: 171206 - DNA, 351 bp, Glycine max
ctctagaaacttcattaagaggcttccttcacaagcttcctcatggcttctttgagaagctagatccttatctatccatacctctctattaactaaattaacctccttaaaaataattacggataaaaataacacaacaaataatcaaacatcaaacataactactaattatatatatatatatatatatatatatatatatatatatcaaggtgtgacaactctcccaccctttttgaaatttcgtcctcaaaatttaccttaatcaaacaaggatgggtgacgctttcgcatatgactttctgatgtccacgtgggatctttctctgatgcacctctccagatcacctt

SEQ ID NO: 171207 - DNA, 413 bp, Glycine max
tgcttctacaatctccccctttgtgatgatgacaaccttgaaatcaagaaacacatacatattctttttcctagtcgatcactcacttaattctccatattctccccctttgtttttgagtttaagcttcacttgaaattaaattatttaactatatgagttcttgatttaaatcctattttcgctccccttttggcatcaacaaaaagccaaagtgcgtaacaaatataaaatatacataaatgactaatcatacacaagacattcattgaaaaatctaaaccaatcatgaagcaaaaacatgaataacccacattaaaatgtaaaccacatagtcatataacataattcataaatgttcagtcatacttatcgaataataaaagaaatactaagtattcaaatgttataaa

SEQ ID NO: 171208 - DNA, 303 bp, Glycine max
tatatatgagccgcctcaggagacccacggcgagcgaacttgatattcttttattatatcccgagctctctgggttcggttcgaacctgctctactgattatccgccgggaaattggctactggaggaacgccctggccttttcactacatgcataacgtacacctttacagttttaaaagctctatatatgggcctccgctatacagccttcattttgataaggctttgcgtctttagtttttgaaagataacacagggatctttcttcatctgtttctggtctctacccattctcatatca

SEQ ID NO: 171209 - DNA, 223 bp, Glycine max
ttttacccctcgaaaccttaactggagttgaacgtacttttaaaattgagtgttctttgacctttgaacccaccccatgggtactaaattcaaacgaccctcttgagaaacaaaaccctttcgccttttaactgatggttttgaccaagtaaatcacctgcctgaaatttgtggctacttctgatttaaaatggctaatttgtaacatagcctaacatatgaa

SEQ ID NO: 171210 - DNA, 372 bp, Glycine max
tagcaagtccttcactccaattcaaccttggcctcttcctttgtctcttcatcacactggtcacactcatttccactacattcttgttcttgcccctaccctttcctgtactttgagaatagaacctttcacaagtattgttcgctatattaagtggtttctagcccaaagaatcatccccttcatagttcttcttcttattattatcatggcattgttctttggagttaagtttctccctagtgttcatagaatatgcatgagagggagtacttagcacatcatcaatgcacctctttgaggaagaactctccctctcatagcccttcttcttcttattattactattatcatggcattgctctctggaat

SEQ ID NO: 171211 - DNA, 474 bp, Glycine max
  unsure (1)..(474): unsure at all n locations
tagaacaatatacttgtcctttatttaactgtctttgggcttggcggcctttatcaacaaagnactttcgaaacctactgtatgttgattgtcatgtggccatatcgacatccttctctatcataagtcatcgcccatttttcttttgaaatgcgatcaatccacgttgctatggctggactcagttgacaaaaattttctaaattttgataaaaaatgtgcttgcaaaaagtgtagcctgcataaaattagttaggaacaacaattttaagtatatatgaaacttaaattaacatgaccatgataaatgaaatcttacccaatttcttcaacatttctttttgtttggcattattgaatttgcaatcgaaattgcttgctatgtgtcggacgcagtaaacatgataaccgtggggaggttgccaaccaagtgcttcgttagccacatcagactctatactcgcgtgacgatca

SEQ ID NO: 171212 - DNA, 301 bp, Glycine max
gttttattaccctatcttaacagacaatacttaatacactaccaaataaccataaatcgggggaaattgatacaacttatacaagttttatttacaaaagttagtcgtcttcaccgattaacaactcccccacatttacaattttgcttggcctccagccaaaacagaacaactcactagtcctcaagtgacaatggcctgcagcgactatgtacaaacgtgtatgctacaaaagttatctgattgcatattaagagaatgcgagacaattccttcatcacttgtctttcacaacggatgc

SEQ ID NO: 171213 - DNA, 292 bp, Glycine max
  unsure (1)..(292): unsure at all n locations
acccaaaannacccccgcccacagaaggagaggcctttttacccaacccacaaagccgacaaaaccggcccttcaacacacacggaacccgcggaccacaagcgaccgaacaacaacgagcaggcgggcaagcaaaagcccccgaacccccccaaaagccacccaagggaaggcccgaggacgaatcaccacaaacgacgacgcaacccaaagggcccaacaaaacgccaagccagataacaccccaacccccacccccgaccaaaccccgagacaaaccaaccagacgcca

SEQ ID NO: 171214 - DNA, 463 bp, Glycine max
  unsure (1)..(463): unsure at all n locations
tatataccctntatcatagatgagacccaatctgagttcattgatggaagacatctattacatagtgttctcattgcgaatgaggtgattgaaaaggccaaaaggaacaacaaatcgtgccttgtattctaagtagattacaagaaggcatatgattcggtttcttggaatttttattatacatgctggaaagaacaggtttcagctctaaatgggtcaaatggattgaggagtgtttgaaatcagcatccgtctcagttttagtgaatgggagtctctcggctgagttcctcccccacaagagtcttaagcaaggggacccattagctcccttcctgtttaatgtggtggctgaaagtctgaatgggttgataatgagagctaatgaagaacacctgttaangggttccaagtaggcatcaatatgtaatattacatcctacagacgcgacacacaatcttt

SEQ ID NO: 171215 - DNA, 470 bp, Glycine max
ctctcggggccatctcttgcgaagacatatttatatagtttgtttacaaggaaataccattttaaagcgaaatcaagcaaaaatggcatacaattccttctgacaaacacaaatatcaatatgaatttagagaaaacttacatgttgacgcgtatgcttccctaggatgcacatatatttacacacattttttttcttgagaaaaatattttattaacatacatacatatttacaaggtattttgctacctatatcgacatacatgcatttttgtcaaagtattcttgctacctatatcaacatacatgcgtattcaaggtatttttgctgcctatatctacatacatgcattcttgcaaggtaattttttgctacctatatttactccattttgggtggcattcctttttgctacatgttcacattttattcacatatatatacacacttgagagtaatttcatgctac

SEQ ID NO: 171216 - DNA, 378 bp, Glycine max
gaattcaagattaatttgccgcttgtctaatgcagaccatgcaaacaaatctacatttgttgccaacacttaagctatgccttcttccactttggaactcatatagaatccaagtttagtgcacgaagatggatctttgccaagttggaaaggtttgacctcttatgttggttctgctctcagtttttcctcttgtggatcaagtttagcatcccctaaattgttgttgagggaagtgcatgccaccaactgtgacttgggctttgtgtccttcttcacttttccaattctgaggattgcaacatagcatttttttaatgtcatctggttggctcacatagagatgactatccattctcgcttagacacttcatcatc

SEQ ID NO: 171217 - DNA, 329 bp, Glycine max
gacgcactcttttaacgagccctacctgctaagcgagttcatccattgtggttgaatttatgggtttttgatgaacatgctaacttggccctgtcccgctagcgagttcatcaattttgcttgaaattcctgatatttgtatgaactcgctaagccattgcactatggcttagcgagcctttaacatctagtctttaatttttgaagtcgcatgaactcgctcagccagcatgtcgcacttaacgagtacacttagttacgactatgacttacacgcgtgtggtattctgcgtgcggctaagtgagccacactcgctaagcccaacatg

SEQ ID NO: 171218 - DNA, 430 bp, Glycine max
ggaggaaaagaaaggggagagaattatatattggggagctcccaattgaacgaagacaaagggagagaagttgaactttgagttgtgtctcacaagactcttattcatcaaagttacaacaagtgttacacatgtttctatttatagactacggggcttccttgagaagcttttctgagaaaacttccttgagaagctagagcttatctacacacacccctctaataactgagctcacctccttgagaagccttcttgaaaagattcctaaagaagctagagcttagctacacacacctctctaatagctaagctcacctccttgagatgagaagctagaacttagcttcaccacccctataatagctaagctcacacccatcgacaaatacctgaaaatacacagaaagctcctactactaagactact

SEQ ID NO: 171219 - DNA, 409 bp, Glycine max
  unsure (1)..(409): unsure at all n locations
actaagcnttctgtttgtnattatcattcctttgaggagaaccatcttcttttttctaggaataccatcaatgcagatatctcatttttgaccttattaacttcattatacatttggcattttgaaaatttggtactatctttaatcataccatatacagtctttaatattttatatacggattttataaaagataagatatatagagaatcatattaaaaattaagaataatttgatatagataaaatattaattacaattttaaatttacgtattatcatttaaaaataaacaaataaattaacgttaattactactttaaacttggtatacacgaataatgacaaagggtgaagacttacttctcaagtcaatgaataccggacacgggttcaaaacacacttacc

SEQ ID NO: 171220 - DNA, 244 bp, Glycine max
cagagattgccactaccgttcccaagcatccatgaaatgttgccactctcccaccttattaataaggattttggatcttgcgttgacattctttgtaagatggaatagacataacaagttgggtgaagaaataaaaataatcttcaatgcttccatgaaagtacgattcctaacattgaccataacctgagacaatacattatcttttacagacaacactttcaccttactgagagcccattaa

SEQ ID NO: 171221 - DNA, 355 bp, Glycine max
  unsure (1)..(355): unsure at all n locations
taatgaatataanacaataaaactagattgctgatattatattgaacgagctgacaacactaaccatcgcggaaatgcgtggagaagagctgattaggttccatgtttaattgttcaagccgcaatcaccaacgaatcgaaagcgagagagaggaggagtgaatcaaacaaacgaatatcgaatacggaatcgtacgaatcggagagaagagtgtagcgatcgacgttgaatctaaggctgtatatgaatggggaaattagagactaactggaatgaattgcagaagattaacaggacgatgccggccatgaagccgctcaagtgaggagagacaccaagcttctcaaaaaatat

SEQ ID NO: 171222 - DNA, 456 bp, Glycine max
  unsure (1)..(456): unsure at all n locations
tcaccttctggtcctcctcatagttgttgcatgagaaattatgctctattttcatctcccactccaagtaggcctccggatcattctttcctttaaatggaggaatgttgagtttaataccatcaattcggttttgtctaagaacaccatcattccctcttctcctcctttcttcgtcattatgatctctattctccatttgatccaacctctcatggagcgcatcatctcgttgtttcattaacctgtccaaatgttgcatcaaagcttgcatttggaattgcgaaagccccacttcatcattaggattagtacctgacatctcaaacaaacaaatcaaacgtaacaagacaattatagttgttggttgaatacctcacccactccagtgtatcccacaattatggcttttntctaatgaaacactcttgcctttaccactctaattcncttgag

SEQ ID NO: 171223 - DNA, 410 bp, Glycine max
gcttctggtgggacatcttgacttgctttccaatctgacatttatcacagattctgccttcttctattttcagattgggaatgcctctaacagcacctttgtcaatgatattcttcatgcctcttaagtgcagatgtccaaatctttgatgccatattttgacttcatcttctttggagaatagacatgtggaggagtaactggtatcttgaggtgtccataggtaacagttgtcctttgatctgctacccttcattaggacttcactcttctcatttgtcaccaagcattctgactttgtgaagtttacattgaatacttcatcacacaactgactgatgctgatcaagttcgcagtcagtccctttaccagcagtactttgttcagactaggaagtccatcatggact

SEQ ID NO: 171224 - DNA, 334 bp, Glycine max
tctgggggggaagctccttcttcatggcttattccttaaaggatggcgcctcctctcacctccttttctttgtcttccgctgcatctccatggtggaaaatcaccattaaaggaccccattgaagctcaaagatccagcctccatagaagctccacaagcaagcttccatcacaactgatatggcttcctgaagtaacataacttcatcatacgtaacacatcttcacaacacaaaacattttgaagtacgttgcttcataaatagaaagtgaacgaatacgtgctagtgtgttagtgttttgtctaaagctagactgcataataacttcagtc

SEQ ID NO: 171225 - DNA, 403 bp, Glycine max
  unsure (1)..(403): unsure at all n locations
ggatagatatcancctgcgaccggttctgatgaagattaatatgcctcttatcgtactgctcagaatggagtccacttgccagaacatattgcttttcatgatggaagatgtccgacaacagcatgaaaaatgaaatgaactttcttaggagccgtattttcatcttcatcaactacatttttctgatgccgctggtatttaaatctttaatttgcaattgcaacacttccttcctgtagttagcggaaggtcacggctgccgaacacgtcctttgcttctggcatgagtacacgaatgggttgttatatggctggtacctatgcagactgtttcagcttaatgaattgttccttacagagnctcacaaggctacgatttatcattactatgtacctgtcttt

SEQ ID NO: 171226 - DNA, 419 bp, Glycine max
  unsure (1)..(419): unsure at all n locations
aactaagctttatgcatattaatatggtaaagatgggttgtttttcttgcttttcatcagntcaatgaatttgtccttaaataaaattttcaagctttttctcagctcaagatccgcctccgcctgacatgaccttggaggcttggaccactaatcattcccccacatgttcaactaatatgggccataaaataaaataaaataaaaactccgttactgacagacataatatatattatgagatgtgatacaataaaataattttaacttgaatatatatatttttgaatcttcctaatattaatagtgtgaagtatcgctctttattattatttgcggtaattcttattttaaaattatcaaatgaaaatatttctgaattaactctcatttaaagataagtcataaaagtagttata

SEQ ID NO: 171227 - DNA, 333 bp, Glycine max
aactactggacaagaccagccactaagctgatcacaatccaattgctcctcagagctgtataaggatgagctttcagataaatcacacacatcttccagcaaagagaactcatctattgtacttgagacatcagagcccaaatcaccaatgcccctgagaatatctataaaacatcaatgaagcaataacaaagggaaataaagttgtcagggaaaaaactaagatgtcaagcagcaaataaaagaaaacatgttactcaatacttgcatcttcatgctcacatttcggggaaggggggattgtacgatgaggggagcaagagattacatatt

SEQ ID NO: 171228 - DNA, 376 bp, Glycine max
  unsure (1)..(376): unsure at all n locations
tcttggtggtgaagctccttgtttcttggcttattccctagnggatggtgcctcccctctcctattctcctttgccttccgctgcatctccatggtgaagaatcaccattgaaggaccacattgaagctcaaagatccatcctccatagaagctccacaagcaagcttccatcataaggtatcaacttggggtctctagtttccccttcccctctcagctggtagatcactagtgctgagtccccgtacactttgagtagcttgacattggagtcaattgccacctgaaccgctagggcgcacgcttcatactcagccatattgtgggtgcagtcaaaccccagcctggctgtgaaaggtatacattggttgtctg

SEQ ID NO: 171229 - DNA, 335 bp, Glycine max
cctgccatggagttactactgtcccacgtagcgctggaaattttttctctgtgccaaaaacctacggaagcaagtcactcttaatggcgggacttgacaagaaaatgttggatgaaaaaagtcacctgggaatactaaccactaatgcgcaatacggttcaccataacgcaggtgactctgcagcgaatagggccattattacaactagcacaagagccggttatggcgatcaacgcctagcgtatcgatgccacccatctataagatgatggaggctttacacacacgttctaaccactgaaggtttgaaatcaaccagtgtaatcactgctaa

SEQ ID NO: 171230 - DNA, 410 bp, Glycine max
tgctcttcgaatgagttacgacgtcatgcatggttgaattatcttttatggcgtcttgcctgctgaacggtagacatatattcgttgtcaagggtgacagagaatctgaacctatagcatgggaagatacaatgaaagaggaattataacgtgaaagatatcctcgtatgccttggcgtgatggtcattgagcccttaggggaccaccttgccgagacattgcgaggcactttgttcagcgatggaattatgccactgttagtcttattacgcagctgcattgaagtcgagaagcatgtaggttctatatctatattgccaaaataagaaataagatttttttattaacattagaggaacggagctccatatgatcaagcgttggcatgagatatgccctagcatgatat

SEQ ID NO: 171231 - DNA, 424 bp, Glycine max
caacgcgaactttgaccattgttcttccttcccgcgatgcttcttttcatgtctgcctgagtgggcttatagcctaaaccgtacttcccacgattaccttgggcatttatcagtctagttatgccgccgttgtttttttctaaacccatcccgggctcataaccgttccccaacataactcgggccatcattaccgctgcatcggacagactaggctgcccaaagagggagtccacggaggaaatgctgaccacctcaaaagactggaaagcagtttctaacgattcttctgcggcttccacataaggcatggaggatgggcatcttaccaagatatcttcctcgcctgacacgatgaccaagtgcccctctactacaaaattcagctttggtggagcgtagaggcacgactccactgagtgat

SEQ ID NO: 171232 - DNA, 440 bp, Glycine max
ctaagcttcccaacatccaagcaaaacaacattcaaaaagcacaagctatctttatcttagcaaaacagagcaaaggcagaaaactctgctcaacacatcaaccaaaatcacagcttttctcatttaaagaccacagtaacaattccttcgatccaattcgttaaccgttggatcgactccaaaattttactggaagtctatagtgcataagcctacattgtgatcgttgggatctactagcaaacatccagaactcattctgtactactctttccacaaccaaccacacacaagcatttttctgcacaaagccaaaatcctgctgcaccctatttgacagcaaaattctgcataagtgcagatttcgaaaatcacacttcccctcatacaatcttgctcaaatcaaatcctacaagtcccaaatcatgtatcaaacatg

SEQ ID NO: 171233 - DNA, 307 bp, Glycine max
ccaagagggacgtccttggtgacaacttgtgacctgaatggaattgccactacaggattgcttgaactgtctttgatatttggcacgagatatagagatttgggaggtaattcctactggattaacttcccatgcttaatatgccaattagtgatgacacttgtcgttggattacctatgatgtcctgattcgcagggtcgcctatatcctttttgatggcgtatgtctggaaccaggctgaaaccggactttattttgactcttggacaattcgcaaacttgcttggatagtctatgtcccccctt

SEQ ID NO: 171234 - DNA, 296 bp, Glycine max
atgggaaacattaatcttggaccgctctctagatcgtctagatccaactatgtgttgttatcaagacaaggctttttaaaaaagtcttagcaggactgactggacctgagaaacccgtcaagaatctaaacatgaactgaaaaaagatcttgttaggttcaaaataaagatctctaatcctacaaatccttaaactgtgaagactttaaagaaaagactaaatttaccgtctgccaagctaagttatccagtcttgatatctccaaatcaaaacctggcagtaatcacctccttgc

SEQ ID NO: 171235 - DNA, 321 bp, Glycine max
tgttatccaaggcattatctcggtggtgaagtacctccatttattgcttattctctagcggatggggcctcctctcaccttggctcatttatcttccgtagcaactccatggctgaaaatcaccattgaaagactttattgaagctcacagatccggcctccatagaagcttctcaagcaagcttccattaagtggtatcagagcacaagagcttcaagtaggtgctctttaaacatacattaattatcagctttaccttctactccatcggtgttgctacatatctctccatgtatctcctcacatgtctagtggtgaat

SEQ ID NO: 171236 - DNA, 457 bp, Glycine max
  unsure (1)..(457): unsure at all n locations
gctctttctcttctgataggtacatgttttattcataaagacccaaacaccctcacatgcttcactgttggcttcctttgtgtccacacttcttcaggcactttattctttagctgcttagttggactcttattcagtatatagactgcagtggacacagcttctccccaaaattctgatggcaggtgttnctccttcattacagacctattcctcctttcagccagcccattatgctgaggagtatatggagcagtaacttcatgaattatgccatgttggatacagaaaaattcaaaatcctttgatgatactcccctccaccatctgttctaataaccttgattgcttttccacttctgttttcactcaacactttaaactccttgaatatagaaagcacttcactcttggcttttataggtacagccacatcatcctactaaactcatcaatg

SEQ ID NO: 171237 - DNA, 448 bp, Glycine max
  unsure (1)..(448): unsure at all n locations
tatgagaattccaagctntataagcaaagagtaaaaatcttcatggcaaaaagctgtcaaaaaggaattttcagcctggtcaacaggtattgttatttaattctagattaagattgtttctaggtaagctgaaatccaagtggtcatgaccattcatcatcaaagaagttatgccacaaggagcagtgatattggaagacccaaccaccaaaaggacatggaccgtgaatggcagcagaatcaaacactacttangtggagatttcgagaggctaaccactattgtccaactgcaagaggcttgaaccacaacaaagacgtccaactataaagacgttaaagaaacgctcttaggaagcaacctagtatttcttaactctacttntaannattcttttcttctgatnntcatacttgtcgtgttaaataattgttggttgaactattt

SEQ ID NO: 171238 - DNA, 472 bp, Glycine max
  unsure (1)..(472): unsure at all n locations
actaagtgctcacctttagtagttgtttttcttaggnnngttcatataaacctcttcctctagatgaccattaaggaatgtcattttcacatccatttgatgtaactcaaagtcaaaatgagctactaacgccataattactcggaaagaatctttcttagatacagaagaaaaagtctctgtgtaatcaattctttctctttgagtgaaccctttggcaacaagtcttgccttatgtctctcaatgttgccttatgtgtctttcttggttttggaaacccatctacatccaatggcttttacaccactaggaaactgtacgagatcccatacttggttaaacgccatataatccatctcatctttcatggcattgtgccacaagtttgattctttataacttatggcctgtgaaaatgtttctggatcatttgcagctccaatgttgtagtctgattcttgcagatacact

SEQ ID NO: 171239 - DNA, 443 bp, Glycine max
taacacttcaagatctgaacctttcttccttgacaatttcttgaaagcttcattcaaggtaagggaagtctttttcacttcttaaaccctaacattgttgtctttggaagctaggcttcattacatgttgtgatgtttaaaatttcgtatatgctgccatgactggaactggatgatatgttgttttttggaagttttaaggctaaatgtgttttctttgagtgttaaaacatatatttagccttaaatttcacttaaatcggcattttctagcaaaagttacgaataaaacaagttttagaacattttactggataaaatctgtcacaaaaataatttggcagtgagagctgtatggcctggctttcttaaagttttgacctcaaaaatgaagttattatgtgtgaaaatgtacggtagcatataagattattgaaaattga

SEQ ID NO: 171240 - DNA, 410 bp, Glycine max
  unsure (1)..(410): unsure at all n locations
agctgaaccccatatcttttatttataacaccggaacgtgcctatatcattgtatcatctccctctccatcattgggggcgctacttgagctgccagatccctccacctttgggcatattgtttgaaagattcatgctccttcttacacatgttatgtagctgcattttatccagagccatatcaaaattgtattgatactgcctaatgaaggcaaccattaggtctttccaagaatggacccgggaaggttctagattagtataccatgtgatggctgccccagtaagactttcttggaagaaatgcatcaataatntttcatttttcgagtatgcccncattttcctgctgtacatcttcaggtgattctaagggcaagtagtctccttgtacttatcgaaatccggc

SEQ ID NO: 171241 - DNA, 394 bp, Glycine max
  unsure (1)..(394): unsure at all n locations
nntgaaaacactntntattntaaatcacttggccaaaccttttctaattcaattaggaattcccttcctaatattctagtgatcatcttgatgttgtgacttgtaatcttgaagtattgtcttgaattttaatcttgaaaagcccatttgcatcaattgcaacacatcatcatgatcatcatcaaaacatcaaagccaattgcatctacatccttatatcctttataccctttttatattttttctatttttgtggtcgacaagggtgtttccctttgctcctacgtattcctcaattgtgatgaggaaatcagacctacgtagttctttcggaacaaagtgtttggttaagttgtttttgtctttttttgcaaaatatgtttttattgaacaa

SEQ ID NO: 171242 - DNA, 356 bp, Glycine max
  unsure (1)..(356): unsure at all n locations
gcaagcttgcttntacatatgcaacagaagaattcttgtttcactatggaggagttgattaacaaaacataactctctccccaaaataatcccaatgtcatcacgtcggcttggcggctcctcaataaaatctcatccctgcatcctactgctgtcattctgcttccataaacaagggttgcgatcatcacaggtatcaaccacatgatacaaaattgcaagggtgagttcactttaaagagaaccaatgttaaatccaaataatcacaattagcaagaaaacataagcaaacatcatgagcttacacaacattcattattcaacacccacattcaacaattatttatcatacaca

SEQ ID NO: 171243 - DNA, 376 bp, Glycine max
tgaagaattatggcctcatcaaactactggtagcccgttgtttattctatatatagacctcccatctttaatggagtaggttaccactactggaaaacccgcatgcaaatctttatagaggcaataaatttaaatatttgggaagccatagaacaatgaccttatgttccctctataatggccggaagtgcaacaatagaaaaacctacaacagattggactaatgaagaaagaagattactacaaaataatttaaaggccaaaaatattattacatctgccctaggaatagatgaatactttatggtttcaaaattgaaaaatgctaaggatatgtgggatacactacaagtaacacatgaacgaacaacagatg

SEQ ID NO: 171244 - DNA, 348 bp, Glycine max
caacagccttctggaggaatcttctggagggcccaagtgggcctgattgttatttgcacccccatttttactaaatacaccccctcctttttttggtgattcttttttcgtaaagttacggaaacttacgaatttggtaacgatacttgttttctttccgtaatgttacagaaccttgcggattacataatcatccccttttttgacttacggaatgttacggaacctcactatttgtgcaacgatgcttccttttgatttccggtgtgtcacggaaccttacagattgtgcatcaatattttcttttgatttccggcacgtcccggaattcacaaattgctaatgat

SEQ ID NO: 171245 - DNA, 433 bp, Glycine max
  unsure (1)..(433): unsure at all n locations
tctntgtttganaattccttccctggttggtgttttggttcatgttaagggtggtgtctagtatcggttgtgcggcaggcggactttgtggctgatttaggggtgacctttgtggatgattgggtgttcttggatgataaagtggtggttaatgagaggggctgatattggctgagtattaacatagttgagctggtgggaaatttggccatgtaggaatgacggtcacaacatgggttcctcccttcttcttattctctccatttgccccaggcttcttatttatcaaagcaggataatcaaatttgcctcttctcagacccacttcgatcctttcgctggcaaaaactaaatcggcaagcttaaaggtgtgtaacccaacatctttttatattagaacacccggtacgtgtgcactatcattattatcatc

SEQ ID NO: 171246 - DNA, 410 bp, Glycine max
  unsure (1)..(410): unsure at all n locations
agcttgccacctagcttgccaggttatctatgttgcttcctccagaagcaaccgccttttggaggaattttctggaaggcccaagtgggcctggttgctatttgcacccccatttttactaagtacaccccctaccttcttttggtgattctatttctgtaacgtaacgaaactttatgatattcgtaacgacgctggttttctttccgtattgttacgaaaccttacggactacttattcaacccctttttggtttccgggatgtcacgaaatcttacggatagcgcactaacaccttcttttaatttctggcattgcatagaacttcacggatggtgctacaatgctttatttctacttccggcatgttacaaantcttatcatattgcctaacgatgggtgccaatt

SEQ ID NO: 171247 - DNA, 444 bp, Glycine max
  unsure (1)..(444): unsure at all n locations
ttggaatatttcaagcaagagtttggagtgcacatttgtttttcaaagatgtggagagccatgaaagaagcaaagcaattagtggaagggaatgagaggaaacaatatgccaaactatttgattatgcacatgaattgttgaggagcaatcctggatcaacagttaagatcaacacagtgccaagtccagaaggtccaccacaatttcagaggctatatatttgtcttgctggctgtaaaaaggggtttgttgctggatgtagaccattcataggtctagatggatgcttcctaaagagtgcatttggaggaaacttgctctctgctgttgggcttgatggcaataaccacatctatgttattggttatgctggtgnggacattgagaacaaagacacattgaaattggttttaactttgttgcatgaagatcttggggattac

SEQ ID NO: 171248 - DNA, 417 bp, Glycine max
tgagaagtgaaattgagaatggggtaaatctggagcaaactctcacctcacacaagtctataacatcaatttaaacttgctcaaactggatttacacctaaaattccaccgaatcaaaatttgactcctcaacacccaattttaccctagaaatggctctctgttcactttggccatttgtttttctctcttgcacagcccaaactttctcataagtcttaaatgacatttcaagctaggattaactcactttaacctccaaataccactaaatccagatttggctttccaaccctcaaaacctcactctgtttccactcataacaccatattctcactgtctaaccctagggtaactctacccttcatctctaacagttgtccataagccatttcgccacataaacattacaagca

SEQ ID NO: 171249 - DNA, 430 bp, Glycine max
  unsure (1)..(430): unsure at all n locations
tctatctactgaataacagttctatttgttagttcacattctaggtctttctttgtttgacatgcacatttgctcaacttcatgaaaggaaacacaaatctcatcttaagcatgcattcaatttaaaacaaagtcatacacccgttttcacaaaaagataaaagtgtttcactgccatgtcatctaaaataagttaaactgttcaaaatgcttcaagataagcataataattattcatatataaaactagtagtatatatagacataaaggaaatactgtacgaaaaccaaaattataataataataaatcaaaaagtgaaaagtgtcaccaggaattaaaaatcctgtgactagtcctgngtctcctgtgtttgaccatcctcctcatttgtcagctgaagaactggagtagtgggaggagaagtgtca

SEQ ID NO: 171250 - DNA, 462 bp, Glycine max
  unsure (1)..(462): unsure at all n locations
ctgcagcttgaccncttgccttcaacagcttgatttttactnggatntggctcctctaaagggtggatcaagcactttagaaaataaagtgtaataaagacattaattagaaaatcaacaattgatattataattaattntaggttttgtcaaatatgtatttgattttatcacaattttcaaccatcgatnttttaatcaatgattgtaattgcactttatcctctaaagtacacctcacttcagaagagccaactacgtaaaccttgatacaatcctttgatgatttgatcttgatcccagttcaaacttgaaagcataaaagtaatatcgtaagagttattagcacaaaaattaagagttctttcataaatttggggagagggagggtttacattatcacctattgattttaaagaaacaagagaggaaagaaagtatctaaatgatttttaataagta

SEQ ID NO: 171251 - DNA, 405 bp, Glycine max
  unsure (1)..(405): unsure at all n locations
ntgagccaaaatcctgactcaccataaaccttgacccagggttttattgtcaatccttaccctcggaagcaaaaaaagaatagaggggaaatttccaatcaaagaaaaagagaaggaaaatttccaatgaaagcaaaaaaagaaaagaaggaaaattccccaatcaaagagtgggagaaaggaaaaaagaaaagaaagaaaattcccaaccaaagaatgggagaaagtaaaaaagaaggaagctcctggtcaaaagaaaccagaagaaatgtgcagagaggtctttggaccggacaatatctgaacaatacagaattgtcaccaaatgaacaaaaaaggaaggaaagggaaccacgacctanaatagtcttctccctttgattaccaaccaaaatcccgtgcgct

SEQ ID NO: 171252 - DNA, 387 bp, Glycine max
  unsure (1)..(387): unsure at all n locations
actatgtcaaagtgagccatgcaacatggaagttatgctaaagatggggcaacttggtttaagatgtgtggttgaagaaccaaaacatcgcccaacaatgagccaggtgtgtcaagaactagagcaagccctctactcagctaatgatagcttcaataacaagaaatcttcaaagggattccttacaccaattggctcatcccaacaatcaacaaagtcggagactcggcgatcagttgaatcatacgattgttccaaagctttgttagtattgacagtgttggattacagaaatttcatgttgatatggataagttctcctttaagagcacagacttaaggtgcttaganaataatagtattagtattgacatggatagagtataa

SEQ ID NO: 171253 - DNA, 400 bp, Glycine max
actcaagccttcgtttttatattaatgtttcagttagggactggtcctttttttaacacggataaggcctaacggttggttaaatttccgattgttgaaatatgtttcgaaatactgtgtcatattcagttgatttgtcaccacaagttgtgattgttcgtctcttttctcacacataaagcataactacgggggaatttttctattatgcttatataaaatagattgatgcagatgcattctcaagtcctgttatcttttgccttgataaaatcccgttgagcagaagatccagaaacatcttagagttttcaattgagtctgtgatagcttgcatctaaacagcatcatgtgcccatgagggttttgagtgaaatttgctgatattaaaggtatgggt

SEQ ID NO: 171254 - DNA, 266 bp, Glycine max
  unsure (1)..(266): unsure at all n locations
aaagagccaggaaagggcaacacaacaacgaaccatanaaaggcgacggaacactagaattaattgatataataatgtctctctatatatgaaatttttttattcacaaaaatggaaaacaagtataaggagattaacattccatacatgttacttaaccaattaaattagattctcttaataacttagtatttggaggttgaatccaagtataggactgtatcaaatactgagaatatatttagagagagagctctatcgaacat

SEQ ID NO: 171255 - DNA, 424 bp, Glycine max
  unsure (1)..(424): unsure at all n locations
tcccttattattctgactatagagcactattttctatttttttnctttcttttngggcacaagtgtagtgttgcttcattgagaaactaggactagaagcaccaatggcatccaagaggaacacggttgtttttgaggactacttccctgcaatgatggagaaactgggcactgaggggttcatgaaggagctgacaaacggatttcagttgctgatggacagagagaagaaggtgataacgttcgagagcttgaaaaagaactctgcattgcttgggttggaagggatgagcgatgatgagttaaaatgcatgctgagagaaggtgatctcgatggtgatgacgcacttgacgagatggaattctgcaccctcatgttcaggttgagtcctgctttgatgaacaattccaaggagcttttgga

SEQ ID NO: 171256 - DNA, 436 bp, Glycine max
  unsure (1)..(436): unsure at all n locations
tgtactgctctgcaccgccgtaaggtataggatcatatcattttttttcattcttcgccttgtcttcggtgaatattattnttttcattattgttattcgagagaaattaaagcacaattatcattcgtcgtctttgcagttatctgtgttgcggacgtgcttgtttctaattcctatttttattgtttattttttaaaaagaaaaaagttagatccgtgcattgtaataaatatgaaatatatttttcgatgttgtaatgtcaaaaatattctctgttcacatttgctgctagctaagatcctctgtttcaagcaattctctattttagtttatcaagtttatggcgattccttcagatttatatgcaagtaacatttagagacattgcgtggatgtagatctattgttntatgaattatgaacaatgatatgct

SEQ ID NO: 171257 - DNA, 392 bp, Glycine max
ccccttctacttccgatcttaatctcagtgaggtgaacgatgcatatctggattgggaacaacaagatgctctcatctgtacgtggcttctctccacgatctctgattcgctactcccgaagcttgttgactgcacgcacgcgtggcaggtttggactgaagtgcatcgttacttcgccacgctcctcacgacgaaagcacgtcagcttcgctcagaattgcgtcgtctctccaaaggtcctctcacgattgagtcgttcatggagcgtgttcgcgaaatcaatgaatccttgatctcaattggagatcccgttcctcttcgtaacctaattgagatcgtccttgatgcacttcccgaggaatatgatcctatcgctgctactgtaaatagt

SEQ ID NO: 171258 - DNA, 385 bp, Glycine max
  unsure (1)..(385): unsure at all n locations
tctntcagacttgggagtaacaaaagacgataatagtttttctgtcacacttggctcccatatatgggaacaagcctgttacaattaatgacgtatggatagattaagcatgtttatcctgaggtggacgatgaataaatctaaattatgtgtgtgctactgctaaggtttgttcctccagggatactctatctgtcattcgttgcttcttaattaaagtgctgtagatatttgccttggaacttaatagatccctttcatctttgagggatactatgttatagttataataaatgtacgataaatagtttgctttattgatacatttgttgatgatacaggatcactcccaatctccttttaattaatatatattacatcgaaa

SEQ ID NO: 171259 - DNA, 370 bp, Glycine max
  unsure (1)..(370): unsure at all n locations
cttttattcngtgaccacaaagtggtacctggagatatgtcacgggggtcaggagaccttggggacgtcaggtggggtgctattgcccaaaaccaagcttgaccaatcccgacccaactcgggcatagtcagtcagtgagaacctgtgatgtacctaaataggcgagctcctggcagtcaaccaataaaagaataaagaccacaaagcaaggaggcttgtgtggtggctggccagctatggatcttgagtgatatttggaatatggcctctggtaatcgattaccaagggtgtgtaatcgattacaaggcttaaaaatgaagacaggaagttaagatggcctctagtaatcgattacaagggtttgtaat

SEQ ID NO: 171260 - DNA, 450 bp, Glycine max
cggaagagctctacatgggaaacaataatgttcaagatattgttttagaagcaaacgccaaagcatgggttcatgtttaagtgagttaacgcatttgaatcaactaacaactttgaacatgcagatagaagatacttcagattttgtgagagactatcttggctatgggagactagaaagctacaagattttgattgtggatggatggaaatggtctggggtggagtctgggaattatgtaacttcaagacttcttaagctgaattcgggtgcggatctaggcattgtaatggattatgggataaagatgttgacggcagaagcttaaaatattgatttgggtgaattgactggtgtccatgaagcactttatgaattgaatgatgaacggctttcgcgactaatacatcttagcatcctaaattgtgttgaaatggagagcattattgg

SEQ ID NO: 171261 - DNA, 324 bp, Glycine max
  unsure (1)..(324): unsure at all n locations
acacaaaaactcagcttacgctcagnctctggggacgagaccgtgattctttatctcgctacaacgcccttaactaaccactatgtacaacagtatcatctatccgatccctaatatgctctactcaacgagaactgactggcgatttaaatcatatcctatccgaaggcaactctcattatgaagataacgctgattgtgccactatgctctaccgagaacacaaaatatatctacctaaggcacactgaaaaaacaatattggtcaacactgactgaactgagcatacacaagcgtaactactactacggggaaaatatata

SEQ ID NO: 171262 - DNA, 414 bp, Glycine max
  unsure (1)..(414): unsure at all n locations
agcttgtgcatccaataccctgatgaggtttttccatatgttcttaaaactggactaatccatttgcttccaaagtttcatggccttgcaggtgaagacccgcacaaacatctgaaagaattccatgttgtctgctccaccatgaaacccccagatgtctaggaggatcacatatttctgaaggcttttcctcattctttagagggagtggaaaaggactggctatattaccttgccccaaggtccatcacgagctgggatgacctcaagagagtattcttagaaaaaatattccctgcttccaggaccatggccatcaaaaaggatattttaggcattaggcaactcagtggagagagcctatatgaatactgggagagattaaaaaactatgtgccagtngccctcaccacc

SEQ ID NO: 171263 - DNA, 450 bp, Glycine max
  unsure (1)..(450): unsure at all n locations
tataagaacaaaattgccttaatcatttccaaatatgcatgttaattatgacgcatcaacaagaatcaagccaaggctattgtgcaagcaatcaatggggcaaaacacaccaaatgattataatgatggatggctcaaattctcacaaaggtaaaatcatcactttcaaattgagctttcaaaactatcatgacatgtagagaagaatcaaggatttcaagtcacaaaatgtcaagaacttttattttcaaaacaattacccatttcttgaacatatcctataattcaaagaaaaacatgcaaagtcgtacgtgcacacaaaattgacccaaaatattaaactgaaaatccgaagaaactaacaacattaacaaattaacacaactaacaaattaacaaaaccaacaaaactagcaaaaccaaagaacactcccccncccncccccccat

SEQ ID NO: 171264 - DNA, 438 bp, Glycine max
  unsure (1)..(438): unsure at all n locations
agcttaaagcaatttgatctcagcaatgttgtcnatattgctgnaaaagaaaaacgagtaaattacagctatacctgtgaggtttcatgtaagtattagaaatagatgctaattaaatgttatgaaacatgcgactgaaacttgtctatccaaattcttacttatttcggggggttcattatgcataatttgaatgggctgacaagctttacaatattaatatgttatcctcgtttgatccattcgcttgcacattacgcaagcaatgtaaataatgaatttagtctgaataaaagaataaaaagaactatgggatggaaagcaattcatgattggtatatgcgcgagacaagaggagaagcaaagacttatcgcttttcttgtttttgaatcttaattatgaggattggcaagcaaacgacaagagctatgtctaca

SEQ ID NO: 171265 - DNA, 391 bp, Glycine max
gaccataaaactcagctatattgagaaagaaagaagcagcaagataatttttcttttagcaaaattaagaatagctgtagcataatgcctttaattcaccatgacttgttgctccaatttgccacaatgatttgatcataaaaaattgaaaaaaaattaaaaaaaaaagccggagctaggaagttcaatacccctttagaaacgaaacctaaataatttccctatttctagttattgggattgttgtggtggtgtcatttacgagatttttaattaattaacttgtacaagaaatatataaagaaaaaaagaagggtaaccgtaagggtaagggtaagataaaaaaaatggagaagggggggacaaaataagaatcaacttggtggaatgc

SEQ ID NO: 171266 - DNA, 462 bp, Glycine max
  unsure (1)..(462): unsure at all n locations
agctngtaggcctaggatcttcttcatttatgtactcctttacttcttggaagatgaatgacagtggaatggagaaggaagagagagagaggagatgccacttcaaggagaagatgagtctagaaggagctcaccaccataggaggccatggataagagcttggaggaagaaggagataaatgaagggagaggaagagaagacacacgaaatttatgctttaaaagagctctaaaatctgaagtttaattttcaaatgatcaaagttcaaaaaaatacacacacatgacctctatttatagccaaagtgtcacacaaaattggaggaaaatttgaatttctatttaaatttcacttaaatttgaaattaaatttgtggagccaaaatttcactaattatgattagtgaaatttagctatggttcagtccactagtccaagatcaagtccaagattctccact

SEQ ID NO: 171267 - DNA, 403 bp, Glycine max
  unsure (1)..(403): unsure at all n locations
taaagtctcacgattgccatatcttgatgcaataattgttattcgnggccatacgagacatttttcctaacaaagtcaaacatgccataactcaatcgtgctttttcttcaatgtcatatgtagcaaagtccttgatcctgccaagttagatgagctagaaaatgaggctaccaatacattgtgtcagatggagatgtattttcctcctgtgttcttcggcattgtggttcacttaattgttcatctggtgagggaaattaaatgttatggtcttgtttatttgtggtggatgtacccgattgaacaatactagaagatcttaaaatggtatacaaagaatctacaccgctttgaagcatctattgtgggaaggtacattgtagaagaagctattgagttttg

SEQ ID NO: 171268 - DNA, 423 bp, Glycine max
ttcatcaaaaagggggagaatgtgaatgtatgtatacatgattctgatgatgccaaagaagaatctaacaaggctgctacaaatgataagcatgtgcttcaagaataattcaagattgcttcatcaaacaaagcccttgtttcaagattcactaaagaccaagcattgccttaaaacaatgtgctttcaagacatgcaaggctctggtaatcgattaccaggaagtgtaatcgattaccataagacagggttgagaaatagctgttgaaaaaggtttcgaatttgaatattcaacatgtaatctgataccatatgtctgtaatcgattaccagcaacaaaactttggaaataaaatgctaaagcataaccctccaattataactgtgtatcgatacacaacattgaatcattccagtgaaagt

SEQ ID NO: 171269 - DNA, 378 bp, Glycine max
aactaactggacaaaccgaataaggcccaagcgatttgattgtttgccaccaccaaaactaataacagctccatcactgatagggagcatgactacatgcagcactacccacgacccaggagagagacacacacacccacgtatctgcatgactatgtgcaacattaagatagagcgattattgaagtgggagtatggtagatgtacatatttgatattttcgggcacgaaagttctcgaaacccgaggccttttaatatcgagaagcactatataaaatacaaaatattgagtcttaagtttgttattctctttcttcctcctggagaactgtcctaatccggaacttagggaaccaccacttacaatcacaattcc

SEQ ID NO: 171270 - DNA, 446 bp, Glycine max
  unsure (1)..(446): unsure at all n locations
tttttttgatgatgacaaggatgatgacaaaaagcccaaagaatgatttcaagattaagtcaacaagttcaagatcaagattaatttcaagtttcataagaggaaatcaagaagaatcacgaatcaagagaagtttgatttcaagattcaagagaagatgagttcaagattaaagagaagaaatcaagaagacttcacaaggggagtattgaaaagatttttcaaaaaacaaacatagcacaattttgttntttcaaaagagtttttctcaaaattttctaagttaccagagtttttactctctgggaatcgattaccagtttcctggtatcgatcaccagtggcaaagttggatttcaaaagcttttaactaaatttgcaacgttccaattggttgttaaatggtggaatcgattacaatatattgggtatcgattaccagagta

SEQ ID NO: 171271 - DNA, 439 bp, Glycine max
cttcatggacgcacctagtgaacaacaggtagctactcactctctcttcttacctttaaacaatgaatcaattaatctcgttccttaatttcgcatgaatgcaactccatatttgcctccgcaatcaattattcaagtgattatgattttgatcatcactcgccggttctgattatggaaggttgctgttaattatcattgttcaggtatcgttgagaggagcaagtgcgaaggagataacgagagacgcgcttcttcagaaggtctcctgggaaagagaatttcgcaattacgcaaaataagctgcttctcctgcgctctatattcaagttctttgtctttgcttccgatttctctgattttaaaaaattaccataccgcatgggtgtcaaaatacgataatattttcaaaatacattacatgacaaagttataacct

SEQ ID NO: 171272 - DNA, 275 bp, Glycine max
  unsure (1)..(275): unsure at all n locations
cttaaaaccccctctctgacaaaaagtgagggtttttttccncagccctcccgtattttttaaattcctctactgcattcatgcatattatacgttggatggggacatctaaaacactttctatcattatttgaaacaatgatttttaccaattttaacaacccaaggctttcctccccaatcataaaccctgtcaccccttactggatctataaacgcataaatatggccagattatcttacacttcaaaaactctttctccaagatgcttttt

SEQ ID NO: 171273 - DNA, 421 bp, Glycine max
  unsure (1)..(421): unsure at all n locations
aattctatcaatagacctccaatctttaatggagagggttaccactactggaaaacccgaatgcaaatntttatcgaggcaatagatctaaatatctgggaagccattgaaatagggccttatatacccaccacagtagaaagagtttcaatagatggtagttcatcaagtgaaagcataaccatagaaaaacctagagatagatggtctgaagaggatagaaaacgagtacaatacaacctaaaagccaaaaacataataacatctgccctaggaatggatgaatatttcagagttncaaattgcaagagtgctaaggaaatgtgggacactcttcgattaacacatgaaggaactacagatgttaaaagatctangataaatgcactaactcatgagtatgaattatttagaatgaata

SEQ ID NO: 171274 - DNA, 432 bp, Glycine max
tataagtcctaaggacttcaagctagagcaactcactttaacttgtatttaccacagaattcagacttagccttcccactctcaaagcctcactctttttccactcataacaccacattctcactttctaaccctaagttagttctacccttcgtctctgacagatttccatcagcaatttcagcatataaacatcacaaacatcatcacgaaaaccctaaaacagaatgggtatgtttaactcatccaaacatggcaatttcaacaagttttcagcaaatgccttcacagataatcgtcatacagcagaaacctagcatgactacccatcatatctcccaaaaccccatacccacgaaaatcaaaggagaaagaagccacccgaaccgaaatttcgaagtccactcgtagcacgcacttacgaccccgaaa

SEQ ID NO: 171275 - DNA, 238 bp, Glycine max
aaacaggactcaaatattgcaacaaacactaaacctaaatcagatcacaaaagatgagaaaaaatatcttaatcaagcacaacattgaagtctaataccatgaatggggggaagatatggatggcacatatgggtagaggagcaatcaggagctggtatggaggaagggaccatggactgctgaaggggacgaggcgctaggtgagtatgtcaggctgcatggtgaaggcacaaggaa

SEQ ID NO: 171276 - DNA, 390 bp, Glycine max
tgtcactccacttatatctagccttgtctttatttctacttaacactgctgacaacagcgtcaaggaattcttgcaccccggatacaaaggcttcttagaattggtttgcaatgtatcatacatatgggcatgtgcttgctgaaaagactcttatctaatatcacgaatcatatcctctaagcgatctcctatttctacatcaaatggttcagattgagaccccctctgcatgtctatcaattcaccatgccatatccatgtggtgtaattcttcttaatcccattacacaacaaatggtcctgtgtgttgtccagcatttgtcgtctcccgttcaaacaattgatgcaaggacgaaaaatatttccatccttatctgatcgacttcttt

SEQ ID NO: 171277 - DNA, 376 bp, Glycine max
tcgatgccaacattggagaggttaatgaaacaacgagatgatgctctccatgagaggttggatcaaatggagaatagagatcataatgaagaagaaaggaggagaagagggaatgatggtgttcctagacaaaaccaaattgatggtattaaactcaacattcctccatttaaaggaaagaatgatccggaggcctacttggagtgggagatgaaaatagagcatgttttctcatgcaacaactatgaggaggaccaaaaggtgaagcttgccgccacagagttttccgactatgctcttgtgtggtggaacaagctacaaaaggagagagcaagaaatgaagagccaatggttgatacatggacggagatgaaaa

SEQ ID NO: 171278 - DNA, 388 bp, Glycine max
  unsure (1)..(388): unsure at all n locations
ctgcagcttattttattgtggacgaatttttttttannaataggcggaaagaagtgaaaggtgaaaaaattatagatgtcataacctgatctaccaagaaatcaagagagaaatcgctagaaaaatatagtggatgcatataataatagtaacttgtaaaatataactttccctcttaattttgacctttggccgtaaaacaaaagagaaagaggggaaagataaatgattggacatatcttttcttcacattctgatatggtgtggtgaaatttaagtgtaactttgatattgtctgatgctttctgaaaatgcataaaaaactgtgggaaaaataaattacttctagcacaaatttcactgaagagcctagttctccggaataata

SEQ ID NO: 171279 - DNA, 399 bp, Glycine max
  unsure (1)..(399): unsure at all n locations
acctataaaactcaacttgcaattatgctttcgacaatatgaggatacncttttgatactgaagngtgacagatctattcactctttttaatcaccaagcgtaatctcgcctattaagtcatatttgtgctgctttaatcgataactagtaaaaaaaaccactgaaggataatgtactgtatccatgcaacgcacgtcatgttagatgagcataatctgaatcaccaaccctcaactttataaccaaaatctgattcataccggatagttgcgttactctgaccgaatcatgcgggcacatatgtgaatccaaatttaccaccaccccccaatataaaaaatctacctaactggtcaacacgaaactgtgataaggtgcccacaactacactcctaaaa

SEQ ID NO: 171280 - DNA, 374 bp, Glycine max
acactagaagaactatggttattgaaaactagacttgtattcatgtaaatctaatcatgtatgcatgtacctgttatatcatagatttaatttcggaatagaaaaacgttttggtggtagatatgcagttcattttcttggtgtaagttacccctatcataagaataagtaggacaaccactaaatagagaagcgtcacttcctaatagcatatggccaaaatgacaactccaacaatggaagttgcacaccttgagatgaagttacccaactgtgagtaagaaattcacttgggctttagtcataaaatgtggtgaatgaagaaaggtgaaacttgtatccaataaagatattgcattaagggccattgactt

SEQ ID NO: 171281 - DNA, 361 bp, Glycine max
  unsure (1)..(361): unsure at all n locations
agcttgaagggatatactctgatgngtgttgttcaacgcagtgtgaatctcttggtgagagtagatactttgtatcatccctagataatcttactaggaagatgtgagtgtatatcttgaagagaaagagtgaattgctatgagtattcaagaagttcaagagaatggttgagagacaaactggtttcttgataaaactatagtcactgttggaggaggagagtatactagcaatgaatgtgatgaattctatgaactagaaggtattgggcatgatgtgacacctccctacactccccaacataacggtgcagcagaaagatgaaatcaaacagtgatgaatatggtcagatgcacgctt

SEQ ID NO: 171282 - DNA, 359 bp, Glycine max
  unsure (1)..(359): unsure at all n locations
cctncaatcagcttttaatggcagcaatgacgaaccgtgcgactttaactactataaagattggtgaatcctacaaggggtttgagaacatcaataagctggtggacgtcggtggtggcgctggggccactcttaacataataagcttaaaataccctcacattaagggtatcaattctgacttgcctcatgtcatagaacactcctctccctatcctggtatgatctctacgttatagatatagttatggaggatcttctatgaatgctgcaaaagataatacccccacaataagaggtcaatggcccataatncaataatttctctatatgaaattcttaaccactagccatcaaac

SEQ ID NO: 171283 - DNA, 418 bp, Glycine max
  unsure (1)..(418): unsure at all n locations
agctntcatgccactccaaacttcctatggggtcttaaaacctatggcagttgaaggaacttgatttattcaataaataatagtgctaacaacctctgcccaaaaggactttggcaattcaacatggtttaacatgcacctgacttgctccaatatggttctattgaacttttccactaagccattttgttgtggtgtccctctcacaattaagtgtctagcaatgtcattctctttgcaaagagttttgaacatttcatcataaaattcaagcccattacttgtccctagtttcttcaacttccttcctgtttgagtttcaactagaactttccattcttcaaacactttgaatgcttcatttttgtgtttcagaanatggacccacaccttttgagagaagtcatctaataataaa

SEQ ID NO: 171284 - DNA, 450 bp, Glycine max
tcacgtcacattggcttaatgttaactccttgggacaactgctgaatttatcagcaagtgcactaagtcatacaagtagtataaaacgataagaccgagtatcgtatccacagggagtttgtttcattcataagagcgttcattcaatcagtagacatttgtgtaacatcatgaaatggaattaaaaacaggatataattgcaattctaaagataactacaaaattaactaagtaaatgcgagagataaacaaatgattaaaatgttgggcctttctactgagtgacttgatgcaattaagggtttttctctatctaatgttggttctgtggtctataatgacgaaaattatcccaaatatcaatgtcttgcatgaatgggctaattctaattaaacttcattcttggatccctcatcgaacttagcctaaccaaacaacattaagatca

SEQ ID NO: 171285 - DNA, 440 bp, Glycine max
gatccttaagcaccgcggctgcaacttgagagcccttcttagatgttctttttctccattcttcttttttcttgcgccttttaatgcatttaatagttatattaagggaatattagacagatctgtagtattttctaaagaatggattgcggcttgaaatctctcaagaacagtaataagtattttcttaaccattttagaattagaaaattcaaagccatgcaatcttacttatttgtgtggaagcaaagcttcatgatgaatcaaaagtgattcaaaggtggtttgatgataacaatgatgacaacaaaagatgatgacaaaggtgatgaacaaaatgctcaaaggtcaaagaacatctcaagtgaatcaagaacaagtcaagagttcaagattcaagaagaatccaagactcaagaagaaagcctaaaatcaagatc

SEQ ID NO: 171286 - DNA, 409 bp, Glycine max
  unsure (1)..(409): unsure at all n locations
tgtgcgaatcagatcactcctgcattacatctctaccatgctattttctttctttacccactcctcacgtttggttttttagggaaaaacaccataactaaacgcgccacaaggcatccctatcgcaccagatccaaatctagaacgatgggtgatcaagaggagacacaggaacagatgatagccgacatgtcatctctgaaagaacaaatggcttccatgatggaagccatgttagggatgaggcagctcatggaaaagaatgtggccaccgctgccgctgtcagttcggctgccgaagcagacccaactctcttggcaactgcgcaccatcctccctcatacatagtaggacagggaaatgacacactanggcacgatggcagccctcacctgggatacaaccgag

SEQ ID NO: 171287 - DNA, 451 bp, Glycine max
  unsure (1)..(451): unsure at all n locations
agctnttattaacatatgtgtctatattagatttgataacanacattgatacataaaggaatctatctaatttctaaataacgatgttgaataaaataacattagtcaaccagggtaatatgctttcactaacttaataaaccaatacataaagcaattatttttatttttgtttggatgggaggagggacataaaggccccaatacacataacggcatagaaaactaaagtttaatcccacaggcatcaggaaggctgataagttttgtttctttaaagttcaaaaatggtacagcagccctcagacaattacacagatctcttataagccatggctctctgaaatacagaagttgctgacttacaacaatcagaagttggattgggtcgggtttcccgcaatagcccacaaaggtgagaatccttatctcattgctgtggaggagaaat

SEQ ID NO: 171288 - DNA, 394 bp, Glycine max
tgcttacgctaagcgcagagacccctgattggttttctattatttcagataagcgcacatcactgcgctaagcccaacatcttcactataattgaaccttaagtagtgggcttggcgtggatgatgtgctaagtgccacttcttctctggaaaatttttactgtagtagtgctaaccgcgttgtcctgcgctaagccctagatccattctgtaacttaagctttaaagctgggcttagtgacgcaggatgcgctaagcgccaatctcttacggattttgaattcttggaaatgcgcttagcgcacctattgcgctaagcctgaactactcacttgaagttgaagattgatggtatgctaagcctcacatctcaagctaagcgcatattgtagaa

SEQ ID NO: 171289 - DNA, 396 bp, Glycine max
agcttgaaagagcccgggtagtctatatatatttcaagtccatagccatcaaagtctaaagaagagagtatgatgaactaagggacgtcaatatggccaccgatgaagccttggaatgagaaaccaagaaggcccgaaaggaagaacacgaccaaaacaagttttgaggggctttatagggcatcaatagtgagctcaaactccgaagaggtgaaaggaatcatcacgggtcaaaggcatgatcttgaaggatgagctaaaggcttgccttaggtcgaaaagaaatttgtcccaaaagttaagcgagactgaagggaatatgtgggccatcatcgatgagtgcaaagagaagctaaatcaagcggcgactcacgagcaaaggctataggatgagta

SEQ ID NO: 171290 - DNA, 406 bp, Glycine max
  unsure (1)..(406): unsure at all n locations
aaaactcaagctgngacaattctctcatcctatcctccaagtcccatgtagatacaccctcatcggntccccactgcaccttcaccaacgcgatctcctttcctctcaacgacttcgtccttcggtcagtgatcttctgaggttgtgctctataggtgaggttatccttcacctgtacctcgtccactgcaagaatatgtgatggatccgggttgtaccgtctcagttgagagacatggaacacagggtgcaaattcgataaactcggaggtaaggcgatatgataagctacaggcccaatcttcttcaaaatctgatatggacctagatacttgggtgtcaacttcctagccttaagagctcttccgactccggntacgggagaaaccttcaaaaacacatgttc

SEQ ID NO: 171291 - DNA, 464 bp, Glycine max
  unsure (1)..(464): unsure at all n locations
cttaagtcgatatcttagaggaaacgttatcttaatgatgatgtacataggagactaatgtggtgggttataaaatatctagctgtcaaacataagttttactaactagaaatgaatgctgggtagagcattactatcaatatgatatcaacatgataaattacctggaatagtgggtggggaaccctgatctccatagccaagtttcgctggtattttcagctttcgcttctcaccaagacacattcccaataatccctggtcccaacctgcaaagagaggtagtgatcatggaatactctatctngaaagatctcccatcaatcataaaccagtaatttgtaacaaaattacatcatacatactagtatgattatgtaaaacacgcatgcatgtatgtgagcatataatatagcttatatgttttggtggtatgttaataaataatatgaagccataaatct

SEQ ID NO: 171292 - DNA, 455 bp, Glycine max
  unsure (1)..(455): unsure at all n locations
ctaagctntagatgcactgtggtggcatcattcccagagctaataagatctttctctttaccagcatcatctatggcctcaattatcttgtcaacattggtgaggttgggatcaaagtgcacttttgcctcctccaaagcaagaccaacaattgcctctttcaccccttcaacaatttgaagggcattctcaacagattcggagcagcttgtgcatgccattcctttaatcctcactcggcacactgctatgtactgctcatgaagctcatttactctaaacccactctcctctatgctatcttttatttgtttcacctacaaaaataaatatcaccatacttctggtcagtgttaatattgaagtacacctaagacttatatttaatagttaatatacaaaatatgccttgaaaacggttacttgtatagatttattcctcggaattctaattt

SEQ ID NO: 171293 - DNA, 501 bp, Glycine max
  unsure (1)..(501): unsure at all n locations
gtcacctgccgcatgcaagcttataagaacaaaattgcctaaatcatnttctttatgcatgtgaattaggaagcatcaacaagaatcaagccaaggctattgtgcaagcaatcaatggggcaaaacacaccaaaagattatgatgatggatggctcaaattctcacaaaggtaaacttatcactttcaaattgagctntcaaaactatcatgacatgtagaggaaaaacaaggatttcaaatcacaaaatgtcaagagacttttattttcagaacaaatacccatttcttgaacatatcctataattcaaagaaaaatatgcaaagttgcacatgcaaacagaattgacctaatatattaaacaagaaacccaacaaaactaacaaaacaaacaaatttaacacaaacaaaactaacaaaactagcagaaccaaaaccaaagaacactccccccatacttaaacaacacattgtcctcaatgaacacaattaaagcaatta

SEQ ID NO: 171294 - DNA, 350 bp, Glycine max
  unsure (1)..(350): unsure at all n locations
ntaacctcattgtctctcacagtctatagatttgggagcctttctcttccttgtgtccggactctcagccacttatgatagccgccgatgatcccattactgcttcgcctaagctctctgtcctttcttcacgccgcatcccatgccttgcgaactccttggagtaccctcgcgttgtggtcactgaaaccccatgcgatgaagggcgtgatgctttcgtctgatggcactcctctcatggggtagccaagctgtcttatggcgaggacggngttataattaatacaaccccttgttccatcaagggaacatttggacatacctcgcatgaagatagaatcctgattctt

SEQ ID NO: 171295 - DNA, 437 bp, Glycine max
tttaatcgataatgaaggatatcatatgaaaactttattactggataatctcgtaatatatctgaagtatatgttgagacctatcttgaccctaataaattttgagatccaactaacttaaacttttaattatcagattaaatataacagatgttcccaattttgagtgaaatgcaacagcttcattgacttaagaagattttatagccaattccctatttgcatgtgtggcggtgaaaattaaaacttatttccggagacagtggcctattgaaaccggcatatcaaagagcgcgcccttcaatcaaatgatgctcaatattgaaatggttatcctctgccgttcgttaggaatggaagcgacgtttatcgatacaaaatgacatcatctgacaaataattatgtctcttaattatgagatcgacatataggatac

SEQ ID NO: 171296 - DNA, 156 bp, Glycine max
attccgtctgtaaaagataacttcaagtgggccttcagaggtgacggtcatcgtaagcttgtccagccactctgccacaatgcgtatacgactcaggaatgtctcgcctcattgatagacctggtacacaaggcgctatatctatccacacatagg

SEQ ID NO: 171297 - DNA, 465 bp, Glycine max
  unsure (1)..(465): unsure at all n locations
ttctggaagggcctagattcaataattctatntacacccctatntgataagttcatccccctatttntgtgtttctggctggtttctttccaaaacttcacgaaactttatggattccacgatgatgggtgttaagcctttcgaagcaatcaacgatggtccccgaatgaaattagagtgtaacagtctatctacacacacccccactttgctaaatacactcccgttttcgtatttttggccggtttctctctgaaacatcctggaactttacggattccacggcgatgggtgttaaacattttgaagtggtcaaacgaaggtcgcatgccgacaaacaatggtccctggatgatattagggtatgacaagtgctaataccttccccgtgcataaacaantcccgaaccctcattttcaaaatacacagacactgngacctttccattttgggttttttgacgt

SEQ ID NO: 171298 - DNA, 297 bp, Glycine max
atgacctgaggaacaagaatgaggcctttacctgtggtgaaaaacaccagcaagcctttgctttgctaaaaaataaacttactaacgcacctgtcctagctcattctgactgtcctaatacttttgagctacaatgcgatgcctctagagtaggaattagagacctattgctccaaggtgggcacccaatagcatatattaatgaaaaacttcgtagcgccacccttaactaccctacctatgataaagagctttatgccttaataagagccctacacacttgggaacactacctta

SEQ ID NO: 171299 - DNA, 458 bp, Glycine max
gcttctgttatgaatgtcgagcgtctcgtttactacggggcccaatcgaacatccgagtaaaaggttattatcatttgaatttgctacgagcatctgttttcaattacgagcatctcgatatattacacgacacaatcggacatccgagtaaaaagttattgtcggttgaatttgcttaaagcttctgttttaaatttcgagagtctcgatattctacagggcacaatcggacatccgagtaaaaagttattgtcgtttgaatttgttcagagcatttgttttcgatttcgagcgtcacgatatattgcgagacttaattggacatccgagtaaaaagttattgtcgtttgaatttgttcagagctttctgtttcgattttgagtgtcacgatatattacgagacttaattggacatccgagtaaaaagttattgtcgtttgaattgttcagagcttt

SEQ ID NO: 171300 - DNA, 435 bp, Glycine max
  unsure (1)..(435): unsure at all n locations
tgtagaatggctagacatgatacatgtcagggtttggtttttctcaaggataaaagggatgccccacattatttccatgacacaaatgcacaaatgatgatttggaaattntatgcaaaactggtcatgcatgcacctatgtggacactcaagtgtcaaatttttatggtcatgtgatgctagggctcacgattcatttcctctattttaaatcaacccaatgtttccaaaatatgttcttttatcaatttgtgcattcatccgagtccatttcgggcgtccggggaaaacttcacagcattcacccttcaggtgtatacacatttttttcaaaaactagttatgatcaatgaattnttttaaagaaaagttggaaatcatctcttctcagaagcatgtcggtttttatctatacaacttaattttcttttttct

SEQ ID NO: 171301 - DNA, 437 bp, Glycine max
  unsure (1)..(437): unsure at all n locations
agcttgataccatgccaagcaccaactttcctagaaantttagttgttaggtgaatgcacatagttggttttatgtatctaacaaatactaatgttttccatatttatgagcaccaaggcacaaaccttttattgttatattgtaaatntcataccctaatttcgtctggggatgatcatttgcaaacattcagattctcaccagccaaattgagctgcttggcacaagtttccatgcaaatcgaaaggtttttcgacatttcagaaaataatgcggaaaatactcaaaagggagggcaaaaaggtcatttttgcactttttcaaacccctggctcgcccaggctagcctttggctcacctgcgccaccaaaattacttaatggagaagtaaccaactcgtctaggcgagctaggttgtgtcagaatgagtaaatcc

SEQ ID NO: 171302 - DNA, 445 bp, Glycine max
ctgcaacttggattagcttagcattgagtccagcaagactattatactatttagggatgaagcttgattcatattataagctaaccacataaactaaacgatattatgcaagctcattgtccctcaaatgaatatagaattaacagggctgcaatgcaaattgcaagttcccttttaggtaaaattattcatcattagagaattatccttaaaaattatgggtactatttgaaggcttttgtacactctacttgctattcaattctcttcaaaagttaaattttcaaatgaattatcagaagtaccttgcttctatgaagcccatacagtggaccaactaatacaagaaaccataattatgtgatatggtcatgacatttaccatgggacacgtgattcacacttagtgcaataccattttcatgaaattaatttaaatcattat

SEQ ID NO: 171303 - DNA, 428 bp, Glycine max
  unsure (1)..(428): unsure at all n locations
ggttccttatnttatttattcagttctttgttaaaagatgtaaacgtagggtttcaatacgaattgtagaaaaaaagagtttcaatacgaattcaaataaaaattaagtatttagttgttttaaaaattaaaaatgttcaatattttttgagtttttgaacaaagttctttttgaatttaaaaaagccttgttttctggtgttgataacattgatgtctgattggagaggattgcacttgcaccgagagaatacttacaaaaatctaacatgatcgtcatcaaatcatcacttcctagtagcggatatacacaaaaatataaagaagcttttaccatgtactgtcnaaataagaattatctcatttcattaaagaacacagaactccacaccacctcaaagtcttttctaatcttcccatcccatgcc

SEQ ID NO: 171304 - DNA, 322 bp, Glycine max
aaaccagtagcacgaaagacctattttcttcttaagaagcaaagcacgcttcagatgggtgaaagcaaacatcaacgcgcgtgaaggcgtgtaccctatactgcggaccatcgcgaggtggacagggctgcaaaatctcttggagaaagacagaacccccctctactgtggaagtgacaaaacgaccaaagggttcgataaggcatacaaaaacctacaattctattggaaccttggagcgggtcattttggaagcgaacatcatacaaagcccttacatgactaaagcatacattacactcggaataagaataaaataaat

SEQ ID NO: 171305 - DNA, 402 bp, Glycine max
agcttctccccttccattcctattaccattctttgtttatgcacgggctgaaactttactgttagtggtatacatattatgtgaacaaaagactcagatgcttattaagaacaaattttaaatcacgaaactgataaatttaaaatcaaatgtatatgaatatatgaggaggtagttaatgttgcttcaatccaagtttaattttagtaaatttgctatcacgattccatgcatatgaaaagaagtcggtcttcaaggtggatgtctcctcctcctcccattcaatttcttttttgatcaaaagctcacatgcatggtcataaaaccggaagtaaaagacaacttcatcttcggccatcaattttatttatcaagatactgataccatgggtcatcaattga

SEQ ID NO: 171306 - DNA, 390 bp, Glycine max
tgtgcatccaataccctgatgaggatgtgccatatgttctttatactggactgattcatttgcttccaaagtttcatggccttgcaggtgaagacccacacaaacatttgaaagaatttcacattgtctgctccaccatgaaacccccagatgtccaagaggatcacatatttctgaaggcttttcgacactcattacagggagtggcaaacgactggctgtattaccttgctccaaggtccatcacgagctgggatgaccttaagagagtattcttagaaaaaattttccctgcttgcaggaccacagccatcatgaaggatatctcaggtattagacaactcagtggagagagcctgtctgagtactatgagagatttaagaaactat

SEQ ID NO: 171307 - DNA, 461 bp, Glycine max
  unsure (1)..(461): unsure at all n locations
agctntanaagagctcttattgtcttctcttctagaactagtctctccagactttagggcaacaaaatctttctttggcagatgatctcggttctggagatggatttcatgaactattaggttacctaacagttcatcccatgctagggttttcaggtttctagtctcttggatggttattgtttttggttcccacactttgggaaaattgtctaagatcttcaggtttatctaggctttggtgaaggtgtgtcccggagctttaagtccatttagaagtacttgaagtcttccaaacattccatccacaaattcttttttttttcatggagaagctctcatggtgccacatcaaagtgacaacttttcttgggtgaacatcttctgttcgttcataattgatgcttaattaatcacagatctcntttgttgctttaattgcatgattgtatacttattct

SEQ ID NO: 171308 - DNA, 425 bp, Glycine max
  unsure (1)..(425): unsure at all n locations
tgctaacccatggaagctcctaatatctcccacactttntgttgtgggccatacttggatggccttgattatctcaaggtccacttggaccccatttctaccaactacaaaacctaagataactatattatctacacaaaaggtacacttctctatatttgcatagagggtgtatttcctaaggactgaaagaacttgtctgagatgtcctaagtgaaaatctaggctcctactatacactaaaatatcatcagaataaacaactacaaatctacctatgaaatcccttaagacatgatgcataagcctcataaacgtgcttggtgcattagtgagcccaaaangcatcactatccattcatactaaccaaacttgtgcttgaaaacagatttccactcatcaccctttttcatcctgatttggt

SEQ ID NO: 171309 - DNA, 471 bp, Glycine max
agcttgtagacaacactgcggctgcagtatttattgctaaccttttccaacctctgtcacccttgttgcccaaattcctttgatctctaagtacatcagccaatacacgttccatttccaaattccatgtaaaataattttttgtttcctcattattttttcattagatgactccattgaagttaatttacttattcaacctgcatataacaaatattagatataacctactttattcatttgactagtccactacacaattatagaaaatatttcaagcaaagtttttatgcaataacaaagtacataaaagtctatcttcaatagaaaagtacaatagtaacaaagcacacaaagtttgtctgcaatagcaaattacatttaaaatagaactgtccctaagcatagtttctcctaacttgatagttagcaaacatatccatagctaatgtatctcgaaatcttgccatt

SEQ ID NO: 171310 - DNA, 458 bp, Glycine max
  unsure (1)..(458): unsure at all n locations
gacctatgaaactaagcttgactatgttacggcaacaagatcatgcatacttggtttcttctctcaancaccttaacatgattggcaagggtgaagatgagttctaaatctgatgtttaaatttcacaacgatccaatggttaacgagtccatgatcgtagttttagtgggataggttggtttgattgtatgtggaaaaaaagaggattttaagagagggagaagagaaaacaaatttgagagaagagagaacgtagtgatgtatcgtaaatgtaaaactgacatatgtttctatttatagttaaggtactctcaacttattatttaaactaaatttttattttattattctatgaaaactaaatttattttatttcctatcaataaataaaacttctttntatcttctgaaaacgtgtatttatgctatttaactttaaattattattntaattaat

SEQ ID NO: 171311 - DNA, 369 bp, Glycine max
  unsure (1)..(369): unsure at all n locations
aagtgttttaaggtccgatgccttaaatggtcctctttgctattatcggttgacatggaccgttctaaagcataaattcaatatgtaattntaccgcttttgtcgatcacctcaagagatcgttaatggtccaacaccttaacgttntctctcctttcaaaatcaaaagtatcgttaaaatggttcaacaccttatatgacctttgttcatattaaaatatattttgcggaaaaagatctatactctttatccaatgttaagttcttaaagatctctattgttgattcctctcgtattgacgtttgatgactaaggtacttcttgttactcttattattatgtttcgttatcttgttttgcctattact

SEQ ID NO: 171312 - DNA, 460 bp, Glycine max
tactaagcttgatgattacatctccctatttctcaagcaaattcttcttgatatcatcaaaatcttcatgatttacattctccccctttttgatgatgacaaccacctgtaggttaggagcaacaacaaagaaaatatctatttgcatatagtttactcccccttggttttacaatgattgcttatatgagacaattgaagatttcatatttttcatatataaaaagttgtctcataaaacaatagataatttttcttactattttatcttttatctttctctccccctttgtcaacatcaaaaacaaatcatgaatagaaaggagaaagatgttaccacttgttgcaatgtatgagaatcaagtgataccaaaaggcattaaaacaatcattcaatattaatcaagccaaaacaagtacaataacacatcaatcaaacacaatccatcatcaaatattt

SEQ ID NO: 171313 - DNA, 454 bp, Glycine max
  unsure (1)..(454): unsure at all n locations
gatccttgagtcacctgcggcatgcaagcttgtannttaaaagacatagaagttgacaattattttatatttttatttgtactaggggatccaaaaccacaagttagcatgaacaaattactttaaaaaataaaaaataaaattctcttggattcttttctataagaaacaaattttatggtgaaacttgtttcttataagaaggatgtatttattatatattaatttaatgaaatgaaagcactgatgaaatgttcaatcgtgagacctaaaagtggaatggaatgtaagaaataaattagtaattaaaagacaaaaattgacaatagagtaaaaaattagagatagtatattcaaatctgtaaaaataagagagataaagttaaaaaaactcttaatatatacttattatttcctcagatagagggaagaaggggtatatttgacatactca

SEQ ID NO: 171314 - DNA, 449 bp, Glycine max
  unsure (1)..(449): unsure at all n locations
tactaagcttaatgctgcaaaggttaaaattcaagaattgaagggagttttagttagatgacaaaatgaagntatcccaagaaggaattgatatnttcttcctcctcacattatagatgtcaggatatttttgggttcctttctggtcatgggccctgggcaatcacaccgcanaacaaccccaggatctgtcctgcatatgcaaataaattgatcatatgatgttccattaagtttcattgtcattgttccaactctagccatataatgtcttgtagntattgctctctcatttctctcttgcgtgctattagaatgttgtacatattctagaagtttatacccatactacagagataattcttgcaatagaaagaggcacaaatgtttaaacactatttattaccagggtgtatttgttctatagccaccccttatttacacacttc

SEQ ID NO: 171315 - DNA, 422 bp, Glycine max
cattatttaattaccgcgcctaattattgcaagagtaataattgaccaaacatattaattaggtaacaaaaccaatcctctctaaaagctaagggcaataattaactgaacgtgttaatcttgcaatgcaatgcaatgcaccaaattgacaataagaaaaaaagaaattactagacatatttttttccacaatattaatatgaaataattattaatgatgactttttttaaaaaaaatctaattaaatattcttagtcatttttttaattatattcttccttacataatattcgaaatcttatataaggaaacaaaaacattaaatttaatatcacacgaaccacaaattttttaatggttattattaggcagatcaacatgaagaaaccattaatatataattaaggtgggatataatatg

SEQ ID NO: 171316 - DNA, 276 bp, Glycine max
aagaaaatattactttgatgatatatttaacaatctacctgtgcatcagaaagacactagcactgctacagaggactttggtatggagcacagtggaagatatcttgatgaattttaaatatggagataccacatcatattcgctagataaaagatcttcgcgttgtaaactataaagtcttctgaaaaccgaaaataaaattaacacaggtgctctctacttaataaaataactaatatagattttctaactatactggccagcttctgtggatt

SEQ ID NO: 171317 - DNA, 453 bp, Glycine max
  unsure (1)..(453): unsure at all n locations
gcgatcttaagtcacctgcngcatgcaagcttccatcaagtggtaatcagagcacaagagcttatagtggtgctccttaaacctccattaattttttgctttaccttctcttccattgttgtttcttcatttttttctccatgtatctcctaacatgtcttgtgctaaatgttgttaactttattctttaaagtttccaccgattaaacttgctatagaagctagatttgattttctatggttcaaatttcttgttcttgttcttgaaccatgaattttgttgagtttaggttcctttgagtttgtcttgtttttttttgtggctgaaacctaaaccataaaattcttacaaaaatattaaagtagaagaaaacctcaaaaatctagagtgacttgttcacctattgtagttttgtcatagaagtcacgcctagtcatgaaactttgcacata

SEQ ID NO: 171318 - DNA, 400 bp, Glycine max
  unsure (1)..(400): unsure at all n locations
ttgtatcccagggaggagattcnagcttaatgttgatgggatacctttgaacatattgtgaaagaacatgaccaccctatcttagacatggagcgttctttccttctctaacatgatccctacctcgcatacttctgatgtcaacctggacagagccaaactcatttatggcatcattatgaagatggacatgaatatagggtacctcatctcctaccagatctccctcacagctcagcatgacacatccagacttggattcccgaccttgattacaactctatgtaaggctaggggagtttagtctgactcgaggtccctggaaaacttgagtcctgccattaatttggcatacattaagaagaactaatggaatcttgatgatccaacagtcactttc

SEQ ID NO: 171319 - DNA, 425 bp, Glycine max
  unsure (1)..(425): unsure at all n locations
agcttccttcacaggatgaaaccatccaactattctaactatggagaaaagagcatggactagtgtataaagacctaaaagagatggcaaagagatttgagattttcttgtccaatttgaattatatcattgagtttaatgctaaaagaagctccccttctggctaccttcttggtctaaacaattttgctgattggagccctagtgagttccaagaaatctacttacatagccttgatatgcctacagatagtgctcctaagctgaatggccctcttttatcatgtattgctcctgcatcgttagattggaggaataaagtagctgttactgcaattaagaatcaagggagttgtggtaagttnttgttatcactttcataatgcctccaatgttngttaagttnntttttataaagcatcatt

SEQ ID NO: 171320 - DNA, 376 bp, Glycine max
  unsure (1)..(376): unsure at all n locations
ntaggttgctcattgactccagaatgtttctgcaaagaatgtcttatatttgtatggtgatctgcagaagaacatagaccacagactcttacaacaggtgtagatttctgattcatggcaagctgagttaccaagttgaccaaggcatcaagttttccttcaagctttttattttcagtagatgaagatgaatccgtgaccacctcatggactcctctaagaacaataacataatttcttgcactgaattgttgggagttggaagtcatcttctcaatcaaattcctagcctcaacaggggtcatatcaccaagagctccaccactggcagcatcaatcatactcctctccatgttgctaagtccttatagaaata

SEQ ID NO: 171321 - DNA, 423 bp, Glycine max
  unsure (1)..(423): unsure at all n locations
agcttcggtcttgtagatctgtacacagttttttctctcataactgtatggaacttggacctntctctctctagaaaccctagacatgcaaagctttgaatcccattccaaactccctctataaaatctgatttcaggcttaaataggtgtccttgttcgtgctcgtgcgcttagcacacttatggaccgcttacccacattagtgaattttggcttagcgcgtgtctttctcgcttagcggatgaactgaagcattgcacttagtgagatgaagcggtgcacttatcgaacctgtacaactcatcttcttcaagagtcatccataccgcttaacccatgagtgttgcgcttagcagacgctcgctataccaacaaattggcttatcgagaaggtgaaaacaacactttccatagcttgctta

SEQ ID NO: 171322 - DNA, 434 bp, Glycine max
  unsure (1)..(434): unsure at all n locations
nggacaaaganagtgtcatcatgcagaagatgtgaatcttttctacaagacggttgtattacctttcacccgcccttagtgcttacccagattggtgtggtgttgaccatcactcaaaatgactctttattcatcttccaatttgtaggatcccggatgacacgatgcaaatgcatgcatgtttatgatcaaacgttaaatgtaacaattaaacaggtgctatcatgttcaatattatttaaacgcttacggcaccccgttgatcgagccgaatgactctggatttagtgagcaagatcgagagcgtatgttcttggagataataaaagtaaaggacacaatactggaggtagagatgcaaatcattaacccacatttattaatgctacgattatggggtagaaaagaattcaaaacttggagattcaatgagt

SEQ ID NO: 171323 - DNA, 459 bp, Glycine max
  unsure (1)..(459): unsure at all n locations
agcttcagaccaaagcaactcagaatctatgtatctaaaacccctcaatttagtggattttcaaggtttgagaagtgaaaatgagaatggggtaaatttagagtaaactctcacctcacacaagtctataacatcaatctaaactttctcaaactgattttacgcctcaaattcccccgaatcaaaatttgactcctcaacacccaattttaccctaggaatggctcttgccttcactttggtcatttgtttttctctcttgcacagtccaagctttctcataagtcctaaatgacatttcaaactaggatttactcactttaacctccatttaccactgaatcccgttttagccttccaactctcaaagcctcactctntttctactcataacactacattctcactttctaaccctaggttaactctacccttcatccctagcaattntccatcagc

SEQ ID NO: 171324 - DNA, 419 bp, Glycine max
taggttaaattagtctaaacttacgagggatcgaggtttattattttatgctacaacatataacacaagaacatgattaattagagaaatatcctcatatgcatcaacttgtttgtttgaaagacccaacgctttttacctattgctgtcaacttttacttacccgcatttactgtttttaccatagaattagtttatttctatttttaaccatcaattatcaatgtttgttccaacaatgccttacttctgaataaaactctgtctaataagcaagttccctgagtttgatactcggatcactccgttttaattttaaatacttgacaacctggtgcgcttgtccgatatttattgtccttgaatatatttgtctaaaatggggaaaaaggaaccatatgggaaagtgaacaccatgt

SEQ ID NO: 171325 - DNA, 406 bp, Glycine max
agctatattatgccctctgccctcggggtgttttcttctcggcgagtgcgacatagttgtggctgtgatattattgaccaccccttcgaaaccttctaccgagatgtcttgggccacgcgggcctcgttcagaacttttactagcagagcccgatgaggctcggagctcatgagtaactccaacagcgagaccctggctggagttttgaggagctgttcgataacctggaattcgctctgctgaattatacggaggaactcactggcttcctctatcgacaccttcttttaccatcccctgtcttcggaagacctttcgccggattatctgtattcgaagcgaggggtgcttcgtcattctgttcctccaccactattcctcttcccttgacactctcgggttgga

SEQ ID NO: 171326 - DNA, 401 bp, Glycine max
ccaacaacacactccaggtgaagaagagagtgggagtctgtgcttcccaacaaacggcacaccctcgaatatgggcaggagagtttctttcccttttgccactcaaactaaattgatccacgtctaatgcaactcaagacgcaacgcacctggaaacaggcgtaggatcactatgcgtcatgcacttggggagcattcatttcccttccatcttcttatgtgatatgcacaaactatacataaacgtagacgagacctaattgacaagcccaaaatttggagtacactggtctcataataactgacgagaacatcaagcaatgcaatatgcgtataacctctaaagaacagggatacagctaccgatgtcatacaatagctcgaaagcttggctcataatc

SEQ ID NO: 171327 - DNA, 459 bp, Glycine max
  unsure (1)..(459): unsure at all n locations
agctngatccattttcattcataatccttatttcngttttntttatatnaaaattttatatttcaccttaaactataagtaatacttttaaattaactaattctattttcaaaaaaaatttcttctatcattaaaccttaactctttgttttttacttatttatttctttttttggtaatgcatatttcttataaggtttaaatattctttccctataaaataggatatttttaattttagtcatgtaaagtagtataatcatagtgattgaatatgtttgaaattaaatatttccatcaccatctttgcttaaaaaaatattgaaatggaggcttggagagcatttatcctttacattatgtttggatggggaatttaaagatttctaggaaattcaaattcacagtattctgatcgtcttgatataaattcctttcattttgtaaatattntttttg

SEQ ID NO: 171328 - DNA, 390 bp, Glycine max
tgtatgtgctttaatcatagctatttgaatctgacttgtgtttatattgatgttcaaaatggttttaatttggtgctaattgaagaaattgaagtttaagtatatttgggatatgaaatatgcttccacgccatgtttgacattgattgaaattgcatgagttatgaattcagcttttgaagcttgtatacttgtggttcctctattaattcctttgtttagaatctattcaatgagcttaaatatgttattaaactaataggattcacacttaaaaaattggaaaaagtatactaaatttgcatgtgggactacctaaatatgtccttaaaataggactacctaaattcaaacctgttggaaaaattgcatgtgggaattctactcttg

SEQ ID NO: 171329 - DNA, 417 bp, Glycine max
  unsure (1)..(417): unsure at all n locations
agcttctagccaaatggacttacctnttattaattcctttgatagcccttttgagccttgtttccctttccttgttttgaagctcactacaagccttaaatgaaaaaccatgatatcaccatatccttaaggaattttggagctttggaattgttttgggaataagtgtgggggggttttgtttcattggataacttgttttgttggctatgcttcgtgatgtattttgggccatacttgatgtacattgtatattggttaaatgttggacatgctgaatgaaatgttgtttctcaaaggctatagagtaaaaaaaaaattccaaaataaagaagaagataaagaaacgctataaagttgagtgaataagatctttaatgacacaagaatgatgaaactcttggttctactctttat

SEQ ID NO: 171330 - DNA, 392 bp, Glycine max
tataactgccattgcattatcaagcagatatgtgtatttgtcttcttatggcatcggaattggggtgaattctacaatcttcttatctggaaaattccttctttggttggtgttttgactggtattacgggtggggtttggtcttggatgtgcatctcgccgaatttgtgtttgtggatgatagggtgttcttggctggtaaggcggtgggtaatgacaaggactgatactggccgagtattgatattgccgagctaatgggaaatctggccatgtaggaacggtagccacaacatgggtatctccctccttattattctctacactttccccatgcttcctattcatcaagcccgatatcaaatttactcttttcaacccacttcattctt

SEQ ID NO: 171331 - DNA, 450 bp, Glycine max
ccccgtaatccaaggaatggaaattctgatcgccaatacttcaacaacatctcatagggatgaatgaatcgggcatactttaagcttatgcacggaaaatgtaattatgaaattgagatgcccgaagaaacaccatttcctagttaaccatgcattaggtaccatgttcaattattttgtttttaagtgaaacgggtttatgatcccaacatggttggctcctaacacatgaaactaagaatgtagtgtgaagtttcacgcttcccccttctttgtttttgttttgtagaggaaaacgcatggatgagcaaacatgaaaacaaatggtatgcaattttgcagatcatagagtttgttgaacgcatatgcatgatgatgccatgactcatgcaaaatgtgaggctggaatatgataacggacaaatgcaggatatgtccattatgatgtta

SEQ ID NO: 171332 - DNA, 413 bp, Glycine max
  unsure (1)..(413): unsure at all n locations
gcttctcccttattntgctataaataggggatgaagtgaagaatttattggttcatccccttaggcacttctctctctctcgaaatagctgaggaaaattagttccgtgaagaaaatccaagccgaggcgcttccgtaacgtttccgtgagtaattacgcgaagattctcgaccgttcttcaagattcatcgatcgttctttgttttcttcagtcttcaacgagtaagtacctcaaaccaagcttttcaattcattctatgtacccgtggtggtccacattttatttcatgtatttttgttctcgttttcatttacttcttatacccccttttgacgtgcttaagccatttatttaagtcatttctcgcctaatctaaaaataaaataaatttccaccgatcggttgaattga

SEQ ID NO: 171333 - DNA, 501 bp, Glycine max
cgatccttaagtcacctgcggcatgcaagcttctataatggcaggatcgttgagcttcattttttctttcaatggtgatttttcaccatggagatgcaatggaagataaaggagaagaggtgaggagaggcaccatccactagggaataagtcatagaaggaagagtttcaccaccaagagagtgccttggataagaagtttagagaggaatattcaatgaaggaatagaatgagagagaggaggagcatggaattgaaggagaaaatgagggagagaagttgaactttgaagtgtttctcacaagtttctcactcatcaaagttgtgacaagtgttgcacatgtttctatttatagcctaggtcactaactttgtgaatatcattttcatttcatgtgaatctaggaggaatattccaaggatatgtcaaaggcatcttagcatattctaagaatatgcagaaatatgtcagagacatcttatcatattctttttagatg

SEQ ID NO: 171334 - DNA, 344 bp, Glycine max
  unsure (1)..(344): unsure at all n locations
gccgctggagctgacccatcaacttccctagctcgtttatactgttgattcctangctcttgacattgacttgatagaacctctttttaagtgaaggcgtttgacttgatcccatgtttactaaagtgaaacaaaatctagcgcgaatcataactccgacatctatcatgggtgaaatggatgaatgtatgaaggaatgcatatgacatagatgcaatttgtgaatacgggagcccgggaaatggtctccttcttagatacaacatgttggggtagcacagcgcccgacttatgtatttaagaaggtgacacggactttccgttgggttaccaaagagagggga

SEQ ID NO: 171335 - DNA, 426 bp, Glycine max
tttttcatattcactcttagcagatcagatgactccagtgtgttcagattggtatttcaattttgaatccaatatgtggtttaagaggaaaaccttttgttaatgtaattttgatatagatctgggtatcatatttaattagttttactagtctttctaaattataaaatcgacctttagatctaaacctagctttaggacattttgcactatctcatgtctcttggttcaaacatctttatgatacatttgtttcattcacttgattgtatttttcttattacttagaaatctgtcaatcatgatggacaaggtggcattcacttcaattctataaaccatcctcatggtatgaataaacaaattaagtataaagggagcatacatctcatggttaatgcttaaatttgatagataaataatatg

SEQ ID NO: 171336 - DNA, 474 bp, Glycine max
  unsure (1)..(474): unsure at all n locations
gccttcaatctaagctnttaagacagttcatatacagcaactgtcttaaaaaccgtcttattaaatctgttttctaagacggttgttatataagaaccatcttagaagatagactttgtaagacgattcttataagaaccgtcttagaaaatgtaccttctaagacggtttttatgtaataaccgtcttagaaggtcactttcaaaagcatacctcatggttctactttaaccaagaccaagccacttacatgatcttaattacctcatgtaatattatcttggcaaatgaaaatcatagtataatatctcaaaaatgacaacactcgattatgaataacagcattgcgtggtacagtgttccaattattatactaagactaaggaactatttcatcgatgattagaataatactagtatacgaacactctcacgaattttctacttctatacactatcgactaaataatcatg

SEQ ID NO: 171337 - DNA, 353 bp, Glycine max
atcctcatagtcacctgcggcatgcaagcttgttttgagttaatagtgcatcatgagatgttatttcaagaaggctcttctttgcgggagtatatgctctatcatggaggatggcatgatcactagttgtcatattctcaataagctccatggcatcatcaagagtcttcaacttgattttaccattggcagaggcatcaagaagttgcttggaatgaagtcataagccacccattgaaaatttggagtggaatggcttacttaacccatgaaggggaattttggtgaaccaaccaccaaaatgatctattagacctcacttaaattcatcaagaaattaatggaatgatgaa

SEQ ID NO: 171338 - DNA, 290 bp, Glycine max
ggttatattataataaggctaagatatgtcttgtgttcttatgaaactataatgtgttattatggtggctcacaactaaggttggatgattttgaacctactaagcatatgcttgtccactaaacacaacacatgtattagttttgtttactgtatcttctctatccctttctcagacacttcaccacctcagacaacgacgactcctacagcagtaagcctcattgcgcaccaaactcagcccaaagaggcgcttctatcagtactgacagctgcctcagagcaacgac

SEQ ID NO: 171339 - DNA, 480 bp, Glycine max
  unsure (1)..(480): unsure at all n locations
agtcacctgcggcatgcaagcttctggtgggacatcttgactggcttttattctgacattcaccacagattctgccttcttctattttcagattgggaatgcctctaacagcacctttgtcaataattttcttcatgcctcttaagtgcagatgtccaaatctttgatgccatattttgacttcatcttctttggagaatagacatgtggaggagtaactggtttcttgaggtgtccataggtaacagttgtcctttgatctgctgcccttcattaggacttcactcttctcatttgtcaccaagcattctgactttgtgaagtttacattgaatccttcatcacacaactgactgatgctgatcaagtttgcagtcagtcccttcaccagcagtactttgttcagactaggaagtccatcatggactagctntcccattccagtgatctttcctttagagccatcttcaaatgtcacat

SEQ ID NO: 171340 - DNA, 439 bp, Glycine max
  unsure (1)..(439): unsure at all n locations
ggatattgaaagagaanttggtctacattctatattcattgttttgtccatcaacttcaatgagttcttgttacattggcaaaaaaacatgttcaaattgcattaattgttattcaatttagttgctaatttgtctaatattgttggagcatcatgtaagcactgggatatttttcgaaaaagtcaaattacaatagtgaaagaagcattgcaaaaaggagaaatctcaagtgagcatgacttgaatcaagagagcaggaaacactaaatgaagctcacattatggtacattacttagtttagtttctctttnttcttccatgattgatgtgcttgaaataattgaagaagatgacataagtttagagcataaggcttaaatatgtgctttgttaaattctgtgcacagctttgaatttgntntcatcttgcacttgat

SEQ ID NO: 171341 - DNA, 430 bp, Glycine max
  unsure (1)..(430): unsure at all n locations
agctttctctctccctgttcctttcttttcataggagggtaactgggcctcgaaaaccaagtactaacagaactccaacccagatttcacaaaatttcacttccaccgcaccgagcacgttgttgttgggacatgagagctcanagtaaagaacgaacattgaaacattgtcatgacgacgaacaatctctctccctatcgcattgatagagctgattctgctgagattgtcggcgagatcggttattcgtttcaagcttgtatgtaagtcatggctttctctgatctcagatccccaattttgcatttctcaaggtggtgaatatccttgagggtagcccagtcctcccaagaggcttcatcagggtggagtccctcccactggacgaggaccatgtgttgnggccagattcagatggaataatcttat

SEQ ID NO: 171342 - DNA, 313 bp, Glycine max
ctttcatgttggttattatcattccttgtaggaataccatcttcttttttctaggaataccatcaatgcagatatctcatttttaaccttattaacttcattgtacatttgtcattgtgaaaatttgttactatctttaatcataccatatacattctttaatattttatatacgtagtttataaaagataaataatatagagaatcatattaaaaattaagaatacattgatatagataaaatattaattacaatcttaaatttacgtattatcatttaaaaataaacaaataaattaacgttgattactac

SEQ ID NO: 171343 - DNA, 467 bp, Glycine max
  unsure (1)..(467): unsure at all n locations
agctngaacttacaatatgactcatggaccttttaaaatnntcatttatattnttgaagaagttcaaactataaggaaataatatcagtaattgcaaaagcagtactgaaaaatcaatctgttaacaatgataaattggtatattcctccctttactgaatttccttgaaggagaaacgtgccttactaaagtcatacttccaaatgggtactatttagcaaattacttttacatagatattagaactatatagtgaaatgagcttctaaaatcagaagaacataggtgaaattgtatgatatacactttctgctgaagttgaaattcacatgacatatttatttgtaaaaatatttgcctgtattgtggtaaaattgcatagccttcattttttttcttcttaattttcttcagactttccctagaaacttgggtgaaaatatactctcgatactgattatatcta

SEQ ID NO: 171344 - DNA, 406 bp, Glycine max
  unsure (1)..(406): unsure at all n locations
taacaagctntgttatagatagactttggtgtatttatctatttaaactctataaaaagcttgagcttgacctttatagtaaacaagtcagaccgagccgagccttaaataggcctaaccataggttcttgacaagcgactccgctcatttccatgcctaggcacacaccatatattagtagaatgcagcagtatacaaatttatcaaggttgaacacaaaatttgttgaattacgtgaagattgaacatttagttacttgttgcgattgtcatgtaatatgataatatatgtgtgtttccttcgacgttgatataattatgtgtttcactaaaatttcatatttagttacttagcgcgttatgtgccattgaatccactaatcagagtttagtggtacttttata

SEQ ID NO: 171345 - DNA, 454 bp, Glycine max
  unsure (1)..(454): unsure at all n locations
cctgcggcttgccaagcttgaagaataagagaacaaactggtgccttatatgaagaccagtnggctaataagcggggattgcagaacctcagggctcgagaataaccaggtgtgcctgatatttattttatgtcatgatttatgaattcttctggcacgataaagcgtgagaaagtaataggctgaacaatgcaatctatatcctttcactatctcatgaggtgttttagtttagccttatttaaattggaacattcagcgtaagaacaatgttttagtttatccataaagcgtaagaaaaattcttatggaagcttctaatgtctctacctaacactttggaaaaagaaaaaaggaaaaaggaataagggatggttgaaaagggacgctcctcattatctgtgggaagggcatagtttggtgatctggttgagcacgacactgatccttggat

SEQ ID NO: 171346 - DNA, 345 bp, Glycine max
ctgtgataccacttgtttttcatgggcctcagatatcttaagagaggggggccgaataacgattcaccctctttatcttaaaaaacaaactattctgacgctatcccaactaccctagagtccgtttgctaatgatctcctacctcgcactgccaattgatgggctaaatctgaacagtaggctttagacaatcaatgagtttaaggggagacaaagtgcagactcagacttatgctggttcaagcacacccttgtgcctacgtacaggccctcaagcggccgcttgagatgcccactatcttgcagaatcccgtctcgagttttgaaccacactatgacaaccc

SEQ ID NO: 171347 - DNA, 475 bp, Glycine max
  unsure (1)..(475): unsure at all n locations
agcttgcacaacaagtaactacattggngtttgtattttatgaagnagctgactaaatttcactaatatatacagtgactactcagaaggaaatgatgagcctatattaggcccatctaatctacctaattaaactaattacacaaggcaaagcccaaatttgtagcccaattgttcaagtacaaaggttctaactgccaagcttatttctgacaaaattgaagctctttttcttagatttctaaggacttctcatatgctccatttggtgttctgtagtgtcctataggccctgcacaaggcagataggtcaagtaagcacaaaaattcaaaaataagcaataattatcaattaagctcaatcatttgcctaagatcaaaactgagttaaagtgagaaaatagggtcaaagagatgtcaattgagctaanaagaataaataaatactaaaccagaaatgctcaatcaaattccc

SEQ ID NO: 171348 - DNA, 429 bp, Glycine max
  unsure (1)..(429): unsure at all n locations
gagaagaaacctaaagaagctagagcttagctatactcacctctctaatagctaagctcacctggttgagatgagaagctagagcttagctacacaccccctataatagctaagctcacccccattccaaaaatacatgaaaatacaaaaaaaaagtccctactaccaagactactcaaaattccctgaaatataacgctaataccctatactactagaaagaccaaaatacaacgcctaaaagaaggaagaacctattctaatatttacaaagaagagtggatccaaccttgacccatgggctcaaaaatctaccctaaggttcatgagaatcctaacgttcatgagaaccctatggccttctttagtagctctagcctaatcctcttgaagcctcttgctcatggctctggtaactggntcccttct

SEQ ID NO: 171349 - DNA, 451 bp, Glycine max
  unsure (1)..(451): unsure at all n locations
agctngtaataatagtataatactntaaaaagtcattgcatcatttcataatagttaaaaccatggtatgctgtagatattgttcaaagatttggcagggtaaggtgctactcatattttgagcactttgttggcaccatttcccctgatgtttggtgcatggatcatgatctaatatatgttggatatatnatgcaggaagtgttagatgaagaagatgaaaaactgagaactttaaaggatgagtttggtgacgatgtctttcaagcagtggttacagctctgaaggagttgaatgagtacaaccctagtggtagatacccgttaccggagttatggcattctaaggaaggaaggaaagccttgttaaaggagggttgttcttttataatcaggcaatggaaagcattaaagcagcgaaagaagtangactgatgcngaacttacattt

SEQ ID NO: 171350 - DNA, 353 bp, Glycine max
  unsure (1)..(353): unsure at all n locations
nggtaatgttgttgaagggaacacccaagtccctgtcattcttagagagcttccccggcaggtatatatatagatatatatacattttttgggttggttatgaatgtttgttatatgtgcaattgatgtgtttagtatgattaggagctagtttacattattacattttgtgttggatattgnggtttgttttccgtgattatactttctgtttttttttttttaatgtgttttacttgttcattggtttgtgatactaacttgatggatgtttgtattggattaacagctgcgctcaggttacactttcaatattgaagcagggaagcaagctttaaaaaatgtgaactccc

SEQ ID NO: 171351 - DNA, 454 bp, Glycine max
  unsure (1)..(454): unsure at all n locations
agcttatctcatgtcagacaccctattattagttgttgcaaacaatcacagtttacttggtgccaacttaaagtggaattaaacaaggaatatacttaaagtgcataaaaaagttaaataatgctcaaaataggcaatcctagcttaaatcttaccctttccttgatgtcacccaaagttggcaagtacagcttatagaattcctctctgaatgcaaccacaaacctaaataaagtttagaaaccagcaagaataagacaattagaatctgtttgattttgaataaatttaagggacaacaagatacatctactatattatagtattttcacttntaaaggactaaagacgaattattgaccataattgatatattatcatttgtatatcactaactcgctcttacttagtctgtctctcaacttgcaattacaacttcattgcaactcagcat

SEQ ID NO: 171352 - DNA, 459 bp, Glycine max
gacacttgaaactaagcttgtatatggttgggctttcgaagaatacatggtttttctatattacaacaaatcaccacgaggacaagagagcaattatcacatgaattacataaaatctctcactctcctctttccctaatgaaaaccatccccaattcaatcaacttttccaatgaaagcatttgtcaccatgattccttgattctttcttcttcctctattcttattcatatcatttttcactcacttgactagtatttcactatttgccttttattatattttaataggaactaaataaaatgagcaagtatttatttcacatgtgaagataggataaactataattggtgacaatctttttaaactcaacaattctttaccaattcaaatcaaccatttaacacaaagttttcccccaacctaaatggaacccccttcgcgcataatatgtctctt

SEQ ID NO: 171353 - DNA, 429 bp, Glycine max
agcttcctggatctcatcatctgcctgcgctttctccccaaaagacccgtggtcgtcctcccaagcccaagccccaccccgtctggcctgctgcagccctcaccgacagccctgctcttctatccgccaaaagaggccccggtcgtcctaaaaagattggtgtcagcccgccaggcccaaggggtcgtccacccgggactgggagatctaagctgcccaagaggcctggccgtccccccaagcccaaatccgtctcggcgatctccagtggtctcaaacgacgtcctggacgcccacccaaagcccaatccaacgtaaacgtcatccccttcgcagccccagttgctcccggcctgcctactgtgcagcccatccttcctactgcttccgtgcccaatggatctcccaggccccgaggaaggcctaaaa

SEQ ID NO: 171354 - DNA, 399 bp, Glycine max
  unsure (1)..(399): unsure at all n locations
actccgcttacaacanaacttgttgaaataggctaaaaagagcttanattaagatccctagccgtattcataaatccaactaaacttacaagctcctccatatacatcctgcaataccaaaatattttcatttaaaagcgataatagcacttacttcaccaaaatagttaggatgacgagaatatttccaaagtccaacattacaccacttccctctattttctgaagatcttttgaaatgcagcttttgttgatctgctgtaccttccacaataaaacccacagcccacaaaatccaccctactatatcaacaacctgtaggaagggatttctgtcgcttgcattaaccactgtaacaggtaaactcacagcccacacccagacaagcctgcaaaaat

SEQ ID NO: 171355 - DNA, 448 bp, Glycine max
  unsure (1)..(448): unsure at all n locations
cagtgagagtgtgaactttatctgtgagtcaacgactagctgtgagtaataatctttgtatcaatctctgaattttagaatgaaatgtataaataaggacatgatgaaggccatgattgtacatacacaagccttttgaccaaaaagcttaccttgaatgataattatatcctttgcacctttttgagctgaatgatattgtcaaaaatttaaaccctgaacttaaataattatctccatataccttgtttagattctaggagagcatatggttcaaggcaaatttaccccaaatttgggggagtggaacttattaggatgcaaagaanaagataaagcatcagcacacacaacacataaattgtgtgttaaaaaaaaaaagaaggaaaagtatgatgatgtaacaaggtcaaaagcaaatgaaagtgaanagctaatgagcaagcta

SEQ ID NO: 171356 - DNA, 334 bp, Glycine max
tactaagctttattggcctcttatacataacttttcccctttctaggttgagtttcattttcctttgtgcaataagtctagcctcaagacaaatagctagcttgtgacagtggaattcaagattaatttgccgcttgtctaatgcagaccatgcaaacaaatctacatttgttgccaacacttaggctatgccttcttccactttggaactcatatagaatccaagtttagtgcacgaagatggatctctgccaagttggaaaggtttgacctcttatgttggatctgctctcagtttttcctcttgtggatcaagtttagcatcccctaaatt

SEQ ID NO: 171357 - DNA, 438 bp, Glycine max
  unsure (1)..(438): unsure at all n locations
tgaagattattggataattgcctgttccttaggcttttgatgtctttagaggttacttcctcgttgacatcttttgtcttgaatggaattgccatgacaggtttattgttactgtctttgatatttggtagttgatattgtgttgtgggaggtaattccgattggattaactcaccatccttcacttgccagtttgttatgacatttgttgttggatcacctatgatgtcttgtttccaagggtaatctatatcctttctgatggcttaaacatgaaaccaatcaaagaaaaggacattaatnttgactctctcgacaaattcgtaaaacttgtcttggactctgtttctgtttgtacccttgtaatgttggaaaaaccatctcctttgaggttcattattccgagaatagaaatctttcctaagggtttccttatca

SEQ ID NO: 171358 - DNA, 307 bp, Glycine max
caaaagtgtgctatatctcttcattctcttcatcctgtgccaaaaagaattcaacaatgactaataacctgaattctttgtatgtctctcttctccctgttccaaaagaacaaaggactaaccgcctgaattcttttgggtctcccttctccctttccaagagattgctcttgattcttccctttcccttaaacaaaagattttagagactaactgtctgaaatatcttctgtttctccttacaaagattcacaggactaaccgcctgagaattctctgtctcaacacattggaaggtacatccttt

SEQ ID NO: 171359 - DNA, 402 bp, Glycine max
  unsure (1)..(402): unsure at all n locations
gcttgtagaatggctagacatgatacatgtattgttttgnttggctcaaggataaaagggatgccccacattatttccatgacacaaatgcaaaaatgatgatttggaaattttatgcaaaactggtcatgcatgcacctatgtggacactcaagtgtcaaatttttatggtcatgtgatgctagggctcaggattcatttcctctattttagtcaacccaacgtttccaaaatatgttctttaatcaatttgtgcattcatccgagtccatttcgggcgtccggggaaaacttcacagcattcacccttcaggtgtatacacatttttttcaaaaactagttatgatcaatgaattnttttcaaagaaaagttggaaatcatctcttttcacaagcatgtc

SEQ ID NO: 171360 - DNA, 402 bp, Glycine max
ctaagcttctagccaatggacttaccttgaattaattcctttgatagcctttttgatctatgtttccctttccttggtttgaagctcactacaagccttatatgacaaaccatgatatcaccatatccttaaggaattttggagctatggaattgctttgggaataagtgtgggggtttttgtttcattggataacatgttttgttggctatgcttcatgatgtattctgggccatacttgatgtacattgtatattggttaaatgttggacatgctgaatgagatgttgtttctcaaaggctacttacgtttaaaaaaaatctaagaagagaaagaagagcattgcagttgactgaataacatcttaaatgacaaaagaatgatgagactcctcggtctac

SEQ ID NO: 171361 - DNA, 467 bp, Glycine max
ctgcagcttgcttcacaatctccgcgcttttgatgtttatctacttctgaaatcaagaaacacacacacacacacactttttcctagtcgatcactcacataaattctccccctttgtttttgaatttatgcttttcttaaaattaagttgattactcatgtgagttcttgatttaatccctatttctctccccctgtggcttcaacaaaagccaaagttcgtatcaaatttaaagtattcaaatataactaaacatccataaatgactattcatataagagaatagaaaacaattaaacaagataacttaaccattcatcaatcttagaaagataatacttcatagaatgtcatataatccagaaagtcattcataatattcaaataaaacatatatgaataattaaaaaatataaaacacaatatcaaatggtagtacatacgactagtcatatattattaaagt

SEQ ID NO: 171362 - DNA, 321 bp, Glycine max
  unsure (1)..(321): unsure at all n locations
gattcattctatgtacccatggtggtccacattgagtctctttgtttnttattctcatttcatttactgtctataccccttttgacgtgcttacaccattttacttaagtcatttgtcgcttaacttacaaataaaatatatttccactgaacgtttaaatcgtattatccgttaatttcggataaaataaattccgaccgttcggtcgtgtcgcaatcacgttggtaatcaaaaagaggcacaaaataatataataatctataatatatctgttagcaaaataaagcggacaagcaaatcagacatttcctctttgggat

SEQ ID NO: 171363 - DNA, 377 bp, Glycine max
  unsure (1)..(377): unsure at all n locations
agtcacctgcggcatgcaagcttatgagaatcanaatggatgcaaaatatttttttaggattaaaagtaaaaattcatatagaatgagagatttaaaaattaattaatccatcaatttattactttatatatgtgactttggacttttctattagatatcaatatttatttattatacttgcaaaaagaagttgttaacatacatatttacatatttaggaagaaactcaatgatgcaatcctacccccctccccaaggacattggatagaagactccaaaatgattgaatcaatgatgcaagataaggacctaggattctcatgagccctatggtagattactggctcatgggctaaatatgaacccattgatgat

SEQ ID NO: 171364 - DNA, 403 bp, Glycine max
  unsure (1)..(403): unsure at all n locations
agcttgctaatgttggcccgcaaagcatcattaaccggctggactatgtttttaatctagttaagaaattaatgcaatagtaacataatttaacgacaaaaattgcgttttcgtcactaataccggcttaacaaaaatttcagtgacaaattttaaaaaaatatatgtaaattgtttagccattaaagttaatatttttcttataacttcaatgatccagaattggttgaaggagattgtaaatccagttattttttcactttgtcttttttgggtacgaaaactataataatgctgctcatatgggagttgctacgtgcacccagcattattgctggggcacccagcanacagtgaagtgacaaaattgcccttcaataattcttcttccggaagaagtatt

SEQ ID NO: 171365 - DNA, 459 bp, Glycine max
  unsure (1)..(459): unsure at all n locations
agcttccactccagttcccattcgaatgcctatcaagtgtgattntcaaacgctaaaaaccagaatacacaatacccttaagctaaccaacaagcaatttttggatgaaatttactaccggcagcctttcacatatgcaggtaatgaatttcagtttcaatgtatgcaactgaaagatgatactaatgttaacacaatgttaatgtgtaatcatgaattttcgtttgttggtctgattgagttattatgtagcattgctagaaccccagatggtattttaaacttacttcaagtcactatgacccctactcatgatgccctgctatattacaatgggaggtggaacatgtcatgccaaaatgagtttgttggttactcgttcataggaaaaaatcccaaaaagtttgacattcccactggatgtacaatggatgaactgaaggatttgatcaagcaagt

SEQ ID NO: 171366 - DNA, 378 bp, Glycine max
  unsure (1)..(378): unsure at all n locations
tcaggttgctcattgactccagattgttgcanagaatgtcttatatctgtaaggtgatctatagaagaacatagaccacagactcttgcaacaggtgcaaatttctgattcatggcaagctgagttactaggttgaccaaggcatcaagttttccctcaagctttttattttcagtagatgcagatgaatctgtggccacctcatggactcctctaaggacaatagcatcatttcttgcactgaattgttgggagttggaagccatcttctcaatcaaattcctagcctcagcaggggtcatatcaccaagagctccaccactggcagcatcaatcatactcctctccatgttgctaagtccctcatagaaatattga

SEQ ID NO: 171367 - DNA, 385 bp, Glycine max
  unsure (1)..(385): unsure at all n locations
gtcctttgatttccttttcctccatttntatatgactaagaattatgcaatttactcttttgacttaccttctttgtgcgtgttcaattgtttgggataaaacaccggatagatctccatcaatgcgacacaagcaaatcacacaactgaattgaaatctaatttaaccctaaacctcacacatacttgcactcactataataatctcccccttaatgtgagtagaactagagctaagtctattccttaattctctattaatgagccacaaacaaactattcaagtgaacttgacattacacttaactcanaacattaaggtattattaggtttatgggtccttatttcgcttaacttgttcatttttattcaatgtgtgattca

SEQ ID NO: 171368 - DNA, 402 bp, Glycine max
  unsure (1)..(402): unsure at all n locations
tcttcatggngtntcttgaatgattgtgtaagtgaagaatcattntatttctcattgaaacaaatccatgtgacaacgagaatttctcaaaaaataagatttatatcttcaataagaaattgtttttttatcaataaaaaataatatttatcaaatatataacaataacataattaaattataattaagtgaaactaaaataaatataaaagtgcaaatttcttaccattgaagtaaaattattcataatttttttagaatgatatgatactatggaaatcataaaaataacttaaagaaactcacttaatgatctttattagagatgctcttatcatcttttatatatttacacttaaaaagaaatccatcggttatgtttgggagcttggttagtatatc

SEQ ID NO: 171369 - DNA, 442 bp, Glycine max
agcttgtgttgcaaaagtaggtggtatttattttatgatgggtttgaccttagatgtcattactaggtggaattctacttttatgatgcttgaaagtgcccttgtatattgatgtgctttttgtagtcttgaatttgatgataggagctattcaagttgtcttattaatgaagaatgggagagaggacaaaaaatgtgtgaatttttgcgtccttttttttcaaatcacagagttgatatctggttcctcttacccaacgtctaatttgtaattcatgcaagtgtggaaaattgaatgtttattgcttcacaatttgagtaataaggatgagttgattagaacaatggaaatcgatatgaaaacaaagtttgataaatattagagtgatatagcaatgtgctttcctctgggtgcattctaggccacgctttaaaataaatt

SEQ ID NO: 171370 - DNA, 418 bp, Glycine max
gataagaacaaaatcgccttaatcagtgccaaagatgcatgttatttacgaagcatcaacaagaatcaagccaaggctatggggcaaaacacaccacatgattatgatgatgaatggctcaaattctcacaaaggtaaactcatcactttcaaattgagcttccaaaactatcatgacatgtagaggagaatcaaagatttcaagtcacaaaatgtcaaaaacttttattttcaaaacaaatacccatttcttgaacatatcctataattcaaagaataacatgccaagtcgtacatgcacacagaattgacccacaatattaaactagaaatccgatgagactaacaacattaacaaattaacacaactaacaaattaacaaaaccaaccaaactagcataaccaaagaacacttcc

SEQ ID NO: 171371 - DNA, 450 bp, Glycine max
  unsure (1)..(450): unsure at all n locations
agctngaaatntaattgacattntatccattttgatgttaganaacagaagaaaaaaatatcaaactaaaattaacataaatctcaacatataataaacaaattattattattaaattatataaaacaaaatgcaaatatataggcgctgtggtactgaatttccgttggtatatatgaacggtacttcaaacatgtactaattctgcacacgaatataagcttttaagacaaaaatgaattaatgtgattaaaaatgactgtcgccagtagagaccaatgactgcactagaaatgttgaatccaaaaatgatgatggcatgagtgcttggtgttgggtgggaattacattgacgattgacgaatgtattgttgagtgaagtcaatgttgatctttacatcatgcgagctatttgcctatttccttgtactntctcgcatatgtattata

SEQ ID NO: 171372 - DNA, 443 bp, Glycine max
  unsure (1)..(443): unsure at all n locations
ntagaacaattaatctcaacaataattgctctacaacccgtatcacatgttatattcataccaaatagaatgacccaaagtttagcttccagaatagtacaatgcccaagtcttcttgaaaatgttttcagaaatcacctttatcatttcagagcacagaatcacatgcggcaagagctttcacaaataattttcatagtaccatgcagaggcttcttccacattccataagcattgtggttgtcattgtcatcatttggtgtcaatatcatatggctgagcttgcttctacttatatcacgtacaccactccaaacactcagcaccatacctagagtgtttgtccacttattactgaagatgaattcatttcttctcgaccaaatacgatcaacaatagttccaaatatagtgctccacttcacctttccctttgttctcat

SEQ ID NO: 171373 - DNA, 451 bp, Glycine max
  unsure (1)..(451): unsure at all n locations
ggctgcagcttcttggaaacgtgacatttgtcacttacacaatgtccggnacaccacaacaaaatggtgtatcagaaaggcgcaatagaactttaatgaatatgattaggagtatgttaatcaatttgactttacccgtatctttgtggatgtactccttgaaaactgctatgtatttgttgaatagggttcctagtaaggcagttccaagtacacctttgaactgcggacaaataggacacctggtataaggcacctgcatgtttggggttgccagacagaaataaggatttataatccacaagaaagaaaattggatgctagaacaatcagtggatatttcattggttatccagaaaagtcaaaggggtatatgntttattggtttaatcatagtatgagaattgcaaaactggaagtgcaaggtcattgaaatgataaatagtgggag

SEQ ID NO: 171374 - DNA, 377 bp, Glycine max
tgcaaaacgtactcaaatagaagttgactattccatcacagatgtgtctaaatgccacagcagcagcagctgcacattctacagatgtacccatgccattcattacgatatctaaaactgagggcagtacatacagtccacaatatgcacaatctatccaatttgaataagctccaatagtaaaacacactgaatatacagcaacaagacataacaagcattgtattagtcaggtaccatataaattgaagtataaaatctacaatttgcgttaaatataaatatacaagatggccagccgcgactaaagaatgtgattgcgaagagaataacattatttatttatttatgttaaataaggcagtataaacattacc

SEQ ID NO: 171375 - DNA, 475 bp, Glycine max
  unsure (1)..(475): unsure at all n locations
ggatccttaagcaccgcggctgcagctataaatacttgaatctatttcttatatacttaanaatgattccttagcacaagcactacgtaattntttatcatactgctaattctatttgaagcatttctttctatgtgagacgatgccgcaagcagagctggaaatgaggtaagactttctagagatagccttcctaactaaatcttttgatgggatcttctttagctgaacctgagttcgattaaagttggcctgcacctaagaataaccatttttgacctctcccattgttcgagctacttcgtaacctctccttcaaggatagaagctagaagcagatagcagccatatggataggtattcaatcgcttgctttaaaaggtatgagattgcttgtagaagactaaggtcgacaaatatggaaaggctagcaaatgcaatgagaaagtcttcttcttttcttgcttgaagcact

SEQ ID NO: 171376 - DNA, 359 bp, Glycine max
  unsure (1)..(359): unsure at all n locations
ctttcgattcattctatgtacccgtagagggccacattgttgttttgngcattnttatcttcggttcatttacttcttataccctcttttgacgtgcttaagccattttatttaagtcatttctcgcttaacctaaaaataaaataaatttccaccgatcgattgaattgtatcatccgctaatttcgtttaaaatgaattccgaccgctcggtcgtgccgtaaccacgttggaaataaaaaaaagaggtaaaaaataatataataatcaaaaaacatctttttagtaaaataaagcggaaaatcaatcggacgttttctcttcgggaattctcattcttaaccgaattgactaataac

SEQ ID NO: 171377 - DNA, 353 bp, Glycine max
gtctcggcctgaatttaaggcgggctgcagcaccggctccgcttacctaactgtactggaggcggttgtcgtggctttatcctctatagttttctggagttttaacatgacctccgagatggaagccatttgatcttttaaggccgatagatcggccttcatctgttcttgcacgccctcttcattatccattcttctggagcgagtgttataggggtgccttgtggttttcttagttatgacgaaattcctaaacatataaacaaaggtgagtatgccaccaaagcatgaatatgcaaatgaatgatcggagcacttggatgcacccaaaggttttttaggtcacgtgatga

SEQ ID NO: 171378 - DNA, 349 bp, Glycine max
  unsure (1)..(349): unsure at all n locations
tctggtgggacatcttgacttgctttccaatgagacactcattacatagtttgtcttcntctattggcagatcgggaatgcctctaacagcacctttgtcaatgattctcttcatgcctcttaagtgcagatgtccaaatctttgatgccatattttgacttcatcttctttggagaatagacatgtggaggagtaactggtctcttgaggcgtccataggtaacagttgtactgtgatctgctacccttcattaggacttcactcttctcatttggcaccaagcattctgactttgtgagagttacattgaatccttcatacacaactgactgatgctgatcaagttc

SEQ ID NO: 171379 - DNA, 411 bp, Glycine max
  unsure (1)..(411): unsure at all n locations
ttttgacatcgcctattatgaacatggcctattatgtttcacattcacttggcagctcttactcttggacctctattctaaatgccttagatgccattaaatcgggttttcgggtgtgtattggtaagggagatgcatctttattatatgataatttcttggaggaagggccaatttgtgggatggtggatttggttcacattgtagatgtcatcaattatgtccttgtgtattgttcaagacccacaaaaataaatgtgacatcctacacaacactcagagacacgtgttaaccctccacgtcagccttgttacagaagtgcagacgctcnacccttagcaaccaggcttcccaactaataggttatctctaacctattaatattcaaagagtatttaatatcttcatct

SEQ ID NO: 171380 - DNA, 265 bp, Glycine max
atacattcacttaccttgtgaacaggcagtccatgatgaagacaatgaggtgatggacgatgtacgttcaaagcctcatgttatcgagatcatggtcacctgttggatggatacaaatacatgctttcccgaggcgagaaatgcaacctatactcaattggtgtccatgtctgtctatgtcggatctctaagatcttggaaaccacacatatcaggttatacagattgtaggttgatatggatatctctcagcaccgacgagttt

SEQ ID NO: 171381 - DNA, 392 bp, Glycine max
  unsure (1)..(392): unsure at all n locations
acaggatatatatatagcgaaatatcaatactactttttagaaatattttcatttaaaaagtactatctcattcttaaaggactacatataaagtaagataattcaaatttgagtcatcagccaatagtaattcacgtaagttataaagggtaagggactatgatgttcaaatcctgtgatatccattattattctcaaaattcacctgatcgtaactatgattaaacagataaataaataagggacgtaagaagcaagattngcacaagaattttccagtttcttctgactatgtttattttcttaacaagacaccactatagaaatctaagacttatcaagatcccattctctgacagctccaaaccattttcaaattgtatgacataca

SEQ ID NO: 171382 - DNA, 231 bp, Glycine max
gaacgtcataccattcacactgacacttggtttcctaaatttgcgcgcgtaacccctacgactataagacagttatggcctaacctaattaagagagggaaattcacaccgcagcgagtgaataggattgttccgtacattatgaaaaaattgacgtcgatcgttcagtcatgccctattctgcgcgggagatgaatatgcacgacattcactatatagtactcccaatac

SEQ ID NO: 171383 - DNA, 453 bp, Glycine max
gcaagctgcctgtccgatgcagcagtaatgatggttttagttatgttggggaacggttacgaacccagaatgggcttaggcaaagacaacggcggcataactagcctgataaatgccaaaggaaatcgtgggaaatatggtttaggctataaacccactcaggcggatataaagagaagcatcgcaggaagaaagagcggtggtcaaagctcgcggttgagacaagaaagtgaaggaagcccgccctgccacataagtagaagctttataagcgcgggtctgggagacgaaggtcaagtggtcacgatatacgaagatgatgttccgagtacattggatttggtatgaccatgccctcctgatttccagctgggaaattggcgagtggaggaacgccccggcatttacgcaacgagcataatgtaaacctttacgaatttaaaagctctatag

SEQ ID NO: 171384 - DNA, 397 bp, Glycine max
ctaagcttaatggagaatgaagaagaagaaagctacgtgagagagggatatataatgcttctgaatgtctgctttggctgagtgaggagagagaaaagctttttggttttaaaaaaaaataaaaagggttttccctttcttttccattattttattcaagctctgccacatgtccctatatgattggagcaaaagggcccactttctctttttgactgtgacccatactcagtcacaaaagtgagaaaaatctgacctttgaaacgctaaagtcctgcctcggtttgcgtgtcgattctctgattccagattctcgcgtttctctgcgtccgccggggccagttttcgaaagcaagcaatatatatatcaaaacgctcagaatgataccccgagcgt

SEQ ID NO: 171385 - DNA, 373 bp, Glycine max
agcttcatcagatgttgcatttcaagatcgcttcctcttatggaagaacggaatgcacttcttgcattgtatatctatttaatggttgtacaactattggcattgtgttcctttagagttagcataatgtttcttggcttcactatggacttcgtcatatcagcaataagtgttttttcagctttagtcaatcgccccgcatatggatgtccaactaatgacttggccaattcatgattatgcactccacaaatcaacttcaccatccagtcttctcctccaaccactggcttgcaacgaagcttgaagggacacccacatttcctagtcccaatgtctcttctgataaattcttttttcctacacttatact

SEQ ID NO: 171386 - DNA, 401 bp, Glycine max
  unsure (1)..(401): unsure at all n locations
gacctataaaactcagctntgaaatcaacttgccatgggatcgattcttgaaactgttaatcaattacaaagagtaaaaactctggtaacttggaaaattttgagaaaaactcttttgaaaaacaaaactgtgctacgtttgttttttgaaaaatcttttcaatacttcccttgtgaagtcttcttgatttcttctctttaatcttgaattcatcttctcttgaatcttgaaatcgaacttctcttgattcttgaatcttcttgatttcttctcatgaaacttgaaattaatcttgatcttgaacttgttgactcaatcttgaaatcattctttgggatttttgtcatcatcaaaactacttgaatcaacttgattcatcatcatgaaactcgcttctaca

SEQ ID NO: 171387 - DNA, 504 bp, Glycine max
  unsure (1)..(504): unsure at all n locations
atcttaagtcacctgcggcatgcaagcttgtcaaatacaacctgaaggaaagttgttatattagcaccaccaactaatgtttctgccatgctaagaaaaggagtggaatggatgaatggaaatgactaataatttcaagtgcagcagcttatgccattcactccttcctgataaatcaacttttatatatntttttaatattttgcntttatttattattagacctttgaaaaagattcctaaatgaaacaaatttatgaagaaacaaatataaaattcataaatttatcgatggctaaaaaaataatcaaagacaaaaaataaaattattattgtattagaaactaaactgtaaatatatttttatggaaaaacaaacccaaaatttgagtatatattaaaaataaaaacatatattaccttcttaattaatataagttaaataagagtataactcctatgcaatgatatttatatttactttagtttaaaaaaaagtctcac

SEQ ID NO: 171388 - DNA, 438 bp, Glycine max
  unsure (1)..(438): unsure at all n locations
ntaggtgttatcaaactttttcatatttgcaaagaaagcttcttaagactaggtgctttcactttcattttttcaaagaaagcaccaaaagactggcgcattcagttatttttaatttttgcaaagaaagaaccaaaatatatgaagagacactcctattgtttaggcacccccttcatcagtatttcaaataaaaaaatgaacatttttaataatgtttacaatataaatgatgccacacattttttatttatttaaatgcttaataattattaatgataatatgaaaataatataatgaaaatatgaaattattaatattaataataaataaacctttgaaaaaatgtgtttatgaataaatcataagaaaattaaattattttataaatattatatattatattatattacaccccaacacccctaattaaatct

SEQ ID NO: 171389 - DNA, 431 bp, Glycine max
  unsure (1)..(431): unsure at all n locations
agctngtactagtcatatatatgtgacatttctttgatagcaaaaattgaatcgattattgcagatacagaaatacttaaacaaacctgccaattaggagttttgtggctttttgcaaattccgcccatgtttctggatcaaggccatacatgactgtaggatcagatatttgctgaccttcattgtcagcaaagacaaattttgaagtcaatgaagacttaaattgcctccatcttgctgcaactgttgacatcacctttttttttgcattttcaccttcagggatatcaaatttgcactgcacaacaaaaggagttatgtaacagtatgtaaatgaatcctttaaaagtaacttaacaacaaaatcatgaatacaagtgtatttagaattacttaccaaaatatctttccatattaagctctttagatc

SEQ ID NO: 171390 - DNA, 431 bp, Glycine max
tctcgtcatcttgggtcatggtcatattgagacatgtgtgtggtccatcccattgagtgactttctaagaatcgatttttttagataaaattgccctcatatagaaagggcacagacaatctgcatttttattcaagcaacaaacgacatacttgtcccatttgctttcaaccactttgaaactttgatgcaccttcataacatattgtttgactgcattcttaactgcatctttactatcaaaatccatgccaacatataattcttggccaacattaaaactggatggcatctccaaaccacaaatgtcctcttcatcaagatgactccagttgatattattataatgcaaagcatcattccaaaatggattttgaattccttgtacacctaatagttcacataaaataattgaaattaaatataattat

SEQ ID NO: 171391 - DNA, 437 bp, Glycine max
  unsure (1)..(437): unsure at all n locations
agcttagcaccctggccccattcactctttttatcataacattgaatttcaggcgttgctgctgatcaatccaaagcaagctgaattggccaatcaggaaagatacaattcgatccccaggagacagtgtgtttgtgagagcactctcccaagcaccagtacctgaaccaaatacaaaatcattactttnttcttgaaggacagaatcattacttgataataagaaaactagtaaccgatttgttcttattaaacctccttattctctattattgtaacctccaaagcatacacatatacatacgaacaagaaagatataaaagaacatttaatactaccactattgtagaatattatgtataaagtcagcagtcaagtttcgattaataaatcatttttaaacttcaaatcatggccctataaatgtatataatct

SEQ ID NO: 171392 - DNA, 386 bp, Glycine max
  unsure (1)..(386): unsure at all n locations
gtanggcatggttcactctatggatgtgttgagcctgagtctattctcctgcgcaaggacagacatcaataatggcaacattacattgtaacatgggttaaggaatcacaatgacaaggggtcttatgaccttacatgaatcagatagtgaaattaatgctgtacagtggaaaaaaattgtgatataagtagctaaggatagttgctcatcttcagggcacgttgacaactaggcgtttagaggccacaggacaatattattgtttggctttgttctttgcattataagcctgatgttcacatcaaggttgcagttaacatgccatatttcaaattattactcaattgatgtataccaattgtagctcgtcaacacaatcattatt

SEQ ID NO: 171393 - DNA, 435 bp, Glycine max
  unsure (1)..(435): unsure at all n locations
agcttagttatgagaggggtgtgtttagctattctctatcttctcaaggaagttttctcaaagaagcttctcaaggaagttttctcaagaaagcttctccaggaagctacctagtctataaatagaagcatgtgtaacacttgttgtaactttgatgaatgagagtcttgagagacacaactcaaagttcaactcctctccctttntcttccttcaatttcgtgctcccccctctctctttctccccctctatcttttcctccattgaagcatcctctccaaggctcatcttggtggtggagctccttcttccatggcttattccctagtggatggtgcctcctctctcctcttctcctttgtcttctgctgcatctccatgggggaaaatcaccattaaaggacctcattgatgctcaaagatctaacctccat

SEQ ID NO: 171394 - DNA, 452 bp, Glycine max
  unsure (1)..(452): unsure at all n locations
ggaccttgaatctcagcttgttagttccncaatttatggtcatgttgaagtaaatntgtgtaatttatcttgntntatggttaacgctgtctctagaacatttccatcaaatttaatgatgaaatttgtgcatttttaggtgaaaaagaggctaagttttgaattgcaaaaagcagcagttgggctaagtgcatatccactgctaagcgttgcttcaacgcgcttagtgctaaggagaatctggcagagcatcaacatcaatgccgcgtgctaagcacgagatcaatgcgctaagcgcaatatgtgccttcagccaaactaagctcgagattggtgctaaacccaatttcacttactcgcactaagtgcagtgtcgcaatttcacagcctatttaaagcctgtcttgcgtataattaaggtagagctttcaccacctttatgaaacttttat

SEQ ID NO: 171395 - DNA, 349 bp, Glycine max
  unsure (1)..(349): unsure at all n locations
tctacatcanagncaaacgcggccaaataaataataaagtcatctcgactcacagaaagtcatataagtctcatacaattaatatagaacctatatcctaatgtcacatcctatcagagcgtggtgttcccgtgtcctctagcatgaggttcttcatagccatccacctattcatttgctcccccgaacacaagttcaagatcatcacaggatccaaacacaacagcacacaaggagtgagtcatcacattcctagctaatagagaaacgagacacataaatatatatatacctatacatatatatatagacatatatatatatatgtatcctctatatatatacatat

SEQ ID NO: 171396 - DNA, 381 bp, Glycine max
  unsure (1)..(381): unsure at all n locations
aactgatctngngctacaacaattgcaacaagattcactatccacaatgagagaacaagttntatctaaaattttgtatcttgtatgaaagatgttctctctttgggattgggatagatcacaagattgacctccaaggagccctctaaccattaggaggttaccttcttcatggaggtagacttcctcactagactcttcaccccttacttcatcttcacttccactagaggaaaaggaagaagtagtctcctcttgactactataaatgtcttcacccctcataatcatggttttctttgtggggaatttgaggcattgtgacctctcccaagacacttgaagcatttaatgttgctagtcctttcttgggaactagtc

SEQ ID NO: 171397 - DNA, 375 bp, Glycine max
  unsure (1)..(375): unsure at all n locations
tccctcgatcaagcctctcgccaaccaggnttcgttcatcatttcaattctcttagccgaaaacctaattggatgcggatttcgctccgtgatgaaaaaccttagttcatgtttgggatgggttggttattcggaaacgtttgtttagaaacataagcgattgtttattcaaaattaggtgaactgaattgacgctcgttggtttgttaggtgtgctctgattgctgtttgtgtggtgtgatgtggagtgagtgttttgcagttgaagacttgagggggagtggttattggttttggaaatttagtttgttcgacaatgctgctgntttttgtttttaatgtgttactgaaaggatgaaaggaagagtgattttt

SEQ ID NO: 171398 - DNA, 479 bp, Glycine max
  unsure (1)..(479): unsure at all n locations
gaattaccccacctgagctgcaactcgaggagaccaaatccatatattatgagtgaggnancngcaatatcagaacacataatcattaagttctcaccaaaaccatcccaagaataataacttaagacaagtgcaaaagaaatttcacttttgttactttgtatacacagtataattgcaacatatgatttccaacatatattcacaaagcctagaaactccaaatccgatgtgtacagcccacaaaatttcagaatgacaacaaaccaaacttgaatttctagaaagcacatacaaataccatatggctcccagaatagatcaatgaccacatttcaattctctatgcatgttaggatgataatgtacaaaggctgtttaatcttttccttccatttagttatttacattagcatacaggaaataaagtattgaagatacaaagagaaatacccatgtcgaaacaggaaatcaatgat

SEQ ID NO: 171399 - DNA, 397 bp, Glycine max
  unsure (1)..(397): unsure at all n locations
ntccaaacattggtnttcttaaagaaaaaaaaatcagtgaatttatgaaagnagcttaattcacttttgaaaaccacaccatgcttagattaaaattaggaaagtctaaaattaaaagtgttcttttactctggaaacaacttctgcaaaagcatttttcaaacactgatccaaacagtctctggatacaataaaatcgaatacaaaaatgtattatttttaagtgcaattataggttcacacatattacccttaaatgatcctggtgtggcaatttacatataaattatttgttgcaggcatcaattattcttctactgagacataaataatgtaagccaacaactggaagcatgcatgggaccatgactaacagaacatatgcttttatttaaaa

SEQ ID NO: 171400 - DNA, 393 bp, Glycine max
  unsure (1)..(393): unsure at all n locations
ctcatactacttcacatccggacanacaacgaaaagaatcaaaagacagaggcatcgatataatattaagatgatataatatagaaacatattaattccttattttaggatgatggctaaaaattaaaacatattagaatgagtcaaattatagtatctgcgatcttttaagactttttttcgagtggaacaataaaatatcttttaattttttttaactaatatcctaacaaaatcctatcatataatatgaagagaaacacaatagaatatatcaatatatagagagagtgtatgtattgcgtgggtattaanaaacacgaccttttgatctttctatgctatatttatgaaattaattaaaagaatatattaaaatctttatgctttatc

SEQ ID NO: 171401 - DNA, 432 bp, Glycine max
  unsure (1)..(432): unsure at all n locations
ctttgcaataatcttcagaaacaagtcactataagaaatgngactctcggaaatttattttttgaaatcaatcactggtaatcaattaccattaaggtgtaatcgattacacatcaacagatgtgactcttcattttaaattttgaaaatcaaaacgtttaaaagttctggtaatcgattaccagtattgcgtaatcgattacacaagttttaaatgatttgagaatgtttaaacacaagttgtaactcttgaaatttgaaatcttaacattntaaaacactggtaatcgattactaccttcttggaatcgataccaaaaagtaaagctctttggtaatgattttgtgaaaacttcgtgtgctactcaatgtttttgacaaacttttttagtacttatcttgattaaagcttctctttgatcttgaatcttg

SEQ ID NO: 171402 - DNA, 282 bp, Glycine max
gccacgataaacaggcctacgcttgtgctctaccaccgtgattgatggaagggccgtataccatataagaatgtatgaattaacctctcacctatgtcccctagcttcgtagcaataattctttctcattcatttgtagtgacatgctatattgttctacagactgagagagagataactcattagctatcttcccctacctatgatgctttcacacataatagcctataacttgataataccgtgatagagtacttgaataatggccctacgcttctacat

SEQ ID NO: 171403 - DNA, 368 bp, Glycine max
tggaccattgttcatccttcccgcgatgctacttttcatgtctgcctgagtgtgcttatagcctataccgtacttcccacgataaccttgcgcatttatcaaactagttatgccgccgttgtttttttctaaaccaatccgcggctcataaccggaccccaacataactccggccattattaccgctgcatctgacagactatgctgcccaaagagggaatccactgaggaaatgctgaccacctcaaaacactggaaagcaggttgtaacgattctcttgcggcttccacataaggcatggacgatgggcagcttaccaatatatcttcctcgcctgacaccatgaccaagtgccccactactacga

SEQ ID NO: 171404 - DNA, 439 bp, Glycine max
  unsure (1)..(439): unsure at all n locations
agcttctgagatcatgcagacaacattatgaagcacgagctgtctatccttgcaaatcaaagcataggcagtaaactctgctcaacacatgtaccnatatcacagctgttctcatttaaaagacccagtaacaattccttcgatacgattctgtaaccgttggatcgactccaaaatcttactggacgtctatagtgcataagcctacattgtgatcgatggtatctactagcacacattcagaactcattgtgtactactctatccacaaccaaccacacacaagcatttttgtgcacacagtctggatcctgctgcacctattccgacagccaaattctgcttaagtgcagatgtcgaaaatcacacttcctctcatccaatcttgctcaaatgaaatcctacaggtgccanatcatgtatcatacatgtctaaacc

SEQ ID NO: 171405 - DNA, 413 bp, Glycine max
gcttctattctaaatttcaagcgtctcgatatattatggttttcaatcgaacatccgaggaaaaagttattatcattggaattttctacgagcatccgttttcaattacgagcgtcttgatatactacgggacataatcggatatctgagtaaaaagttattgtcatttcaattttctaagagcttctattttcaattttgagtgtctcgatatattacgggaatcaatcggcatctgagttaaaagttattgtcatttgaatttgctacgagcatatgttctcagttacgagcgtctcgatataccacgggacacaatcgaacatccgagtaaaaagttattgccgttgaatttgcacagagcttctggttttcagttcgagcgtctcgatatattacacgactcaatcgga

SEQ ID NO: 171406 - DNA, 476 bp, Glycine max
  unsure (1)..(476): unsure at all n locations
cgacaataacgtttcacttcgttgtctgtctgagtcccgtaatatatcgagacgctcgaaattgattatcgaagctctgagcaaattcaaacgacaataattttttactcggatttctgatttagtcctgtaatatatcgagtttctcgaaatcgaataccgaagctctgagcaaattcaaacgacaataactttttactcggatgtctgattgagtcccgtaatatatcgagttgctcgaaatggaattccgaagctctgagcaaattcaaacgacaataattttttactcggatgtctgattgagtcccgtaatatatcgagttgctcaaaatggaattccgaagctctgagcaaattcaaacgacaataattttttactcggatgtctgattgagtcccgtaatatatcgagttgctcaaaatggaattctgaagctctgagcanattcaaacgacaataacgtttcactccg

SEQ ID NO: 171407 - DNA, 380 bp, Glycine max
  unsure (1)..(380): unsure at all n locations
tgaaanngcttatggaaaactgctagggatgaagggtagagttagcctacggttagaaagtgagaatgtagtgttatgagtagaaaaagagtgaggctctgagagttggaaggctaaaacgggattcagtggtaaatggaggttaaagtgagtaaatcctagtttgaaatgtcatttaggacttatgagaaagcttggactgtgcaagagagaaaaacaaatgaccaaagtgaaggaaagagtcattcctagggtaaaattgggtgttgaggagtcaaattttgattcggtggaatttgaggcgtaaaatcagtttgagcaagtttagatcgatgttataaacttgtgtgaggtgagagtttaccctaaatttaccccat

SEQ ID NO: 171408 - DNA, 468 bp, Glycine max
  unsure (1)..(468): unsure at all n locations
tcatttccaaatatgcatgtgaattangaagcatcaacaagaatcaacttttgctattgtgcaagcaatcaatggggcaaaacacaccaaaagattatgatgatggatgactcgaattctcacaaaggtaaacttatcactttcaaattgagctttcaaaactatcatgacatgtaaaggaaaaacaaggatttcaaatcacaaaatgtcaagagacttttattttcagaacaattacccattacttgaacatatcctataattcaaagacaaacatgcaaatttaacacaaaaaactaacaaaattaaactagaacccaacaaaactaacaaaattaaactaatttaacacaactaacaaaaccaaaaccaaagaacacactcccccctcctaatacttaaacaacacattgtcctcaacgtggcacaattaanagattaaaagcaattaaaccatcaaatagaatc

SEQ ID NO: 171409 - DNA, 238 bp, Glycine max
caaaaatacttaaacactttattgtaatttggattcacatggatggcccggatcctatacatgcctttggaatttgagattgagacaaacttgcttaacaggtaacctcatctatctatcattagaatttgatatagagactgaaaaagcaataaactcacatgtcagtcaagtcaatccatgtggataaagaggctggaatactttcagtgaatattacatgaaatgacatggcaag

SEQ ID NO: 171410 - DNA, 477 bp, Glycine max
  unsure (1)..(477): unsure at all n locations
gacactaagctttactttgtggagggcgggctttcttactttcttgcttcaacgcgagctctgaccactgttcttccttcccgcgatgcttcttttcatgtccgcctgagtgggcttatagcctaaaccatacttcccacgatttccttgggtttttatcaggctagttatgccgccattgtctttgcctaaacccatcccgggttcataaccgttccccaacataactcgggccatcattaccgccgcatcggacagacaaggttgcccaaagagggagtccaccgaggaaatgctgaccacctcataagactggaaagcggtttctaatgattcttctgcggcttccacataaggcatggaggatgggcagcttaccaagatatcttcctcgcctgacacgatgaccaagtgcccctccactacgnaatttcagctttggtggagtgtagaaggcacaactcccactgagtggat

SEQ ID NO: 171411 - DNA, 302 bp, Glycine max
gagtcaatcagacatccgaattgaaagttattgtcatttgactgctcatagagcttccgttttcaattatgagtgtctcgatatcctacgagactcaatcggacatccgtgtcaaaagttattgtcgtttgaatttgctaagagcttcagttttcaattacgagcgtctcgatatattaccagactttatcggacatccgagccaaagttattgtcgtttgacttttcttagagcttccgttttcaattgcgaacgcctcgatatattacagggctcaatcggacatcccgagttaaagtta

SEQ ID NO: 171412 - DNA, 433 bp, Glycine max
  unsure (1)..(433): unsure at all n locations
tgccgcccagctcgcccaggcgagctcagctcgcccaggcgagcanggttgcttcctccagaagcaacagccttctggaggaatctnttggagggcccaagtgggcctggttgctatttacacccccctttttactaaatgcacccccttttctatttttttgtaattctttttccgtaaccttacgaaactttacgaattttgtaacgatacttattttttcttccacaaggttacgaatccttacggattatgtatttactcttttttagctttcgaagaagttacggaaactcacggattgcgcaaaaacacctctttntgatttccgccacattacggaatttcacgaatcacgcaagcctgcttcctttcgatttctgagacgtnctcggacttcattcattgcatgtcatcaagtaataatccccgg

SEQ ID NO: 171413 - DNA, 393 bp, Glycine max
  unsure (1)..(393): unsure at all n locations
gttggnncaagggaaaaagggatgccccacattatttccatgacacaaatgcaaaaatgatgatttggaaactttaagcaaaactggtcatgcatgcacctatgtggacactcaagtgtcaactttttatggtcatgtgaagctaaatgtcgcaggattcatttcctctattttagtcaacccaacgtttccaaaatatgttcttttatccatttgtgcattcatccaagtccatttcgggcgtccgagaaaantttcacagcattcacccttcaggtgtatacacatnttttttaaaaatcggttatgatcaatgaatttttcaaagaaaaagtggaagtcatctcttttcaaaagcatgttggtttttcagctagacaacttatttttctt

SEQ ID NO: 171414 - DNA, 437 bp, Glycine max
  unsure (1)..(437): unsure at all n locations
tgagcanattcaaacgacaataacttttgactcgaatgtctgattgtgtcccgtaggatatcgagacacttgtaatttaaaacggaagctctgagaanaatcaaacgacaataacttttaactcggatgtccgattgcgccctttaatatatcgagacgctcgaaattgaaaacggaagctctcagaaaagtcaaacgacaataacttttaactcggatgtccgattgagtcccgtaatatatcgagaggctcgtaatttgttacagaagctctgagcacattcaaacgacaataacttttgactcggatatccaattgggtcccagaggatatctagacgctcgtaattgaaaatggaagctctgacaaatatcaaacgacattaatttttaactcggatgtccgattgagtcccataatatatcgagacgctcat

SEQ ID NO: 171415 - DNA, 341 bp, Glycine max
  unsure (1)..(341): unsure at all n locations
atggatcattagatgatgtcagtgacatgcgaaccttctgtaacaaatgcccggcatagatgggctagagcaggatgatgttgtacattgtactccaaatgatcatcatgaaagcttatgggagaaagatcatacataactgtttatgtttatactggtaatgtatatgacctatttcataattggaatacctttatgaccttgaactttttcaacttaatggagatgtcattatgttgtttcaccgccatctctgctcacacaactcgacatggnaaatngatgttgttatacatttatgatcataatgacatttatgcttatattactgacatgtcatg

SEQ ID NO: 171416 - DNA, 463 bp, Glycine max
  unsure (1)..(463): unsure at all n locations
atgcaagcttagctacacatacctctctttagctattctacctncttaagaagagaagctagagcttagctacacaccccctataatagctaagctcacccccatgacaaaaaacatgaaaataccaaaaaaaagtccttactacaaagactactcaaaatgcctcgaaatacaaggctaaaaccctatactactagaatagccaaaatacaaggcccaaacgaaggaaatacctattctaatatttacaaagataagcgggctcatacttagcccatgggctcgaaatctaccctaaggctcatgagaaccctagggccttcccttggatctctagccaatctacttggagtcttctacccaatgcccttgcggggtaggattgcatcacctcctctcatggggtagccaagttgtcttatggtgaggacattgatataattaatacaaacccttggtcaca

SEQ ID NO: 171417 - DNA, 462 bp, Glycine max
cttggctgcgcagcagctctgatttcgtgagtatttatagaatatgacgcattgtaatcgattacaggtattggtaatcgattacaggcccaataagccttctggtaatcgattacaggatgttgtaatcgattacaggctgcctgttcatgtgtaatcgattacactggatggtaatcgattaccagagcctatcctaggctagtttctaagagaatatctatatttatgctcaaatacattctatatgactaattttcactactaatacactaaattcaatcattcaattactatatacacaagaaatcataaattctatcataaaaacaagaattcaaacaagatcaaacaaaataatctacaatcaaaaggtaaaaagtaaatcaaccaatcaatcaaccaatcaattcctaattttctaaatctcttacatctaagagacctaattctcttctaata

SEQ ID NO: 171418 - DNA, 418 bp, Glycine max
  unsure (1)..(418): unsure at all n locations
ntataagtgcgggtctgggagacgaatgtcaagtgttcgcgatatgtgaagatgatgttccaagtactttggatttggtacgaccatgctctcctgatttccagctgggaaattggcgagtggaggaacgccccggcatttacgcaacaagcataatgtaaacctttacggttttaaaagctctatagttgggcctaggctttagagttttcattttgttaaagctttgtgtcttttgtttttgaatttataatacgaggatctttcttcatctgttcctggtctctacccattctcattcatttgcatgtttacttcttcttctaaaacggcagattcgatgacgagtcccccggaggtactaatacctgggacccgtctatcaacttcgagcaagaaatgaatcanacggaagatg

SEQ ID NO: 171419 - DNA, 413 bp, Glycine max
  unsure (1)..(413): unsure at all n locations
gattgggngtgaatttaattgtttttctagccctttacacattacgttaaaagctttattccttgccacaaatgggaatataatcctttcctttcgatttgatggttgagcgccccacacctagtttccactacccgtcattcaaaccctaaaaaagttaattcaatcacacacacaccaatacaagttaatcgaacaccaatatatatcatctcaaacctgcaccaaaaccttgttttaagtatataataaattaagtacaccctaaaaatccacatactttggaaagagaaccctganacagttccaattaattaaatgagcaaaagagagatgcataaagaaaccaagggttaagaaaatggatcacaggtgttcaaaactgataaacgcaaattaatcaatanacatga

SEQ ID NO: 171420 - DNA, 392 bp, Glycine max
ctgcagcttatacattaaaccaaataatgtcttattatgtgtaaattatagaaatttctaagaatgataattgttcgaagttaggattgtaaacaattacaaacatactctcccttcaatggatttctggatatatagccgtgtgcgaggtgtaagactgcctgaaaatgatactttataaagtttttgaagttttagctagattcttccctagaaagtgtacacgatcaacaactcgattaagaattaatatttgcaaaacttattatataagttaaccttagatgaatattccatcctcgaaccaaactgatattgggcagaatacgatcaacctccatgaatttgatatataaacctatattccatcgtgaaaattctaccataacact

SEQ ID NO: 171421 - DNA, 421 bp, Glycine max
  unsure (1)..(421): unsure at all n locations
tccttaaacctccattaattttcagctttaccttctcctccattggtgtttcttcatttttctccatgtatctcctcacatgtcttgtgctaaatgttgttaacatgattctttagagtttccaccgattaaacttgctatagaagctagatttgattttctatggttcaaatttcttgttcttgttcttgaaacatgaattgtgttaagtttaggttcatttgagttttgtcttgttattttttgtggctgaaacctaaaccataaaattcttacaaaaacattaaagtagaagaaaacctcaaaaatctagagtgacttgttcacctattgtagttttgtcatagaagtcatgtctagtcatgaaacttgtcacataagatttcttatgtngngctgaattttattttcttgttctttg

SEQ ID NO: 171422 - DNA, 476 bp, Glycine max
  unsure (1)..(476): unsure at all n locations
ggtaaaggctcacattcactntcttctacatcattattcaaactgtccttttaaataataaagtcatctcgactcanagaaagtcatataagtctcatacaattaatatagaacctatatcctaatgtcacatcctatcagagcgtggtgttcccgtgtcctctagcatgaggttcttcatagtcatccacctattcatctgctcccccgaacacaagttcaagatcatcacaggatccatacacaacaacatacagggagtgagttattacattcctagctaatagagaaacaagacaattaaatatacatattatataaatgagataccacttgcttaaacatagctcacgtaacttcaccacttcgtcattcaaaattcacttttcaattatcaatcacattacacaagaatcccacacttcgatcaagatataataacacatcaattagcangcatatgcaatagttatgct

SEQ ID NO: 171423 - DNA, 88 bp, Glycine max
  unsure (1)..(88): unsure at all n locations
cgctctatgngcttgacgcaccaatacgacactcatgatccctcgcagactccctcttccctttggcccttcttgatgaaaacaactc

SEQ ID NO: 171424 - DNA, 306 bp, Glycine max
  unsure (1)..(306): unsure at all n locations
tttcataatgacgaaaaggctgacgaagaanagtttattgattcttcattgcaccactatgttattttctctaataatgtgcttgcagcttcagtagttatcaactcaactgtatttcatgcgaaagtatgttatgcttctagtcatgcactactaatttgatagaggttgagtttttggggctataataatcatttacttgttgctgcacaatgtttcaggaaagttcgaatctggtttttcatgttttgactgatggagaaaattattatgcaatcaaactctgtgtcttgagaaatcattata

SEQ ID NO: 171425 - DNA, 276 bp, Glycine max
ggtgactttttttatattctctactctctaagttcggggttggtctgccaaagaattcttcttcgtaatttatttaatttgtctactggtttggcatatgtattggacgactcctatgtgatttggagggtgtaccaaaaggagggtcctggtcctatgaatggtgcacaatatggtaaaccatatgatgagaaagagtgggaaacagatgaggaaattgattcttgtcaatctgcccctgtagctgctgtttgtgcaccctgtcctatacaacct

SEQ ID NO: 171426 - DNA, 460 bp, Glycine max
  unsure (1)..(460): unsure at all n locations
tttttgggcccgtcattaacactctatttcatatcttgggtccatcatcgcatctagtctagccttataaaaatgtagtcttgatcccaaggttccatttttaaatctttgtagtttatggaattattaaaggcttaagctctatggctacaaatcacaagatggaacatctaacttgcctgaagcacttgggttggggtaggaatagaaatgaacccgattaggtactattggatcctcacgtacccgtcctactgatatcacagagggcacagcagtgccattggcgagctgaagtgaaaatatcaaaataatgaccagtgacaacattgcttcttcttcttcttcttttttttttttcctgaagngggcaacattgtcttaatgctgggttgatgtggtagtggcatccataaataaattataaacagggctcgtaaaaataatttgatcaactaaa

SEQ ID NO: 171427 - DNA, 401 bp, Glycine max
  unsure (1)..(401): unsure at all n locations
aatttgtatgctcaaatctattagcttgtgtgttcaactggaaatcttaaatttctattttacatattttatttggcattatgtaacaaaagatgcaaaaaaaagtttactaaacgtttatatcagaggtgggcnatcggtgtttatatattgcttgtctggcacaccacaaattcttttttgatttcttttgtccatagattagagttgttntatatagttctagtttgctggagttaaaatcaatattatacttgcgtaagccatcaatgaactaaaaaattacaattgaaatatagaacacatgattttaggcaagcagtgatagctggaaaaatggagtatgtgggaatggttgcactcatatctagaaggatgatttactgatatggatgataaca

SEQ ID NO: 171428 - DNA, 446 bp, Glycine max
  unsure (1)..(446): unsure at all n locations
agttttcttctgtggtgtgtggcctatactattatataccatgagatgaactcaacaagctcacgcactaaatgaaaagtaaagtgttagcctgtgaaggagtcattttcaagaacaataatatcgctcttaacaagacaatatgagtaatgacgaaaaacaacatatgcagtgaagttgtagcacactcagcatggtacttcttcaacaaaaggaaagacttttgaaggatatatcttgagctatagaaatgagtttgaggtgatcttggagtctatgaaagattgaaggaagatctatatttataatgaagaaatcgtgaattgatgtaacttgaatcatgatcaaaatataactcgaagttggagacatntgtttgcctggctaacatgatataattgtaatattntgaacatnatttgagctatagaggtctaaatgatatg

SEQ ID NO: 171429 - DNA, 332 bp, Glycine max
gcttggttaggctcttgaaaagtctccgtttttcatttattttaatggaatttccacgtgaacgctcagaataaatctgcagctgcagaatgctatacaagaacagaggtttgtctggaaggagtacttgatgcactactatttgccgtacaaactctcaggcttgacatgtttgctctttatatatttctgcatgcattaaacaactcttggtgactttggtatcagtattttaaaaagagaacacagtcctatcatataactaattaacatggtctaaacagtctcacaatatatttaacttcttattttcctgagaaggattatattat

SEQ ID NO: 171430 - DNA, 449 bp, Glycine max
  unsure (1)..(449): unsure at all n locations
cagggttgagctttaggcggtgggaactcccaagcgtcgtgttgccttcttcgtcaatgaagtccgcatccttccctatgaccgatgacaatattgacattgtccagtggctgtggaaaatgatgcgttgatagaggaatttgttgtgttggtacggttatgtgatccatttcattaagagcttgcaacacattttcggccagtcttttggggttttcgagcaaacagcttgcgagaaacattttttgcagtagacatgagtaagttttgaatactggtgatagaaaaaatttcaacagattcaaacagcaaanagaaaaaaaaacagtaaaagtatttggcttttatgcgaaaaagtgtcaccaagtttctacgcttatncgtgctgatgtttgaagcgtggagatgttactgttttaagctatgttctncagcttggaatcacgtca

SEQ ID NO: 171431 - DNA, 321 bp, Glycine max
tggtcgaacaacgtcatgcaaagattaatctggatagcattttctgaacagactcgggccatataaagcaacgtattattaatgtaggctttagaaccacacaagaaaacactaaggacctgaactctaggattttttatgaagtcataatatatcaagtaattaaagtagaaaggagatgcttttatgtgtttttaaaaacaaaaacacagttataatgattctacacaaatggtagcaactattacagggctagatttcaccaaatcttcattatcttcatgcattaacgtgtcatgcctacttcatagatgctcttat

SEQ ID NO: 171432 - DNA, 372 bp, Glycine max
  unsure (1)..(372): unsure at all n locations
gagccttgttccctttccttgttttgaagctcactacaagccttaagtgaaaaaccatgatattaccatatccttaaggaattntggagctttggaattngtttgggaataagtgtggggggtttttgtttcattggacaacttgttttggtggctatgcttcatgatgtattttgggccatacttgatgtacattgtatattggttaaatggtggacatgcttgaatgaaatgttgttctcaaaggccaaagagtaaataaaaaaaaaaaaaaattctaaaaaaatataaaaaaaagaaaagctttaagttgagtgaataagatttaaatggcacangntgatgaaactctgggtctactcttcatggtaa

SEQ ID NO: 171433 - DNA, 377 bp, Glycine max
agtagtaatgtcaccggtggaagaaaatttcttgggtcgaatctgaaacacttacaccattctactacccaaaataaacaatcaaccacagaaaagtagctatgtaccttagttgacaaatatcacaccaaagcagagcacaagcacaaccagcacggataaatatcgcacaacacaagcactagaatggagtaaacgcagaaagcaaccatgaaataaaaaaaatacagctttttataaaagaaaaaggttcaggggcattttcgggtttttaaaaaatggctagatgcaccaacaatgttgctgggtgcccctagcaattccccaagtctattctcgcagactcaagatgaagggagccgaggcactcattaaca

SEQ ID NO: 171434 - DNA, 324 bp, Glycine max
aataataatggggaatggaagtaaaagcatgatatatcctaattagaaaaatagttaacacaagcaattaaaagtgaaaacagtggtttaaaagtgttgggtctttataataaacgagttgatgcatataaagatatttctctaattaaaaatgttcttgtgttctatgctaaagactaaagtactaaacctcgatccctcgtaagtttagactaatttaaaccaagctttgtccttagatccctcttgttggactaggcttaatttaaatagcattataatcacaacataattaaaaactaaaatacctctatccctagcaat

SEQ ID NO: 171435 - DNA, 493 bp, Glycine max
ttacggacctatgaaactcagcttcgaaaatgaggtgtgtgcatcgtttgcattaacttggtcttccactgaattgccatcattgtatgaggagaaaaacgatcaaccaaattagacatgaaaaggaacacatcttttcaacgaacacaattttttttttcaaagtggataacactattagagaaaaatgaagttcgagtcctaagataaaatttgatttaaaaaaaaggcaagatacaccttggtctattgcaaataccaaccatttattacttaattaattaattctctcttgttgccacacaatttcttcaaaaagtagactgcagtcatcacgcaattttttcatagtggattttcgattaagcaattaataaactgattaatttaacaagtaactgatatctttgggtataaatactgagaagggcaacctcgttcttgcattcaataccacacaaacatagtaatcaagcacaggcaatctgactac

SEQ ID NO: 171436 - DNA, 347 bp, Glycine max
tcttccattgaaaacataactccatgacatgatccatgttggcttaatattattgaaagacaccgccgcaccccttttgaaatattcagcgtgtgatcaccaataacggcgagggaataatgcttcaattgtcaagttagaatgatgattgaactaaagctaacaataataaatgaaaccatgctttcgagatgaagaaaagaatgtatatatttcacacgcgagccgccatgaattggatgtatttcgggtaataaaaatcatggtaaagaccatgcaattctcatggtaaactcttcaccgcgcacagatatgtcaaagatatatgaatatgaagcatgtatcat

SEQ ID NO: 171437 - DNA, 440 bp, Glycine max
  unsure (1)..(440): unsure at all n locations
gagttagaagtgacaagaattattacgtggaatcttttaaattgacaataatatacaccattttccattaacaatatcaaatatatatccagaataaaacaaatactttaattttatatttttttaaattaaaaagatgtcgtataaaaattttcttaattgatttgttgtgaatgattnttctatggctcanatatgtttttgatccttgatatatacttgaattttgcgtttgatccttgataaatttttccttcaaatctgtttcctaatatttgaaaagttttgttttagatctctgtcatcagttaagtgatgacgtgtccattaaatatttgataacacgaattgtgacaattcataaaaccgtgtgtatntatttcanaatcaaatttaaattttcttacgggtaaaaaccactagtattgggtncaactcaa

SEQ ID NO: 171438 - DNA, 294 bp, Glycine max
acttcatttgtatgacgatttctggtttatgaagcctggtgtaaaaaaaatgcggtccatgaaggtgaagtcatttgtcctatttttgtgaccatggaagtttaaagcataactatgacttaaatatcattttcttcatctgggaatctctatcctttttttccccttttctcatgggaggttagctctgcttctgaattgtgtgctttgagtatggcatctgtgctactaaagtgaaaggggatttcatggattttggcttactttttttggtcttttctggtttatatttct

SEQ ID NO: 171439 - DNA, 411 bp, Glycine max
  unsure (1)..(411): unsure at all n locations
gaaccccccaggtcaagctctcaactttttctaccattttcttcttccttctttctaatggtgggtnttttattctgctgaatagtttgcttcatgttatgtttttttgcagagttgctgtggataacatttcaagcagaacagacactgtgataaaggttccaaattcacctttcattggccttgtcttttctgcattgctaaagggtccttttctcttttgtgtgaccaattttccttgtgtgttgttgcaagttgatagcgcgaacaagcgtgggagcttgttggaggtggttcaggttcttactgatatgaatctcagtgttagaagagcttatatttcctctgatggagaatggttcatggatggtacggntccccttcacacttgtcaatnntccttctaccatg

SEQ ID NO: 171440 - DNA, 437 bp, Glycine max
  unsure (1)..(437): unsure at all n locations
gcttttatccaggctcatgtgggggatttccttctctatggcttattccctagcggatggcgactcctctcacctcttctacttggtcttctgctgcatctccatggtggaaaatcaccattaaaggacctcattgaagctcaaagatccagcctccatagaagccccacaagcaagcttccatcaagtggtaatcagagcacaagagcttcaagtaggtgctccttaaacctccattaattntttgctttaccttctcttccattgttgttttcttcattttttctccatgtatctcctcacatgtcttgtgctaaatgtttttaacatgattctttagagtttccaccaattaaacttgctatagaagctagatttgattttctatgggttcaaattcttggtcttattcttgaaccatgaattgtgttgagttt

SEQ ID NO: 171441 - DNA, 402 bp, Glycine max
  unsure (1)..(402): unsure at all n locations
aataactaattaaagacgaggaataaaatttctgataaaaatagaaactaatgaaaaaacaagtcgactaaattatcagatagtgtgtaagaaattttggagtgattgatttctgctcgatctagccaataaaaaacatgtattaaggtgtatctccagacaactaaggccccaaagaagaattcaaagatataattaaaacttcatttttatcacagaagagcacatttgtactatacattagagcaacaaaattctagttgtaggggatattnttttcatacctctccattgaaaccttcccaaggttctttgaaatctttctcctttaacgcaagccaaataaaaatgtcttatgagtgacaaactgaccaagtatcctaattcaagtaacatcatatg

SEQ ID NO: 171442 - DNA, 434 bp, Glycine max
  unsure (1)..(434): unsure at all n locations
gcttcttatccaaggctcatcttaggggngattctccttcttccatggcttattccctagnggatggcgcctcctctcacctcttctcctttgtcttccgctgcatctccatgctggaaaatcaccattgaaggacctcattgaagctcaaagatccagcctccatagaagccccacaagcaagcttccatcaattctagatgtggtgaaaaaggaaatgaccaagctcttacaagctagaatcatctaccccatttctgacagccagtgggtgagcccagtccaagtagttcctaagaagacaggcctcacagtgattaagaataagagggatgagcttatccccacaagagtgcagaacagctggagagtctgcattgattataggaggctgaaccacgtaaccagaaaagatcattttcccctgccattca

SEQ ID NO: 171443 - DNA, 454 bp, Glycine max
  unsure (1)..(454): unsure at all n locations
actgcacaaggctcttaatattngaagagtatccttgtggaaccttcacccaacanagtatttgacaaaaacttatcttctccttcttggacaaagtatggtaggctgggggcaagtaaattttcttcccatcagaccttggatgcaactgtgatcttatatccatatcagctagatcttgacgggtattcaagccatccttcgtcttgccttgaatgttaaggagcgtcccaatcacactgtcacaaacattnttctccacatgcataacatcaatacaatgtctaacgtcaagatcactccagtacggaagatcaaagaanatggacctcttcttccatatgcaactctgactnttatccttctnttgggtcttcccaaatacggggttcaggtgttgaacccgttgatatacctgctcaccagtcaacggtatccgcgcaatatcatgctc

SEQ ID NO: 171444 - DNA, 363 bp, Glycine max
cctatacatataaaacagtcccacaatcccaagcttacaaaaccatactcatatgtcattaaggcatttcaccgagcacttggtgggcacacgttttggcataaatagcaagagaatgggggcaatgtggcatgccccattactccagaatgcaacataggcctaaggccatcccttacaaccccctaactcaaaccaatcaagcatgaaaacaaaccaaaattgctccacaaatttgagcacattcccacaatttagagcaccaaaagaagaccaaaatacaccaatggaaagctagaaagctcaaggatgagatacttacttgttggagtgagtaggagtatcaaaaatgaaagcaaaatg

SEQ ID NO: 171445 - DNA, 500 bp, Glycine max
  unsure (1)..(500): unsure at all n locations
tactccagcttcttagtctcagatgatgcagctgagtttgtagctacctcatgcactcctctaatgactatggcatcatttctggcgctaaactgctgggagttggaagccatcttctcaattaaatttctggcttcagcacgagtcatgtctccaagggctccaccactggcagcatctatcatacttctctccatattaatgtgtccttcataaaaatattggagaagaagctgctccgaaatctgatggtgagggaaactggcatatagttttttaaattgctcctagtactcatacaggctctctccactgagttgtctaatacctgagatatctttcctgatggttgtggtcctggaagcagggaaatatttttctaagaatactctcttaaggtcatcccagctcgtgatggaccttggagcaaggtaatacagccagtcctttgccactcnctctaatgaatgangaaaatccttcagaaatatgtgatcctc

SEQ ID NO: 171446 - DNA, 345 bp, Glycine max
tgcaacttgtttttttattggttcctgtaagcaactatatttgttaagccttcaatgctaattaaataatgaaatgccttggaagttgaaacttgaaagtgcagggaagaaaaatatgatggcaagaaagtaaccaaaaaaaaatctttatgaatttgtgtaagggatgtaaataatccaacagtccattaactaactgaagattaaattaaatgtccatcggagcaatggattatgcacaaactaaagtgaccagttccaagaattaccctctatagtgattaacccaataccataatgtgaaaggaaaaactcaagtaggatattttgattacaagtttacta

SEQ ID NO: 171447 - DNA, 464 bp, Glycine max
  unsure (1)..(464): unsure at all n locations
ggaaattataatacatgagattgattattatgtatcaagttatccaatatatttaatatttgtagcttctcaaatatcattcctctagctgttgtcattcataattggttactaattgcccatgaatatgtatgttttggcagtcagcaatggcatattacactatcaacattatttgaaaaagcttattataacctcttaccatgtttgttatagctggtggagttgttgcatcaattttagtggttctctgcctattatgggttggcatagaggacgtangctttcatagcaaagggaccacactcaatcttgcaactcttcctgttgctgttggtctttatggttactgctactctggacatgctgtgttcccaaacatttatacatccatggcaaattcaaaccaaattcctggagtactcttaacatggtaaatgacatttagctataatctataactc

SEQ ID NO: 171448 - DNA, 378 bp, Glycine max
accagtgggacactactcttaaaacaaaaatggcatacaacctccccccataaatacaaacatcaatgtaaatttaaagcaagcttatgcgcatatttccttacgaacgttcacttgcacaagacattctattaactaagaaaaaatgcacccatatacaatcaaggcagcttcgttatctagattatttacatgtacttccaaggtgtatttgttacttacatcacacacatctccttggctaaatttacatacatgcatactcaaagcattttggggtaccaaaaattgcacatgtgcacatcttggtatttctaatacctatacaaacttcatgttgaatcttgactatctacacaataaggtgctacatttcat

SEQ ID NO: 171449 - DNA, 473 bp, Glycine max
  unsure (1)..(473): unsure at all n locations
nttctttgtgggttgatgaactctgttttcataatggcatgatcgctggctaacatattctcaattggctcagttgcctcttcaggggtcttcaattttattttttccccctactgaagcatctaacaattgcttggtttgtggtctcagcccatctataaacatattcaattgaattggctcagagaacccatgggtgggaatctttctcaataaacctctaaacctctccaacgcttcacttaaggactcgtcagggaattgatgaaatgaagagattgcagctttcccttccgtagtctttgactctgggaaatatttcttcagaaactnttcaacaacttcttcccaggttttcagactgttacccttaaatgagtggagccaccttttggcttctcctgccaaggaaaatgaaaatagactgagtctaatggcttcatctggcacacctacaatctttatagntgtac

SEQ ID NO: 171450 - DNA, 256 bp, Glycine max
ttttatttgattccatgaatttaggcctggacattgaaaaagattttcttccactgattaaaaaatacacaatgattttttgctcgatttgttgttatatagttaaggcatgatttgcatgatccctttcttaaaggaattgcatgaccctttgcatatagatgcatattagtaagatgaatattaacaagcactcttcaaataacttttaagcaataggataaaatctattaacgatgaaaagtccaatttatca

SEQ ID NO: 171451 - DNA, 283 bp, Glycine max
tttatacttgttgaagaattatatttgcccaactagatcaacgattaattcttcccttcaaataggggatttacttcccatacaagccacaaaaaagtatagcacattttttaacaatgcattcattgataccaagagcaaaacaatagaatattagaacagtaaggtcgggcaattaccaacacattcatacagttggagtcaagcatatactgcttaattatttttgactaacattaagtatttcatatacctacatacctctaaaataaccccaaattga

SEQ ID NO: 171452 - DNA, 352 bp, Glycine max
  unsure (1)..(352): unsure at all n locations
aaaatttaaaaaatgttcatagaaaaattggttaaatgattatacaataattattcattatcagtcaggtttactcaaattggtatgctcctcttattatcccttttatatttttggtttaagaaaagagaaatattttggaggaggagactgtatttattttttataatctatttatttcaacagatattactaattgttaactctttactaaaaatatttttatgtacacacaaaacaatacattagaaatttaattattcaataacagctagaattaaacacaacgtcgaaagaattgaacactaatngttaatatcttacatttttaaatctcttaaaatatttaaaa

SEQ ID NO: 171453 - DNA, 353 bp, Glycine max
ctctcatttttgtcatggcatatatatctgcatgtttgatgttaaatgtacttacttgcctggtgtttgtcaatgaagttcatattgatgaagtgcttacattgatcttctatcttggatatatatatatatatatcacttttctaaggggttgcttatttttgtctggccttttgggtttaattgtctctgggctaattaccttaatgagtcaagttttactaaagtggctatgttaggtgccaatatcatggaggttatggtgtatttcactggttgagatttacatgagcgtggtagtctcatttatttattttatgctatgtgttttagtctgaagccactttgttatc

SEQ ID NO: 171454 - DNA, 361 bp, Glycine max
acctctgaaaaaaaccaacagaccaactctgagatcatatgcggaagtgacgatcaagggaaatattcaagggggcaagacgaaacgtgaggacataccacccaccatttcgatcacaccccacgaaggcaggggatactggtgcaacaatgcatgggttgggaagttaaagaaagctatggcagtggagagaatggaggaccgcatagcttgggatttagggtacaattttttcttcgtaccccattacccagaggctcttcgctatgcgaaagtatgggggagggatgttgtacacagccttacccttgcatatgcaaagaggcttgttccggattccaacccatgaccaacaagtcac

SEQ ID NO: 171455 - DNA, 485 bp, Glycine max
  unsure (1)..(485): unsure at all n locations
acggacctatgaaactcaagctggatgcttaagaatggccagcgtccaggagttctgttacatgcaactnttatttaaatgataaatgatgggattataagaattaaatcaaaacaaatgaaaaaaggaaagacatgctataccgaanagaaacgctcacactcgctcacgtgcgtattttgctctacagaagcaactaaaggtcatacttatatattgtcattatagcatgttaattgagaaaataatcttgtttcctcattcaattaaatttcatcttttactctatctataagaataatgttattacacttacattgtcattatagtgtgttaatagaggaaataatattgtttcctcatttaataaaatttcatcttttactttatctataagaatattatcattacacttatnttggcattatatcatgttaatttaggaaataatcttgttcctcatttaataaattcattacttatct

SEQ ID NO: 171456 - DNA, 351 bp, Glycine max
gagtaaaaatttattgtcgtttggattggctcaaagattcaacattcaatttcgagcgtctcgatatattacgggccttcatcagacatccgagtaaaaagttattgtcgtttgaattggctcagaactttaacattcaatttcgagcgtctcgatatatgaccggactcaatcagacatccgagtaaaaagttattgtcggttgaattggctcaaagcttcaacattcaattttgagcgtctcgatatattacgggactcaatcagacatccgagtaaaaaattattgtcgtttggattggctcagagcatcaacattcaatttcgagcgtctcgatatattacgggact

SEQ ID NO: 171457 - DNA, 427 bp, Glycine max
  unsure (1)..(427): unsure at all n locations
actcagcttgagccattatacgacataacttttacatggatgtctgattgagtcctgtcatatatcgagacgctcgaaattgaatgttgaatctctgagccaatccaaacgacaataactttttactcggatgtctgattgagtcccgtaatatatcgagacgctcgaaattgaatgttgaagctctgagccaattcaaacgacaataactttttactcggatgtctgattgaggcccgtaatatatcgagacgctcgaaattgaatgttgaagctctgagccaattcaaacgacaataactntttactcggatgtctgattgacgcccgtaatatatcgacacgctcgaaattgaatgttgaagctctgagccaattcaaacgacaataacttnttactcggatgtctgatngagtcccgtaatat

SEQ ID NO: 171458 - DNA, 370 bp, Glycine max
  unsure (1)..(370): unsure at all n locations
gaaagatagatattagataagataaaaaaaaaatcaacaaatcatatctggcaaataagaaataattttgttctttcatatggacaaaacaccaaactttctccaaatgggaaaatgaaaaaaaataaaatagaatgtccatggtagtgtgtgttttggcaatttggccataaagagacttaaattactcattaatggatttggtaacttcattctctttnttttgtttagaaatcaaaagaaataaaacaacaactaagctttctatgcatgagagaggtgagacagatgctaaccaacaagtaaaaatagagggcactgatgacacctttgtaaacagagatagaagagagttcaatgtctcccatat

SEQ ID NO: 171459 - DNA, 449 bp, Glycine max
  unsure (1)..(449): unsure at all n locations
ntntattntcagtatatgaagatgaattcatggccacctcattgactcctctaagaacaatggcatcatttcttgcactgaattgttgggagttggaagccatcttctcaatcaaactcctagccccagcatgggtcatatcaccaagagctccaccactggcagcatcaatcatactcctctccatgttgctaagtccctcatagaaatattgaagaaggagttgctcagaaatctggtggtgaggacagcttgcacacaatttgttgaatctttcccagtactcatacaagctctctccactaagttgcttgatgcctgaaatgcattntctgatggcagtggtcctagatgcagggaagaatttctccaagaacaccctcttaaggtcatcccagctgaaaatagacttgggagcaaggtagtagagccaatcttttgccactccc

SEQ ID NO: 171460 - DNA, 362 bp, Glycine max
  unsure (1)..(362): unsure at all n locations
tctcttttcactggtggtctcccattttcttgcacaaaatcttgtggcttttccattggtgatgaaaatggagggctaaacacttcatcaatccaagtctgaatttgagttctggtttagtatttctaaattttgtgaatgttcatctattctccccaatcctattttcaattttcatgattatgattatgcttgggattgaaaacatattaggttatggattcatttcctaatttcaaaatttaatcacagattgtttggatgattntccaacctaatttgtgatctcaaaccaattaaggagattgatttgattgaactatctctaatgcatttgagtgaactttcacactgacattatt

SEQ ID NO: 171461 - DNA, 452 bp, Glycine max
  unsure (1)..(452): unsure at all n locations
ctcagcttctggtggaagaaaaggagcctatcaacattntgcagtttgctgatgacactgtctttgtaggagaggctgtgtgggagaatattcttgttataaaggccttattaagaggctatgaactagcttctggtttaaagattaactttgctaaaagtcagtttgggataatagggggtggagtcaactggtctttggaagcagccaattatttgcactgtcgacagctggattatcctttcctctatttaggcttacctattgnggctaatccatctagccagctggtgtgggagcctcttatttctagattcaagtctaaattagccaaattggctcanagagatatattcatggctgggaagatcactcttatcaattctgtccttaatgcccttccaatntatctcctttcctttnttaaaattcctcagaaggtagtcaaaaag

SEQ ID NO: 171462 - DNA, 359 bp, Glycine max
acactccacatccacaaatcacacataaacccaccatccccagttgcccaccttcactgagctcacatactcccacgtagcccttatcctcgttcctctcaacaccgggtccccatcaatcctcccaaagctttcacaacatccaagtaattcaacatccaagcatcatgaactaacacaaccaagaaaacagggcagaggcagaaaactctgcccaaaacacaattcaatatcacagctttccttacttaaagaccccagtaacatttccttcgtccaattcgttcaccgtggatcgactcgaaaatttaatggaagctctagtcataagctacatttgaccgtgggatctgtagcaa

SEQ ID NO: 171463 - DNA, 477 bp, Glycine max
  unsure (1)..(477): unsure at all n locations
taagaagctagagcttagctacacatacctctctaatagctaagctcacctncttgagatgagaagctagaacttagctacacaccccctataatagctaagctcacccccatgacaaaaaaacatgaaaatacaaaaaaagtccttattacaaagacaactcaaaatgccccgaaatacaaggctaaaaccctatactactagaatggtcaaaatacaaggcctagacgaaggaaaaacctattctaatatttacaaagataagcgggctcatacttaacccatgggctcgaaatctaccctaaggctcatgagaaccctanggcctttccttggatctctagcccaatatacttggagtcttctagccaatgcccttgcngngtaggaatgcatcattcccttcaccttggaaagggattgacctcaaatcccgaggttcttcatactatggggctcttccctcacacctgtaaa

SEQ ID NO: 171464 - DNA, 334 bp, Glycine max
tagactcagattcctattcatcctcctgtgctagcttctctaataacttgaaattattattttgttttacttatgaagggaaactctaaaaaaattgaatattttccatcctccttcaagattacatgagttcatcaagaggtaaggggagtattttcaactcttgaaccatatgtttgttgataaacttccgtgaacatgttgcttcgaaatctatatgcttgttgacatgtcctgaatccatgtgctgagctgctttccttgagtatttttgccaaaaatgagttctttgcttgttaaaacatagagttagccttaaatttcacgtaaatga

SEQ ID NO: 171465 - DNA, 494 bp, Glycine max
  unsure (1)..(494): unsure at all n locations
actcagctagtagcacagaataaaattctttgaattcgaagcacatattctatcctgtttcgaagtantctcactctgacctaaaatgtggaatatattccactcccaaacctgctggagctaccagatacttgttcagctgaattagaactatgttccgtcccatcaacatctctaacaaattcaggctccttagtggtaaccatgaagtccatcaagctgcggctgaaccccaaatcagaatacaccctgaaggcatcctatatatgaaaatagatactactagatatagcagcggcagaacattaaanaaactgatatattgaataatatcacaataaagcacccatatatatgttcatattctctactgtcaaatcagacaaagaactcatatgactgtggctcattccttatgcagtagccataaagcccaatgaaaacaagctaagactaatgcctaatgattaaaagaataatacattaagacatgc

SEQ ID NO: 171466 - DNA, 460 bp, Glycine max
  unsure (1)..(460): unsure at all n locations
acctcttcttattaatttttaattgaaatattacttttagaatatgtgtattatagntngatttcataaattaaatgaattgtgaactcataacgatagataaatatttntttcccgtgattttcaggttttaagttgaatttgacattttgaaaaggactttattcaattattaattttgaacctgagaattaatgcacacgcatgtggttgcacgtgataataataataatttccaagacaacattgtatcggaagtatttgaagtgatatgctaaaagactttaccaagggagtggacagtctccaaaattaagtctgggacaaaagtaatacctttgtaacttctcacaacctacgtttgtcaccaacaaaagggtntccaaacacgttgtagcttcaatgttgatcgaatagtgtgtgagctctaaatttcttagtacttgaattcaattatatg

SEQ ID NO: 171467 - DNA, 419 bp, Glycine max
  unsure (1)..(419): unsure at all n locations
gctttgacaggcaatcaactcanagtgcttaaatgtttaaagactggaattaaaaaaattgaaatataatgcaaactaaaaagcaactaaataactggtaaactaaaatgttcatgctttgcagaaattaaactaaacacaatttaaacaactaaacaaaatttaaacgtcctgctcatcctgtggctgatcttcattaagatccagtgctggagttgctgatgaatcttgaataggctgctctggctccatgactggtgcagatggctaggtttccttaagaacatgtgcaggagatggctctggtatctggtctaaggaagtctccttctcctgagccatgtgtacatatgcatcanaataaaagggctcaggaggagtgagctcatcctccccctctgctgctgctggctcctctg

SEQ ID NO: 171468 - DNA, 301 bp, Glycine max
  unsure (1)..(301): unsure at all n locations
aaataaaataaaaaacattattaggggctcttgaactattatatttcgattagttttcacgtgatatataattaagagttattgattctttttttagtaacttaaaaaatttcttctgtaaaaaaataacttanaatttttaaatgtgtcatataaaaagattgattcatatcatgaatacgtgggtggataaagatcacctatataaatttttctattcaagagtagtgagaaaatttaattttagtgacctataaccgcttagttataaagtttgtacttaattattccaccaaaaatg

SEQ ID NO: 171469 - DNA, 437 bp, Glycine max
  unsure (1)..(437): unsure at all n locations
tctgganaagatcaatcctgacaaatggatatatctgcatattaagctggtccatgacacccgcaattacctgctccagttggaattaatgcatgttaaaatgcattaaagtatatctgtatttattcctaatggcaactcaaaaccaagccacttatctacctcaaactgaaaatcttatgatatgaaaacataagaaaatttttgaataaagaaaatagataaggatagataatttgacatgccatggtgaaaaaagagctgaactgaatgatngcttaatttctttcttctttntaggaaaaaagagctccatgattgtatttttaatggtgntctcatggaatgatagtaatgtgcacacctgtgtctaccttaaatcaccaacattaaacatattcatactagataatattttttgtactattaatataaaa

SEQ ID NO: 171470 - DNA, 411 bp, Glycine max
  unsure (1)..(411): unsure at all n locations
acacatgattactaccaccctgagtcaagaaaccctacatatgttgaatggaccacttttncttcatacatgccattaataataacacctggtcttgacttcctgtaaaggtagcctctccttcttgcttaactggacatttcctgtgaaaatgcccaagctcatgacgagaatagcattctaccgattgtttgttgaaagctttgctacctctgtaacttccaaccttcgtccttgcctcgtccttgagattggtgttcatgaggcaccttcaaagcagaattttttcaacattgtaacttatgtattggtcatgcacaagtaaactgctctgcaattcaatgattgatacagacttaaaagtatatgcttggattattcaatgaagcacacagcataattgaacttggg

SEQ ID NO: 171471 - DNA, 479 bp, Glycine max
  unsure (1)..(479): unsure at all n locations
nggaagaagcaagagatggagaagattatctttgagctngatatgatggcacgngagcaggctgttgcaggtgatagacaagccacaattatccaaatcctgaacaaattctcagccactacttcgtcccctgcaagccacaccctcaagaaggtaaacacccacatttcacaaaaccctaatccttcacaaacagaaaaccctactttaagtgttgcacaagacacactgattccttctacttcttctacttcaactccagctccagctcctccccagaaccctagttcttgttctctaaatagccagaataataatcatattaataataatattccagtagagaaaaattcgattttgaataaagtgtcctcatcaaatgagaaagacgaatgtgggagaaggtggccaaaggatgaagtgttggcactcataaacctgaggtgcaccagtgtgaacaacaacaacaacaatgagga

SEQ ID NO: 171472 - DNA, 323 bp, Glycine max
caaccttctggaggaatcttctggagggcccaagtgggccatattgttatctacacccccctttttactaaatgcaccccccttctatttttttgggaattctttttcctaacgttacgaaactttacgaatttcgtaacgatacttattttccttccgcaaggttatgaatccttacggattatgtatttactcttttttagctttcgaagaagttatggaaactcacggattgcgcaaaaataccttttttcgacttccggcatattacagaatttcatggatcgcgcaagcctgcttccttttgatttctgagacgtctc

SEQ ID NO: 171473 - DNA, 81 bp, Glycine max
ggaatcaaaagagtaaaaatatatatataaaaaaactctttataaataagcgaaatcatcgacgtttctcttggattctca

SEQ ID NO: 171474 - DNA, 274 bp, Glycine max
ccacatttcatgaagatccaacggttaacaaaggctgggaagcatttttaccgaggcagctcatgtagtttcttcaaaaagtttcattaagaggctctctcaagaagcttcctcgtgacttctttgagaagctatatccttatctacccacacccctttattaactaaattaacctccttgaaaataattacggataaaaataacgcaacaaataatcaaacatcgaacataattgctaataatatatatatatatatatatatatatatcagg

SEQ ID NO: 171475 - DNA, 458 bp, Glycine max
  unsure (1)..(458): unsure at all n locations
atctatgtatctaaaccccttttttaatggactttcaaggtttgagaagtgaaaatgagaatggggtaaatttggagcaaactctcacctcaaacaagtctatatcatcaatctaaactcgctcaaactggttttatgacgaaaactctaccaaatcaaaatttgactcctcaacacccaattttaccctagaaatggctcttggtttcactttggtcactcatattcctcatttgcacagtctacactttctcataagtcctaaatgacatttcaaactaggattaactccctttaacctccaaataccactaaatccagatttggccttccaacactcaaagcctcactctttttccactcataacactacattttcactttctaaccctagggtaactctacccttcatctctagcnagtttccataagcaatntcagcacataaacatcacaag

SEQ ID NO: 171476 - DNA, 411 bp, Glycine max
  unsure (1)..(411): unsure at all n locations
attaattataattttttttaatttgttatgatattcttatatttttaataactgatatctctcgtgctatctttattatgactaattcaagtagtatcaagatttcccatgggatagtgcctgcccgtggtccatggatgtttaaccttaaattaaattctattaggtatatcaagtatcagtaactgtcactactactctcttctctaaacgaacatttttagtgatttttaaaaataaaaatgtacttagttgataagaaattgactctattcatatcttacaagaaagtaaatttaagttttattacttgcataaaaactttgataattatgaataatntataagtatttttattaagtgttttctgaactttaaggcttgtcttagccctaaaggataatcatcatc

SEQ ID NO: 171477 - DNA, 298 bp, Glycine max
tcaaaaaggtctcaaggccttggtgggtatccaaaatgttgtatctctgatcgattacgaatcagaatcaagaacccccaaacttccaaggaagcatgggaattgctcaattggagtttcatgatactgatagaactaggctcaaggcttaaattcaaggaactgagttcgaagatgaaagagagataattttcagagtgttccgcaaattatgttttgcatgaattgaatcaaataataaggctttggaaggagttgaatgatcaacgtgaagtggaaaaataaagattggtaattg

SEQ ID NO: 171478 - DNA, 461 bp, Glycine max
  unsure (1)..(461): unsure at all n locations
tactagtgttccaagacatgatgtctgttggagaatgtccttactatgtaactctctttgnggtactntctgcttgngttcatttagctcttgtacaagaaggattctactattttgatcagataatgaagaaatttgacgttgagcctggactggagcactacacatgtatggttgcacttttgggtagggctggtttacttgatgaggctgaaaactttatgaagacaacaacacacgtcaaatgggatgttgttgcgtggcgtactttgcttaacgcgtgccacattcatcgaaattacaatttatggaaacaaattacagaaactgtgatacagatggaccctcatgatgtgggaacatatacattgctatcaaacatgcatgccaacgcaaggaagtgggatggagtggtgaagattataaaactgatgaatgaaaggaacattaagaatgaacct

SEQ ID NO: 171479 - DNA, 393 bp, Glycine max
  unsure (1)..(393): unsure at all n locations
tactccatatgggggacaattaacttgggtttctaccttcgtgatcatttaatttaatgtgctaagttgttcaagtctggtctttggcaagtgtgtacaaagttagtacctatcactttctatatttnttgttgttcagacctcactatgaagactaaaagtttcaagctttaatatgttagtttttaaatatttttggaggtagatgttgaaggtacttacgtctggccttgtgggagagctcattctcttgaaggctatgtcagtttttagtaaaaggctatgtcagtntttacaatngaacttttatgctatgaaaaatgttgttttcagagtggtgagctcacacatacttaaaactgatatcaaaaattgtgttgaacacactagaaa

SEQ ID NO: 171480 - DNA, 272 bp, Glycine max
  unsure (1)..(272): unsure at all n locations
tggagatgcaatattgctaaggtntctcgttttanctactccttattgtcgacnaanaactngcggccctgccattatgatatctacagttaatgtgcccacccgtgtcaagtctggtcgttggcaaacgtgttaaaagatatgcatgttgattaataggaacgattcagcacctataggatatgaagagactataatatcggcgattgctaaactactgacctctgaagcagatgaatgttaactagatgatatttactccaattctacga

SEQ ID NO: 171481 - DNA, 467 bp, Glycine max
  unsure (1)..(467): unsure at all n locations
agcnncacttattaagttcaattatagtgaatatgttgggcttancacatttgattgcgcttagctgaactattcagctaaccaattaggggtctctgcgcttagcgcgagcaagctcgggcttagcgcgtgaagactgggcgcttagcgcaaggtctgcacttaacgaatagacaattgcaaaaaaaaattctaaagtctttttctatctatctcttcacacaagcttaaaaccccttgatcattactaaacaagctgataattaatcacaatcacaagcaattatcctaactacatgtaagagataagaatganaaagagaaaagggaaagaaaagttgggttgcctcccaataagtgctcttttaacgtcactagcttgatgcatcatcctattatccaggatccaacanagttcctacttcaagggccgttttctcaggttgtcctttcctcatcacatgcac

SEQ ID NO: 171482 - DNA, 479 bp, Glycine max
  unsure (1)..(479): unsure at all n locations
ggctcatattggagaaactattcatgatgaattcaatctgcaacatagtgcttctgaaatgacatttgtttctcctccaaatgagggaaggtacaccactaaagggacatcttgatgagctaaactctattctaatggagttacgcaacattaatatcaagatagaagatgtagatctggcaataattntgttagactttcttcctcccccctatgagaattggtgagttgtcttagtgtagacctggactccattacacttaaagaagtcaagtccaatctctattcttgagagcttcaactaaaggtgtctggaaatggtgataaagcctttgcatctgaattatcagtgactaattatgctaaaaggcagaaaaagatgaaaggaaaatgtggcaagaagagtaaagatgattctaaggacatctacaattattgcaaagaaccggatcattggaagcgagactatccaaagaaag

SEQ ID NO: 171483 - DNA, 440 bp, Glycine max
agcttctaaactttatacaagaatgaagctctgttaccacttgttagacaagtggcctcagatatcttaagaagggggggggttgaattaagatattccaaactatttcccctaattaaaaatctatttcactttttactcaagttatgaattcccttaatgacaatcttcttaaatattaattcaaatgaaacaatttgaatatgaatataaagcaataataaataaaggagattaagggaagagaaaatgcaaactcaattttatactggttcggccacacccttgtgcctacgtccagtccccaagcaacccgcttgagagttccactatcttgtaaattccttttacaagttctaaacacacaaggacaatccttcctttgtgtttagagatcctttacaacaagagactcacagtctcttaatcccttagagaat

SEQ ID NO: 171484 - DNA, 403 bp, Glycine max
  unsure (1)..(403): unsure at all n locations
tcaaccatacatgcatngctcaaaggaaatatacattntcacaaaggcacgaataatgtttctacacaatcaatgaatctatacctcattccagagttaggcatgattggtaagtttgaattcaatataatgttgttaacattgaccacaatttcaatatacatttcacttgtttcattgtcatgtatttagttaattgttagcaagattagtatgttgtgtaattccacataaaaccactttaaaccttaatattaatgcttaccatgagtcaaggcaccacatgctcttagtctgctatattgaattgccaaaaaaaaaagtaggaacattacaatctcttactaagtctatgataactttcacatattcatcacaaaagaacacactcaatagtattcct

SEQ ID NO: 171485 - DNA, 394 bp, Glycine max
  unsure (1)..(394): unsure at all n locations
agattttgctcaaatgaaactaaataggccaccattggagaaatagaggctactaagcaaaatttcgttactttttatcatcttacacttgaaatgaccaagcacttgaagcctttgtacgttaaagccaggacaaatggtaaaacatggtccaaaggatttgtagatagggagccatcttgagtatcatgtcattgaccatgttaaagaagttaggtaaaaagcatgaggatttacaaatatgaagacgcccaattntatgcgaggagtgatttcaacattaggggttttggtaaccaaaatcatggttggaactaaaaccatgtattcaacattcttcattgtggatgccaaaccaacttattctgtgttgttggggagataggattcattc

SEQ ID NO: 171486 - DNA, 483 bp, Glycine max
  unsure (1)..(483): unsure at all n locations
gggaaatgttacaatgattaagaacaattttataacatgatcgtttggatgtcctaacttgaaacaacagattntgagcctatgctagagctattattgacagtagcaattgaataagagaagtcagcatttgtaacaggggcagaagtagacatcagcagggaaggattgccttgaagctggagattgtgaaatgaataaaggccatcaacacccacaactccttgaaggaggaccttatgtgtctcctgagatttcacaagacagatatgaggatgaaactcacaaaacacaaagttatctttggcaaactgactcacaattaacaaattnttcgaaatagaaggaacatgtaacaatttgtgaagtttaaaggttataccagtgtcgttaggagaaataaaggttgaggaacaagttttagagatacttaaaccttcacaatngcctatgaagatctgatcgggtccatcanaatgagtg

SEQ ID NO: 171487 - DNA, 392 bp, Glycine max
  unsure (1)..(392): unsure at all n locations
gactatgatgagacctatgcccctgttgctaggttggaagctattatattggtgcttccttttgcttgtataataaatttcaggttatatcaaatggatgtaaaagtgtttttctcaatggatatattgaagaaaagatatacgtggagcaacctctaggttttgtagacttcgatcatcctaatcatgtttacaagttgaaaaaggcactatatggattaaaacaagcacctagatcttagaattctctagttctatccagaaagagttggagatgtctatgatgagagaatngactntcttccttggacttcaagttaagaaaatcaagcatggaacctttttatgccaagcaaagtactacacataatngattaagaaagtcaatatgg

SEQ ID NO: 171488 - DNA, 483 bp, Glycine max
  unsure (1)..(483): unsure at all n locations
gagagagaccgatcacaagcacataacatggtcttaatagaagagttattcgcttgctcaagatccaaaaggaacttgactcagcgtttatgcgagacagagaccaacatgttagctatcatcaccaagtatcaagaagaactaagcctagccacaacccacgagcgtatggtggcggacgagtatgcccaagtgtacgcagaanaggaggctagaggaagggtgatcgactcattacaccaagaggcaaccatgtggatggactgatttgctcttaccttgaacgggagccaagaacttccccgattgctagccaaggccaaagcaatggcggacacctacttcgcccccgaggagatccacagacttgtagactattgtcagcatataatagatntaatggcccatataattaggaaccactagggaatntgtattgtcactcanatcttgactagttatangccttttgaataaaatgag

SEQ ID NO: 171489 - DNA, 402 bp, Glycine max
gctttagttaaggaaagtaacccaaaaatgaccaagaatatggtgttgaaagagcataacaagaatttcctaaattagtttaaagatataatcttcggtgaccataatgcatctgaaacgttaaggaagttagtagataggcctaaaataaatgttataacttggcaaggatacgatatcaacaagtattcattctacacgaaatcacaagacgacaaaagtacaatgcaaaatagtggtgttagtttaagagctgaatctcaacactttgctactgtacatgatgataatccccgtgtagcttccatgccttactttggagtcattgaagaaatctgggagggtaattatgtaaaattcagtgtttgtggtttcaagtgtaagtgggttgatagcaatatt

SEQ ID NO: 171490 - DNA, 415 bp, Glycine max
  unsure (1)..(415): unsure at all n locations
agacatcactagattatatggattcattgttcttgggtcaagcatcacatgatcactagacttaagtcaaacatcattaggcactactattgacactaccaaatttgttattgacattgccaaatcatgagaaatccctcttttttccactcaccaaattattctcaccccttttccttacccacaccaaaattacaccaatcccacaaccatcaaccttcatcaccaaactgcccaaatgggggtgcgcatgtgtagagggcttgaaagcttgaggtcgaatgcaaatttggcctggttgttgtagttaatggtgagaatatggagaaattgggtgttataggttgctagtggtgaacgacattgatgttgctggtacaattgtggtcgcactgngatggtgtgcgtacaatga

SEQ ID NO: 171491 - DNA, 374 bp, Glycine max
  unsure (1)..(374): unsure at all n locations
gcttacagagcaaatgaacattattccacatattttatgtattgtctaaccacatagggcgaagattntacataagctacatattaagttgactgatatatcatcaatgcaaaattatccatgcttaaatgttcgttttcttgttttgaagttgggcataaatcaacagcccagggcttaaactccaagaaccacctaacaaactccttgctatctagcaatccctagcttattagcaaaatagagaacgaaaacacttttaacagttaaggcaaagttgacagcataccatgtttgttgcattggtttcagatacataaccatctttgtcaagcatgattgcatcatctggcttttgattattaccttcaatc

SEQ ID NO: 171492 - DNA, 433 bp, Glycine max
  unsure (1)..(433): unsure at all n locations
tgcatgtaagagagaaaaaaaaagaacatatccgattaaccatatatgcatatccggctaattccattttagcgcatctttgatctctctccgtaccccgtgtttaaacgctgccgtttcttctagtttccccgctattctttcttctttggaaaaaaaaaagcgactcatactttttttttctctcgctgcgtggtactgcactactggtttgttcttgctgaatttttcgacttcatgttcatccacaaattaatgctnttttctttctttctttctttcttttttccggtttccaatgttcgagttcagttgacttgactcgttgatctgccacgacttgactcgctcccctcttctgcgtcgaatcgaacggctccactgaaacactggtcgtttagacgtcgatctcgggttcgggataatcatgagt

SEQ ID NO: 171493 - DNA, 383 bp, Glycine max
cctattaacaacttgcgtttgcccatcagtttgtgggtgacaagtggttgaaaataacaatttagtgcccaacttgccccacaaagttctccaaaaagggcttaggaacttatagtccctatcactaacaaatgctccttggcagagcatggagtctcacaatctccttgaaaaacagatcagccacatgggaagcatcatcaacttttttacatggaataaaatgagccattttaggaaacctatcaatgaccacaaaaatggaatctctccactgattgttttggagccccaaacaaatccatggataatcaatccaagatactccggaatggaatggagttacaatccatgaggtttactttgctttgccttttaataca

SEQ ID NO: 171494 - DNA, 465 bp, Glycine max
  unsure (1)..(465): unsure at all n locations
ngactaggcgagtngattntagccttagtttcactntagttattaatcaattcaattaagaatgagaaatcccacagagaaagcgtccgattgattntccgttttattttgctaaaagatgttntttgattattatattattttttacctctttttgatttccaacgtggttacggcacgaccgaacggtcggaattcattttaaccgaagttaacagacaatacaattcaaacgttcggtggaaattgattttatttttaagttaagcgagaaatgacttaagtaaaatggcttaagcacgtcaagagggggtataaaaagtaaacgaaacaggaataaaaatacacaaaacacaatgtggaccactgtgggtacatagaatgaatcgaaaagcttggttcaaggtacttacccgttgaagatcgaagaacgatgaagaacgaatgaagaacgtcgaagaacgg

SEQ ID NO: 171495 - DNA, 336 bp, Glycine max
  unsure (1)..(336): unsure at all n locations
ttttttttttgtttttgcataataggctttgggaaatcttataaattagttatgataagtagtatagtagccgacccttctctttctccgtatttaaacgggggtgtgtcatataatcatggccaacaaatatatattgatatgatggaccaaaaatatgagccactaaacacattctctgctcctttggggttcctatctctatattaggtttatattcgagtcacatatgcttaaatatttttgggcgcactttgatgatttttctgttgacatgcttaatttgagaaaggaaaaaaaactgccttacacatntaggtaataattctcggaaaa

SEQ ID NO: 171496 - DNA, 476 bp, Glycine max
  unsure (1)..(476): unsure at all n locations
tctactgatgtggcatggcggggccccttctgcttgttgtcctcaccgccagccttggcctctattcttcctttctgagatacttctccttatgtcagctcgcgtaggtctatagcctaacccacacttgctactgtttcctctggtgcttaccacgctggttctaccgctgatgatcttgcccaaacccattccgagctcatagacggaccccaacatcacccgggccaccatcattgccgtatcacacacgcaaggctgcccatagagggaatctacggaggcaatgcttactacctccaaagattggaaggtcatttccaaagactcctncgcggcttccatatatggaatatggccttagatgggaagcgttaaacaacaatatctccaacgtgctatcgggcatcacgttcagactggagccactatcgatgagtaccttggccatgacgtggtccacgcattggactgac

SEQ ID NO: 171497 - DNA, 356 bp, Glycine max
taatatcacaatcaatatactctgagaaaaagtgaggggtcaataatattaaataccatatttaatacatataataagtagtcaattagattatacaaataggagataaaacattatatttccgtatataactatcaagttttctaatattatatacatgtctattgaagatgggtattaaaacatgttttacaaacaaataccttccaaatataatgaaataaggatggtttaaagcactacacctctttacattattaattgaagaatcattttatgtcataatatccaatgattatatttaaataatgtgacgtcccataacataataccaatttatctacataatatagcaa

SEQ ID NO: 171498 - DNA, 455 bp, Glycine max
gtactgggaaagattcaatatattgtgtgcaagctttcctcaccatattatttatgagcaactccttcttcaatatttctatgagggacttagcaacatggagaagagtatgattgatgctgccagtggtggagctcttggtgatatgaaccctgttgaggctaggaatttaattgagaagatggcttccaactcccaacaattcagtgcaagaaatgatgctattattcttagaggagtccatgaggtggccacagattcatcttcatctactgaaaataaaaagcttgaaggaaaacttgatgccttggtcaacctagtaacccaggttttcatgaataagaaatctacatctgttgcaaaagtttgtggtctatgttcttctgcagatcaccatatagatctcttgccttctttgcagccttctggagtcaatgagcaacctgaagcttatg

SEQ ID NO: 171499 - DNA, 287 bp, Glycine max
ctgagaaagcaagcatactttccgcaccaacttttcaatgctatgagtataagtagcatccaccttgtttttcattgtgtcaataaaatgaatatgcctggcaaattgacatcagctgatttataatgtcaaagaaagtagtaggagacaaaccaatcaattaatcattttcgaaagactgaatgtaatacccaaggaaggacctatagttatcattaagaaccgaccaggcctaactcacttgcaaaagctagctcaagtgacatcttaatacacccccccccccc

SEQ ID NO: 171500 - DNA, 473 bp, Glycine max
  unsure (1)..(473): unsure at all n locations
cggatacaatggcttcaagcctccataatgcttaccagtgttattatttcangtgaggacaaaatagntgactatataatttctataaaagtaaaagcttttcatagtcaataccagtgattcacctcttgcaattttttcattggatatgccctgtcagccttgaatgtatctaatgctgcatcaacttctgctatctgcccttgccaaatcacatcctacacaaatttaaggttttaaaattatgttagctcgaaattggttacttctttatcccataactcaaaaagtcaagataaatcacacacacaatgaccaacagatagttgaatctaacatgaaaaaaattgaaatgttacacagatttatattgataatcagatcagatatttactaaacaaagaaattttttatacgtatgccatctgatcatagattgtcatatatggtaagaatggtgaatttgaataact

SEQ ID NO: 171501 - DNA, 455 bp, Glycine max
  unsure (1)..(455): unsure at all n locations
ntgagggtggtttatatacgaacagtgctatgcaatcaaatcttgtgcaccagactcgatggtggaggacgcatgaatagcgctaggcaataaattcatgggtctccaaataagaattgagggtggaggatagacgaacaatgctaggcaatcaattcgtggggctccgaataagatttgagagtggaggatagacgaacaacgctaggcaatcaattcgtggggctacagacttgatggtggaggacgcatgaactgcgctaggcaatcaattcatgggtctccgaataagatttgagggtggatgataaacgaacaacgctaggcaatcaattcgtggggctccacacttgatggttggggacgcatgaactgcgctaggcaatcaattcatgggtctccgaataagaattgagggtggaggatagacgaacagtgctaggcaatcaatttgt

SEQ ID NO: 171502 - DNA, 461 bp, Glycine max
  unsure (1)..(461): unsure at all n locations
cggatattcagcctgacgagggatcgaatgttagtaatttatgctacagcatagaacacaagagcacgatcgattagagaaatatatttctatgcatcagcttgtttgttagaaagacccaacatatctacctactgctgtcattttatttaccttacattttatagtttttagcatacaagtttagtttaaattatgtttgaaattatcacttatacatgttatctcaatgatgcttcaattctgaacttaatttagactaacattagttccctgtattcgatactcggattcatctattntaattttaaatacttgacgatccggtgcgctttccggtaaacccccattgaaatttccttgagacataaatgcacaaaaagtagctgtaatggggagtgtcataccctaatttcgtccggggaccatctttttgtggggaatgcgacccacgttgacac

SEQ ID NO: 171503 - DNA, 301 bp, Glycine max
gctggacgaattgcccgcgcctactgggagctaaggctcggaatttgatatttagagaatagaaggtgcgactaaacggatgaacctggataaccacactgttggtaccgtagtaaaagtttttgatcttaaggaaaacgtgattatgatccacacacgtggagggctcgtacaatcaatttggagaaagtggagtgggatattacgctctctgcctctgtacacagggtgcgtagagggaagcacaatgaggatctctcgggaaagggaattgaactcaacctttcgcactctatatgct

SEQ ID NO: 171504 - DNA, 468 bp, Glycine max
  unsure (1)..(468): unsure at all n locations
tgctcattccacaagatattgngaaatatgagcatgtttcgcctttgccaaattaaatccagcagaatcccaaacctccaatgccatttatgatttagtattgaagactcacttagattaagagtgagccaatcctctagagtacctgcaaaaaagaaaccgttattgaaaactggtatgacccctctccccatgctcctcacatcttcaccatctctggtccttacttacataatggacataaaatcacttgtaatttttctgttccacctagccaagttagtgcccaaagcaccacgcgcaacattccatttccattagtgactaatattttatncgaatttgttcaagttaataagccaatatgaaaattattactactatgtaagtaaaaaagaaaggagaaatacgtaaagtcataaagagtatttgagaacacgacgtcgaataaattaatctaggattgac

SEQ ID NO: 171505 - DNA, 285 bp, Glycine max
  unsure (1)..(285): unsure at all n locations
acgtcccactggtaaaactaactttccaaatgtttgccttcgcaggaatggccccgaggaagcttgcctcanagaggtccaggaaggacaaggcggccgaaggaactatttccgccccggagtacgacagtcaccgctttaggagcgttttacaccagcagcgcttcgaagccatcaagagatgtgtcgttctccgggagcgacgcgtccagctcagggacgacgagtatactgattttcaggaggaaatagggcgccggcggtgggcaccactggttactccta

SEQ ID NO: 171506 - DNA, 388 bp, Glycine max
  unsure (1)..(388): unsure at all n locations
tgccacccagctcgcccaggcgagcagggtgcttcctccagaagcaacagccttctggaggaatcttctggagggcccaagtgggcctggttgctatttgcacccctatttttactaaatacacccnctgctcttttttttggtgattctatttttcgtaaagttacgaaaacttacgaatttcgtaacgatacttgttttctttccgtaatgttacggaaccttgcggattacataatcatcccctttttttgacttacggaatgttacggaacctcactatttgtgcaacgatgtttacttttgatttccagcacgtcatggaatttcacaaattgcctaatgatgggtgctaagcacctcaaaatgaccaaacacaagttgcatg

SEQ ID NO: 171507 - DNA, 264 bp, Glycine max
  unsure (1)..(264): unsure at all n locations
gcttcacgggtcgncagagatcacctcttccattcctattgtatgagtcttttttaagaaaatcgatattaacaaagcgacgttaacatcggttttcttagcatcggttttgaagaaaactgatgttaacgaagcgacgnttacatctggtttttaatgttaacatcggttgttataaaaccgatgttaacgttcttttgttatccttggttttcttctaaaccgatgttacctatctgcagttaatcgtcggcttgttgaatc

SEQ ID NO: 171508 - DNA, 496 bp, Glycine max
  unsure (1)..(496): unsure at all n locations
actcagcttttatccaggctcatcttggtggtgaagctccttcttccatggcttattccttaatggatggcgcctcctctcacctcctttcctttgtcttccgctgcatctccatggtggaaaatcaccattaaaggaccccattgaagctcaaagatccagcctccatagaagctccacaagcaagctttcatcataattgggcccctttgacaggttcatatcattctctcccttttcaaagtgattcatccttgaatcatattggttaactagaacaaaatcatgcaaatctaaaatattatgcaaatcaaaagtatcatgcaagtcaagaattaacaaatgttgttccacatcaaccaaagcataaggcttagagatggtgtgagttaaaggtttcatccnccaatggttgccttgttcctcatatgtatccacctcttctccaaatgctttgcctttcatctttttgacaactcttccttggacataaata

SEQ ID NO: 171509 - DNA, 319 bp, Glycine max
ctggactaatacattggctgcccaagtttcatggtcttgcaggtgaagatcctcataagcatcttaagggagtccatattgtttgttccatcatgaagccccctgatgtccaagaagatgatatctttctaaaggctcttcctcattctctggagggagtggcaaaagattggctatactaccttgctcccaggtccattttcagctgggatgaccttaagagggtggtcttggagaaattcttccctgcatctatgaccactgccatcagaaaagacatttcaggcatcaggcaacttattggagaaagcttgatgag

SEQ ID NO: 171510 - DNA, 384 bp, Glycine max
  unsure (1)..(384): unsure at all n locations
acgttcagtaactgctggtaatcgattaccaaatatgtgttatcgattacacagtgcaaattntgaattcaaattttaatagctggtgtaaatcnaatttggccactggtaatcgattacatcctccggtaattgattaccagagagtaaatctcttgaaaaagacttttttaacttaaatttcttggccaaaccttttgctacttcaattggaattcccttcctatttaatgtaatcttcctaagactctagagactgtcttgatcatccatcttgaatatctttgatttctttgtcttgaataaaactttgagaagcatgtaatcctttggcatcatcaaaacatcagcttgatcctttgtctacaaccttatggcaggaga

SEQ ID NO: 171511 - DNA, 373 bp, Glycine max
tttgacatttttggattactttgtttgactaaaacttcatgctgaagtatgtatggaaaaactttattactgttattcaacacatacaagtgaacttgtaacaaattttctacacttggagtgataacatgcagtcctgttgaacctttatctcccactctgtcggcatgacaagacttatgaaggccaacaggtttagccttttcaatgtactctgaacaaaattcaatggcttcttctacaatgtacctttcaacaataaatgcttccggatgatgtagatcttggcaacccttttagggcttcatgtatagctaactggggcatccctgcaataaattgacccaactttgattttctgccaatgacatta

SEQ ID NO: 171512 - DNA, 386 bp, Glycine max
  unsure (1)..(386): unsure at all n locations
ctacgtgggagtacgtgaactcagttgaaggtgtgcaactggggatggtggatttatgtgtgattngtggatgtggagagtcgacttgcaccattgcccgatcgccaccttgtaccacatatgacgggtaccccataatcctacaagcttgaagtgagaaagtgtggaagagtcagtcttcctacttttattcgttgaccacagagtggtacctgaagatatgtcgcgggggtcaggagaccttggggacgtcaggtggggtgctattgcccaaaaccaagcttgaccaatcccgacccaacctgtgcatagtcagtcagtgagaacctgtgacgtacctaaacaggcgagctcctggcagtcaaccgataaaagaacaaagacca

SEQ ID NO: 171513 - DNA, 314 bp, Glycine max
ctatgagagcattcaccccttccttgtctacttaaagaaccaccttttctttgacctcccaacccttattgacatgccacaattaacagcgcacatagggttttttttttacgatgataggtattacaaaagaatgtagtcttgatactctgtgggcttgtgactcatattcctggaacataaattacccaaaacactctcccatatttggaaaaaatttgtcttgatccataataatgttctcctatagcctaaaatagggtgcaaaaagatagcatttgcatttagctcagggttcaatgacacattcattc

SEQ ID NO: 171514 - DNA, 415 bp, Glycine max
ctcagctgatgcattgacctagtgacatctttagttaatttaaatggtaatttttcagattgagggcccaattggtggctagaaccacgatgttgctagcagagttctatgtcatcactgacaacaccatcatcgtcacccaacgcatcatcaagaagcttccaatagaggccaacttcaggctcacaaattgcaagtccaccctcgcaaagcctccaccctacaccctcgcaaacctggttgtcgatgtagaggcatccatcggaggaagagacagtggtgcacagtgtcagggttgagccaatagaggaggtggaaggaccgacttgatgaggaggaagtcattgtcggagtcctagaattggagggagaaagaaagaggggaaggcgaacaacttgtcatcgaggttgtcat

SEQ ID NO: 171515 - DNA, 314 bp, Glycine max
tcctactttttctttccctttctctctctctctctctctaatccaacgaacctagcctctcttccttctctttctctacccttcgccggctctatttctactcggaacccttcttgcccttgcctttcctcctctcacctccatgacaacctcgatgacaagttgttcgccttcccctctttctttctccctccaaatctaggactccgacaatgacttcctcctcatcaagtcgggccttccacctcctctattggctcaaccctgacactgtgcaccactgtctcttcctccgatggatgcctctacatcga

SEQ ID NO: 171516 - DNA, 475 bp, Glycine max
  unsure (1)..(475): unsure at all n locations
ctcagctgtgcctcttacgtcggaatatatatgttcatatagattctttacccttangnngcttgctgatggcttctttccgttccaagcttcaattggagtcttgtcttttacagacttagttggacatctgttgagtatgtaaacagcagtgtagactgcttcagcccagaatttgttaggtagtcccttctccttgagcatcgatctagctatntccataactgtgcgattctttctctcggacactctattttgttgaggagaatatgagactgtaagttgtcgctcaatgccttcatcctcacaaaatcttttaaactcgcgagaggtgtactttntgccgcgatcacttcttaggtactttatcccgtttccactttgattntcagcaagggccttgaactttntgaatactccaaagacttctgatttttatttagaaatatacccatgtcattctagagaagtcatc

SEQ ID NO: 171517 - DNA, 338 bp, Glycine max
aaaggccacatatttaaaaaagctcaacatatcctcttaaagaaaacaaaaattctaaattttatttaaacctatatttgtgggccgccctgtagataatatatttaaatttttattcattttaaaaagcaaaatattttggattttaaatattttagtttatattcttaattaaacttaaggcattatgacaaataatgttatttttttttgggaatttaccaaaagcagtgagtaaatctcgtcggagtctatgaaccagcacaatttgaatattattttcaaaatataatttattctatatccacagatcaactaaaatttaaattttaaaatac

SEQ ID NO: 171518 - DNA, 470 bp, Glycine max
  unsure (1)..(470): unsure at all n locations
gctctatntaaatcatatctatatttgatgtgggactaaacactaccctttatgctacgattaagggaagcccaaagaagccgcaattaaggcaactttgagatagaaaacttataaaaataggtctctcagctctctttgatatcttgtgggggagtgttgaaagtcaggactcaagacagaatattctacatttattttatagcagtttgttggcaagaaatctctgatctagaggaaacaatatatcctttaattatttgtatttaatgtaacaagcctatataaaccaatctatgtggtgtcttcaatcacctgatgactcctaatngtgatagatgcttcttcaaactgtgcccatgtggatgttggatcttcatccactgtctcagcctctctcttgtcatattcagcagtggaatcattgctctctccatgagagagctttgataccatatcatnatttggat

SEQ ID NO: 171519 - DNA, 255 bp, Glycine max
  unsure (1)..(255): unsure at all n locations
cctatgaatttacctagngagagcgacccgactctctaggggggggtttgtcttggcatttacttctatgcacccgacaagtttttcactgacatggtaccatattgcatataagattgagtcttagtgtatctattgcataacacttgtgtattgatcgatattgatttatttaatgatattgtgttttaatccttgagtacgtgaatgacatgaaaatgaatgaaacatgttctgttgtgatgtgatggtaca

SEQ ID NO: 171520 - DNA, 454 bp, Glycine max
ctttggtacaaagaagaagaagaagttttttgagattcacggtttgtataggattgtttgtaatagtaaaagtgtgaaagaatgaattgattgtaaaatgcacaacaaagccttgcttttatcgactcttcgtgtctggtcaagaagaccatttataagagttattactcttagaaaaacttaaaaccacattgaaaaagtcaaaaaccttttgaagagttacatcttttgatttatttagaaacaatcactggtaatcgattaccaaactagtgtaatcgattacacaaagcttttgtgtgaaaggatgcgactcttacattcgaatttgaattcaacattcaaaggcactggtaatcgattaccaaaacattgttatcgatcacactttttgaaataattgaactttttcaaactctttgtaaagggttgtcaaaatcatgtgctttcaagt

SEQ ID NO: 171521 - DNA, 303 bp, Glycine max
ctaagatcaccttcttgagaagcttccttgagaagaatcctaaggaagctagagcttagctacacatacctctctaatagctaagcttacctccttgagatgagaagctagagcttagctacacaccccctataatagctaagctcaccccatgacaaaaaacatgaaaatgcaaaaaaaaaagtccttactacaaagactactcaatagagtggccaaaatacacggcccagacaaaggaaaaacctattataatatttacaaaaataatcgggctcatacttagcccatgtgatgcaatct

SEQ ID NO: 171522 - DNA, 463 bp, Glycine max
  unsure (1)..(463): unsure at all n locations
tactcagcttaaggctcngatctatattaaaaaggagaagaaagaaatagtcttatataaattagggtaaggtaaaacgcataaagcatggtaacacaatgaaggcatatgaaagcatatatggccacaaagaatagtaatgctttggtttttagaatagtgatgtttttctctcacttcctgatttttctatccctttccacgtttccctacccctcctaatttttgttatcttattactagtgctgtttaaattcctgcattttgtatctgtattaaatattacgtttcaattttgccaaagaatacaaagtaccactcattttaaaataattgaacgagaaggggtgtgtttggattgcagtcatgtttaacggaatctacgttgaactcaatccattattcacaactgaatcgacgttgaatgtaactntttcgtttgtgcatttagaaagtataaaat

SEQ ID NO: 171523 - DNA, 392 bp, Glycine max
  unsure (1)..(392): unsure at all n locations
tataatgaagaagtcaacatgttcactgaatgaagagaaaaatttcaagccataagaagtagtaaaaaactaaaggacaataagaatgttgcaaacatgaagatgtcaacaatgaacatgacattaagaacaacattgttacaacacactcagaatgaatttcatcaacaggatgagttcattttgaacattgtatctaaatttctagaaatgcaattgagatattcttgatggatatggaaatcttgaagaaagatcttcaactttcatgaacaagtcatggtctaatacaatctagatcatggagaaaatngagtttgtagttgtaaacactggtctacttgaacaacttgatatgtgtgcagtaagttgaagaccacttgatctacaaa

SEQ ID NO: 171524 - DNA, 439 bp, Glycine max
  unsure (1)..(439): unsure at all n locations
tgtccttggattatacnatgatgatacatganttgggacttgtatgattcgatttgggcaaaattggatgaaggcaagagtggttttcgaaatttgcactttatgcagaatttgttgttgaaatgtgcagcagaattttgtataagtgcaaaataatgcttgtgtttggctgattgtgaaaagggtagtacatatggggttctgaatatttgctagcagatcccaacggtcaaaatgtagacttatgtactagggacttccagtaaaattttccagtcgatccaacagtgaacgaattggaacgaaggaaatgttactggtgtctttaagtgagaaaaagctgtgatntttggtttgagttttgggcagagttttctgcctttgccctgntttgcttggttnnntgtagttgtgatgagtggatgttgaattacttgga

SEQ ID NO: 171525 - DNA, 469 bp, Glycine max
  unsure (1)..(469): unsure at all n locations
gcttgttcttgactcatcttctccttgaagtgtcgtctccaatcgcctttctttattctccattccacttacattgatattaaagaagaaaaggactccattaatgaagaagatccaaggcctacaagctccacatggagctacatcaccttcttccttcactcatcttctcctaccttcaaggtcttatccatggcttccaatggtggtaagcatgttcgtgactcatcttctccttgaagtgatgtctctaataacctttcctccttctccattcttctgtcattgatcatcaagaagcaaaggacaccattgattaagaagttctgaggcctacaagctntacatagagctacatcatgtggtatcagagcatcttcatctaggtgatgctcttttgcttcctctatcnttttgttcgatcaattcactttaatttcttggtcttcatcatcttctccatatatct

SEQ ID NO: 171526 - DNA, 445 bp, Glycine max
  unsure (1)..(445): unsure at all n locations
atgttctcaagactggactaatacatttgttgcccaagtttcatgatcttgcaggtgaagatcctcataagcattttaaggagttccatattgttttttccaccatgaaaccccccgatgtccaagaagatcatatctttctaaaggcttttcctcattctttggagggagtggcgaaagattgactgtactaccttgctcccaggtccattaccagctgggatgaccttaagagggtgttcttggagaaattcttccctgcatctaggaccattgtcatcagaaaagatatttcaggcatcangcaagtggagagagcttgtatgagtactgggaaaaattcaagaaatngtgtgcaagttgtcctcaccaccagatntctgagtaactccttctacaatatttctatgagggacttagcaacatggagaagagtatgattgat

SEQ ID NO: 171527 - DNA, 480 bp, Glycine max
tcacctgcggcatgcaagcttcataaattgcacaagagatacttgtagtgggtaaattctgtcaacacaagctggccagttcgttgggtctgacccacatcaatccaccccttaaatgagttagcccaacccggttcacttaaaagtttatttaagaaaaaagtgacttagtctggcccatcacgagttgtgagttaaatgggttggtccaccaatccacctaaaataaaaaaaaaaaatacatttttttaaagaaattaacaaaaaaataatttttagaaaaataaatctgaatacattaaaaaaatattagttgaattaaatcttccattatccacacaccaaaagacattatcacaagctagaagtctataactataataacaaaaactttaaaaataatcttgaacacaacaataaataaaataatgtcgaataatattaaaatactaaaagtatattttaggtgagttctaatct

SEQ ID NO: 171528 - DNA, 452 bp, Glycine max
  unsure (1)..(452): unsure at all n locations
gttcctcctgatgcgcaagatagattatcttgtatattatccatgtagaatgttctctttcgttcctattccagaatttttggactgttggggtgattgcatcaattatatttctgattcatatttctgaaaaaatgatgatgcaacaaaccgaagccgatgtccgatcttacagcaaattacaagagtagactaccagtgaaaagatggttttgattctgcccttggtgatagcaattccatttgctcactcaattgttggtaatgtaatggtgatgtcaattttggttgccgttgttgctttccttttgggttaagtcgcttgctcgctctatnnttttgggtagaagttgggtgtgatgagcaatttcattcaagtcaatatgaagaacaacctgaaattcacatgtatatttttcacgctaaacttattgtatatttgctntcttcaa

SEQ ID NO: 171529 - DNA, 394 bp, Glycine max
  unsure (1)..(394): unsure at all n locations
gctgttnttgatcgacctcagttggggatattttcggtcacctaggttaaagctatttttggccaacctcagtcaaggctattttttatcaacctcgataatgattgttctcaacctaactcgatcgagttaattntagctgaccttggttaaggttaatttttgttgaccgtgaccaagggttatttttgtcctacttcagttaggattaatttcagccaacctcagttagggttcttttcgaccaacctcgaccaaggttgtgttcacccgaacttggctagggttgtgttcagtcgatctctattaggactatactcagtcaacctccattgaggctattttcaaccaacatatatnntgttgtaatnttcggcaatctcgattaaagtta

SEQ ID NO: 171530 - DNA, 476 bp, Glycine max
  unsure (1)..(476): unsure at all n locations
gagacaacttcattgagaagctagagtntagctacacacacccatctaaaaactaagctcacctccttgagaagcttccttgagaagctagagcttagctacacacacccctctaataactaagctcacctccttgagaagagaagctagagcttagctacacacctctataatagctaagctcacccccatgacaaaaaaacatgaaagtacaaaaaaaatcctactacacagactactcaaaatgccctgaaatacaaggctaaaaccctatactactagaatggccaaaatacaaggcccaaaagaagaaaacaacctactctactatttacaaagaagagtggacccaaccttgacccatgggctcacaaatctaccctaaggtttatgagaaccctaaggccttctttatcaactctagcccaatcctcttggagcctcttgctcatggctctggtaactggtcctttcct

SEQ ID NO: 171531 - DNA, 385 bp, Glycine max
  unsure (1)..(385): unsure at all n locations
ttttncagaaaatattctcaacagtcacatctttttatgtggttcttgaatggctatcaaaggcctatatatatgtgacttgagacacgaatttgctaagagtttttcagaacaaaaaggtcttatcctcttaaaaagaaaaatcattttacaaattccttggccaaaacacttgtgattcaataaggaattatttgagtgctcaaattgttcaatctatctctttcaagagagatttcttcttttcttcttctttattatgaaaagggattaagagacagagggtctcttgttgtgaaagaattctaaacacaaaggaaggattgtccttgtgtgtctagaactctgtaaaggaatttacaagatagtggaactctcaagcggg

SEQ ID NO: 171532 - DNA, 493 bp, Glycine max
  unsure (1)..(493): unsure at all n locations
tcttccttaaattcttaanacaacacttttaatgagataatattatcaatgaatacatcatgttctaaaagagtttgtcaatggtgttgttctcaacaggtgcagcaacaaaaaaaaaacccaaccatggtatccaccaaattaaattaaaaataatacacacatacttataaaacaatcacaaattattcacactacgaaatgacacttcaataaataaacactaacatttcattgcattcaattattgaacaaacaaacaaatatcacaataaaacttagtgattcccaaaatcactagactcaactctttggtttccagaattaatgtggatcttagattcctcaaagggtccatgaactcatatccatgcaatgacatctcatgatcttccccatcatatnggaggtattagaatctcttcctcgtccaagatggagatatctaatatctcctncccatcccgaatngaggtactatcatattcaattc

SEQ ID NO: 171533 - DNA, 316 bp, Glycine max
  unsure (1)..(316): unsure at all n locations
tcccagaagagtatggagtcagcaccacttttaacatttctgatttaattccttttgcaggtggagttgatattgaggaggaggaactaacgaatttgagggtcaatcctcttcaaggggaaggggatgatgcaatcctccataggaagggaccagtcactaaagccatgagcaagaggctccaagaggattgggctagagctgttgaagaaggccctagggttatcatgaacctcagggtagatttctgatcccatgggccanagttgggtccaattatctttgtacatattagactaggatgtcattatatttg

SEQ ID NO: 171534 - DNA, 495 bp, Glycine max
  unsure (1)..(495): unsure at all n locations
tcgagctctcatcaagaagtactgcngccccaggcaggcgcagggcgagttaccacagtaacattgtgatggccggtagcgggcaatagacacaccgccaccacctctagagttcacctctgctcatccacaaaaaggtttgagtattgcctacaccacatggccgaccaataggcgaccaagtccaaagccaaaggtaagcaaagtactaggtcagtgaccgacaagtcataaggcgtccaactcaagacgttaaagaagcgctactaggaggcaacgtagtaccttttaaatctctgcttgttatttgatcagctntgtttctcaagtcatagtgggacacacctagttgctcatgatcctaagaatttaaataaaacgagcacaagctcggaaggtagtcatacctcacaaaatatatgtatgcgtgtttaggtagtgaaaaataccttagatatgcatgtatgtaatttaggtagcaaacaactacctcac

SEQ ID NO: 171535 - DNA, 346 bp, Glycine max
acattgtattcttttggcttgttgaataaattaaagaatgacttgtttctaactttttcattcactacaaaacgctgcaaagatgtgatatttatagaaaaaagtattatgttatatgaatggaattcttaccctatttataaatatatgtctattattcaccgaaaaaaatatgcattaagtttctattttgcttcttatttacaatacaaatgtattcgaatgtgatattatttcggaataaaataattttttgatcatattaaatatgcataatacctaacactcttaattaaaacatatgatgaattacggactgtcaatcaatatatatgttttatactaa

SEQ ID NO: 171536 - DNA, 477 bp, Glycine max
  unsure (1)..(477): unsure at all n locations
ctcagcttattgggtgttaactggaaccattctctaacagtggcctatccacttggcctgggctgaattctggttcaatatctctaccaagatgtctccttttaaagctttgtatggacaggaaccccctcttttagttaaaggagctgacattccttccagattggaagaggtaaatcaattgagtaaggacatggaagaattattgcaggaactgaggaacaatctgctcaaggctcaggatcaaatgaaaagatttgtgaacaagcatagaagggagctagtcctgcaggaaggagattgggtctttttgaaactgcaaccttatagaatgaagtctctagcaagaaagtcaaatgagaagctaagtccacgattttatggaccctacaaggtgatacagcgaattggggagggtgcttataaactggaactttcagaggatagcangatacatccagtattccatatattcct

SEQ ID NO: 171537 - DNA, 279 bp, Glycine max
tatggcattcacttggggtgaagaacaagagcaagcctttgcttttctcaaagaaaagctcaccaaggcacctactctagctcttcttgacttttctaaaacttttgagctagaatgtgatgcctctagagtaggtgtgggagttgtattgttgcaaggtgggcaccctattgcttattttaatgaaaaacttcatggtgccaccctcaactaccccacttatgataaagagctttatgccttaataagagccctccaaacttgggaacattaccttgt

SEQ ID NO: 171538 - DNA, 478 bp, Glycine max
  unsure (1)..(478): unsure at all n locations
ctataaaactcagctgtactcttggaatcataccaaagctgaatcgattctataagtccaacatttctgaaaaaggtntttcanaagtgtaatcgattactatgactttgtaatcgattaccaatgcttataacgttcaaaaatattttgaaaaaccttgtaatcgattacacaaaacatgtaatcgattaccagtggctctgaacgttgaaaattcaaattttaaatgaagagtcacaacttttcaagaaagataactgtgtaatcgattacaccaggattgtaatcgattatcagtggcaagttntgagaaaatctgctaacagtcacatcttttcatttgatttttaaatggtcatcaaaggcctataaataagtgacttgggcacgacatttctagagagttttcccagttcacaaaaaggcataatcctctcaaaacaaatatctttatcattaatattccttggccaacact

SEQ ID NO: 171539 - DNA, 374 bp, Glycine max
  unsure (1)..(374): unsure at all n locations
actcagcttacaaaagtactgcatanaatgttgtggggaagatttttaccatgatataagcagagtggagaataatgagcaaaagagtataagtcccaagagatcaagaaggcatggcactcatcagagctacggtggaggctctctatgctggggctaccttcaggttatctaatggcataaccagagaatggcccggggaaagattgcacctacaaagtggttgggttggggtacttaactcaaattggtcacattgataaagtgggctgaggaggaagtctttacacctttgggggggagctctctatacaagaagttataatattgatttaagcaaggaagggtgtttgttatgtctgtggaatcagact

SEQ ID NO: 171540 - DNA, 383 bp, Glycine max
  unsure (1)..(383): unsure at all n locations
actttgncccagatgcattggccctatctatgtcctaagtgcactagtttgaagtttaaataatttggatctccaacatttttggtttgaagcttccaaatgtgatttcaagaaacaaaccctgctatgctttcttttcttgatgatgaatccagctatctggcaaagatattttttatagcaactttttttgacttctccaacatccctaagttgtatttcaaactattgtttttcatggagctcaatttntatgtttctatccatctgttgggaataagtttttttggaacaagctgagcttaataaagctaaacttttgggggagtgttgaaaacacatattataatcgattctataatatagtggttataggacataat

SEQ ID NO: 171541 - DNA, 439 bp, Glycine max
  unsure (1)..(439): unsure at all n locations
ngaaggtgtgtaacccaccattntctatattagaataccgattatgtgtctaccatcacgattatcgtctccctttntgcacatgttctgtagttgcatcctatccggaaccatatcagaatagtactgatactgcctaacgaaggcaaccattaggtccttccaagtatggactcgggaaggttccaagttagtgtaccaggtaatagctaccccagtaagactttcttggaagaaatgtattagtagttcctcatctttgcgtatgcccttatcttccaacaatacatctttggatggttcttggggcaagtagtccccttgtacttgtcaaagtccagcaccttgaacttgggaggggtgatgatattgggtactangaacaactcttctaggttagcanaggcataatctntacctccttcaattggcctgagcc

SEQ ID NO: 171542 - DNA, 415 bp, Glycine max
caacacccgtgcagcctaaagcacccacccagagggaagctccccaagttccaactccgaacacaactcgaccggccggtaattccaacacgacaaggaacttccctccgaggccattgccggaattcaccccgctcccaatgacgtacgaagatcttctaccatccctcatcgccaatcatttggccgtggtaactcccggaagggtcctcgaaccccctttcccgaagtggtatgaccctaatgcaacttgcaagtaccatgggggtgtcccagggcattccgtcgaaaaatgcttggcccttaaatacaagggccaacatttaatggatgccggatggctgactttccaagaggatcgacccaatgtgaggaccaacccgctcgccaatcatggatggggagcagttaatgc

SEQ ID NO: 171543 - DNA, 436 bp, Glycine max
  unsure (1)..(436): unsure at all n locations
actaagcttgatacatgannttggattttatgatcctcanaaccaagtatatgggaaacataaacttcatcttaaatgtatccatttaggaaagcacctttgatgtccatttggtataactttaaatccataacacaagcataagcaagtagcaatcttatagcctctactctagctacgaatgcaaatgtttcaccaaagtttataccttcttgtcggttatagcccttggctactagtcttgcattatttctagtgatcaaaacatgctcatccaatttatttttaaacactcattttagtgccaatgatgttcatgtttttagtatagggtaccaattcccatacatcgtttcttttaaaatggttcaactcgtcatgcatggagaatacccaaaattcatcattgagtgcctctattgagagcatacatcac

SEQ ID NO: 171544 - DNA, 338 bp, Glycine max
agtgctcaacattactcattccaatttagaagagaaaaaaatttagtcttacacaatgtcctaaatgatctggaataaaaacaaaccgaagcaatgtcctatgcatttgcttgtgggagtattatgtatactcagatttgtcctcaaccaaacataagctctgcaactggaatgttaggaagatatcaaagtaattcacgaatggaacattggaaagctgtaaagaaagttctgagatacttacaaggaacgaaagatcacatgcttacatataggaggtctgatcaccttgaggtgattgagtattcagactcacactctgtttgatgtgtagatac

SEQ ID NO: 171545 - DNA, 450 bp, Glycine max
  unsure (1)..(450): unsure at all n locations
tatntaattacatctgctcatgctattcataattactcctgtcgaccctgctagtgttcatgtgcatgagaatgagctagctccattattttgtgctgcatgacataatgaactcaaaatccactatgggccattagatcacaaggaatccttgggggaccagatagagagatgatgaataaaaccaaactacgtggcttataattgtttgaggatatgaaaagtgatgtctgcactgtttctccttttgtgacaaaaacatgataatctagcttgttggccatgctttgtttgttctatgaagggtaaggcaatataagggtcatggngacccccaatcttagatatataatctagtgaggatgtcacttcatactactttgtgaaccgctccannatttgtacctttaaatcttgtcttacgcaattaacatctcgttcaagtgacac

SEQ ID NO: 171546 - DNA, 298 bp, Glycine max
accccgctaatagctaagctcacctccttgaatgagaagctagagcttaactacacacaacccctataatagctaaactcaccccatgcccaaatacatgaaaatacaaaaaagtccctactacaaagactactcaaaatgctctgaaatataaggctaaaaccctatactattagaatgacaataatacaaggtccaaaagaagaaaaaacatattctaatattttcaaagagtggacccaaccttgacccatgggctcagaaatttaccctgaggttcatgagaaccccaagatct

SEQ ID NO: 171547 - DNA, 426 bp, Glycine max
  unsure (1)..(426): unsure at all n locations
catggaattccttcatcaatatagggatacaagaagatatggaggacagtaccaacctatctttatagaatagggagccatgcttcatactaaatacgggctgtgaggctggatccttctgcaaccctgctatcacttgttttaaaaagggtcttgaaaaaactccttttgaacctgttgctcttgcatccaaactggaaatgaagtgatgttttgcagttctccatcttcatatatttgagacagtgagccatgcttcatactgaatccgggctgtgaggctggatccttctgcaaccctgttatcacttgttttaaaaaagggtcttgaaaaacctcctgttggacctgctgctcttgcatccaaactggaaatgaagtgatgtnttgcagttctcgttcttcgtatatttgagaaaataagtc

SEQ ID NO: 171548 - DNA, 420 bp, Glycine max
tattatgaacattgcctattatgttccacattcactaggcagctcttactcttggacctctattctaaatgccttagatgccattaaatcgggttttcgggtgtgtattggtaagggagatgcatctttattatatgataacttcttggaggaagggccaatttgcgggatggtggattcggttcacattgtagatgtcatcaattatgtccttgtgtattgttcaagacccacaaaaataaatgtgacatcctacacaacactcagagacacgtgttaaccctccacgtctgccttgttacagaagtgcagacgctcgacccttagcaaccacgctttccaactaatagggtatctctaacctattaatattcaaatatattttaatatctttatctattggtagtacataattatcta

SEQ ID NO: 171549 - DNA, 439 bp, Glycine max
  unsure (1)..(439): unsure at all n locations
atttttctnttcctattcataacaggaaaccatttgttgaaaggttattctttcacttacctagtgaacaagcagtctatgttaaagataatgaagtgattgatgatgttctttcaaagccaagtgttatcgaatcgatgttcacctcttggatggatacaaatagaaaatatccagaggcaaagaatctaacctatactcaatttgtgtccaagtatgtctatgtcaaaactagaagaacttggaaaccacacaaatcaggttatacaattgtaaggttgatatggattcctctaagcacagacgagttatatnttcttatattaatgttaaccgntgcaaaaggacaatgtagttatgatgcaattaagactatgagaaatattgaatatccaacttttaaggaagcatgntttgctatgggtgtcattggagatga

SEQ ID NO: 171550 - DNA, 244 bp, Glycine max
cccactataaataggcgagtctacaaatgcgagctcactacaccttgactaacatcatcttctctgagaagttaatatgcccagctattcccatatggtatcaaacacatctagctttgttttgaactcttcacattgcacttactgttctaccatgacaaccaagatgattgcttatctgatctgtggcttatacattcgatcagttcaacatgaagcttaccattcttctgccaactgtatg

SEQ ID NO: 171551 - DNA, 371 bp, Glycine max
gctatacgagacatcttgccaaacaaagtcaggttagccataactcgcctgtgctttttcttccatgccatatgtagcaaagttgttgatcctgtcaagtttgatgaacttgaaaatgaggccgcaattatactgagccagttggagatgtattttccccctgctttctttgacatcatgattcacttgattgtgcatctggtcagagaaatcaaatgttgtggtcctgtttatttgcggtggacgtacctggttgagcaatacatgaagatcttaaaagggtatacaaagaatctatatcatccagaagcatctattgttgagaggtacattacagaagaagccattgaattttggttggaatatattga

SEQ ID NO: 171552 - DNA, 424 bp, Glycine max
  unsure (1)..(424): unsure at all n locations
cgagatgaggaagtgtagaagggtgaaacttcctgctnttattgttgaccacagagtgttacctcgagatatgtcgcggnggtcaggagaccttgtggacgtcaggtggggtgctattgcccaaaaccaagcttgaccaatcccgacccaacccgggcatagtcggtcagtgagaatctgtgatgtacctaaacaggcgagctcctggcagtcaacagataaaaggaacaaagaccacaaagcaaggaggcttgtggtggctggccagctgtgaattttgtgtggtatgtggattatggcctctggtaatcgattactaagggtgggtaatcgattaccacgggttgtaatcgattaccaggcttgaaaacgaagtcaggaaactcanggagcctctggtaattgattacccgcctgtgtaatc

SEQ ID NO: 171553 - DNA, 396 bp, Glycine max
  unsure (1)..(396): unsure at all n locations
tactcaagcttgatattacttattgganatgtntctctagtttgcttatctctttggcatgtatcacaaactttattgtgcgactcactgattctattccaactaccattagagattatctgagtagtttgccaagatggatgtcccaaatgcttgtgtcatacttctagttgaattatcccttcaactctgcaagccttcacttttggaatttcctggaagaagtagagaccatcccttcgttcacccgctccattcagcatcttcgaagtgtggtcatgtatcacacatagattagcagtaaactggacattacaattggattcatcttataattgtgatatagaaaatataagtgcattcgaactaaggcacatcaagcacatttttaagtct

SEQ ID NO: 171554 - DNA, 387 bp, Glycine max
ctcacttcgtccatgagtcctgctatcaaacaattggtgatgtggatggattccaactttgaaatctggaaagatctcaaagaaccgatttcgcatttgatagttttgattgctatctcagattaatccgaattgtagcagggaactcacgcatttctgagtactatactcgtctaaagattccatggaaagaactagaattgtatagatgtttcttgctgtgtacatgttctagtccttgttcctgtgggcttatttccaaactcaagaaagaacatgaagatgactgtgtgatccatttcttgtgtggcctcaatgatgcctatgcacccatcagatctcaagtcatgcttatagaacctatgccttccttggttaaaccttttc

SEQ ID NO: 171555 - DNA, 435 bp, Glycine max
  unsure (1)..(435): unsure at all n locations
atgataccattatntcctttagatttaaggaaaatactgtttatcggtgcatgtatcggaaggtcagtgagagtaagggtattttctaattntgtatattgatgatatcttggttgaagctaacgatcttggtcttcttcatgagactaagaaatttctctctaaaaactttgaagtgaaagatatgggtgaggtaagctatgtgatagggatagaaatattccataatagatcacaaggattgttaggcttatctcaganagtatatatcgataaagtactagagagattcgagatggaaaggtgtttaacatcacctattctaatttagaaatgagacaaagttagtctcgcacaatgtcctagaaatgatgtggaacgaanacaaatgannagtaatttgtatgcatccagttgtgttgcatctgagagctg

SEQ ID NO: 171556 - DNA, 335 bp, Glycine max
  unsure (1)..(335): unsure at all n locations
atcatggaacttcttggtcttttctttgtagaacttggcattctcataggcttctaggcggatctcatctaactcacttagttgcaactntatttcttcaccagcttgatccatagagaagcttcaagtcttcactacccagtatgcttgttgctcaatctccactagaagatgacatgcctttccaaagacaacccgataaggagacattcctatgggtgctttgtaggcagtccgatgtgcccaaagagcatcatcaagcctggtactctaatctttcctgctgggctgcacaattttctctaaaattctcttgatctccctgatagaaattc

SEQ ID NO: 171557 - DNA, 461 bp, Glycine max
  unsure (1)..(461): unsure at all n locations
tcanataatataaccagcatcaccaagtctcttgcatacttattaacaactcgtcgtttccaatccaaaattcctgcgcaaatccaacatattattagcaccaccaccctcacaaaaacagatttcatgcaaagaagatataaacagttctcatggaagcaacaaagtttgaacttaagatcttatacaatatgttaatgtattttatcataaactatatataatcgttaattttctagtcaacacttgtgtaataaataaaaacatgatcatgcaaacctgaagacagattatggaagatctctcatacaacaaccaatccaatatcctttgattcctggtcaaccaacacgctntgtaatcgctttcgcggcaactctgatcctgtnttcaccccaccaaaacacaaatcagcggatacaagcatccagatttagagcaccccatgtaagcaagtggac

SEQ ID NO: 171558 - DNA, 423 bp, Glycine max
  unsure (1)..(423): unsure at all n locations
tctggaggagatcaactngatgttctatgcctctngaaggtggcagtccatgaggaatctccataggaaagacatttttaaatttctgcaataagggttgaacactatgagaaatagaaatagtaaactcattagaattatcagtagaaattttactatctttgaaatactgtagattgagtggttcatgagcaggtaacactttcctcacttcactcgcctctgcaaaataattaaattttctctcatgtgtatcactcttttcctcgggtgtatcactcttctttttcatattcctttgtggtgcctcactattttctttctcttgttctctcttttctcccattctgatttggtcatcacacacttctctaggggatagaggtttaagagtaaacgaggaagatatggctattcgtctgt

SEQ ID NO: 171559 - DNA, 279 bp, Glycine max
  unsure (1)..(279): unsure at all n locations
catccctgcgnnnncctctacaaaacaaaaacaaaaaaggggaagcgtgaaacttcacactacattcttagttgcatgtgttaggcaccatgagccaaccatgatgggatcataaacccatttctaanaaaaaaaaaaacatccaccaacaaaacaaaatatttgaacatggtacctaatgcatggttaactaggaaagggtgtttcttcgggcatctcaatttcataattacattttccgtgcataagcttaaagtatgcctgagtcattcatcccta

SEQ ID NO: 171560 - DNA, 469 bp, Glycine max
  unsure (1)..(469): unsure at all n locations
gcttctccccaatttctataaaagggggagaaggaagtttataaggttcagtctcttatgcacttctctctttctcgaaatagctgaggaaaattagttccgtgaagaaaatccaagccgaggcgcttccataacgtttccgtaacgtttccatgagtgatttcgcgaaggttttcgaccattcttcgacgttcttcatcgttcttcagtcttcaacgggtaagtacctcaaaccaagctttntaattcattctatgtacccgtggtggtccacatttggtttcatgtatttttattctcgttttcatttactttttatacccccttttgacgtgcttaagccatttatttaagtcatttctcgcttaatctaaaaataaaataaatttccaccgatcgtttgaattgtatcatccgtctaatttggttgaaatgaatttcgaccgatcgggtgtgccgcaaccacgtt

SEQ ID NO: 171561 - DNA, 369 bp, Glycine max
  unsure (1)..(369): unsure at all n locations
actccatttcattgaagcgcatatccactngcagttccaaagtatcaaacctctcaccaacaaaggtttgaagaccatcaaacctttccaaaatctttgaaagaagagatgaatcttctccctcatgtccttcttcaccaatgttcctagcacccttatttacccatgatccatcatgctccttaatataaccaaaggatgctatgactgaagtgcctataaggaatgatctcttgattagaacataaggttcagaatcaagagggatgttgaaatgttgaaggaagagggtaacaaggtgaggatatggcaatggggcattcaatcgcaattccttatgcatgcgatatctaacaagatgtgaccaat

SEQ ID NO: 171562 - DNA, 385 bp, Glycine max
  unsure (1)..(385): unsure at all n locations
tatgttngaactatcgatcaagttgagtatagtaagcatcttcttcatcttcaatcaataattctctgcccttgtagcattagatcttttgatataagacaaggttatcaacaactatctaaaagtgagtttctaaagtggccaggcaagagaattatgaccataacatgaaaggcatgtgagtattgagcctttgtattttgcgaaaagaagcttggcttgatctgatctcctctntgtaggcagataacatcattctcaactctaggtcatagtctaattgttcccagtttgaaaagttcaaactcgcttcaggttcctccaacaaaatgttttgtctagaaagtcacaccagacttagaatgatcccatggaagaataatat

SEQ ID NO: 171563 - DNA, 322 bp, Glycine max
  unsure (1)..(322): unsure at all n locations
gagcgtctcgatatattatggactgtatctcacatccgagtcacaaagttatttcgtntgaatttgcttagagcttatgttctcaatttcgagcgtcttgatatactaccggacacaatcggacatccgagtcaaaagttattggtcgttgaatttgctcagagcattctgtttcaattaccagcctatcgatatattgcgagactcaatcggagatccgagtaaaaagttattggtcgttgaattttctcagagctttcagtttcaattccgagcgtctcgattactacgggaacaatcggaattccgagtaaaagttttt

SEQ ID NO: 171564 - DNA, 454 bp, Glycine max
agcttctcccctattttgctataaataggggaagaagtgaagaagaaaagggttcagccccttaggcacttctctctctctctcgaatttgctgaggaaaattattttcgtgaagaaaatccaagccgaggcgcttccgtaatgtttccgtaacgtttccgtgagtaattacgcgaagattctcgaccgttcttcaagattcatcgttcgttcttcgttttcttcaatcttcaacgggtaagtacctcacaccaagcttttcaattcattctatgtacccgtggtggtccacattttgttgcatgtatttttattcttgtttttgtctactttttatacccccttttgacgtgcttaagccgtttatttaaggcatttctcgcttaatctaaaaataaaataaatttccaccgaacatttgaatcgtatcatccgctaattttggttaaaatga

SEQ ID NO: 171565 - DNA, 446 bp, Glycine max
ataaaatttacacataaagagtagaaccaagagtctcatcattcttttcttattcactcaactttactggctttctttttctttttcgatttttttttttgctctgtagccttttgagaaacagcatcatattcagcatgtccaacatttaaccaatatgcaatgtatatcaagtatggctcaaaatatatcatgaagcatggccaacaaaacatgttatccaatgaaacaaaaacccccacacttattcctaaaacaattccaaagctccaaaattccttaaggatatggtgatatcatggtttttcacttaaggcttgtagtgagcttcaaaacaaggaaagggaaacaaggctcaaaagggctatcaaaggaattaagtcaaggtaagtccatttggctagaagcttataagaacaaaattgcctcaatcgtattcaaatatg

SEQ ID NO: 171566 - DNA, 537 bp, Glycine max
tagctggaaaacgaattgaaatacttgacttaagcacacaatacaaagaatagtttgcactataatcagaaggtacggtcaaaagagtattctttatgaaatatttttttttatgagtcattgaactatagagtatcaccatcgctaagaacaagaatctcaaacaaccatactatctatgcaattaaggcaaaacaccatactactaacatacccaaaattataaggttcttataataagtatacaacgtacatataagaagtaagaatttaatagctaatacggatgtattaaaaaaattacaaacttcaactactacattcatgactacacacaaaataaagtgagttaagtagtcatgcgtttacacatcaagaaagacatactcatccaagacatatatatggttcaaaaggtttttacaacactaatccacacatcaagatagaaataagtttattaaccacatacaccgcagaagataagggctcattaagcattatccacccatatcaaggctttttgcatcacttaac

SEQ ID NO: 171567 - DNA, 583 bp, Glycine max
tcacttcaattggtgcatgctaatatctggggaccatcaagtacccctagctttggtggaagaagatatttttccctcttcgttgatgactacacctgaatgatgtgggtgtacttcatccaacaaaaatctgatgcattctctagcttcaaggagtacaaggccttagtggaaaagcaaagtgggcattccctcaaaatcttgagaacaaatcgtgggggagaattcaatgggcacatattcatcaatttttgcaatgatcatggcatcaagaaggagctgactgttcgtcacactccacaacagaatggtgtcgctgaaaggaaaaatagaaccattgtggaaatggcttgattgatgctacaacacaagaacctgccaaagaatctatgggcgaaagctgttagcatagcagtatacattctcaaccgttctccaactaaagaaatcttaaatttgacgccatatgaagcatggttcaacagaaaaccaacagttgatctttttaaagttttgggatgtgttgcttattcgcacttcccaaggagaaccgattaaagctttttgaaaaaggagaaaaatg

SEQ ID NO: 171568 - DNA, 450 bp, Glycine max
agcttagagccaattcaaacgacaataactttttactcagatgtctgattgaggcccgtcatatatcgagacgctcgaaattgaatgttgaagctctgagccaattcaaacgaccataactttttactcggatgtctgattgagtcccgccatatatcgagacgctcaaaattgaatgttgaagctcagagccaattcaaacgacaataactttttactcggatgtctgattgagtcccgtcatatatcgagacgctcgaaattgaatgttgaagctctgagccaattcaaacgacaataactttttactcggatgtctgattgagtcctcgaatatatcgagacgctcgaaattgaatgttgaagctctgaaccaattcaaacgacaataactttttactcggatgtctgattgagccccgtcatatatcgagacgctcgaaattggaa

SEQ ID NO: 171569 - DNA, 375 bp, Glycine max
tcaacattcaattttgagcgtctcgttatattacgggactctatcagacattcgagtgaggagttattgacgatcggattggctcaaagactcaacattcaatgtccagcgtatcgatgtgttactggactcaatcacacatccgagtaagaagttattgtcgatcgaatttgctcataacttcaacattcaatttcgagcgcctcgctctattacgggcctcagtcagacatccgagtaaaaagttattgtcgatcgaactggctcaaagcttaaacattcaatttcgagcgtctcgatctatcacgagtgtctttcgcacatccgaggccagaggaattgtccccagaattggcgtacatgctgacattcaac

SEQ ID NO: 171570 - DNA, 446 bp, Glycine max
agcttggagaggatgcttcaatggaggaaaagaaagagggagagaaagagataggggaagcacgaaattgaaggaataaaagagggagagaagtggaactttgaagtatgtctcacaatactctcattcatcaaaggtacaacaagggttggtacacatgcttctatttatagactaagtagcttccttgagaagatttcttgagaaaacttccttgagaagcttatttgaaaaaactttcttgagaagctagagcttagctacaaagacccctttcataacaaagctcacctccttgagaagcttccttaagaagattcctaaagaaactagagcttagcgacacacacctctctaatagctaagctcaccttcttgagatgagaagctagagcttagctacacaccccctataatagctaagctcacccccatgacaaaaaaca

SEQ ID NO: 171571 - DNA, 145 bp, Glycine max
tgcactatcacacatgtgatcattagcaacatttagtaaaaagttcctaagatcttttgacaacatttaaaaaatgttgccaaatatgaataaatgttactaatatgtttttgcagcagatgcgtaaacccttgctgtgactgcc

SEQ ID NO: 171572 - DNA, 571 bp, Glycine max
agcttatggtaaaactaacagcaatggaaagtacagtttcactgttgaaggctttgactatgtgaaaaatggagcctcagactgcaagggtaaactccatgctccttctaaggattcacgctgtttcatacccaccaagcttaatgagggaaccaaactgaaggtgaagtccaaggataaaaatgaaggtgcgctcagagcttaaccatttgcttatgctcctgaaaagccatatgattgcgaaaagtccaatcccaagcctttccctacttcttatgacaaaccatattattagaactctaccccaccccctttacccttaccgcacccacaccctccttactactataagtcaccacctccaccaccatcaacatactattacaaatctcctcccccaccttcttattactacaagagcccttcttcaccatcaccatcaccttctccatattactataaatctcccccgccaccatcaccatcaccacctttaccctactactattaaatctcccctcctccccacaaagatccataccatcctccttactactacaaggcaccctcc

SEQ ID NO: 171573 - DNA, 357 bp, Glycine max
atgtgtgggcaccacttgtgatgaaggaagatccggtcataagagggcctttaatctcatgcacatatattgaattgtactaatatggcgtacttcacatacgctgaaatagcagccaatcttgggcgctaatcaatcaatggttgttctacactctataaccgatctagtgtcactagaacttgctcactgcttaatgaactaagatccggctccatcgccaaacatcctatccaaacaactcagcttacaaagagaatgactgtcattcagtgaacatgcatgtataccaaaaactaaccattactaactatccagagcttcttatacagggatcgagcggagttcttaatcggc

SEQ ID NO: 171574 - DNA, 292 bp, Glycine max
  unsure (1)..(292): unsure at all n locations
agctttgaagntagatatattttattattataatacatgtttatctatttgttaagtatattttgtagttagttaattgagacttatgggtgtatatcaatgtttatacttactattttgattaggttagtgcgtgtatactacctaaggttattggtcgagaccgtacccgaatcaaataaacattaaaaatacagtatctaggaagtgatcctaggtcatttcccaacgagcaatgatcaaccaaacattcataacagataatagtgaaacagtaacgaattgggggggg

SEQ ID NO: 171575 - DNA, 586 bp, Glycine max
tgatgatgttattaaaggctttgcactacctctggcagtaacagtgacaaagatgatcataagtacgtttacaacttgacatcaaattttacttgagattttataatttctgatacttggttcacttggacataacagtggggagcaattgatggaagatgaatctcaaattgatctaaggagaaggaagaaacttgttcttgatggtgatttggaaagacaaatcaaagatctccatgagaagtaggtttgaccagatcaaacttttgtctgaactttggagcatgatttaaattagagccttgtcaaaaagaaattcagtcttttttatttcattttgtttacatcattggtacaaacattcttaaaaggagtgagcaagatagatcaattcatagcttttcaatattttgttgaatatcattatttgtactgtatttcaattcatagcttttcttgtactaatttaacccgagtttaataaattccaaaaattaaaaaaaaaatctccatattctacatcggttcaattataaacgatgtagaacatatcctcattctacatcggttaggcaataaacgatgt

SEQ ID NO: 171576 - DNA, 395 bp, Glycine max
agcttgccactggagctgacccatcaactgccctaactcttttagataggcgacccctcagctcttgaccttgacttgatagaacctctttttaagcgaaggcatttgacttgaacccatgttttactaaagtgaacaaaaaatggggcgaatcaaaactccgacatctatcatgggcggaatggatgaatgcataaagaaatgcatatgacacagatgcaatttatgaatacgggagctcgggaaattgtctccttcttaaatacaacgtcttggggtagtaaagtgcccaacgtatgtatttaagaaggtgacacagaccctccggtggtttgttaaagagaggggatcaagacagaacccgtgcgtgatgcatatgcgaaaggcacaacaca

SEQ ID NO: 171577 - DNA, 446 bp, Glycine max
tacaatacccacgctttaccatatgtttatgtaagtcgcaatcaaagtgattatccatgctgcattgaatatagctgactgatggattacatatcacttaatgctccccagtcttactttctccgtgcggctgctgctattcttccttgctatcttatggcctggatgatccgcataatacagcatcaaaggcaaagacaagttactaccctgtgcttattctaatattgaagtatttgtattgctttcatttcattttttcctttttcatattttgattaatcatatgatgccgtttggtacgccacttaagatgataagatttaagtgaaagtaccaataggaatgccaacaacatatggtgcacatggcgtggtctctactaaaaaccttgaaagttgatagtgattgcggattaagattttagagatgggaaatgcttttgt

SEQ ID NO: 171578 - DNA, 420 bp, Glycine max
agcttgccacccagctcgcccaggcgagctcatctcgcccaagcgagcaaggttgcttcctccagaagcaacagccttctggaggaatcttctggagggcccaagtgggcctggttgctatttgcacccccatttttactaagtaccccccccctgcattttttttggtaattcttttttcgtaaagttacggaaacttacgaatttcgtaacgatacttgttttctttccgtaatgttacggaaccttgtggattacataatcatcccctttttgacttacggaatgttacggaacctcactaatcgtgcaacgatgcttccatttgatttctggggtgtcacggaaccttacggattgcgcatcaatttttcttttcttttttggcatgtcccggaatttcacaaattgcctaatgat

SEQ ID NO: 171579 - DNA, 588 bp, Glycine max
ttggtcaattctgccatctcgagggtcaaattaagcttggaagtcaaaacctctgcacttgaataattgggctttgttttgtgtaattagttagattagatgggcctaatcaaggcccatacatcacttctaatttatcactctatatattagtgttttttagttagttagttacttcatattgtaaaaaacaaaattagttacttattgtgcaagcttccttttttctctccttttctctcaattgttcttcattcttcttcatctcttcacttccgctcttccattttcttgcacaaaatttcatgtcttttcattggtgatgatcatggagggctaaacaattaatcaatccaaggatccactccaagcaaggctgaattttgagttctggtttagtatctttactctttgtgaatgttcatctttctcttcaatcctattttcatttttcattattgtgattatgtttaggattgaaaatgaattaagttatggattcatttcctaattcagaatttaatcacagattgtttggatgatgttccatttgattgaactttttctaatgcatttgactgaactttc

SEQ ID NO: 171580 - DNA, 522 bp, Glycine max
agctttaacctcatcgtctctcacagtctttatatttgggagccaatccagtccttgtgttcggactctcagccacttatgatagccgccgatgatcccattactgcttcccctaagctctctgtcctttcttcacgccgcatcccctgccttgcgaactccttggagtaccctcgcgttgtggtcactgaaacctcgtgcgatgaaaggcgtgatgctttcgtctgatggcactcctttcatgggacatccttcgcatgaagatagaatcctgattcttccttccttctaacgagggaaccatttaacagacgcccctccatgctagccaagagttggtgcacaacaaacaattcttgcgccgctctttttacatccccggtcgaacgtgtcatacatggccaaaatggcgacgaccgggcttttcttgccatgatgaaaggcgaggaaagcgtcaatcgctgctatgtccactaaccctttcatattcggaaagaagacaactccaaagatcataagcgc

SEQ ID NO: 171581 - DNA, 576 bp, Glycine max
  unsure (1)..(576): unsure at all n locations
ttgcagatttggtcttcgccagcgaaaggatcaatgtgggtccgaaaagaggcaaatttgatcatcctactaggacgactgagaaaactggggcaaataaagagggtgaggatgagggagaaacccatgctgtgactgccattcctgtacgaccaagtttcccaccaacccaacaatatctttactcatccaataaactttctccttacccaccacccagttatccacaaaggccatccctaaatcaaccacaaagtctgtctaccgcacttccaatgacgaagaccacctttagcacaaaccannnaaaaaaaaaaaaaaaaaacctccaacaagaagtgaattttgcagcgagaaagcctgtagaattcaccccaattccagtgtcctatgctgacttgctcccatatctacttgataattcaatggtaaccataaccctagccaaggttcatcaacctccatttctccgagaatacgactcaaacgcaacgtgtgcttatcgtggaggagccctacggcattccattgaacattgtatgaccccgaagcataaagtgtgaagtctaattgata

SEQ ID NO: 171582 - DNA, 509 bp, Glycine max
agcttctcttagaccttaggcaaaccttcaactcatccttcaagatcaaactgtctactcgtgattggtacctctcccctctcttgagcttaagctcgctgttactgccccacagagcccctcagaattttttgcggccgtgttcttccctacgagcccttttggtctcttgttccaaggccttggtggtagctatatttacatctctcagttcggcattctcctttcggatcttaagatctgttgctttgaacctttctttgactgtttgggcttgctcgacttttgccctaagggcctgcacctcctcctcttcctcaggggccctaacttccttccctttaaccgctttcacaccaccgaaccaaaccacacctttctttggggcttccaacccctttgagatccactcgcggaccccttgttgtttcctaactccctcctcgcccctttaggctaccccccacgcttgccatacgttctccttactcccccccttgtacccccca

SEQ ID NO: 171583 - DNA, 465 bp, Glycine max
caccatcttttcataggagaacactggtgatgtgactactatcacagttatgatcgaccttttcatcattgggggtgccacctgtgctgccagggctctccaccattgggcgtatgatttgcaagattcatgcccctttttgcacatgttctgtagttgcatcctacgcggagccatatcccaatgatactgatactgcctaacaaaggcaaccattaggtccttccaaaaatggactcgagaaggtaccaagttagtgtaccacgtaacaactaccccagtaagactctctcggaagaaatgcctcagcagatcctggtcttttgcgtagtcccccatcttctaaaaatacatctttatatggttcttggggaaaggagtccccttggtcttgtctaagtccgacaccttgaacttgggaatgaccatgtttgtgtgctacgaacaactcttctatgttagtaa

SEQ ID NO: 171584 - DNA, 508 bp, Glycine max
agcttgaagaggatgctttaatggaggaaaaaaaagagagaaggggggagcacgaaattgaaggaataaaagagggaaagaagtggaactttgaagtgtatctcataagactttcattcatcaaagttacaacaagtgttacacatgcttctatttatagactaggtcgcttccttgagaagctttcttaagaaaacttccttgagaagctttcttaagaaaacttccttgagaagctttcttaagaaaacttccttgagaagtttctttgagaagctagagcttagctacacacccctataatggctaagctcacccccatgacaaaaaaacatgaaaatacaaaaacaatcctactacaaagactactcaaaatgccctgaaatacaaggctaaaaccctatactactagaatggccaaaatacaaggcccaaaataagaaaacaacctattttactatttacaaagaagagtggacccaaccttggcccatgcgctcaaaaatct

SEQ ID NO: 171585 - DNA, 658 bp, Glycine max
ttaaataaaaggtttcactcttttttttttctattattttattcaagctctgccacatgtccctatttgattggagcaaaaagggcccactttctctttttgactgtgacccatactcaatcacaaaagtggggaaaatttgacctctgaaacgctaaaatcctgcctcggtttgcgtgccgtttctctggttccagtttctcgcgtttctctgcgtccgtcggggccagttttcgaaagtaagcaatatatatatcaaaacgctcacaataaaaccccgagcgtggttcagaggttggtttcgttaaattctaagtcgcacgcaaaacgatgatttttaactaattaattaagaattaacccataacctcccagttatggatttctctcccttaattagtccagcccgcatatcttgcccccactattcctatttctaccaagaacatatctatacatatacacggaacaatacttatatatatatatataatcattcaaaatacatcgtttccgtaaactccgggtagaaatttccaggatgttacacactgcgcccccaaatgcgcaagtaaggagagaagattttcaagctctcgtgtccgtaaatgcattcatatcatgcattgcataagcatttctttatggcatcataatg

SEQ ID NO: 171586 - DNA, 463 bp, Glycine max
agcttgtaactaacacgtgtataaaagtctactcaaaggaaataaagtcaggcagaaagttaaccctagttcttaaggaggaagccttgccctcgaaattaaggcccatactctcttttctctctccctccctcactcgtcttcttctctctctccttccccaccatcagcgtctgtctctaacatccaatgtaaattgctagctaattgctcttgcataataaatacatataatcaatccaagggttcattcattttaaaattgagtaaaattaatttaattaatcattaaatgtaggttgaaaccaataaatgcatatatttttaagagaattataaaatttcttacagcaaattttataatattttcttgttgcagtacattattcatgttattttaaaattaacaaaccaacattatcgttaaaaaaaaaactccagattgatctcattttctcataat

SEQ ID NO: 171587 - DNA, 690 bp, Glycine max
tgcttctacaacttgattaagaacctgtatgatatttaccagaagcctgttgttgtgggatgggactaaattgtagatgcatccttcttcttaacatattttgatgtaaatgaaataatatcaagtgacaaatgtttgaacatagctatactagagttgtggattatgtaagtaaattccatatcattgactaataattaatattctttatgatatacatgattaccaattttcatttgaaatgttcaaaataggtttatgcatgagtggagttcaagcttaggtcatggttcggtgtatggattccttgagcttcagttcatacacaatgcaaaggatagacatgttgaatgtcaacattacgttgaaacatgggtgaaggattcccaacgagaggtctacctacgagcttacttgaatcaataagtaagatttatgaaattcctgtaaagaatatttgcattatacgtacctaattattatcgaattcaaggcccattggcagttggttgttctatgtcttacgaacaatgttgctgtctggttttgttcgttgaataagaagcttgatattcatatcaaagctgcaattaacaagttaaagttttgtattataacctaattaatctaacctaaactggatagaaaaattgtgttttcttcgattataccttggtgtttttttcctac

SEQ ID NO: 171588 - DNA, 743 bp, Glycine max
cccctgtttttttttattaaagacgaactcggcctaacggggccccgttttttaaaataagggtgcacgccgataactttgaaaggtttttcagataaagccttcattcatccaaatcaactccagtggttcgcctcaattccaactttttgcccactgaacctccttgagaaactatttgtattaacaagttcttttataacctttcctattaaagccttcctgagaaaccttcttaaaacatctgccttgaacagctttttcgtaacctaaaacctacatcctcaccccctaataggttgaaatcacccccttggtacttacctgatagtgcagaaccactccttttccctcaacttccctttttgcctgataatccacgcgcaacaccctttctcacttcaatgggcccaacacaaggccccacttttaaatccaaccttttcttttttttctcacaaaaaagggtcccctcctttgcctcgcgggtccaacacctacccttccgtttcgtgaacacacaacggctttcttttaacattctccccctcctcttgcggcccctcgttactgcccctggaacggccctttctccgggagcctcccttttttcttacctctcctattctcgcagagcctcctttctactccctcatctcactcttccctctctcgccctgactcctctcctccaactgcactcccccactctagcctctccgccactctccgtccccttctcc

SEQ ID NO: 171589 - DNA, 354 bp, Glycine max
cggttcgaggtacttacccgttgaagatcgaagaacgatgaataacgaatgaagaacgtcgaagaacggttgaaacctttgcgagattcctcacggaaaacgttacggaaatgtttcggaagcgcctcggcttagattttcttcacggaaacaatttttccaagcaaattcgaaagagagagaagtgcctaaggggctgagatcctttccttcttcacttcctcccctatttatagcaaaataggggaggtggttgtctgccattttatataaaagagctcgtaatgaacccccgaacgtggttcatacgttggtttgcattgcttctaatgcgcccgcccaacgatgattttt

SEQ ID NO: 171590 - DNA, 216 bp, Glycine max
agcttctgttttcaattctgagaatctcgatatatttcgggattcattaggacatccgggtaaaaagttattgtcgtttgaatttgctcacagcttctaattttaattttgagcgtctcgatatattacgggacttaattggacgtcccagtgaaaagctattgggggttggataagctaccaactttcctcttgaattcccagcattccgttttc

SEQ ID NO: 171591 - DNA, 367 bp, Glycine max
ctaagctcttactcggatgtccgattgagtcccgtagatatatcgagatgctttttttgaaaatagtagctcctagcaaattcgaaccataataactttttactcggatgtccgattgtgccccgtagtatatcgtgacgctcgaaattgaaaacataaggtctgagcaaattcaaacgtcaataactttgtactcagatgtccaattgagtcccgtaatatatcgagatgctccaaattgaaaatagtaggttcttgcaaattcaaaccataataactttttactcggatgtctgattgagtcccgtactatatcgagacgctcgaaatggaaaaatgaggctctgagcaaattcaagcgacttta

SEQ ID NO: 171592 - DNA, 338 bp, Glycine max
agcttaagagattacaattcaatcaattggatgtgtgtattgttgtatcccctaaataaattcattagttcatacaaagtttaatgcatccgttatcataaaaaacaaagattttgagggaccttgcattgttcaatgtcttaagttctaacaatgtcgtcgtagagctaaacaacagtgagaacccaacctttgcacatgaatgaagtggcaacaacaattgttgcaggcattgcaacgaagttatggatctgatttgttatctagttttttatctgctatgtgtttttggatctgagattttttgttggtgccggctttcttgatctatcattttt

SEQ ID NO: 171593 - DNA, 644 bp, Glycine max
tatcaatgcaaggaattaacacaagacttgagactagaattgaaaaattttacactcataaaaactaaattaatattgaagtctttatgaaaatttaaaacattctcatttaaccttaatttttattaaaataaagtctatcgaatgaaatattttttatccctactatttttttctagttccttctccgtttcaaactatatattatgatagttttaattattggatttttaaattttgtaggtgtgattgttgaacttatgtgttatattgcaaattttaaatcatattgaactttagcctatgtgataatgataataataatacaattcttcctgatttttgctttcactcaaactaaattttgattggattgaattacagattttatcaaattcaacccagatacccacctatatgattgatgaatgttgacaagatgggtctaactattttaaatatgtaatgaatattagttcctcttttacttgagtgctaaagtccggatcagaggaaaatgattacatatgaccctggatgtcagtatctagatatattaacaaattatataaaacagcaggacataatttccattaaaaaatatatgttttattaaattaagcagataccatagctttaaccca

SEQ ID NO: 171594 - DNA, 546 bp, Glycine max
agcttctaatactttgtgctgcaattgcaacactgccacaattgctttctcttctgcagatagagaataagtgagaggaggtgctttgatgtcattaaaggaaggccatcctgaagctgttgaagagacgccagctttgggaaaatctttatcattattcattacaccctatagtcctataccacgactgactacttttagttactctgccttcaacttcagttaatttgtgcagtcaactggacaataaaattccaaagtctgataaaagaaacaagaccagatatctcacactctataactctgttttcaaccatcctgcacagaatgccaatcaattattataaaaaaaacacacagaaattggaattgattatgcaaaagaattaaatcacaaagaagtttctggaattaccactggtttccaaattgtcaagagctgtaatggtattggaacttgtttcataaaagctttggttcaaaacaaactgcatatacatgtataattatgattattaatttcaaatttttccacgcaagagattt

SEQ ID NO: 171595 - DNA, 470 bp, Glycine max
tgacaggtttaggtgcaggtgctgctactggtggaggcacttgaatttggttgccagacctcaaggtgatggcactcacatttttcggattctgcacagtctgtgaaggaaatttgtcaaaattttgggactgagcttggttcaactgagtagccatctgcccatctgatttgtcagactctgaatggaggctcttggctcttgctgaaattgcatattctggaaggtcattttccttactaactcctctaaagaaggttgaggaggagcctcagttgcttgttgtctttgttgtgaccggtgttgttgctgctactgtattggagggggaacatatggcttgctttgacccccaccattttaaaaaagagggacacattgttgttgttgtggaagacatttccctctcaaatttggatgattccttcaacctggattggatctatttcttgaaaggccataattattct

SEQ ID NO: 171596 - DNA, 474 bp, Glycine max
cgcttatgcgcatatttccttacaaacgttctctcgaaaaaaatgcacccatatacaatcaaggcagcttcgttacctagattatttacacgtacttccaaggtgtatttgttacttacatcacacacatctccttggctaaattcacataccatgcatacccaaagcattttggggtaccaaaaattgcacatgtgcacatcttggtatctctaatacctatacatacacaaacttcatgatgaatcttgactatctacacaataaggggctacatttcatgctcttttcaagtttttgctacctaaagccgcatgcaaattcaagtatattttcctttgctgactaaaattgtattcaaattaaaaggtatacattttttggtaatgtatcttctttacataacatgcaacatatttatgtatatttttttgcgagacatcttgactaccaaaaactatatgtacatacatc

SEQ ID NO: 171597 - DNA, 561 bp, Glycine max
tgtagaatggctagacatgatacatgtcagggcttggtttggttcaaggataaaagggatgccccacattatttccatgacacaaatgcaaaaaatgatgatttggaaattttatgcaaaactggtcatgcatgcgcctatgcaaacgctcaagtgtcaaatttttatggtcatgtgatgctagggctcaggattcatttcctctattttaaatcaacccaatgtttccaaaatatgttcttttatcgatttgtgcattcctccaagtccatttcgggcgtccggggaaattttcacagcattcacccttcaggtgtagacacgtttttttcttcaaaaatcggttatgatcaatgatttttttttttttcaaagaaaagttggaaatcatctcttttcaaaagcatgtcggtttttagctagacaacttattttctctttttccacctttttccttacttgctttctttttttccttatttgctctctttttctttacttgctctcttcatttaccttttgatctcttttccattcattcatctcatttttttctttttc

SEQ ID NO: 171598 - DNA, 380 bp, Glycine max
  unsure (1)..(380): unsure at all n locations
agcttgagtcatccttaagttcaactttgcgaggctgataatagttgtattgatttaatggttccagttttcaaaattaagttgaaggtttataatttgtagtttctaaagtaagcattagaaattagaaaaaactgtcttgatctgttttaatcccagttgttgtagttgaataaattggttaaactattgtattccatgatatgtctttgcagttcccatttttgcatttaggtgataaagaatttattcatttgagttgcacagctttaccagtaccaacagtccaacaccatcaggccctactaacctggaagctgtgcatttgttctttttattattgntgntggagacaagtgatttggttatctccatttttt

SEQ ID NO: 171599 - DNA, 555 bp, Glycine max
gggttaaagtctcacgattgtcacatgctcatgcaataattgttagtcgtggctatacgagacatcttgccaaacaaagtcaggttagccataactcgcccgtgcttttccttccatgctatatgtagcaaagtcattgatcctgtcaagtttgatgagctggaaaatgaggccgcaattatactgtgccagttggagatgtattttccccctgctttctttgacattatgattcactttattgtgcatctggtcagagaaatcaaatgttgtggtcctgttcatacacataattcaaattcattaatatgtaatgcatatattggatgaaagctttgaaaatggaacttatggcagttcatcttaaattgttgcaggtactcttacttcttcggatactgttcattcttccaagcaggtactcttccttcttcagatattgttccttcttcctagtgtctaattcttgactcattttgtatggtgtactatatgatgatgtaaatgggaatatggtttctaaacagtttttatacccgttttttgtttatgttc

SEQ ID NO: 171600 - DNA, 393 bp, Glycine max
agcttgtatcttatactaaaataatcatatattgcattcaaataaagcaatataggacaacaaggatgtatctatacagtgctcaagtgagaaatataaaaacctgatggcaatctctccttgttgagaaacaagagttgctagttgattaaagatgttgctgagctcatgaatagtggactcaacattctgaagagcttcagctctgttttgcatgtaactgtcttgcaatggaactacctcttgctgctgctgctgctgttgcagcaatggttgactctccccatccacctgcttcctgtggatttaaaaggccatagaataaattatgtgagagcataatttcagatataaattcatcacaaccttaatattggagaataaccaaaattt

SEQ ID NO: 171601 - DNA, 650 bp, Glycine max
tgtcatttccactaatagttgtatgccatattaaagggcaaaatttgtatgaagaccatgaagtatatgcaagttgtaattttctgtgtgctaagcaagtgtgaagagacttttttttctaaattttccattcaaccaaacactccctaaatgtagatgataagatggagaaaatgttggttgcttcccttttgtcataagactgtaagaagctaggcattatcatcataagttatacacatgaaatgactgggtaggtgtttgctttcacttttatcatatagccagtgttattttcagcattaataataatcaatgaattgctacaaaagatagcaaagcttcatgtctaaatttttgttcatgaatcttatcagtgatagttgtccttccaggttgtcaaggaaaaccagatactacataaaggtgataggataattgatagcgatattgaatttgctaccctcgcagatgtgaacatatttgctggagatcaggttattgtgagggactctgagatccatgaaaatcgagatattgttggtaagctatttgatagtgccgtagtggcaatgtgggttgccattctattatgttattccaataggttacattagggaacatgcaataatctttttgatctccataaa

SEQ ID NO: 171602 - DNA, 857 bp, Glycine max
  unsure (1)..(857): unsure at all n locations
caccccgtgaccttccatgagacggcccccctctatttaagacctccacgcctgcaagcttaatagttacaattttttttgggggattttgtttttttgcctcccctacatagaggtgttgattccttccaagtttaccgccttcgttgttccttaaatgaaactcttgcgctggcatgagatgtcaacgtgggtacccatttataatcgggctcagtaaaggctccccgctctgggagaaaacccactcattgaggatttctcgcctgcgcgaaaaaactggtcttcgaattgctccccacccacaagagggcgatttgttaaacatattgctggaaaaaacatcttatttttgcactaaaaatgtataacccaaacttcgtcgtctaaaggcccttaaaaattcgcgctcaacttcccgggtcattgttgagaaacttgcaccccaccgtttcctgttattttataatgccgagggaggccactacaactttagagaaggtccaaaggttccctcctgattgagggattaccactttggggaagggcaaaactttggcccatccaaaatttttctcaccaaagaaggttgcaataccatctcagggacctccccccaattcgggaacacttccccaattctccactcaatttgtttggcccccctcgagcatcgcaagaaagcttgatctcacctccctgcgggggtctttcaccgcccccacgggcttttaatcgcgatacctcaccttcgcctctaaatatataaaggggtggcgcctcttcgcaatctatttaattgtgtttctccccacccctccggatatcccnctgggcgtgtggagggcttatatttc

SEQ ID NO: 171603 - DNA, 912 bp, Glycine max
  unsure (1)..(912): unsure at all n locations
catactgcccgaggacgcaaatgggttggaggcgttttcatgcactacacagaggactgtggcacgagaaaagtgtctaactgatgagagctggatgccaattactcataaagatgcatggcggccgcaagagtcaagactgactggcagcacacatgcagatatgatcatacctcgccgccacattaatggaatccgtgcatgagaaaagacggaacaggaagctgatcttgaaattccgaacggtcaaggcgcagacttgcgcacatgagtggctcatagtaagctgcgcccccaaagtctttcaagacacgcgaatcctggttcctaatcggattttgctcctaaggcactcgtgagaatgttcttcccccggaacggatgggaggaacagaacaccaggcgagaaaattgatcttaaggaaaaacagggactaaggggcttagcagcgtaacagttgatgggacccttcgcaatcgatggataaatacaaaaacggtgctcccgtttggaatccactcggctggaaatgcatttaaagcgacacaacgccttcctagcaaagaatgtggattcatattgggatacttggtgcgggaactaatcggttgaggcgcataaaggggaggccatgtaaaaatggtacgggcagggtatcttcaaccgtgcgacggcttttaatagtatggaaaagcgaactgaacctatatgccacctattgaataaacgagtggctgaacatgcgtactagaagggattatggtgagcgccaatgcgtttctatgacttgaaaatcacggtgcaacaggttttacgaaatatgactcttataaaacnttcacgaattcgaccacgattcatccgaaggtagccataccttgtgcgcatctgacgatatggggcgtcaaacg

SEQ ID NO: 171604 - DNA, 363 bp, Glycine max
gatggaatacttactggggggtgattaataaaagcgcaaaacggaatcaaaaaatgccaaaaggataaatcctatggctgcaaactcgcaaattccgtgggtatggcttttgaatggggggaaaataagtttttgaatgctaaaacggccccctttcattgatatttatattttggtgcaggggttgctcgcccaggcgagctcaactcgcccaggccagctcacctgcacttttttttttttttgagaggaacattaaccatgtccccttcttccttatggattagcgttttgcctatttgaccctacttaagatagaattaggcgttaattacttaaaaaaaaaccaacaatggtagtaaa

SEQ ID NO: 171605 - DNA, 568 bp, Glycine max
tgatcccttgtaagtttagactaatttaacccaaacttcgttcttagatccctcttgttggactaggcttgacttaaacaacattattaacacaacataataagaaaactaaatccctggtaatgtagttatttagtcctgcttctatcaagttctaaggaaacagtacatttctcaatgcctcaaaatcacctaacaatacacacaggtgggtgatcagaccaagagcatgcagtcattaagcattgaaagaaacattgaacacacaaaacataattaattacatatgagaagtaattacatcaactgttcattagaaatgctcaactagggtttttagccagtcatacaagaaaccctaatacaagtgagacagaaaatacagagcaattgttgctttacacatgaaaggggatacctcctcctattttggcaccttgttggaattcccctacggaagcttttatgttccacttttcttcattcagatatgttcaacgggaatatcgtttgccagaaagcgcacccgattgttaagttttaaaaattaaaaaggatgaatcccaat

SEQ ID NO: 171606 - DNA, 95 bp, Glycine max
gaacgaaaactgttctagaaaattttttcttaaaagtgccatgaataaagaaggcggcttttactaatataacctattacccgtcgtacagggat

SEQ ID NO: 171607 - DNA, 205 bp, Glycine max
acaatgctcaaatcttaaatgcatacttgaatctaaccacatgtatctgattcaaaaatactatttatgacccttgtgaatgtaaagccctctattagtcattcaatgaatggggctgatattactaaaacttaaacatttattaagttactaataaatcttccaattgtattcaatttaagcaaatatatatttgtctgaatta

SEQ ID NO: 171608 - DNA, 316 bp, Glycine max
aaacttatccaatatttctttttttcatcaataatacacccacaacttgtttgtggtgaattcggttgcgagaccctcagtgataaaccaaggaagctatcccccattgtggggacctcatgcctctgtcttattattctaattcacacacttttttcattttaacctatttcattgaattaccttctacccagccaatcctatatggattttatatagaaactaccgaaaaaattgcggctttatctttatttaaagagagaatctaccgaaaacgtcgctttcgaactgataggagtttttgttacagtaatga

SEQ ID NO: 171609 - DNA, 511 bp, Glycine max
tagagagggggagcacgaaattgaaggaggaaaaagagagagaacgtgaactttgagttgcgattcacaagactctcattgatcaaagttacaacaagtgggacacgatgctttatttatagacttggtagcttcctcgagaagctttcttgagaaaacttccatgagaagcatttttgagaaaacttccttggcaaactagagaggagctacacacaccctactcgtaactaagctcacctccttgagaagctaccttgagaaaattcctaaagaagctagagcttagctacacacacctttctaatagctaactcacctccttgagatgagaagctagagcttaactacacgccccctaaaatagctaagcttacccgcatgacaaaatacaggaaaaaacaaaaaaagttcctacttcaaagactactcaaaatgcctcgaaatacaaggctaaaaccctatacaactagaatggccaaaatacaaggcccaaacgaaagaaaaacct

SEQ ID NO: 171610 - DNA, 199 bp, Glycine max
gcttaagacctaaaggggatgggacctttttaggttttggagaggatcaataacaatgcctatatgttggacctcccaaaagaggatggagtcagcaccacttttaacatttctgaattaaattcttttgcaggtggagctgctattgaggaggaggaactaacagatttgagggccaattctttttaaggagaagggg

SEQ ID NO: 171611 - DNA, 567 bp, Glycine max
tgcttttacaaaatatgaaatgtgaccctttttcatgcaattaatgacatgttttttcatttttcctagaatacaccatggtcctttctttttgaaaccttagttgggttcaccccttttgaagatacaaactgagttttctttgaaaaggagatttgtttgttatatgacaagtcggtcttatctgtagtatgcttttgcatactgagcatgcaattaagatcactatttcctttgtttgaattttcaaacaaatctttaaggtaggaaagctcagtttgcaaaaatttgtaatcatccatgttaaaagaagtagaggtatatttacaagtagtgggcttaaatcttgaaacaagcttttcattttcttgcttcagtttgttcagcttttcttgtgttaaaggcaatttattgacatgcaattttagattactttttaaatttttgtttaaaacagaaaacctttgagctctctcatgcattttattaaatggcttttaaaagttcttcaaagtatgaatttaacttaatgttttcacttgttgacagattatttatggaattttg

SEQ ID NO: 171612 - DNA, 337 bp, Glycine max
agcttgagattgatcaacggaaagtctcgagaaatacaaatggtcataattttcactcacaagtctgattcaggcgccaaacatatcgagacgcttaaaattgaacaacggaagctatcgagaaattcaaatggccataacatttcactcggatgtctgattaagccacataatatatcgagacgcttgaaattgaacaacggaagctgtcaagaaattcaaatgctcataacttttcactcggatgtccgattcaggcgcataatatgtttagacgctcgaaattgatcaacggaagctctagagaagtcaaggggtcattatttttcacacggat

SEQ ID NO: 171613 - DNA, 369 bp, Glycine max
tctgttgttcagtttcgagcatctcgatacattatgcgccttaatcggacattcgagtgaaaagttatgaccatttggatttctcgagagctttcgtagtccaattttgagcatctcgatatattaactccccgaaccagacatcggggtgaaaagttatgaccacttgaattctcgagagcttccggtgcttaatttcgagcttctcgatatgttatgcgattatatcgaacatccgacggagacgctatgatagatttaaattctcgagagcttccgctgatcaaatactagcgtcaagatatgttgtgcgtctgaatcggacatctcagggaaaagttctgaccatttgactttctcgagagcttc

SEQ ID NO: 171614 - DNA, 254 bp, Glycine max
agcttgaccagtcccgacccaacccgggcatagtcggtcagtgagaacctgtgatgtacctaaacaggcgagctcctggcagtcaacagataaaaggaacaaagaccacaaagcaagggggcttgtggtggctggccagctgtgaaacttgattgatatgtgagatatggcctttggtaatcgattaccaagggtgggtaattgattacaaggcttaaaaatgaagacatgaggctaagatggtctctggtaat

SEQ ID NO: 171615 - DNA, 371 bp, Glycine max
ttgcctgtagcagttccttgatcaactccaagttgcttaaagacaaaagaattatagtaagttttggtagaaatgcagtagtgacataataagtgcattagtgacacacttcttttaatcttggccatgtatctccaaaagtagatatgggtattctggtcatcaactagtacataataagggcattagtgacacttcttttaatcttcctatcaaaaacgctttttgagctataataagtcatggatcctgctgagaaaatgattgagtcttatggggttgttggttggatagcagaaacagaacatgccatctcttcaataagaactgtttattcatatgtttatgggctttgcaaaggggttggtgtt

SEQ ID NO: 171616 - DNA, 259 bp, Glycine max
gagcttagttattagaggggtgtgtgtaactaagctatagcttctcaaggaagttttctcaaagaagcttctcaaggaaggtttctcaacaaagcttctcaaggaagctacctaatctataaatagaagcatgcggaacacttattgtaactttgatgaatgagattcttgtgagacatacttcaaaagtccacttttctcccttttttattccttcaatttcgggctcccccctttctctttctctccctctttcttt

SEQ ID NO: 171617 - DNA, 572 bp, Glycine max
tgcttgtacaatagtatgaaatgagacccttttttatgcaataatgacatgtcttttcatttttcctagaatacaccatgttccttctttttgagaccttacttgggttcaccccttttgaggatacaaactgagttttctttgaaaaggagatttgttcgttatatgacaagtcggccttatctgtagtatgcttttgcatactgagcatgcaattaagatcactattccctttgtttgattttccaaacaaatctttaaggtaggaaagctcagtttgcaaaaatttgtaatcatccatgttaaaggaagtagaggtatcatcacaagtagtggctttacatcttgaaacaagcttcttatttttttgcttcagtttgttcagctcttcttgggttaaagctaatttattgacatgcaattttaacttacttttcaaatttttgttaataacagaaagtcttttgaactttcttatgcatttcattaaatgcttctaaaaggtcttccaagtcagaaattacctcaatttttttaatttgttgactaaatcaattatggattttggcatt

SEQ ID NO: 171618 - DNA, 353 bp, Glycine max
gaaagacagtgaagtgtcttaagactgacaatggcttgaaattctgtaaaggtgaaggcattgcaagacagtgtgttgtacactatactctatagtagaatggagtagttgaaaaaatgaacagaacctcgttagaaagggccagatgcatactatccaatataaggttgaataggagttttggggctaaggtagttagcacaacatgttatctcatgaattgctcaccgtccactggcatagatttcaggacccctattgaggtatgatctaacaaacttacttaatattcaatgttgaagatggtttgatttcccacatactatcatgtaaataaaggtaagctagagccc

SEQ ID NO: 171619 - DNA, 234 bp, Glycine max
tcccagttatagagagctaaatcctctgatgggttttccttgtaggtacttgatgcaaatacatgtatatctagctaacgatgttttatgtgttctctgcgctatcagtatgtcatttcagtgtgttttttgccttgatcatgcagatgcatgctttgttacgatctttcaacagtacaaactgccctgattcttacaacttgatatgacatggctagtttatcgtattatcac

SEQ ID NO: 171620 - DNA, 394 bp, Glycine max
gaactgcacccatgcacgcttttacaaaaggtttgtcccatatttttctatacttgtagcaccactcattgagccggtgaggaaccatgttccttcataggaacatgcccaggaaatgggttttcagaccttaccttacttcaacataccaaacaccactaatacctatgggttttcagaccttaccttacttcaagaaccttgggatttgaggtcaaatccttttcaagggggagggaatgatgtaatcctacctcgcaaggccaaagatgcaagaaaaggccctaagggtctcatgagccttagggtagatttcaagcccatgggctacagatgagcccacttatctttttacatattaaattaagggttcataaattttggggcttctatt

SEQ ID NO: 171621 - DNA, 929 bp, Glycine max
  unsure (1)..(929): unsure at all n locations
ctcatcaaatatctagngacaagatactccattatctctcaccncacctactataccntctgtntcccatattgttcaccagatactgcagagatctcnnctattnanacacnnnnnacgagtgatgccctcctatcgaaccccccnatacataactaatccggcagctggctagaccatccctagaagcgtgtgcaacgtttgttgaaactctgatgaatgatagggttatgatactgactccacagttacacttccgtccctcttttattccatccaatgctgagctcaagcctgatctatttcttggcaccccattagaagcatgatctctgagccggttacgaaaggctcaccaagggggggaaactcccacttacagggcttaatccttaaagggagtggcgtcctcttacaacttttcctatggactcccgcggatctccataggggaaaatcaccacaaaaagaccccattgaagctcataaagtctacctacatagaagggccacaagcctttgcttccatcattatggttgagccccataaacccaggccaaggccgaaaatatttgcctaaagtgggccaaagagatctcaaggcatgttaagcaagagacacctgcacaaggcgtgactattcaattgaggcaccggggggtacgaatgcaaaagcttaccgtcgcttttaaaaaaaaaatggaatgggcttgcaccaagtgaattacatggaattccacacacccacatcagaaatcttctttctgcgttcgaaaatcacagaatactctaatacaagaacaagcttgctgccctaatataaagggctgaaaacttatattgtaggggtcactaccatcatgaggggcccccaatccaccccccaaatcattgaaactctaattgatacggacccagatatagggcg

SEQ ID NO: 171622 - DNA, 1131 bp, Glycine max
  unsure (1)..(1131): unsure at all n locations
gccgggcgcgtatcgccgacccnttnccccgctaccnacaacagtcctccaaccggtatcatgcgtcaaaccgnacccccaccccnccaggatgagaacatgtagaaccncccgnctctagaaaagaactcgccgcacgccaagccctgcaccaanaacacactaccgcacaagcgccgctgaggattttaattcactgcgaaganacctctcgttcaatctaaccagaggcgcaggcatgaggagacgccgctcaggaacatctaacaactgcaagagaaatgggcgacacccccgaagcgcactgcgaggccgggactctaaacctaaccacaactcagctacaaacggcttttccaaaccagcctgaaccatagaaaaggcggaggggggcaatgcccagtgatgccgttgcgcctcaaccctcacactaaggaagaaaggacgagggcgccttggccaaaaagaaccaaccccggaataaggaaagaacatctccncatcggggtgccttctggcaggacagcccctcatggtgccccaagagaggcactcactctaaaccctggcgagctccaaaatctttacttgctttggcgcggcacaaaacattctcctaaaaaactctcactagaacgccccctggttagaaacacaatacgcgcccggcacacttggttctgggggggtggggaatggacgtcgaaatcaccaccggcggaccaaacccccaaaccctttttaaagcaaggacatgcactggacgttaacggcaaaaacaggcggtcccttgatcaaccaaacggataggttctaagggacctccccaaaccccgcacaaaaaaaagtaagaacatggacgacaaacctacgacacccacctttgaccacacatctaggtccctaaggggcggttgcgatcttccaccaccactcgtagaaaccaacaacgccacccggcgcgggaggaaagacacatcactacaccccaaagataaaccggaacacaggtgcctacgaaatatcaatacccctcagcaacaccggaacacctcccacacaatatacgataagcgcggggggcgcgagatagcggcatccgcgcacactacgacgcaccccgcatcgccg

SEQ ID NO: 171623 - DNA, 1081 bp, Glycine max
  unsure (1)..(1081): unsure at all n locations
tggtgaacgcatgcatctacgnngacactattgtggtacattaagacccaccgtctgncatcgacatccgaaagcaatcntaagatgagcagggtagcggcgactcatttatttatggacattacgcagtagactctagagcattgacgaggagctgcatatcttcatcaccacgagagtcagcgttctcggcagcaaaccattctcttatctaaatacatggtaacatcgctgtctctcgactcacaccccttgattgggctctcgcggggtatcgtctcctactatgaaccacacctgacaagcgatgtcgcttcgcacacttcacgtatgccatgcgaggcactgtgaagaacaggacttctattagttacanagccgcgtcgatggagcctcttcgtgacataagaacgtaatcctacacttcttctgtagaatgttctctataaagtcaactgtaaatgcctgttgaatcaacttcaatgtgataccatcagatcattactcaaaaatgtaacgcaactccggtcgcctctgtacgtgtgaatgacaccctccgatctttatactatacacgctactcgcctgattcctaacgttcgctatccacctatggacgaacctatacctcaacacgattcagcttcacttagagctcacccgatataaaaatatatttctacgcccatatttacactcgccgcatatatcatccttaatgaaacctccattctgcttctatgccaattgatctaatggtaaccccattccttacccctgcttcggacaggcttactatcgaatatcctcaatctcggcctacgcgcatatacacgcgaaggtacatacacatccctagtcgcgcgcgtatatatgattccactcacgatattcactatcctcgaccatccctccgcgctaatgagacattacatacctaccgtactgatgttgtccacgattccgtacaagcatacatataaggctcgacccacggctgcaaaatcgcacacgctacgctctgcctatcgtcaaacacatattggctcccgcataacagtcgtgtgctctcggacgcccg

SEQ ID NO: 171624 - DNA, 312 bp, Glycine max
agcttgaaggtgtgtagctcacaatcttttcatagtaaaatactggtaatgtgtctactatcattggcatcatttttttttccggcattgaggtgccacttgagctgccaggtctctccacctttgggcgtattcttttgaaagactcgggccctctttttgcacatgttctgtagttgcatcctatccgaagccattataccgacattgcctaacgaaggcaaccattaggtccttccaagagtggactcgagaaggttccaggttggtgtaccaggtaacagctactccagtaagattttcttggaagga

SEQ ID NO: 171625 - DNA, 940 bp, Glycine max
  unsure (1)..(940): unsure at all n locations
tgttgctgttgaatcctacgttccttacatttttctctcatatgctatagccaatcctctctntgtctantactttntctagcttccnncncncggtgttctgtgctacctccgagncattgaaactatacaccaccctggcctcagactgtagatcatcacacaaagcaggctcaagttagctacacataggtctataggcgatggcgcctgagtacctctatgacataattgcaggaatgaggattcggttatattaatctcaactggtcatttatgtacctatttagacacttaaatgtcaaactcctattatcatgtgatgttagtgtttatgaattatttactctttatacaaccaacccaatgttttcaataaatgctcatttatcaaggtgagcatacgtttgacttcttttatgccgtacggggaagagcctaaacatacccccttaacgtgtttatacgatgtgtttctctgcaggaatatgatctttcaacgaccttattttcaaataaaacatgcaacctcatttataatctacaccaggaaggtttcatacaaccaacaacttattatctgtttatgcacctggtttcctaacttgtggtcgatactacttgaaattcctcttcattcttattatatacgccttttaacctcacttccggaattgcaccgatgcaaaagcacttgtgggtatcctatgcataaactcacgggggaccttatttttcacctataccttaagtccctgcttttttcaattagaaagatttccttccgttatccatttaaaatccaaatttttaccttccatagatacgatcttacctaattacactgacaccatacaacttttccgtctatgcacactgccataactgttcgctcattcattcaaatgtatcctctctccacactcacactctgattccg

SEQ ID NO: 171626 - DNA, 434 bp, Glycine max
  unsure (1)..(434): unsure at all n locations
agcttgtagaattatggggtacccatcacatgttgtactaagnggcggtcgggcgatggtgcacaacaagttttccacatccacaatgcgcgcataaacccaccatcccctgttgcccacctccaactgagctcacgtactcccacctagcccatatcctcgtttttctcaacaccgggtccccatcaatccttccaagctttcccaacatcaaagtaatacaacattcacacagcacaagctaccacagccaagcaaaacagagcaaaggcagaaaactctgccaaaacaccaaccaaaaatcacagctttttccacttcaaagaccccagtaacaattccttcgatccaattcgttaaccgttagatcgactccaaaattttactggaagtctatagtgcataagcctacattttgaccgttgggatctact

SEQ ID NO: 171627 - DNA, 413 bp, Glycine max
ttgcggatttgggtcttagccggagaaatgatcgaagtgggtctaataagaggaatatctgatcatcttgctttgataaatgcaaaaaaaatatctgcggctaatgaagagggtgaggatgaaggagaatcctgagctgtgactgccattcaagacagccaagttttctaccaacccaacgctgtatttacttagtcattaacaaaccttctccttacccaccgaccagttatccactaaggccattcttaaaatcaaccactaaggctagctaaccgcactttcgatgacaaacaccacctttagtgtaaaccgaaataccaaccaggaaatgaattttgcctttagaaagctttacaattcaccccaatttcagtgtcctatgctgacttgcttccatatctatttgataa

SEQ ID NO: 171628 - DNA, 423 bp, Glycine max
aagcttgttcgcacatcgttcgcgtgtatgatattcactccacaagggttgaagatgaggagaccttcaatcctattacgcaacgtggcggacaaaagtgggctgttaacttgaatggtcattattgtcaatgcggaaggtattctgcgcttcactatccatgttcacacattattgcagcttgaggttacgtgagcatgaactactaccaatatatagatgttggttacacaaatgaacacatcttaaaagcttactccgcacaatggtggcctctcgggaatgaagcggctattcctccttctaatgacgcatggacacttatccctgacccaactacaatgcgtgcgaaaggtcgaccacaatcaaccaggataaggaatgagatggattgggtcgaaccatctgagcaaccgaaaaaat

SEQ ID NO: 171629 - DNA, 1198 bp, Glycine max
  unsure (1)..(1198): unsure at all n locations
gcgaagagtgtccgcgggcttccttttactgtctctctgctgttgataatgatcantcagtgactatcgtctcatgaactccnacgcacagggagctgattgcttcctttgcattccacgagactcctatagcaatactccctcccatcccctgctcctgctttattgcgtctaatgctaaaacatttgtccgttgttctcatctcacaacctgnacataatatcctttcgatcagattactatcttctcctatctttcttacgacctgatgtccaaattacaacgtctcattctagccaccagaattatacaccattgtgacttacaccatactattctctcagcaacaaaccttatgctcacatatgaatgaatggctggcgcacgaaccgcaacttatagagcgagtccgattcttcaatgatcattccgtatgtcagattcatttctcacttcagaggctttatataacacgttttgtgcctattattcggcagctacgatcacagaagggtgtacaattacgcttaccttgtatgtcgccttggaactagtgaacactttcgcttgaaccnatagatgccgaaaattcccctggtacaagattgataatatactcacaattctaagtaccacccgaaagtattgtgcatacaggtgccgactcatattatatgctccacaccatttagtgtcttctgtgctatctacgcatataagtcaaatgacgcnctaactatgggctccaatagttggctggaaactttgggcgtctctcacattgagtgagtccgatcgccgggcctaatctaatataattttctgcatcattatagatgtattagttctggctcacataatctcagtctttgtttgatccctgtcgaggctttggccacttatcttgtggaatatatggaatgggtctaatcatgaaatgatctttctggctcctgggcatcatctttattcctcattgcgcaacccgatggtcttcttgaaaacgactgcgcagagatcacactgccgtgcccacagggaggcgttaacccaagcactgtactatggtcacccttattgtatcatcttcactatctctcgacatcgtacactctagtacaggacacttcgactgtgtctatatgattcatattgcgtgaataatgcttatcacactgtcactgatagtcatagtcg

SEQ ID NO: 171630 - DNA, 226 bp, Glycine max
  unsure (1)..(226): unsure at all n locations
agcttattaactgcatcagctgattgaccaattaattcactgcattcacggtcccaaagcaggaattttgtgctttcatcttcgtggntgatcatcatctcaagcctatacatgctaccatatgtaccaacagtgtaattgtgccccaagttacacaaacaatttcctgtgtgaacacaacatacacatcaaatgctaaaaaaacatcacatggttgggggtaaag

SEQ ID NO: 171631 - DNA, 573 bp, Glycine max
cggttatgggcaatagcaccccacccgacgtccccaatgtcttctgacccccgcgacatatctccaggtaccactctgtggtcaacgaataaaagcaggaagtttcacccttctacacttcctcatcgcaagcttgtaggattatggggtacccatcacatgtggtactaggtggcggtcgggcgatggtgcacaacaagttttccacatccacaaattgcgcataaacccaccatcccctgttgcccacctctaactaagctcacgtactcccacgtagcccatatcctcgtttctctcaacaccgggtccccatcaatcctctcaagcttccccaacatccaagtaattcaacattcaaacaacacaaactatcacagccaagataacagggcaaaggcagaaaactttgcccaaaacaccaaccaaaatcacaggttttctcacttaaggaccccaataacatttccttcgttccaattcattaaccgttggatcgactcgaaaagtttactggaaagctctagtacataaattctacattttgaccggtgggacctactattaaacatc

SEQ ID NO: 171632 - DNA, 506 bp, Glycine max
  unsure (1)..(506): unsure at all n locations
gctgcaagctttgcggatttggncttcgctggtgaaatgatcgaaggggggctaaaaagagcaaatctgatcatcatgctttgataaatgcaaaaaaactggggcaagtgaagaaggggagaatgaaggagaaacccatgctgtggactgccattttctatacagccaagtttcccaccaacccaacaatgacattactcagcccataacaaaccttttccttacccaccacccagttatccacaaaggccatccttaaatcaatcacaaagcctgtctaccgcacttccaatgacgaacaccacctttagcacaaaccaaaacaccaaccaagaaatgaaatttgtaccgaaaaagcctgtagaattcaccctaattttggtgtgctatgctgacttgcttccatatttacttgataattcaatggtagccataacccctgtcatacctaatttcgtccgggattattatttgatgatatccaccctttgattggccgcttttaa

SEQ ID NO: 171633 - DNA, 1276 bp, Glycine max
  unsure (1)..(1276): unsure at all n locations
cctaaattaaacgttcataactcaactgattcactactgtatctatttttttaaattctaccactaacaataggctgnnnccgagtgtatgtagtcctcccacnacttgaataatatggcacccctcccctcttcagagaaggttccccaagaagaggtgtctcaagtgtatgtcttcctttcacgctattataataagaagtcactggtgcagatcacatgtcatgcgtttaantatgtgacagcacatcgtactagtgactctgtagtaagacaatcctactaacattaatccgatactatcttctgacccgatttatgcctactttcaatatttggattgtcccgacgtctactcgtattactattactactacctctacttagaatttgtccgtaccactcgagaagcattctctaatacataggctctattattccagatgcgacatttcttgtggtcggccagaaanctccctattcttcacatgggcgttagatctcctatagggaaggagggccctacttcattaccctgttacttacattattctttccggttgaacatctctcattgggttggaaacaatcaccgcattctgatagcgaaccgttcatatcganagttctctataaacaattcccagattctttctaatatgtaacagcctgacaaccaatagcataggtattctctcattcatgcacagacacacacgccccttataatcctggattccagtagcccacaatgtgctctgctgccaatacactcgcatgtggtaggngacgaacataatactatgatatgctattccctacttagtatcacatactaatgctatagcacgccgaattcgcaatgcgccattaacactctggctacaatgacacattcgtccggtgggctaatgcacagatcggtaagtgaagtttcctctcctgttcgaatacatggttctgtgacgcgggaagccacacggtactatggctctcaacacaacgaatacacatccgtcatgactatattgtgacatttatgaacaagaagctccgttatatctgtctcttgtgttgtgaattcgcggatcacatagttacacgttcatattacgctcgcatattggtcctctcaggtcctacttcatttgattcactcagccaaatcgcatataccgacntaattgcacaccgcatctgacgcactctattgtctacagtgttacactctacttacgcgacgtcgtatcgcgcacgagtcattcgcataactcgg

SEQ ID NO: 171634 - DNA, 382 bp, Glycine max
gcatgcaagcttgagatgaggaagtgttgaagggtgaaacttcctgcttttattggtgaccacagagtggtacctggagatatgtcgcgggggtcacgagaccttggggacgtcaggtggggtgctattgcccaaaaccaagcttgaccaatcccgacccaacccgggcatagtcggtcagtgagaacatgtgacgtacctaagcaggcgagctcctggcagtcaacagataaaaggaaaacaagaccacagagcaaggaggcttgtggtggctggccagctgtgaattttgtgtaatatgtggattgtggcctctggtaatcgattaccaagggtgggtaatcgattacaaggcttaaaaattgaaacagggggctaacat

SEQ ID NO: 171635 - DNA, 948 bp, Glycine max
  unsure (1)..(948): unsure at all n locations
aagcaatagaatcctaatccttgtgtcgcgactactaatctatctatgatgatatattttatctcnacattcagccacggcggtgatgatttgaatcattcgcactacctgacnatatanacttctcaacctttgttggaatgttgcgcggactgatgggcaaccattaagtgtattgctggggctcagaacccacagcgggtgtgtgaagagtacgagcatgggtccatttctcttccattactcttatagccgcctgttcgacccgaatttttttaggcaattcacgcttagaggacggaaacgataatcaaacatttgctctttaaaaaacccacctcacattttttccccggcacacaccagatccgcaaagttggacggcatgtaacccactacgctcttatagtataacactggcagagcgtcctatcatcatggtgatcatcttctctctcaaccatgggaggaactacttgtgccgccaaaaccctgtatagctgggcataaatctttaaaggcttcacactcattttttgaacatatactgtacttgagccgtgccaggagccatatcacgaattgcactgatatctgcttaaaaaggcggaaattagatccttccaagcacggatacaggaaagcttctaaattactgcaccacaccattagtagctcctgtcaagataaccttgaaagaaatgttataaaaggcttttcatcttgcaaactgcgctcccctatttaaggcagaacatttcaaaaaggatattggcgaatactgcgactctttaatattgttcgaaaatctctgccatcagaaaactttacgtaataacaactctttcgtcctcatcgatcaatacatttcacaccttaacaacaaccggcttcaaagcaatttcatagtgccctataaccctactacacgatccacgcagccgtccg

SEQ ID NO: 171636 - DNA, 669 bp, Glycine max
aagaagtgtggacatgatggagcacccctgccttgggctgcatatctatgaagaccagtttgacggccttccctaattgtgaggaccaaaggactacttggcctttcccttggcaagaggcttttttgggaatgagccgtacttaggtctaactcaaaggcggtgttgcgccctaaacaatgacgaaccctccctttttatcaaaaggtagaccctcgaccaataaatggatttttgtagtgaaaaagactggaaaaattcaccgtagtttctggggccctatgctggacctggtcccatattctatttgaaatattaagggcccccccaaccggttgtataccccaattttccgccgggatctgtatccgatgaattcacatcctttggccggtcggccagacaaaatgcggcgccttttgtgagcaccatatgtgaagtctctgacgtcgcctcgaaataacaagcgtcgcgtgtttacccctgtgctacgcttccgacattcgcgcgaccttccagacagcgtacttcccgttcttccctcctattgctgggtttcgtctcttgttcgctcccctttcccgttggctctacctggctgctatgcttctacgtaccgctttcccttgtgccagtgtctggatcctcttcccttccacttcctgtccg

SEQ ID NO: 171637 - DNA, 414 bp, Glycine max
gaacaatatacttgcccttcatttaactgtctctgggcttgttggccacgctcaacaaagtactttcgacacctactgtacgttgatttgaccaatgctgttatgggaatgttgcgacaatccttcaaaaccttattgatacattctgagaggttggttgtcatgtggccatatcgacgtccttctctatcataagccatcgtccattttttctttgaaatgcgatcaatccatgttgctatggctggactcagttcacgaaatatttctaaatattgataaaaaaaagtgcttgccaggagtgtaggctacataaaaatagctatgaataacaatcttcagtgtttatgaacagttaataaacgtgaccatcaaataagaaaacttacccaattctttcaacatttttttttg

SEQ ID NO: 171638 - DNA, 302 bp, Glycine max
gctttagtgattgtgtgaccaccaattttatattgtttgttcgcacggatatgttctacgattgggtttgcctgaatttctaattgacgtaacgtatgattcatggaagggatctaagcatttttttcttatatgccagtggccaacccacttttccaatatacattattttttcgccatttgccaaccctttgagccagaaacttggtttttatcagaaccctaacctaagatgaaaggttccaaccttaccttaggataagagagttagggtgttttccagggaaaattctattcttttt

SEQ ID NO: 171639 - DNA, 811 bp, Glycine max
gcacagtttactgtgccttgattgaaaaggggatgtgtttttttgacacgctcacaataggtctttgcgacgccctattgtacgtatgatctgcacccactgctgtctcagagaatgagtgctaccaccacactaatatccattattgactaacatgccataaacgctcagatggcatcgttgaccgagatcaacgataccttctttatcatacagcccatcgatcattttagaccttttgaaaaggggatcatatccatgttagcttatggctgggactacacttcaacgaaaatcttttttaaatttttgaaaaataaaatgtgccttgcaaggagtgaaaggctctataacaaataagatatgaagtaacaattttaagtatattatgaaagttaaataaacgtgaccatcaaatatgaaattctacccaaacgggtaaaacaattcctctcgaaatgcattactgaattttagaaagaagtcttatgcttcgtgcttcatgcaccaaatgaggtaatccgtggggaagtgtataactcaccggactgacaacttaacatagctcttagtctaccatctgagtcgactaattgataataatgccttttacagctaagaggattcttcttaagatacccaaatactttactctctatttatgtcatactctcttataattcgctgccggtctatgacgaacatcacctcgctctcgcttttaagtataaaggggactgaaacacttctcaaggcatgaaccccctcaaaatcttgttgggaacatcaagcccttctagagaaaatgacg

SEQ ID NO: 171640 - DNA, 806 bp, Glycine max
  unsure (1)..(806): unsure at all n locations
acggttgggaccccgatagncanctgtccancntctaattgtgaattgaaagcancgcccgcttgnnttganataagtttatatagggagaaggtttttattttcttatctcatcaacggccacggacgggagaagagttatgtttaaataagaacccaccagcataggaatacgggcgagtatgtccaaatatacgcgggaaaagaggcttcagggaagggtgatcgactctttataccaagaggcaaccatgtggatgggatcgggtttccttcactcggaccggggtttgcaacctttccccgtgttatctcaccccactgctacgcggcttctcgtttcccccctcctcttatttcttgttcatctagacttttccgctctcaaacctataactttccccgcttctccacataccatattgttagagcactttcggtgtcaccttctccctccctactctttgcccctatttgctcttctcacctctctccttcttttctccccctcttctcccctcactctctcttctattggtgctcctcctatttcggtcttccccgcgttgccctccgctctccttacttctcgccttctctctctctattctaactacttcccctccttcatactctactctgtctgataacatttctcattccttctcgctctcccttctttgcatctctgttttgtcattgcctctcaactcgtgactcctccgtttactccgctctctccctgccccacatgtcctagagacgtaacaatcccctcaactttctgctaccgcttcctaccaaca

SEQ ID NO: 171641 - DNA, 907 bp, Glycine max
  unsure (1)..(907): unsure at all n locations
acatatcatagacgaccaccatactaatgttataagattggtcaagaattcttataagactgcaactatatcttaatatccnnccccgcaccacgaagtgattgcttgcatcgccgacctatgaatacaaacctctcccctatttgctatacaagggggaggagcgaagaatatatgtttcatcctcttaggcacttctctgtctgtcgaaattgctgaagaaaactatctccgcgaagaaaactccagccgagacgcttccgtaaccgtttccgtgagtaattacgcaaagattctcgaccgttcttcaagattccccgttcgctcttcgttcccttcagacttcaacgggtaagaacctcaaaccgaacttttcaattcatcttatgtacccgtggtggtccacattttgttcaatggacatatatcccgccttccataacttgtttataccccctcttgacggcctaacccatctattgaagtcctttctcgcctaattcaataataaacataaattccaccgaacgtttgaaatggtatcatccgctaccttcgtttaaaaacgaattccgaccgttcggccggcccgatccacgccggtaaaccaacaaagaaggtcaataatatatccacatccagaaataccctttaataaacataaagcacaaataacaatcggacgttccctctttgggactactcattcctaactgaattgactactacctgaagcgcaactaaggctcagatcaacctcgctcaaccaaactggccccaaaaaaaaagttttcggaacaacaccatttctagccctaactacatcaacgagggcctattctaaggtccaaccgcttccagtgactcacccctccgctacaatgaacgctctgagcactcacacaac

SEQ ID NO: 171642 - DNA, 517 bp, Glycine max
tgcagcttgtgattattttgccggcgaaggattttatgggtctgaaaagaggcaaatttgattatcctgctttgacgaatgggaagcctaaggcaaatggagagaataagaaggagggaggaacccatgttgtgattgtcattcccacatggccaaatttcccaccagctcaataatatcaatattcagccaatatcagcccttctcattacccaccaccctatcagccaagaacactcaatcatccacaaaggccacccctaaatcagccacaaagcccgcctgccacacatccaataccaaacaccacccttaacacaaaccaaaacaccaaccgtggaaggaattttccagaaaaaaaaaaaaaagcctgtagaattcaccccaattttggtgtcgcatgctaacttaatcgcatatttactcaataaggcaatggtagccataatcccagtgaaaattcctcaacctctatttttctgaagatacaactcgaatgcaacatgtgcttatcatg

SEQ ID NO: 171643 - DNA, 595 bp, Glycine max
tgcctaattaacctgaaattgagagaaaatgattattaaactcacaaaatgaaaatactaagtatttattacctatacttaacagaaaatacttataacactacaaaataaccataaattgggagagtttgatacaatttatacaagttttatacacaaaagttagtcattattttcaactcccgaacccttattttcaaaattcgcaaacctctttttgatttttttaacgttttccttaaataaaggtttgtggtgactcccacgcattttcctttttggaagatgcgccttttgcttttcgcctcgccctcccgtcgaagggtaggttgcgatatgtctaaatgcaaagtcctatatacaaattgaagacaatttagtatagatttcaagggcaaggttaatatcaacatttgggtcaaatatccattcagttttaaaagggacaaaaaatggtgtttttggtttctacatcaagagacgtcattttgaaaatctggttatgccaatgtgaccaaggttaagtgaaggtcacgaaaacaacatcaattttataaaaaggtacttttacatcgtcttattttaagggttttca

SEQ ID NO: 171644 - DNA, 351 bp, Glycine max
agcttggtgacacgcggagatttatgtcatcttccgcgctcacaagatctgtcatattgacattatagtcacgctgacgggcggaaatacccaaatggttatctgtataaatattcttttttggttatctgtaaaacgaaaagcctgatagcacgcagagactaacctcgtcttctgcgccctttgtcaatcgcggccgacaagcccattaacacgccgagatttacgtcatcatccgcgctcacaagatctatcatactgacatttgagtcacgttgacgggcggaaatacccgagtgggtatccgtataaacattcctttttgctatctgtaagaccaaaagcttgata

SEQ ID NO: 171645 - DNA, 624 bp, Glycine max
acctacagaaactaagcttattcagctgccctgctcgaccaagcatatccaccacacaagcataatgctctaactttggctttacgccatacaaactctgcatttgaccaagatattttaatccttctgttactaagccagcatggttacaggcaattagcactcccagaaatgtaaaagaatccggtctgcatcctttattttgcattaatccaaacagctcaatagccttcagcacatgtccatggataccatatcctgcaattataacattccatactgcttcatccttctcatttaccctgtcaaaaatgttccgagattgttccaagcatccacatttagcatacatgtcttttaatgcacaagtaacaaagttatcctcagaaagacgaggtttcattgcaaaggagtgaacttctttccccagccgcaatgcatccacatttaatctcggtattatattgtattatttgaagctattgaaaggaaaaattggaaaaaagatagtacctttgtagtaagaggttgtaaaagcaaaaagcatctgaagagtccgcattgaaatggagacagactacgagcaacgacaccaaagcaggaggaaaaattgcataccaaaaa

SEQ ID NO: 171646 - DNA, 380 bp, Glycine max
agcttttatcaatattaaaacatcttactcttatcaaagcacatgtaacttataagtcttgaataactctattaccaattaagcaagattgtttgcacagaagaaaatcaacagataataaccatataacagcaaacttgccatgggttgacaaattcaggaggaccagtttgactgcctccactactttgaggatcagaaggattatttggcattccgattgacgagatgcttctctgggaatgagctgcactatggtctaacttaaaggtgctgctgctccagaaatcttctgatccatccaccttagtcactgtttgaccttgagtccttagtcctttagatgcttcatccattgaaataatccctggagttttttt

SEQ ID NO: 171647 - DNA, 572 bp, Glycine max
ttgaacaatatacttgcccttcatttaactgtctctgggcttggtggccacgctcaacaaagtactttcgacacctactgtacgttgatttgaccaatgctgttatgggaatgttgcgacaatccttcaaaaccttattgatacattctgagaggttggttgtcatgtggccatatcgacgtccttctctatcataagccatcgtccatttttcctttgaaatgcgatcaatccatgttgctatggctggactcagttcacgaaatttttctaaattttgataaaaaaatgtgcttgcaaggagtgtaggctacataaaattagttatgaataacaattttaagtatatatgaaagttaaataaacgtgaccatcaaatatgaaatcttacccaatttcttcaacatttctttttgttttgcattattgaatttccgattgaagtttcttgctatgtgtcgcatgcagtagacatgataaccgtggggaggttggcaaccaagtgctttgttagcgacaacggactttatactcccgtgtcgatcaataataaaccaatccatttttatctg

SEQ ID NO: 171648 - DNA, 386 bp, Glycine max
gcatgcaagcttgcatgaaaatttctcacgggaggtaaattgcaaccttgcggtgggggcttgggggggggatctccttgataagggccaaatgggtggattcaaaatcgccatgcataaaattgtcaggctctgaatctgaagtgtagtctacttcatgcagaattaataaggcatataaatctctacataatgaagtaaaatgaaatttctaccaaaacaaaattaccaataataaaatgatgctagagaaatttaaggaggttgatactttttgaatcaaaattgaataaatttgaccatactaaagaaaaaattggcaaatttgcatattgaatatagagaaagccatcaacaccaatttacttattacattatcttttttt

SEQ ID NO: 171649 - DNA, 490 bp, Glycine max
tgcccggtgctggttctcgagtgaggaaacttgacttagagcgtccatatcaactcatgcacccgatgcgatatatggtgagctatggcggctcctatactttcctatgcgtatgcttccaccagcgagatcaatcccatcagtggccttgtttatgacattctgatgcttgagtcttctaccacctttcgtgagctatccacacgccttgggagcgcgcagtgggttccttaataattctcgcgacaatgggaccatcaatgacaccggccggcaaactcgattgcctgcctgttagaatcgtacacctttgatgtgcactggtacggataaacagggatgccttatttagtatataaaatatataaacgcgcatgaaaacactcttggttgctggagaaatagcttgcctcttagagagtgccaattatctaggacattgagctcaggccccttgcttgtcttccttcgggccggctgaatagactac

SEQ ID NO: 171650 - DNA, 273 bp, Glycine max
atgcaagcttgtctcagcgtttatgcgagacggagacttcatgctagctatcatcgccaagtaccaagaagagttaggtctagccacgacccacgagcataggatcacggacgagtatgcccaagtatacgcggaaaaagaagctagagggaagggtgatcgactctttacaccaagaggcaaccatgtggatggatcggtttgctcttaccttgaacgggagttacgatctttcccgattgttatcctaggccaaggcgatggcggttactt

SEQ ID NO: 171651 - DNA, 551 bp, Glycine max
  unsure (1)..(551): unsure at all n locations
tcttctcaacaggatcatataacctgtaaccaaattcattctcatcataaccaatgaagatacattgccttgactttgcatccaacttggatctctcatcctttggaacatgcataaaagccttgcagccgaaaactcttaagtggtcatacttcacattcttgcccaaccagattttgttcggcgcctcactattcaaagcaataacaggactaagattgataacatgcaccgccgtgtatagtgccttaccccagaagtgcttgggtaactttgcttcagagagcatacatctcactctctcaattaatgtcttattcatcctctccgccaaaccatttagttgaggagttttctcatgagcaatgtcatgcttcttgcagtagacatcaaatggtccctaatactcaccgccattgtcaatacgaatgcgnttcagcttcttgcttgattgcctcttaactaagacatgaaactccttgaacttcttaagaacttggtcatttgtcttttaagcatatacccaaagtttcctggaatagtcatcaatg

SEQ ID NO: 171652 - DNA, 353 bp, Glycine max
  unsure (1)..(353): unsure at all n locations
tttgaaagtattgnaagaggggaaaacatttatgtgttactcacgcacacaaagaccttgtatgaaggattaccagaatagaaaaaatgattgatcattgttgatgtgaaccttactaggagtggatcgcttgatacaagctactcaattttggacgacgccacttcctgatagggaagataattcatgtacatgccacatgaattaccttgataaatccgagattggttcagcgaggaacccatagagaagttctcacaaatttttatgaaaggcccatagttccttcattgaaaacgaaaacctatacatatagtgtatctgaacaaaaagatattaatagacgtgtgcct

SEQ ID NO: 171653 - DNA, 869 bp, Glycine max
  unsure (1)..(869): unsure at all n locations
cgccntttcgaattgccttgacgatcccatcctgaacacgnacctcngatcncatataacgccatagccttcaaggccaactatacggtgtgacacaaccaacatcgcaatcagtaagacatgttctatgtactgtatgtagtatccatcactgatccttncacctccgcagtgtgcttgtgaagtgacatccatatgagaagcactgggatagactcatcatacaacggaatactgggtggtacaactcaactaacccatcataagctccatgaggaccttattaaagcaaggagccacgacattaactgcttcaccgtgcgtcgcgaacacgtcacgtattgcctcacagttcaactacaaagactaggcaacttaaggaggataaagcttgtattactgaacctttttcccattcgttcccatctagcgatgaagagctgcctctatacgaaagagagtcataaggaaatttgctaacgattagaacgatgtagggtagcccagcacatgaattgcatgatcgtcgtagagaaaatattttttaagccaagtgcctcatacaccggaagtaatgctttttgatcatcgatggtgggagtttaactaacgggattggtctaagctggcttccaaaaataaatcggagattaaagccaatccctctagcaacaaacttcaaagttgagactttatttttctttcgcccaaaatggtgtcaactttttaggatagcgcaactccatgttcttttgtgaaattcataactcgggctttaacctgtcccacaatccgtggcttcctctcttctatgactataccgacctcgatgcttctctctgcccccctttgcttcactcatttctccg

SEQ ID NO: 171654 - DNA, 371 bp, Glycine max
agcttgaccaatcccgacccaacccgggcatattcggtcagtgagaacctgtgatgtacctaagcaggcgagctcctggcagtcaacagataaaaggaacaaagaccacaaagcaaggaggcttgcggtggctggccagctgtgaaacttgattgatatgtgagatatggtctctggtaatcgattaccaagggtgggtaatcgattacaaggcttaaaaatgaagacaggaggctaagatggtctctggtaatcgattaccaaggggtgtaatcgattaccaggcttgaaaacgaagtcaggaaactaagggagcctctggtaaatcattaccaccctgtgtaatagattacacacagggatgggtcacc

SEQ ID NO: 171655 - DNA, 409 bp, Glycine max
atgataatgaaaatattttcacaacagaccataatgatgtgatagctacagacaaatcgaaaccccttgtcaattaaatcgaaggaaatctgtctaagagaaaaacacacaaagtttataccaggtcatctgtaccatctagactacattcagatcttgtcaaaccactaagttccactaacttataaaagctacaagctattttatactgctactcctgaatcttacagacacaagctctacccaaagcttgattttaacccagtattctatgatctacttagtcatagtgggctctaaacaaattaacatgaatctgcgttgaaaggggcttaatgactaaaagattatcgtcctacagacagatattacactcgactatttcgttgattctctcgagaatacaaat

SEQ ID NO: 171656 - DNA, 362 bp, Glycine max
gcatgcaagcttaaagcactaaaagggggaaaaataatgaatatttactaggacaggttgtatcggatcccgtaacaaaagtaagcctctagaaatgaaaatgaagctacctcgttaactatagcacctaagacataggaaaatagccactcttgagctttccccgctggacatgaaggctttgctctctttggtttccccaataaccaaagttgaagacctggcaagtgtgcttttggccggctcacctagagaaagacttctcccagacatttcaaaatcagatatatttaaggcagctgccatactgaatatcccttcaaacatagcatctttactacatacgaatggctcattttcaa

SEQ ID NO: 171657 - DNA, 281 bp, Glycine max
gtcaaacggtcttttttttttctactgtagaccttagcaagagctttcgtattttaaactgttgtctctgaacaataaaatctcgctatattctcatcatgccattatgttttgcagagtggaacactagcattccgattctgaatgattggcttatatattgcacagctctattcactgctgttttaccttaggacaggtggtgacttgagttagttctctatgggaacccttatatacgacgatgaagaaatcagcgttgattgtcttttgaaaacttc

SEQ ID NO: 171658 - DNA, 461 bp, Glycine max
  unsure (1)..(461): unsure at all n locations
cttatngcaacaaatcaacatgtgcttgcttatcgaacacatgcacattgagcgcatagcataatcagacaacaaacaacaacaaacatttgcacttaaatcaactaacacaaatattcatagagtcatgagcataacccaaatcaacctaacatcaacacacaaaccaactaacacaattattaaacaagttacagaaaagaggagaaagacacaaaccaactaacacaattattaaacaagttacaaaaaagaggagaaaaagggtagaaatcctgggttgtctcccactaagcgtttttttaatgtcattagcttaacgggtcaaatgacttcaagacggcatgaaggtcacatagaacacatnatccttacattttcacttcttagctagagactccatganaaatatgtatncctgagatggcttccatatcattgcaagggaagggttggtgatc

SEQ ID NO: 171659 - DNA, 487 bp, Glycine max
tctaaggtggaacaacaattgcatagaaacagtcatgaagatgagttcatctaattttcactcgcttggttggaaagacacaaataagaagaagggaggatcatcaacaatcaatctcaatgttacaactcaaagaactcaaaataagttcgatgaggagcttaagaaagcaaggagctatgaaattaagtgcttcaagtgtttgggaaaaagtcacatagtttctcaatgttcaactaaaaagactatgttacttaaggaggatagagaaataattagtgaatcttcttcaaaatctttcccatctagcgatgaagaagagcatcaagaggaaagaaagttagaacgagatttgttcacgattagaaggatgttgggtagccaagcagttgaattggatgatagtcaaagagaaaagatttttcatgcgaggtgccttatccaaaggaagttatgctctttgatcattgatggtgggagtttcact

SEQ ID NO: 171660 - DNA, 114 bp, Glycine max
agcttctcgatatattatgcacctgaatcggacttccgtttgaaaagttatgcagaattgaatttctcgagagctttcgttgttcaattatgagcttgtcgatatactattcgc

SEQ ID NO: 171661 - DNA, 192 bp, Glycine max
gaacaatggaagctctcgagagatggacatggttatgacttgtcacacggacgaccgctgcatgcgcatactatatcacgactgttgaatatcaagctcgataagctctcgaggaaatcaaatggacatatactttacgctctgaaccccctttcgcgcacataatgaaaagcaacgctcgaagaaagacag

SEQ ID NO: 171662 - DNA, 363 bp, Glycine max
gacacgggcttcttctccttttgctagttgtgggttaaaaagacaattgtgcaaaatcccccaaaatttaacaaaacaatcatcctcaatgtccacatctggaagttgaaaaaagagtttcaaattaatgttacaaatcttccataactaatgagggacacaaagtgagtaaaggttgaaagaaatataattctagtccaagatgtattaattatcatgtatgtaccctagctttcttcgggcagtaagtgataaataccgcaaggtaaattgtctcaatcaccccaccgaatgcattgatggtgataaaaagcgtttctccggtcttcacataggcataaaagatccaaagcattgcactga

SEQ ID NO: 171663 - DNA, 381 bp, Glycine max
ctggtgagcaggtcactcataatgtgaacattcctgttgacttttaaaaggagaactacaaatggttcttccttgaccagtaacccccaatccaaggtacatgaattgagtttaattactatccactttcagtataattattatcttacactctccatttatactgttaatcaatcagaaatcatatatgaaaacaacttttaagtaattttatataaaagttaacaaacttattatatgtaccatacataaactgcttactcataaattactatttttattaagaaatgttttagctttgttaattatatataagttctgtgtatttttgccaacattatcttgctatactagtagaatgtttaatatgttaaccaaatt

SEQ ID NO: 171664 - DNA, 627 bp, Glycine max
  unsure (1)..(627): unsure at all n locations
caatttttttgtgttgtatagcaaatattttttttagttagataccttatgtttgaatttgataatttacgagtttgatatatatagatatttattataaatattaaattttcaatattattaattaatcaaaaattattttaaaacaatgttaacaagatattataaaagttaataaatttatcttgtgtaaaaatttataaatagatggccttgtaaaaaattaaaacaaacattttacaattagtgcatatgatgtttattcataatattttgtttaattgaaaattatatttttaatatatcatattaataaaataaatgtatattagtaataataaaaaaattattatttaaatatgttatttaaatttaaaaatttacttacaattaaataccttactattttaaatagtttttattaatgtcaataacaaaaaattcaatgtaaaattattttatataaaatttatgtaaaatacattgataatgtaaaattattttatattgttatcataatcttattaattttctcaataacaactttaaaaatcatattcaagttgatgttcaacangttaacatgacaatgtaatttatttttatatttacaatgcataataatta

SEQ ID NO: 171665 - DNA, 621 bp, Glycine max
tgtatgaggggaaaaagtattaaacgttacatatagatacccattctccatcttttaagcgctcaagagcttcaatcatgtgctcttgataaattccaccacctcttgtaataggtatgcatttccctgtgcaagttaccattttagaaacaacagtactctgtaaaaacaactagaaaagcttttcagcatattttgatgcatatattaataaacttcaacccaatcatatgaaatagacagcagtaaagcatcacagtaagtattaaccttccgattcaaacattgttagcctagtgaagtgaaatgggtttaattcaatgctactgaactatagacaaagacaacacacaaaaggacttcatccaaatcaccacaatgtaatacattcattgaagaaaggccttgatagttgataaacagatttgttatattcaatgacatttttgccaattctggttttcttttttctttttttgattcagaattaaattttgggagtcgaaaggatactaaagtgctttagctgcaaatttccttttcaacaacttttaagcaacagatctgttgtgttaaagtattgtcccaagatgaaaagaaacaagattgaggatctatgtc

SEQ ID NO: 171666 - DNA, 579 bp, Glycine max
agcttatctaattaatctgaaattgagagaaaatgattattaaacacacaaaatgtaaatactaagtatttattacctatacttaacagaaaatacttataacattacaaaataaccataaattgggagagtttgatacaatttatacaagttttatacacaaaagttagttgttttcaccgactaacaactcccccaaatttacagttttgcttgtcctcaagcaaaaagagaataacttacttttcctcaagtgacaatgacatgtagtgactatgtacaaaggtgtatgctacaaagtgactaatttcatgataagagaatggagtaaaatgccctcatcacttgtctttcacaaggtatgcagttatccaaagagaagaataaaatgtaacctgaacagatagatgaagttaggcataagataaatatcaaggaaagtagcttaaaccacagtctcatggctactgtttcactcaagcacaagtgtttaagctattcattaatgacaactagcaagagatccaatctttgaatttcatctcatgccataaagtcaaaaatgtataaatagaatca

SEQ ID NO: 171667 - DNA, 527 bp, Glycine max
  unsure (1)..(527): unsure at all n locations
tcttagtctcagctgatgaagatgaatttgtggctacttcatgcactcctctaatgacaatagcatcatttctggcactaaattgctgggagttggaagccatcttctcaattaaatttttggcttcagcaggggtcatgtctccaagggctccaccactggcagcatctatcatacttctcatgaaatgtatgtgtgttacgataggtagcaaaaataccttatcaaatttacgtagcaaaatgccttgttgatttaattagcaaaataccttgttaatttgtagcaaaaaaatagtaatataccttgactatgcgtatatgtatttcttaggtagcgaaaaatgccttgaatatgcatgtataagttgctctaggtttacatttggaaagagtcgtangccgttgttgctgcactttgctttaaaatggcacttccttgtaaaatgactttccaaatgttggcttttgtaagaaatggccccaagaaagctttccacaaagacatccaagaaagacgtcaccgaa

SEQ ID NO: 171668 - DNA, 571 bp, Glycine max
  unsure (1)..(571): unsure at all n locations
agcttgtccccaagtcccataattgttgggcctctttcaacagctgattgttacaaataattttgctttttaatctcccttctgcttccaattttatttttttgatcagcgaaggtaatctataaattaattggagtaccagaagtacttaatagtacataaaggaccatacaaatggttccacaatcagacattgatattctgaaagggaaccagagtatggatatatatttgctatgaaatttacaataaataggctcgtaacaatgtaggctactactgatacaaaaagctttgtgtaaagctgcttgcccattgattgaaatggactgtgaaacctttctcaaaaccccttagccaagaccacagtagaaaagtcgcatcttcaaatagtgcattagcattgaaagtggcattggagaacactatgttgtttctaagcttccaaatagaccacgttaaggctaaccaccagtattgccatctgttcatccttactccagcaagttgtacacccaaatgttgtangaaatgctgctttgggcttaatgggaaagcaccttttatgtgc

SEQ ID NO: 171669 - DNA, 110 bp, Glycine max
cgagcgacagtaggccttagaatcattttactatagtgatcatagatgtcgtgatgggtgcgagctccttgaacgacatgtgtatgatgctggtgcacctttctcttgct

SEQ ID NO: 171670 - DNA, 521 bp, Glycine max
agcttcttatccaaggcacatcttgggggtgaagctccttcttccatggcttattccttaatggatagcgcctcctctcacctcctttcctttgtcttccgctgcatctccatgggggaaaatcaccattaaaggaccccattgaagctcaaagatccagcctccataaaagccccacaagcaagcttccatcaagtggtatcagagcacaagagcttcaagtaggtgctccttaaacctccattaatttttttctttaccttctcttccattggtggttcttcatttttctccatgtatctcctcacatgtcttgttctaaatgttgttaacatgattctttagagtttccaccgattaaacttgctatagaagttagatttgattttctatggttcaaatttcttgttcttgttcttgaaccatgaattgtgttgagtttacgctcctttgagtttgtcttgttattttttgtggctgaatcctaaaccataaaattcttacaaaaatattaaagtaga

SEQ ID NO: 171671 - DNA, 534 bp, Glycine max
tgcctgtccgatgcagcagtaatgatggcccgagttatgttggggaacggttacgaacccggaatgggtttaggcaaagacaacggcggcataactagcttgataaatgccaaaggaaatcgtgggaagtatggtttaggctataaacccactcaggcagatataaagagaagcatcgcgggaagaaagagtggtggtcaaagctcgcagttgagacaagaaagtgaaggaagtccgccctgccacataagtagaagctttataagcgcgggtctgggagacgaaggtcaagtggtcgcgatatacgaagatgatgttccgagtacattggatttagtacgaccatgccctcctgatttccagctaagaaattggctagtggaggaacgccctggcatttacgcaacgagcataatgtaaacctttacggttttaaaagctctataattgggcctaggctttaaagtttttcttttgttaaggctttgtgtcttttgtttttgaatttataatacaaagaccttttcttcatct

SEQ ID NO: 171672 - DNA, 503 bp, Glycine max
  unsure (1)..(503): unsure at all n locations
gcttncacaacattcaagtaattccacatccaatcatcatggactaacaaaaccaagcaaaacagggcaaaagcagaaaactttgcccaaaacacaactcaaaatcatagcttttcacatacaaataccccagtaacatttccttcgttccaattcgttaaccggtggattgactcaaaaattttactggaagtctctagtacataagtctacattatgaccgttgggatctgctaccaaatgtgcagaaccccatatgtactatccttttcacaaccagccatacacaagcatttttctgcacttatacaaaattctgctgcacatttcaacaacaaaattctgcataaagtgcagatttcgaaaaccactctttccctcatccaattttgcccaaattgaatcctacaagtcccaaatcatgtaccaatcatgtctaaaacaaggacaagcttcagaccaaagcaacacaaaatctaggtatccaaaacccctcaattaat

SEQ ID NO: 171673 - DNA, 627 bp, Glycine max
tctatagaaggttcgtccctaatttctctacaattgcatcacctctcaatgagctagtgaagaagaacgtggcatttacctggggtgaaaaacaagagcaagccttttctttgctcaaagaaaagcttactaaggcacctgttctagctcttcctaacttttctaaaacttttgagctagaatgtgatgcctctggagtgggagttggagctgtattgttaccaggtgggcaccctattgcttattttagtgaaaaactttatagtgccaccctcaactaccccacctatgataaagagctttatgccttaataagagccctccaaacttgggaacattaccttgtttccaaggaatttgtcatttatagtgatcatcaatcacttaagtacattagagggcaaagcaagttaaacaagagacatgcaaaatgggtagagtacctagagcaatttccatatgttatcaaatacaaaaagggaacaacaaatgtggtagttgatgccctctctaggagacacgcattgttttgctccctaggagcccaaattttaggatttgataatattagggacttgtatgctttaaatgaacatttctcttccatttacgagagttgtgggaaaa

SEQ ID NO: 171674 - DNA, 455 bp, Glycine max
  unsure (1)..(455): unsure at all n locations
cataatctacattttctcttgacgaggaattgccctgaagcttgaccacacttatccaacaagccaacaatgcaattaattttaaaaatagaggctttgcaaaacaacataatcttttttttaaagggactgaattggaaaaacttgcttccttaaaccacaaatgggggacaaagcaccaaaagaaacaagtcgatgaaagcccctactaagaacttcatcagcaaggtaagaaaggattgaaaacaacaaatctgcttgtcggaccccacacacaagagaagaagctaactggttttccattgataagaaagaaaagcttagttgacttgaggaacacacaaatccaggaggcaaaagtagaattaaacttanaataacttatgacatgaagtagtccaatccgtggtatcaaaggcattaccagtgtccaagcttctaaatcatattaccac

SEQ ID NO: 171675 - DNA, 340 bp, Glycine max
gtaacgtcggcaacgacaaccaggacatggatagcttagtgacgactagaaaatgatatttcatatggctttagcgaaatcatctttgaagactccacacatttcaaaaacggcttttgcgaaaatgactttggaacctcagaaatgatgatgatcttcattttgaaatttcacagtcaattttgacaaaaccatttgtgaagtgtgttcagtattaacaagaatgtgactgcatctattaacaatgacaatcatttcatagccgactcagataacgcattgtaaaagatgcatttattgactaggataggcagaggagattgaaaatgagtttcatttt

SEQ ID NO: 171676 - DNA, 306 bp, Glycine max
cagctttgagcaaattcaaacgacaataacttttgaatctgatgcccgattgggccccataggatattaagacccttttatttgaaaacggaagctcttacaaaaatcaaaccacattaacttttaactcgaatgtcccattgagcctctttattatatcgagacgctggaaatttaaaccagaagctctttgaaaaaacaaacgaccatgactttccactcggatgacggaaagagcgccgttatatatcgagacgcttgaaattgaaagctgatgttctgaggagattcctacgacaataactt

SEQ ID NO: 171677 - DNA, 427 bp, Glycine max
tcagttttcaattacgagcgtctcgatatattacgggactcaatcatatatccgaattgaaagtttttgtcattcgacttttcatagagcttctgttttcaatttcgagcgtcacgatatattaaagggctcaatcgcacattcgagttaaaagttattgtcgtttgatttttctcagagcttccgttttcaattaccagcgtctcgatatcctacgagacacaatcgaacatccggcttaaaagctattgtcgtttgaattggctcagagcttccgtgttcaattaccatcgtctcgatttattaccgtactcaatcggacatccgaattgtgagttattgtcactagacttttcatagaaatttcgttttcaatttcgagcgaatagatatattagagggctcgatcggacatgcgacttaaagg

SEQ ID NO: 171678 - DNA, 488 bp, Glycine max
agcttgccaacccatggaagctcctaatatctcccacactttttggggtgggccattcttggatggccttgattttctcaaggtccacttggaccccatttctaccaactacaaaccctaagaaaactatattatctacacaaaaagtacacttctctatatttgcatagagggtgtttttcctaaggactgaaagaacttgcctgagatgtcctaagtgatcatctaggctcctactgtacactaaaatatcatcaaaataaacaactacaaatctacctatgaaatcccttaagacatgatgcataagcctcataaaggtgcttggtgcattagtgagcccaaaaggcatcactagccattcatacaaaccaaacttggtcttgaaagcggttttccactcatcaccctttttcatcctgatttggtgatacccacttttaagatcaatttttgaaaagatattggcaccatgcaactcatcaagc

SEQ ID NO: 171679 - DNA, 593 bp, Glycine max
tatcgtcatcgattacatggttcttttttagactggttgatttttcaggagtctctacttcaatcgattactagtagatataatcaattacttctctcttaaaagtgttttagaagtgatcaagaacactttaattgattacatcaagaatctaattaattacattgttcttgaaagttttccagtttttgggaagaacactttaatcgattgaaatgataatataattgattacttcttcgaaataatcaatgacattgtatatttaatcgattacaggtgggtataattgttttctctataaatagccaccatgtgttctcacttcgaacaacttctgaatgagatagaattacgagctgatattagtaaaatgaaaaaaagaagaaaaagttcttagaaacaatgtgactcacaacttctaatctttgattatgaagatcattttgtgaaaagtgagttgtgaatttttcttgagttcaagaaggcacccattcattcaagcccaagtcttgcatatgtttgatcagggtttgtctatctttggacttacttttcgtggggttacacattggtagtttgtgcatgaattt

SEQ ID NO: 171680 - DNA, 544 bp, Glycine max
agctttgagatttaagaggaacaagaaatactattaaggttatgggtttgcaaaggaaaaaagagaaaatgaagatgaagataaaaaaactcaccctttgtgatgattgttatctggcaatatttttattttattaatgaaggtaactttagacggatgaaatgatcattttgaattaatttaaaaagataaaggattaaactgaaaaaaagaagataaaacactaaacaagtcatttggccttattattatttttaatatttattattattatgttaaagctgaaatataatattggttttcataatacaatgatttcaagtaaatttattttattgtattatttctaatttttaaaaaagatgtgtatttttaatttttgaaaaaatatgtattatttttattaaatataagactaaaaataatatttaaattaaaattaaaactaaaaaatatctttaaggacaaaattacgctttattctcaaggaatttgatttgattttaataaataaatgagcctataatttgcaacgacattcata

SEQ ID NO: 171681 - DNA, 618 bp, Glycine max
ggaagcgcttcctaatcatggagaattggtttgggatgaaaaaatggaaggccaacgttcaccaatcactacaaacaggaaatcgaaagatgtagagaggttaggcattggaaaagagaggtcaggtgcaagatttagagtagcattttaaaattaatctaagccattaatttaaaatgaaatagaagattcagattgagagtaatttgaaacctaacatgatgaggggtaaaaagaatcttaattgacctttagccttgatcaaccacccaaagtgatagcttcaccaagtctagaacatcgatctgagaaattataattactttatatataattgaacaaaagaaaatagtaggttcaatctcatccctccaaattcaagaataagaaaaatgcagatacatgtgtgtgaatatatgtcatagaattgaatagattgggttccattccattctatcctttcttttgtaatttacagaaatttttttggtatatatgtaggttaaataatgtaacataattttattgccattcatttttttccaattaattttatttcactaattaattcataatttactcctttttagagataaatgaaaatgtttatgatgaatc

SEQ ID NO: 171682 - DNA, 538 bp, Glycine max
agcttctacttatgtggcagggcgggcttccttcactttcttggctccaacgcgagctctgaccactgttcttccttcccgcgatgcttcttttcatgtccgcctgagtgggcttatagcctaaaccatacttcccacgatttccttgggtttttatcaggctagttatgccgccattgtctttgcctaaacccatcccgggttcataaccgttccccaacataactcgggccatcattaccgccgcatcggacagacaaggttgcccaaagagggagtccacggaggaaatgctgaccacctcaaaagactggaaagcggtttctaacgattcttctgcggcttccacataaggcatggaggatgggcagcttaccaagatatcttcctcgcctgacacgatgaccaagtgcccctccactacgaatttcagcttttggtggagtgtagaaggcacaactcccactgagtggatccaaggcgccccacaggcagctgtaggggggttaatatccattatttggaagcgacttgacag

SEQ ID NO: 171683 - DNA, 664 bp, Glycine max
  unsure (1)..(664): unsure at all n locations
tcaagaataatcnagtttcaagattcaatcaagtttcaagactcaagagaagactcaatcaagataagtactaaaaaagtttttcaaaacattgagtagcacaagaatttttcacaaaatcttttaccaaagagttttactctctggtaatcgattactagtagccagtattgttttcaaaactgatttacaaagctgtaatcgattaccataatcatgtaatcgattaccaatgttttaaaacgttaagatttcaaatttcaagagttacaacttgtgtttaaatattttcaaatcattttaaacttgtgtaatcgattacacaatacttgtaatcgattacctaagcttctaaacgttttaattttcaaaatttaaaatgaagagtcacatctgttgatgtgtaatcgattgcaccttaatgctaatcgactaccagtgactgatattgaaaaatacatttccaaaagtcacaattcttcaagtgacttatttctgaagattttttcaaaagtcacaacttttttagtggttacgttttaaagaaattgtcaaaagtcacaaactttgacttgagtcatcaagagattataaatttgtgaccatggcatgaatttcataatcatctaattatcaatcatctttgaatcatctatctatcaat

SEQ ID NO: 171684 - DNA, 978 bp, Glycine max
  unsure (1)..(978): unsure at all n locations
ggcgcgcggggggactctcaccgtgggntnccctctcctccttaacattgactacaggcgggcgaagctagtagtgcaacctcccccgtagaaccgggagtgtaacgtggagacctctgccttctcgagagatctgagccccccccctcgngacaagctctcngcccatgaaggaaaaaaaattctttttaggtgcggggcgtagccgggggaagcggagaatatcactatcgtaaataccacaccgtcccctttggtaaagcacggtcttcgcgcaacatcttaatatagtcagggagggcgaactctcatacggaagacaatggagaatttgaacccaaccttaaaaagaaacagggattctcccggtcgacaaagaagcaaaacaccccttaccagcccgttcgggcccctatttataatttttaataatcacctactcataatgccgaaaggcggagatatataaattgtggtttcataataacaacggatgtcccaggaaatgtcactgcaatggggcgatttctcaaaccctaaaaaaggatggggaatctttacattcttggaaaaaaaaacggaataattttcaataaaacagcacgaaccaaccacaatattttacatgcaaaattcaggcctacaaacaaatcttttatagggaacaaataacggtctatttctccacgaatctcggactggagcttattaaataaaatcgggcttgagtatttgggagggacattctacacataccgcttcttacgacttaccaaaaccttctttgaagacagcactgtgggagagataattttctaacaaacacttttttagaagagggggtgttataaagaaagaggttcaggcctcacttagccgcttttatataccatcgctcgacctgcgaatgcaaatcttcttcagagaattaccatcgaccatgacctctgggatgctaatcaacctgctgctgtaccg

SEQ ID NO: 171685 - DNA, 448 bp, Glycine max
tagaatgattgcacttcgtgctctatctttcatctttgatgtcccctttgagcctttgagattcagacatcattccttctactttaagagcttatgcacaaccatgttgaatccagattgcttacatcttgaatcttcataacccaaagtcattttcccctgaaaacttctctatatcatattttgtgggtcccatctttcttgatcctgaactattccccacagacagcgccacttgtcggttctttggaaaagtcccgcaactcttaaacctgcccatgatcagaacatgaacctgagtaaatatcattcctgacctattcagtggagctagaaccccaagatgtacatggttcaccactctgcctacttacaatcatcacatcggtcacgaaagtgccaatttcatttcaagccaactggctaactttggagctctctttgcttt

SEQ ID NO: 171686 - DNA, 301 bp, Glycine max
cggcaggatgtttcaatggaggaaaagaaagagggagagaattatatatgggggagcacgaaattgaaggaagaaaaagggaaagaagttgaactttgagttgtgtctcacaagactctcattcatcaaagttaccacaagttttacacatgcttctatttatagactacggagcttccttgagaagctttcttgagaaaacttccttgaaaagcttttttgagaaaacttccttgagaagctagagcttagcttcacacaccccttttataactaagctcaccttcttgagaagcttctt

SEQ ID NO: 171687 - DNA, 615 bp, Glycine max
ctctagcctgctcaatggttagacatgatacatgttcaaggttcggtctggtttcaagactcaagagaagactcactctatatccgtgtcacaaatgctttcaagacgatgaggacactatatgctttcacggacatgtttgcccctgagtggtcccttctgggtatcaattacttggacccgggatggtttggctaactgatttactactctgatatcgattaccataatgatgtcatcgattacccatgttttaaaacgtgcatatatcctatttcattaggtgcgacttgtgattaaatatttgcaaatcattctaaacttgtgtaatcgattacactatacttgtaatcgattacctaagcttctaaacgttttaattttcaaaatttaaaatgaagagtcacatctgttgatgtgtaatcgattgcaccttaatgctaatcgactaccagtgactgatattgaaaaatacattttccaaagtcacaattcttcaagtgacttatttctgaagattttttcaaaagtcacaacttttttaagtggttagttttaaagaaattgtccaaaggtcacaaactttgacttgagttctcaagagattataaatat

SEQ ID NO: 171688 - DNA, 513 bp, Glycine max
agcttgtagcgtttttatagattgttatagaagctcttaaaagctgtcctgtaatctgtcaccataagctaagcagtagccttcatcatgaactattttttgtactatctgtcaattcatatacatatatatatatatatatatatatatatatacatctcagcaaactaaggttgaggatcctttttgggtgcatattttcatactcaaacatttcaagtaattctaaagagtctaaacgtctaaccattttaattcatggaatctaaataagccttatagatgcaaacatccaagatattaccattcatgataatttaatcatttgaaatagcactaactgcagataacacaaaccttattacaattgctttatctgtatatccttccccgcggtcactaaatgaatttcgcaccatactcattggctacaacatttaacgaacaagacaacgaattaataagccatgacaagggcttgaagaaatctatgaataaccctatggagaaact

SEQ ID NO: 171689 - DNA, 304 bp, Glycine max
tcttagtttcagatgatgcagatgagtttgtagctacctcgtgcactcctctaatgactatagcatcatatctggcactaaattgctgggagttggaagttatcttctcaaataaatttttggcttcagcaggggtcatgtctccaagggctccaccactggcaacatctgtcatacttctctccatgttactgagtccttcataaaaaatattggagaagaagttgctccgagatctgatggtgagggcaactggcatatagttttttaaatctttcccagtattcatataggctctgtcgca

SEQ ID NO: 171690 - DNA, 263 bp, Glycine max
  unsure (1)..(263): unsure at all n locations
agcttgcctccttcttcatactatgtgccaatatttccgaccgaagtttcagtatcctttgtctccatgtgtgtgtatatatatgagaagagatcaaatttacaccggtataactttgacaactattataccattctataatttttcaactgattaatgtgttcttaaaacttaccattgcatcgaaagttcattttacatanattacatacccccattttatattaatctacaattattcggtacccttatccatatagatt

SEQ ID NO: 171691 - DNA, 960 bp, Glycine max
ctgttgagacatcgctggcgatgcgaacccgactactaatataactacgtcatagccttattcgcacaatctgatataacatgtgcctactttctactgaggactggatttcatgtctttcacagtagcacaatctaacttccacatacgacttagctatggtatgactatacactcgaatacaccatttgctcatctctgaataagaagatatataccacagtcgtatcacaagcaatcgcctcttaggtacgaatgcctcctcactgacatcactaattatatacaccggttgcttcattgaaaacgcatctctccacaatatttcgggaagataacaacttttacatcggatccgaacacgactaaatattaatctcgattatctttctttcgacaataaatctgttgcacaaatgctctagtctaagaacgattacccagtgcggtaataatcagcctgtgtgtataaaccacccaccagtgtgtttctcactctccaaccagcttcctgagtgaggatacatattaccaagcggatggtttgtgctcctgaggctggtgacagaaggaggtctttacaaaccaaagtgagctcccggcttaaacatgttctactatcagagaacattttcgtgaaaacgtgagctcttgaatgtttccttgagctcaagaaggcggcccaatgaattacaacccaaatcctgtgttggaccgaaccacgtgtgtgtgtaaggttgacctctcctttcaaagggggaatacacgtcgttcggttcgggcctgattttcctagggcccgcctcaacaagatactcgttggcggctcatacccgacgacccttaggggggaagcctaagcctctttccaaggggaagcaccgtactttctgtgggaaattcttcttgcatggcgcaaatctatctgggttgggttacatacctaatttacctctctac

SEQ ID NO: 171692 - DNA, 508 bp, Glycine max
ttatctccaaggcatagaatgattgcacttcttgctctatctatcatctttgatttctcctttgagcttagagattcagacatcatttcttctcctttaagagcttatgcacaaccatgttgaatcaagattgcttccatcttgattctccataacccaaagtcattttcccctgaaaacttctctatatcatattttgttgttcccatctttcttgatcttgatctattccccacagacagcgccacttgttggttctttgtaaaagttccgcaactcttaaacctgcacaagatcaaaaaaagaaaaaaaatagaaaacatagcaaacaaatacagcagagcaagaacccaaagatttacatggttcaacaatatgcctacttccaatcatcacattgatcatgaaattaccagttcaatacaagcagcaactaactttgatctctctttgtttctcttttgacaaaacctctctcaatcacctagcttactacctcgtttttgaa

SEQ ID NO: 171693 - DNA, 1070 bp, Glycine max
  unsure (1)..(1070): unsure at all n locations
ggcaggtggttggttgtgtganacntataatctatgacantataatcaagtgtgagagtgntgtatagangtgaatgggaacagaggtgagagtaggatgatatgaggtggaattatatcncanccagtnncnnncacgagggttgtggacatggaagtagcnacttgtgganagnaacccactcanaattttggtggagaaaagaccctcnncncacattnatnananattaataatggtntgggacctttccttatatagtgtgtgtgtgttcagngatcataaaattttgggaacgcttagagggaaaataggagtgtaatattgggatttcgatgggaacaataaattaagggagtgggaggctcttgggttaattatggggaattgaggagagtagaggggataggaagcgtggntggttacagagattaggagaggtgttaagaaaagtatgggggagttaaagttagagggggagattagttgaggtaggggagataggaggttttgattgtttagggataaagggggtaattgttaaaagtaaatttaggagggagtagggggagaaaaatgtgaaagaggtttaagaagaaaagttagagtaggtgggggggaaatgtaattgggggaaggagattggagatgggtgaaaattgggggttgaggtaatgaattagaaatgatggtagaaggggggttatttagacaggtaggagggacgttacaaaaatgttggaggaaaggtggaataggagaaaaggaggtatgggtgtgcagtggtggttgagaggaagatgtagaggttgaggggtggagaagggataaagagaaaatgggggggtgagggataacaggggagagtggtgatggggagagagataggaggtttgggggatgaagtggtaagtattggtgtgataaggtgaatgttgagggaatgggggattagtggggaggaagggcgaggagtggtgtaatggggagagtgaagagaataaatggcggaggtaagggagtatgaaagaggaatatggtggttgtttgtgaggaaatgtgtgggagt

SEQ ID NO: 171694 - DNA, 302 bp, Glycine max
cgacgtttgatgttggtgataaaatgaaacccttttttctcttcctttgatgttgattggctaaccatggcgtggcaaacattttttcttcctctctttgactccaattttgttttatacatacagcattcatggaaactgttaaaaaccacattgtttccggggttatgatccccatacagggaatttttacgtgatgtctttgggatgaaaaatgctattggagtggaggaaacttccccttggaccccaaagctattcttttattcctttttcttcacaaaagtacttttttgatccaa

SEQ ID NO: 171695 - DNA, 911 bp, Glycine max
  unsure (1)..(911): unsure at all n locations
ccccgccccgtggaaccttccgccacaccctcccacccccctcttcaagtntaattgcggatatccttccctnctnnctcccccagccaacgagagngtgtagactcgtcggaaccccgccgatcctctagagaacacctgcaggcctgccatcttagcaaaaatagaccaaaacttcgtaagttatctaaccctgaacccagcccaacaagagggacccgaggatgaagcttaactttagttattccaaacccaggagggtcgtctaaaccaagcctatcccaacaagagggatcctgggaccaacctgatgcaagcctccttggagcttgcatgcctaggatcttcctcatcaatggattcccttgcttcttggaagatgaatggcaccggaatgaataaaggaagagagagaggagacccccacttcaaggagaagataagtctaaaagaagcccaccaccataggaggccatggataacaacttggaggaagaaggagatgaatgctcggagaggaagaaaagagcacaaaactttgggctctaaagagctttgaaaactgaagtctaaaattcaaatgatcacaagctccaaaaaaagcccacacatgacctctatttatagcccaaggggccacacaaaatcggcaggaaatctgaattccatccaaaattcacttgaatctgcgattgaatttgcggagccaaacttgggagcccaaatttcctaaatatgataacggaatctaatatgggccagcccactaacccagaaccactccacaaattcccataaagggctaaggggtcacgaggcggcaagcatgaaggacatcccacaggggtaaacatgaacggccacggggcgcacaaacataaggccatctcccccctaaacaaagacgggat

SEQ ID NO: 171696 - DNA, 282 bp, Glycine max
gatgaaatcgtgacgcactatttgcatattataaaagactacaaaatcgtaaaaggctatctgtgactataattgcggaaaaaagaaactgataaaaataattaagagttagtactgcaattgatcccatagagtacatcaccgtcactttaggggagccaaatccacctctcaacactttagattgtagcctatagatttaccatttcattttataaatcggtgtatacggcgacggtcagaccataaggtgaaactgaacaatgaataatgacatgcctg

SEQ ID NO: 171697 - DNA, 437 bp, Glycine max
gaaaatatctattgttactacccgagatacaggttttgctgctcggcctattggcaaatccaactgcatcaatgcatctttaacaagcataccacgaaccagagcagcccccaagttgacctcctttggactctaaaataccatagaaaacaaggtatgtaaaatgtgcaactagtcatatattaatcagacccttcttaaaccataaattaaggcattttccacagcaaaccagggaaggcatttcaatgggtaaaaaattagacgccaacttttctgcaaaataacatggtggttaaaacacagaagtttcttatgcagtacctaggcagtggcaccacataaatgtaacaaaacatttgaatctttcaatatttatggtatggctaagcggaacatacttgcgaaaatacttaaggtcactttagcatgcatac

SEQ ID NO: 171698 - DNA, 651 bp, Glycine max
tcataacatttagctagagggagtgtgctagaatatctcaataacatcttaatatcatagacaatagattttattctttcctatatcaaatgatgaccacaatcaaggtcacatcaactatatttgtttggaacttttcacaatatggaagatgacgaaaaaatgttgatagtgaccacaacaatgcaaaattttataatagtatgttacaacggcatatggggagaggaaaagaaggaatatacaagggcccgggccaatgatgcaacatactaccttaatcacaaaataaacattattttgtcactcagtatggaattttgcaatccacaaacaacaacatatggggagaagaaaacaaggaatgttgtatgatatatatttacaatagttacacgcctttgactaaaatattttcatttttgcgattccttgtaaagatcacctttggatccatactatataatcaaataaactcggctttataataataattcagaaataacaaagtaaaaccttttcggtgaactttggcatgtgcttctttagacgtcaaatttttttcttccttgacatgtgtttgtctaacgcggaacaaccaaagcaaagacccatctttggtggttctctctcttcctttggttctttggc

SEQ ID NO: 171699 - DNA, 309 bp, Glycine max
agcttacggtaaaatctgggacctagccatggtagaagtctccacagaggccatttgcctccctcgcccagtattatgatcaaccgttgaggtgtttcacttttggggacttccagctatcacccatggtggaagaatttgaagagatcctaggatgtcctctagggggaaggaaaccatacctcttctcagggttctatccctcattagctagaatttctaaaatagtccaaatctcggcacaggaattaaacagcggaaagcaagtcgaaaatggggtggttggaataccgagaaaatctttggagg

SEQ ID NO: 171700 - DNA, 649 bp, Glycine max
cgtatagttccccaatttatggtcattttggagtaaattttgtaaataaatcttgttttatgattaatgctgtctctagaacatttccattggatttaatgatgaaatctgtgcatttttaggtgaaaaagagactacgttttgaattgcaaaaagtagtagatgggttaagctcagcagttgggctaagcgcatatccaccgctaggcgcagcttcagcgtgcttagcgcaaaggagaatatggcagagcatcagcatcaaggtcgcgcgctaagcgcgagatcaatgagctaagtgcagcaggttccttcagccaggctaagcgcgagactggcgctaagcccaatttcacttatgcgcgctaagcgcaacattgggatttcagagcgtatttaaagcctgtcttatgcagaattagggtagacaatggccggggcacaaaattccagagcagccataagcctatttggggaaaagagccctataagcagaaaaaggggggcagattgtgcattaaagcctcaggtttgtcatttgagagagattattgagtaaagagtgagtgtgagatgctgagaagaggaggaggaatcccccttcttgtgtagaaactatcaattcttgcttttaatttcatttattgttaag

SEQ ID NO: 171701 - DNA, 424 bp, Glycine max
gcatgcaagcttggaagtcaaaattagctaaccaatgtcaacttattttcttgtagcctaagtcttgacaaacaacaattcattcaccagttttttcaaattcaaaaaggacgaaccaaaagtatatcatttggatctatggtacgatagatgccagcaaggtcccttaaagtgatgttcttcaagctaggaatctaatctatggcagagtctaaatgaccatttgtcaaatagtttgcatttgaaaaagaagatcataatagaaaaatattaatacatagatatcataatcataagggacttgctaattactatacttggttattagttaaagaactaaaagaagaaaatgatattgcttattgaattaaatactacactgctattgtaagacatagtctgctttttcaccaatatgttacat

SEQ ID NO: 171702 - DNA, 498 bp, Glycine max
cgtgcattcaatatcctgatgagggtgttccatatgttctcaagactggactaatacatttgctgcccaagtttcatggtcttgcaggtgaagatcctcataagcatcttaaggagttccatattgtttgttccaccatgaagccccctgatgtccaggaagatcatatctttctaaaggcttttcctcattctctggagggagtggcaaaagattggctttactaccttgctcccaagtccattttcagctgggatgaccttaagagggtgttcttggagaaattcttccctgcatccaggaccattgccatcagaaaagacatttcaggcattaggcaacttagtggagaaagcctgtataagtactgggaaagattcaagaaattatgtgcaagctgttctcaccaccagatttctgagcaactccttcttcaatatttctatgagggacttatcacctggagaggagtattattgatgctgccagtggtggagc

SEQ ID NO: 171703 - DNA, 486 bp, Glycine max
agcttatcttaatgaaaaagggtatgccaaaatatgtatctccagaagattggaattggctaattaaacacaagtagagtggttcaaaattttaagtaaaattattttattattttgaacataatttttttaataggtttacacttataatataaaatcacttatactttgatgtaggaaagaagcttgacaaacaaagctaattgaagcaagcaagaaataaaataaattattgaaaaaatcaattgtgcaaaagacatttgaaatggtagcatcttttaatattttatattagttttcttacaagttatataaaataactcattttttattttgtgattatttttatatgatatatgaaaggttggtgaaatttataaagacattatgcattatattatattatttaatttgttttttactatataaattttaatagaaaaaagatttaatatctggtgaatgacaaaaaaattaaggtaaaga

SEQ ID NO: 171704 - DNA, 440 bp, Glycine max
aaggtgaactctgatccgaatatacaccgggatagcaataccataagtccccactgatagaaacaaagtatctagaaatgtgacactaaaaaatatacaatatctatcagcggtgagaacaacaccgaaactctatcaaaccccaacctttcatatcaatgttgtgctgaaaaagacctaaaaccaatcacttaattatttgcacctcatccttaggcaacttgaatctctcaagtaaaagtcatacatacctgagttaagaatccaatggttttaaagcatcttttttaaacttatttataaattttagatcctgcatgaatccatattatagcaattaaacctgcaggatgactatgcatattcatgaaagggaaagtcctaagacacagattacaacagagataaaattcagctacaaacccgaaattctcacaaga

SEQ ID NO: 171705 - DNA, 432 bp, Glycine max
  unsure (1)..(432): unsure at all n locations
aatttgatcatgaaaattcctttncagaattttaccctcatttgcgcatttcatcagagcaacaattcaacaattcaatttggagaagaggttgtctgataaaagctttgaccattcaaaatggactatttcctcccaaccacgctcaagaagccaggaggtctcaaatatgaagttcctaccaaaaaattttctttttgaggcatccaggtagaggagaataaaggagtgatcagatttggcaagaataccttttgagaatatggagttcgggaaaagatccatttaatcaatagttgcaagaaccttatctagtttctcctcaataacatcatgttttcctctgctacgggcccaagtgtactgatatccttccatggggagatcgtgaaggttacaattaaaaatggcttttcttaaaccatggggcta

SEQ ID NO: 171706 - DNA, 1167 bp, Glycine max
  unsure (1)..(1167): unsure at all n locations
ctgacatatatatgctgagttacagaatacttatacctctattatataagacttgaatatggatctattgatattaagtaagttattatataagtgctgcctccactgaacgccnnccgagattttttgacatccnttcctatgtacngacactatanaatactcaaacttccctgtgctggaatcaacttgggaagtatcgaaaactgttgcctttctcatatttacaaaactgcatttctctttggtggtgagaggaatatatgatatatctcacttttaagccatcacatgtaaatgaatatttgcccatggaaaaaaatatttcaatgtacctacagtcaagataggtgggatgacaactaaaggttctacacggaaatttatgggtattctctgtagaaagttaagatccgtctcttctaaaatttgagccatgatccatttggttgacagcctgcttcttgggataaatatttccgagaaataatgggctcaaaataaaatttcccatcaatttgtaaaggaagccaatttttggggaacatttattaccacttgtagtctcgaggttcttaataaggaatatttaataacaatgaagttggctctgaaagattgggatggtaatattgtatgcgcaatgaaaaagcctttgtgtttcatagctaattgatacaatagaattcacacaataatgtaatgaacgcgtaccagagactcaaaatggatgaccgagatatatttgatttttacccctatgggttaaaatacttgaacacacaaaaggactttaggttagaatgaaacttatgaaggatttaactatatggttgaacaataagtgtgtaaacacgttgtgagactttctgggacctatttgaaaagctttgatataaatatgtaaaattaaggtcctcccactatccaggcacttacaaaggctctataaatatgctaatagcacacattaattatatgcgataatgactgatcgggaaattctttgtttctgatgctgcaaatatgaaatctttcggcggtataaacaattagcacatgtcttactactaaatacaaacaactatactttggctaaataactcatgccgcttagacactaatacagaataggtttcatatctaatattgaaatgagagaaagcc

SEQ ID NO: 171707 - DNA, 881 bp, Glycine max
  unsure (1)..(881): unsure at all n locations
caaaaagggggaaatactctcgcttcaacatcctntcacaacttcgccnacctcccctcaactcgcgcaaacatcacgaanaaagagttgacacgtgcaccccccnnntttnaaaancccccaggcntcaacncggaacgtcacggagaaaacactttttttttaggaacacgggaaaaaaacccggggaataatataaagaagtgaaaaccgaaagaggtaaaaataaggaaaacggggaggaaggccgagaagagagaacccggggggagcgggagaaaggaaacagggaaaagaacagaaagaaaaaaagggcaatgggacgtagggggaagagggaaaagcgtcaaacgaggagagagactcgcggacaacaagaaaacaggaaaggaagcaaagggcgaaagggggaaaagggaacgaagaagaaaggcaaacagaggacagcggaaccgcgggcagaagagaaggaggaaaggcggaacaacgggagaagaaggaaactcgcataacgcagaaggaagaaatggacgaaaaaggggaaagcggaaacagggaccaggagcgaggaggccgaacagcggaagggagacagaggacgaaaggcgagaaacggggaaaaggggaaaggggagaaacacgagaaaagggggggagacgggacaagaggcgggggagcgcggaggggagaaagaggggaacaggggagaaacagggaagcagggggagaaaagggacacaagacgaaggaagaggggaagagagcgagaacgaggcggcgaaagaagaccaacgagagagaaaagcgcggaccaagggaggaagaatggaggagaaagggagaactacgcgcgaagaacaacggaaaaaaggggagaaag

SEQ ID NO: 171708 - DNA, 305 bp, Glycine max
tgcagggataacttggattgaattttacgaccttatgatggccaccaacaattgttcacctcagaacttcattggaagaggtgaggttgggatggtttactagggcattctacctgatggctcaatggttgcaatgaaacggcttgaataatcaaattctcaaagagatgctgtgttctaaagcgaggaggacattgttaagcaccttgaagcaccgtaatctggtgccattaaaaggaagttgcaccattggaagaaccaatttgggaaattatatattgtgatggtttttaaagatatttaac

SEQ ID NO: 171709 - DNA, 330 bp, Glycine max
agctttccatcttgaagacttgcttcagagataatcttaaagaataagatttctgaaggaagaggatgcttctttttcaatttggtcatggctgttgttgtgacttggattctatgaaagaaaaggatttctaaaggaagagattaggacgttttttgcagctgcaggaggcaactgaaatgagtaagtaatctgtgccactggtaatggtgcatatatttttactttggaaagagtagaaagtttttattgaaaaatgttatgtatatttttttttctaacctacgtaaccttgcacaagttaagtgtctttaataatcccccaccccc

SEQ ID NO: 171710 - DNA, 587 bp, Glycine max
tctaccctattttcctataaatagggggagaggtgaagggaaaaaatgtccagccctcctggtaattcgagatcacttgaaattagtgaaaaaaatcgtttccgtgaagaaaatccaagccaaggcacttccgtaacgttcccataatgtttccgtgggtgatttcacgaagattttcgaccgttcttcgacgttcttcgttcgttcttcgtcgttctttggtcttcaaccggtaagtacccgaaatcgaactttttcaattcattctatgtacccttagtggtcctcatttgttttcacgtgcttttattctcatttaatttactttctgtacccccttttgacgtgctttagtcatttacttaagtcattttctcccctaatcaaaaataaaataaatttccaccgatcatttgaattgtaacattcgttaatctctgttaaaatgaaatctgaccgttcggtcatgccataaccacgttgggtaaccaaatagagggtaaattctaatataataattcaaaatatccttttagtaaaattaatcacaaaaatcaatcggacgtttttttttgggattttttttt

SEQ ID NO: 171711 - DNA, 578 bp, Glycine max
agcttttttttatcacaaaataagctattccaaacatgtactaaaatgtttatcacaaaattaacttttctggtaatttcaaatggtgatattgatgtagatgcatgacttattttggaacttggaagcaacaggtctaggaaattatgacaaatatcttttgttgcagctccctttaatttcacagcataattctaaactttagtataatttgtatgcaggtatgattgggatagttgattataccaattatgatgatatgaaatatgctgtaagtgttctaaacaactaaacctgtatcttgtaattgttatcaggatctgtgttttacttgccttggtgtctttttaactagtacttttgttctacttctttaactttgtattctgttacagatcaggaaacttgatgactcagaattccgcaatgccttttctcgtgctttcatacgggtgggtggatattatatttggctacattctgctttcaatatttttttagttgcttttgttaatgtacatctctgattggtccaagtgagggaatatgattgaggttattctacaagtcctagtcgt

SEQ ID NO: 171712 - DNA, 625 bp, Glycine max
tcttcaacccatgatactcgaagagttctgaaaaaacaaaacctttagtctttagccattccaagtttagaaacatgaagtgaatcaactccttctaagcataattgtacacgtaggacacttcataatgttcctttgaaaaccatgaagtgacctttggagagggtggtggtgatggagaccatgttgtccttttgcccttattggaagagtgaccctttgtaggctcattttccttttgtgatattgtttttagggttgtaggtctgtgcctaatgctcttcatcttcttgcctttagttttagccattgatggaggttaaggataaaggacgaaaaagaggttgaaaagggttggagaagaagataggatgtgggttatgtctattaaggtttgaaaaaaagggttgagtgttagaaaagtgaggattttaggtaaaggtttaggtatttacaagaacagagaaagtgtatttttgtttctaaaaatgttttagacactctgtaatcgattaccaagtgttgtaatcgattatagcctaccctagaaagagtttaaggcctcttcaaaaatggtaatcgattatcaatcagtgtaatctattactcccaacccttaaatcct

SEQ ID NO: 171713 - DNA, 433 bp, Glycine max
  unsure (1)..(433): unsure at all n locations
agcttaaaataaaataccggacccttatttatttacanacattttggatgaaactagctacacccatattgtaaccacacggcgctgtattgtatgaaactgataaacgatgatgatgtccacacaatgttaatggggcaagagcaatttttttgtgttggtgcgatagaactattatgctccgttggaagaacaccccatggaataataaacttacttcaacccattatgccccctactcatgacgcgatcctgtattacaacaggaaatggggcatgccaccgcagaacaaatttgttggatgcgcgttcacaggaaaaaatcctaagaaattttaaattccttcaacatgtaccatcgatgaactgaaggatttattaagcaagttgcacctaaaaagattctccctcttggaaatcacgaatcacaaac

SEQ ID NO: 171714 - DNA, 843 bp, Glycine max
ccttgatcacgtctctaaccaacccaacactatttctaaactctagaccccgtctcacgatccacaatcttatcgtacatcggtgagtgattttctgttatgcaccttggcatgcgatctacgggcggtctatagcttttgcgtagacatttaccgcttagctctgggcttgttgtgggtggccagactgtaaattttgagttgtacccggattgaggcctcttgaaattcattcccaaggctggcgcatatattccgatgagtgcaaaattgagggcacgaagcccaaatgacctcttggcatagaataacaatgggtgtcacgcgctaaccgccatataaacgaacttagtgcaacttagggagcctctggtgatctattacaaaccggcgctatccattactctcactattcgcgcctcgcgcatccttgtgatttcatatcggatctaatgccggcttatgcatagataatgcatactactggcggtggctcaataatgcagagcccctgtaagcctattccgcgaagctgagcccttcaatcacaaaaaagggggcagcattgacaatcacattcctttggcttgaaatgttcatagagaaccttgtgtagcaacctgagctagattattctgggaaaaagtctgccgcttttctcctctatgttgtcagaaactaaatgtccgttgcacttaaatttcattttatatgtacagattctattgcctttggtggcctttaacaacccctcttggggtatctcatggagccgtctatgggactacctctcaattgaatgcgatcttgttttgttttcctcaaaacaacctttaacggacc

SEQ ID NO: 171715 - DNA, 392 bp, Glycine max
agcttgtatcttttggtcatactagtagtgtatcttctactgtgagggttcacgacaccacgaatattccaggagagcacactcagaattgtactatccatacaaaactaataaagggaggagcagatgagagccctactgaggtccaggatcaaagtatttggaccatttccatgtcttaaacatggttcttctccatcatggaggggagacgcaccatgttcctacccaggatggaaaacccgagtttagcattgggttgggaatgcttgatcacgctcttaggggggtaggcctaggagtagcactacactccttgtccaaattctcctttttttccccacgagttggagttttgctggctacctggaaagaccacgcaccccgtgtcc

SEQ ID NO: 171716 - DNA, 435 bp, Glycine max
tcacatgttttggatcagctttggatgtatcaaattgtgcctaccattttacaaatgcattcctttgtagtgatggatattgattagtttttttagtcttactgtaatgatattgccatgaaaaaatccatgacaaagcaaaagtggagaaataagtctaccggaatttgtgattcctgagaaattaaattgttttctaaattgagcaaatccttgttgaacctgctctgggaaaatctccggaatagggccaaagaaattccaccattgtaagaaccaatttgggaaattatagattgtgttggttttgaaagatattaaccatgagtgcttgaagcgggtgttttggtgccaaaaaacctttgtccaagcattaacataattccaataggtataacctacaggatcaaatggtactgaaaattttttcccctt

SEQ ID NO: 171717 - DNA, 438 bp, Glycine max
agcttgaatcggacatctgtgtgaaaagttatgtccatttgaatttttcaagagcttccatttttaaatttcgagcctctcaacatattatgcgcccgaatcggacatccgtgtgaaaagtcatgatcatttgaatttctcgagagtttccgatgtttaatttcgagcgtattgatatattataaccctgaatcggacctcagtgtgacaagttatgaccatttgaatttgacgagagcttccgttgttcaatttcgaatatcactatatgtgatgcgcctaaattggacatccgggggaaaagctatgaccatttgaatttctcaagagcttccgttgctcaatattgagcgtctcgatacgtgatttgcctgaatcggccatccgtgtgaaaaagtataaccatttgaatttctcaagagcttccgttgttcaatt

SEQ ID NO: 171718 - DNA, 366 bp, Glycine max
tttgagaaattcaaatggtcataacttttcacacggatgtttgattatagcgcatcgcatatagagacgctcgaaaatgaacaacggaagctctcgagaaattcaaatggtcataacttttcacactgacgtacgattcatgcttataatatatggatatgctcagaaataaacatcggaagctctcgagatattcaaatggtcataacttttcacatggatgttcgattcgtgtgcataatatgtcaagaggctcaaaattgaacaacggaaggtcttgagaaattcaaatgttcataacttttcacacgaatgtccgaatcatgcttataatatatcgatacgctcgaaattaaacaacggaac

SEQ ID NO: 171719 - DNA, 473 bp, Glycine max
tgcttgggattgatcctccaaagggtgttttttgttatggccccccaggaactgggaaaacacttttagccagggctgtggctaataggactgatgcttgttttataaaggttattggaagtgagctacttcagaaatatgttggtgagggggctatgatgggtcgtgaactattttaggtaaaatgcacaagactccgtcctctagcttttttttatcattgtttcgatgaaaataaatcattcgactaaaattttctgatttttagatggctcggtcaaagaaggcatgcattgtgttttttgatgaaattgatgcaattggaggagctcgatttgatgatggttgtggaggtgacaatgaggttcaccgcaccatgcttgaaattgagaatcaccttgatgggtttgatgctaggggaaacaataaatttttgatggcaactaacagggtggttgaatttattgtgagag

SEQ ID NO: 171720 - DNA, 456 bp, Glycine max
acccgatactatacacaaccctagcttgtattatataatatccttgaatcttcaatcaagaatttgatattctgaaggccaaaaataccgagatatatttaaaaaattattaatctatcctaataaatacttattcatattctcaaatcttgtatcatatccttccattcattatattttttaaaaataaaattatctgtcaacaatgtcataccataatggttatctaatctaaactatttaacctggcaaaacgataatttttgttattatgatgaacaagaattataaattataaaatcttagtcatataatgaaaattaaaaaaatacatataattttgtaagtgattattcaaccagtaataaaaattttaggttaattatttatataaaattaaattagtcatttttattcttatataagatgatgatttacattaagatggagtcaatg

SEQ ID NO: 171721 - DNA, 522 bp, Glycine max
cagctttgaaccaaaaacctgactcaccataaactttgacccaaggggagaaagacaattcttaccctcggaaaccaaaaaaaaggggagagggaaaaattccaatcctagaggaagcccctaaggagagaaggaaaatttccaatcctacgaaaaaaagagaggaaagggaatttccaatccaagagtgggagaaagccccaagaaaagaaagaaaacccccaatcaaagaatgggagaaagaaaacagagaagaagaaagggaagaaagctcccgatcaaaaaaaaataatatgccgaaaggtctttggaccggacaatatctgaacaatacagaactgtcaccaaatgaaaaaaaagaaggaaagggaaccatgacctaaaatgggcttccccccttaattgacaagcaaaaacttgggcgctaacaacctttttttctcccgcactaaacccgaacagaaaaagaaaaagcccgaaaaatccaaagcccaaaacacccaaaagccgcgaaaaaaaacc

SEQ ID NO: 171722 - DNA, 1253 bp, Glycine max
  unsure (1)..(1253): unsure at all n locations
tagcgaagacgcgccgggangtcaaatcatccaacacgctcagaaataccatactcngcgtgtctgttacaagagaccgatccctgctctcnccaccgggcaccccnaacgggattgatgaccgtcctaccaacgtgacacgacacnaatanaaaancctaccctaacccatgaacacgggagctagcgcctgcaaaaaaataaagtctctttggttcatcagccacagcccaatatggtcaacaagcgcacagtgaagggactgttcccacctaaacgtagaaatgtccgctccaagaacactcccacaaggacgccccttagaaacaaccaccgcaaagaggtcggcccacacgaggagcagctgacgaaaggccgttcggaaacacccccgacgtctacggcgccgcggacctatatacgcggggaagtcgaatcncaattgtaacgggcaaggaacgataggcacagctgggaatatccaagaggagtcatatggaggggaaaacctagagcgccctcaaaaggccccgccacgcacaagtcgacccattaagaacaatcgcccaaaagaacgggatggcccactgggggaacgacccatggcaaattaccaccgattagaagaaagggctcccggacacacaatagaaacggaatgcggacgccagtcaccaacctctccgcggcaacgaaacaggacagggctcacacgaggctcgtatcaagccaaatagccaacctccttcgtggataagagacggacaccacatttcacatgcagacgagcctatccaccgtctanacattcgaggcatctcatcataatagtggctgcgggaacccggacancgtnacgaccgctcgaaccgctagcccgtgcgtgtgcatcgcctcaccacaagcgacatatccctcatgacgagggagtatcgcaaaggacaccatggatcacgaatgccgcatgaacagcgctcggaagccatacctcagcggcgtgcgccaacggttgcctactggcaacgtacgctacgcaacaaaaacatccgcgtcaaactgcatccccnggccgacacgagccatcgctcttcgaggacgnccgtccaacgcgcgttataacaaangcgccactcgtacagagaggcgagtcgccgaccacgagcgacgacagcccgncagctgccactcacattcactgatagggcatcgcgtaatacagggacgcgcacatatctacagcagacacaccaccc

SEQ ID NO: 171723 - DNA, 366 bp, Glycine max
gcatgcaagcttgtgcctcttcagctattagtttcacatccacagtttgtctgaacatgcaaatcatatgctaccaataatggggaataaaatttcaaaaaatcttaacttctataaattaaattgtcaataacgaaaaatataactatcatatatgttgtaacaaatcatttaacccaaatcatatgtatcacgttaaaaagtttaatgtcaaccttaggtattatattccccttgggtctattaaatatttttttcctttttgtcagagttgttgttgagcttatgtgtttgttgagtgactatagtcagatgtttatcgatgttattcttcactccaccattaatggttccttgaaccttgat

SEQ ID NO: 171724 - DNA, 533 bp, Glycine max
tgcttctacaataaggtgatgtccttcggactcaagaacaccggggcaacctatcagcaagcgatggtagctttgttccacgatatgatgcaccaagaaatcgaagtgtatgtggacgatatgatttctaagtccaaaaccaaagaagagcatctaatcaacttacggaagttgttcgagaggttgcgaaagtaccagctaaggttgaacccagccaagtgcactttcgaggtcaaatcgggaaaactgttgggtttcatcgtaagccaaaaagggatagaggttgaccccgaaaaagttaaagccatcctcgaaatgccgaagccatgcactaaaaagaaagtctggggtttcttggggcgcttgaactacatcaccaggttcatatcacagctcacggctacctgcaagccgttattcaagcttttgcgcaaggatcagtccgttcgttggaatggtgattgtcaagaggtgtttggaaagatcaaacaatgtctcatgaaccccctggtactaatgccaccggtgggtgg

SEQ ID NO: 171725 - DNA, 201 bp, Glycine max
cagcttgttgcaaccttatacgcgaaaatgacatttttttttgccttaatgaacaaacacccatggtgacattccattttcatggctgcgtcatgcggggtggtggaatgggtgttcttgctgggccgcgcgcggtggttgtggaaacaccgcacctacatgggcagttacaaatgcgccaccttggcctttcggcactga

SEQ ID NO: 171726 - DNA, 941 bp, Glycine max
  unsure (1)..(941): unsure at all n locations
gatagggagtagtgtttaatagttcggttattatgttaattcgttgtttaataaggacaagataanttttttctataaancnccgggttgttgatgtcatcggatagaacccacttgatanttataaagantnctgacttgggatgtaaaaggagtggaaatttagataatgcgatatttattttttatgagcgatgtacgagaaataaggatagtgatgtattagaaaatatttgacagactgcaataaagttatcaaagaggactgataatcttaataagtataatgaaatgatatattgtagtgaaagagaaacacgtctgaagttttgtattaaacgtgaacagagaacagcggatactatcaataaaagaaaactgatttatagtaaagtaagaagagttacgaaaaagacaatactttggtaagtttgatatgaaaaagatgaattgtgatctggacaaatggaagaagtatttaatggtagttataactaaggagtatttgaagctagttctattgaaggtgtataattataattttgtttaggaaggactgacgatatttcttagactaagtgaagaaattaaatttttaatgcggggagattgtgaagggatattaagatgaggataggagatggaaaaggaggtatatagcaaaaggtagtgttatattaaatgtaattattttaaaggaaattagggaagagacctttaagtgaaaagtaaagagatcggttattctgaaaagcattagatcttattaaagatgtctttgatggaatgaaaggggtttaagtaaagagatattaaatttaaggtagatgaaaaaattgggcatgttggttaagataaatgagaaaggctttgttgattggggaggatctggatgggaataaaagggaggttggcgcggtaaagaaagaacggtttttgtt

SEQ ID NO: 171727 - DNA, 473 bp, Glycine max
agcttgtcagtttattcccaaaaacctgcctagtccaagaatatggctttcaattgaatgacaatagtctctaaatcaattcattggcgtatcacttcactcacttgaattacaacatgatagatacttaactgataaatcatatatatgtgatatgagtaattaattaaaactatatatatataggacaaagatatattattgattaaatttttaaaaaacaaaatattgttagtgattatttttttaaatgaatatatgtaacataattagaattgacagtaaactgtatggtaaaaaacacagttataatattaagaaaaaaatttaatcaaatctcctattttaaatataactatgcttattataataaaacattaaaataccataattggatttggatgtcctaaaacaactggcactaatcctttttaaaaaaaacttataactcaaattgataaaagcttatcaat

SEQ ID NO: 171728 - DNA, 1063 bp, Glycine max
  unsure (1)..(1063): unsure at all n locations
agcntttgattgnactagacgacccattcngaaaccnaacctcgaanacctatttnacaacatctcacactccctgagtttctctctaatcccattaaagagacaggtatatcgccatctatttcctcctatcacagcacaacgcctattttggcgctggaattgctagttttgcacgcctgtcaaatttaaatggaaaagtcttttggttactattgataaatcatttatttttggcgaatggactaaatacctagtttgttatactatcaattattaaatcatctttttggggaattattttactcccattgnttttaaataatatcgaaggattttttatcttttgattcaatataaattttgttttagaatatattaagctccttatatgacgaaatattcccctactctgccttttctctttaattcaaaacaagttgtattctcgactatccttttcttcaaaaatattttgacttttcttaaaattcattttatttattttctttattaagaaatcatatcatcctttctttttaattagtctttgtaaactaatagaaaaaactctttttcagaaacttacacttctacacctccacccagggaagacaatttcactctgtttactaatgttcttgtgtgcagaatagttctcgttactgctaattttataatccgcacagtaatatgacatctgctttttcctatgataagaaactattctgtgataagacttcagtcaattttctttgtattttatttgaaatatctatgattctacgtattaatacgggttgtcttataataaccttacaacgactccatctattatccaatacaataagaggggatgcctatactgggtctttcatgaactaattatttcttttatcggagtgctaattaattgcttaaatacagttcacaattctgtgtcgacccgtgaattccttctccgtacaataatatactcactttataactccatttgtgggatcttaccgtctatccttagttctctccgtattgtctacaacttcacacgattctgatcacg

SEQ ID NO: 171729 - DNA, 190 bp, Glycine max
agcttgtagcaaccttagacgcgaatcttccattctgttctgcctgaatgaacaaacccacatagggccattccattttcatggctgcgtcatgccgggtggtggaatgtgtgttcctgctgggctggccgcggtggctgtggaaacgcttcacctacgtgggcagctacgacagcgccccgttgccctc

SEQ ID NO: 171730 - DNA, 568 bp, Glycine max
tatgaaaataagagaaagaaactttcaaaataaatttgtatattaaacaaattatttttggtcaccttgttaaataaatatttattttagtcaaattaatttataagttagtcgaataaacttttataatctaattaactattagagcaatttggcaatcatacccatggttaaagaagttatttaaccagtaaaaaaaacttttaggaattaaatttacttaaaatatttataaaacatatatacttttttagggtaaacgtatgtacttaaaatatatcctttattcaattttgttagacattttagtaatttatttgtttcattttaattgtgattttataatattgatgatgtattaaatatttttttcttaatatatccattatcggtcatcattaagtgagaaaacaaaaaaaagtataaataaaagatagtccaattaatataaaagaaaaaaatattataaaaattgcataataattttaataaaatctataatataattacatatctaaatttctgtaccaaaatttgtccacaaataaaatggagggattttatatta

SEQ ID NO: 171731 - DNA, 553 bp, Glycine max
  unsure (1)..(553): unsure at all n locations
agcttatggtgaatcaaaggtgattcaaaggtgttttgatgataacaatgatgataacaaaagatgatgacaaaggtgatgacaaaaagctcaaagatcaatcaaaggacaactcgagtgaatcaaagattaatcaaagaacaactcaattgaatcaagaagaattcaagagttcaacataagaatcaagaagaattcaagaatcaagaagaaagtttagagtcaagaatcaagattcaaggctcaagatctcaacaatcaagatcaagattcaacactcaagattcaagaatcaagagaaggcttaatcaagataagtatgaaaagtttttctcaaaaattgagtagcacatgatttttctcaaaacatgtttaccaaagagtttttactctctagtaatctattaccagattgttgtaatcgattaccagtagcaaaattgttttgaaaaagttttcaaattgaatttacaatggttccatttaatttcaaaaagttgtaatcggttacaatgtnttggtaatcgattatcattgcctttgaacgttgaaa

SEQ ID NO: 171732 - DNA, 503 bp, Glycine max
tgttttaaagatttagggttgttaagatctacctctttgtcttgttctaattttgactattttgatgtcatgtcaattatcagacacaggttgactttctcttcatcctttttatctgagatggagtcatcaaagtcttcctaggtgctcatcaatcatttcttgctctttgagttgaatgatttcttcttgtctttggtcttttccaattctaggcattttgatttgaagtgtccaaacattttgtattcatagcagatgactagactcttctcattgtcccttttttctttgaaatcgtcatagttagggatgttaatggggaagggcaggggaaaagagtactccctcactccccaccccctaactaaccctctatcctcgtccccgatccttgctgtgagggatttttttcccttgttcccgtccccgcgggtcctcactaacataatattcaaactcaaataatccatgtattgttaaactcaaataaacaacacatg

SEQ ID NO: 171733 - DNA, 1080 bp, Glycine max
  unsure (1)..(1080): unsure at all n locations
accgagagcactagtgatccaatactctcagactctccccctcancaaacncgtgcaactagtgcctattcatcctcactcccagcncnccaggatgagacatggaaacacttcaaaaaccctanaaaattcgagaggaaaccgccgcggctaccccctcaaagaacaacacataatttttctacttttataagaaaaacgggtacatgcgcggagagcggcgctaacaccgcgcacataaaaagtagacggcagacaaaaaacgtccgcagcggacaaaaaagccaacgacgcaggggcctatggagaacgaaacgcgcgcagggtgaggcctggcgagagaataataaacgaggctcgtctgacatctgggagaataaagaacaatggcaaccgcggtacagagtgtgacaaacaagaacaaagactgggcaagaggagtagctggacgaaagagagcaagagggggactcaacgaaggagaaagacgcgcacgataggtggcagggcacaaaagacgccgccgggagagcacaacgaaaaaaggcagccaaacaacgagccccaagatgacaagaccacgcctcgaggcagaaaagagagaagagcgacgcaaggcagaatacggcgtacggtggaacgcccgaaaaacaaacaaggcgacacaagacgtgtgcgacagaagaaacatcactgaggcgaacgacgcggaagaagcgtgcacagcaaggggcgcagtctggagcagcagcacatcagcgcagaaaatagccttcgactcgtggaaatccgcaggactgaaagatgcggagcgaatgctaccggtacacgacgtcggccaaagatggaaacaaagaagagcgataaactgacgggaagggatatcggaagatacataaatcaagtccgccgacacaccacatagaagacggggaagcacgccggggaaaagacgggggaacgagacaatgaactagcgacacgaaatacgagaagcacgcaggcgaaaaaagcaagcagatagacgacgaaggacaggcgaaccaacgcactggcacaaaagacgagatggtcatcgcc

SEQ ID NO: 171734 - DNA, 175 bp, Glycine max
agcttgcatgatttacatctccccctttctcaagcaaattcttcttgatatcatcaaaatcttcatgatcccgactcgttggtggaggatgcatgaatgacaatcaattcatggggctccgaataaaagtggagaatggaggataggcgaacgagcgctaggcaatcaattcgcg

SEQ ID NO: 171735 - DNA, 318 bp, Glycine max
tttcaactcattctatgtacccgtggtggtccacattttgtttcatgtatttttattctcttgtccatttgctttttatacccctttttgacatgcttaagccatttatttaagtcatttctcgcttaatctaaaaataaaataaatttccactgatcgtttaaattatatcatccgttaattttggttaaaatgaattccgaccgttcggtcgttccgtaaccacgttggaaataaaaaaagaggtaaaataataatataataatcaaaaaataccttttagtaaaataaaagcgaaagatcaatcggacgatttct

SEQ ID NO: 171736 - DNA, 189 bp, Glycine max
agcttaggagcctaaacttgtatcttcaatgcaaggaaacatgcttatggcttggaatccaaaatttggttttaggattagaaaagcatgaaaatagggacttgtttgtaagaatttgggctgccccatgattggtacttctgcacctaagtaacatgggaaatgcttttcaatggtgtgtagatatat

SEQ ID NO: 171737 - DNA, 497 bp, Glycine max
atttacattttcaaagattacatattggggaatctaacataacagacaatcgattgtacaaaacaatgataggagtaaaatctagtaacatcataatttaaactcactgcgacggataaatgacaatcaccatactcaagagcctcatggataatgataagatctttcctaccctaatctaaaaaaattagacgattaaacaatttatgtttggtgactacatagtggcactaatatgtaaatgcaaaaatgctgacctggccatgttcattgaaagtatcgagtccaacaattccaaggtccagatctccagataacaattttcttgtgatgtatttgggcctctaaaaccaaactatgagtttggattgctgcagtaatgcaagagaattggtttatggtcatgtagagatatagtacattgatggaagccaagggaaaaaatagaacgcacatgaggaagcaactcacttaacttatttctgctttttggatca

SEQ ID NO: 171738 - DNA, 342 bp, Glycine max
agctttgtatggtagaaggtgtaggacacctctatgttggctaaagccctgagaagacctcaccttaggacttgaagtggtacaacaaaccaccgagaaagtcaagttgatccaagaaaggatgaggactgctcagagtaggtagaaaagttatcaggataagaggaggaaagacttggaattcgaggttggtgatcatgtattcttgagagtcactctgtggactggggttggtcgagcattgaaatcccaaaaactaacacctcgcctcatcggtcctttccaaattcttaaaagagtcggtcctgtggcataccaaaatgcattatccccatcacattc

SEQ ID NO: 171739 - DNA, 282 bp, Glycine max
gccgcagctttgcttctacaaacacccggagtgggtgctcctttaagaataaggggaacctataagggtggagcattttcgcaaaaaaacgtgaccctgactggtctgcctatgattttacctacggagagggacccgaatcggcagagcggggtctggcttggcatgtacttctaagcgcccgaagagaatttacactgacatggtaccacatggcatatacgacagaaacctagtgtatatgatgcataccgcttatgcaatgatcgatatcgattaact

SEQ ID NO: 171740 - DNA, 572 bp, Glycine max
  unsure (1)..(572): unsure at all n locations
tgttaaagaacttagaaaaaatcaagaacaagtgcgttcgcacatcattcgcatgtatgatatccactctacaaggtttgaagtaaaggagaccttcaatcctataacgcaacatggcggacaaaagtggacagttaacttgaatgaccattattgtcaatgcggaaagtattttgcgcttcactatccatgttcacacattaatatttcttctttttcagtctttgtaagttcacactaaaattgaaaaaaaaaaacttagaggtaccaaattgaaaaattacacacttatatgaaccaaaaatgaacaaaaaaaattccatgcataaaacttgaaaaaaaatgcaaacttatgggaactgaaaataaataaaaaacttagagacactaaaattaaaaaaaaatgtgaacttatgaggacaaaaccatatttaggcctatttttcaactgaattacagtctattaatattgacaccctttgngtttttttgggttcttgctacatcaatctcgttaaaagaattttacatcacactttaacctcaaaacctttatattccaataatctccc

SEQ ID NO: 171741 - DNA, 434 bp, Glycine max
aaaaatgttcagccctcctgttaattccagatcacttgaaattagtgaaaaaaaattgtttccgtgaacaaaatccaagccgaggcgctttcgtaacgttttccgtgggtgatttcgcgaagattttcaaccgttcttcgacgttcttcgttcgttcttcggtcttcaaccggtaagttcccgaaatcgaacttttcaattcattctatgtacccttagtggtcctcatttgctttcacgtgcttttattttcatttcatttactttccgtaccccctttgacgtgctttagtcatttgctttagtcattttcttgcctaataaaaaataaaataaatttccaccgatcatttgaattgtaacatccgttaatttctgttaaaagaaatcggaccgttcagtcatggccgtaccccgttggaaaccaaaaagag

SEQ ID NO: 171742 - DNA, 582 bp, Glycine max
ttgttgacaacactgtggctgcagcattcaatgctgaccttgtccaacctccatcacccttgctgcccaaattactttgatctctaagtacatcatgatgtaagctccattggagcttgtaggcctaggatcttcttcatcaatggattcctttgcttcttggaagatgaatggcagtggaacggataaaggaagagagagaggagacgccacttcaaagagaagatgagtttagaaaaagcccaccaccataggaggccatggataagagctttgaggaagaaggagatgaatgaagggagagggagagaagagcacgaaattttgtgctctaaatgagctctgaaatctgaagtttaatattcaaatgatcaaagttgaaaaaaatgcacacacatgacctctatttatagcctaagtgtcacaaaattggagggaaattcaaatttcacttgaatttgaaattgaatttgtggagccaaaaattcacttaatatgattagtgaaatttaattatgtttcaaccccactaatccaagatcaattccaagattctccactaagtgtgcttaagtggcatga

SEQ ID NO: 171743 - DNA, 559 bp, Glycine max
agctttgcggatttggtcttcaccggcaaaaggatcgaagtgggtctgaaaagaggcaaatttggtcatcctgctttgatgaaaactggggcaagtgaagagggtgagaatgagggagaaacccatgcagtgactgccattcctatatggccaagtttcccaccaacccaacaatgtcattactcagccaataacaacccatctccttacccaccacccaattatccacaaagttcatccctaaatcaaaccacaaaacccacctaccacacgaccaatgctaaacaccacttttagcacgaaccgaagcaccaaccaaaagggaattttgcagcaaaaagcctgtagaattcaccccaaattccggtgtcatatgctaaacttcctctcatatctactcgataattcaatggtagccataacccctgctaggtttcctcaacctccatttttccgaggatacgacttgaatgcaacatgtgcatatcatggaggagccctggggcattccattgagtgttgtatgaccctaaagcataaggtgcaaagtctaaatgat

SEQ ID NO: 171744 - DNA, 539 bp, Glycine max
tgctatgtacccctacgccaaactagtatcatagaagaaatatgatatgggagaagagcggcgtaaaaccggtaaaaaataagtcaacaaggtattgcatgcgaactttatcatagaggtccgattctctacttggcttgccaacatcatcataatcaaaaaggccaacgcctaatggcaaatattcatcgactacactgatttgaatagggcatgccctaaagacgcataccctttgcccaacattcatagactagtcgatgggacatccgagttccaggagcttagcttcctagatgcttactatggatacaaccaattcaaaatgcatgctctaaacaaggagaaaatgacattcatcactaaagatgccaactttaactgccaggacaagccaactttagtggagttgggtatgttaaagtaagttaatgacaaaaaactcccttactgagcatcatcccatgagggaacatgtttcctcaccaacccaatgagtggtgctacaagtatatacaaatatgggacaaaacttttgt

SEQ ID NO: 171745 - DNA, 314 bp, Glycine max
gcatgcaagcttgtaatcgattacacaaatcttgtactctattaccagaggagaatttcagaaaataatttccaagagtcacatctgttgccatcaaaggtctatttatatgtgacatagaacacgaatttgcgaagagtttttgagaacacaaaggtcttatcctctccaaaaaagaaaaattatcttatcctcttaaaaattccttggccaatacccttgcaattcaataaggaattattttgagtgctccattgttcaatctatctctttcaagagagaattcctcttctcttcatcctatttccaaaaag

SEQ ID NO: 171746 - DNA, 318 bp, Glycine max
gaccctataatatacatcaccctatcgtgccgcatgacctggcccattttcagaccggcttattttttactgaggatcactatgctctggaccttgacttagataaacctctacttaagcgatagcagtggactagaacccatgtttaactcttgtgttgcatactttaacatgattaataactccgacgtctatgatgggtggccatagatgaatgcataaccatatgcataatagacataagcatattatggataacgtagcccaaaaaatcgatgacattgtatattcaaccgattacgggaggacatagctgga

SEQ ID NO: 171747 - DNA, 510 bp, Glycine max
  unsure (1)..(510): unsure at all n locations
cagcttttgtctcaaaacacattgttttcaacattcaagactctgggaatcaattaccaagcagggtaatcgattaccagaagacaatttttaaaatcagcttttaaaaaaggttttgaatttgaattttgaatcatgtaatcgattaccagcaatgaaactttagaaaacactttgaaaagtcatgacccttcaaaatataactgtgtaatcaattaccagtgaagaatttcagaaaaaactttttgaaaaaacacatctcttaaaaccattttgaaaagtcacgaaaggcctatatatatgtgtgtctgacttccaaaagcaagagagagatatgctaagagaacttaattgccaaattctctctcaacaactcttggtcaaacacttgttaatctattgataattcattcaggaactttnaattgtattatcatctctaaaagagagaaactcctctaggaacttcaatttgtatcattcactctaaaggaaagaaatctttatgtt

SEQ ID NO: 171748 - DNA, 565 bp, Glycine max
acggatttggtcttcaccggtgaaaggatcatagtgggtttggaaagaggtaaatctgaccatcttgctttgataaatgcaaaaaaaaaactggggcaaatgaagagggtgagaatgaaggagaaacccatgctgcaactgccattcctatacgaccaagtttcccactgacccaacaacccttctccttacccaccacccagttatccacaaaggtcatacctaaatcaaccacaaaacccacctaccacacaaccaacacgaacaccacctttagcccaaaccaaaacaccaaccaaaaatgaattttgcagcgaaaaagcctgtagaattcaccccaattttggtgtcctatgctgacttgctcccatatctacttgataattcaatggtagccataaccccaaccaaggttctcaacctccatttttctgaggataccgactcaaatgcaacatgtgcttatcatggaggagccccggggcattccattgagcattgtaaggccctgaatcataaagtgcaaggtctaattgaagccggctggctagaatttgaggagaat

SEQ ID NO: 171749 - DNA, 412 bp, Glycine max
gcttacatgttccttatatggtgctcactgatcaagtccgttagcaaaaaatttaaacatgttttaacacaaaacgaaaactgaaaataaagaaataaaaacaaataagaatcttttaattaagaaaaatcagttagcattaaaaaacttttttaaatttgcaacgtttataaatctggtgcttaatgattttgaaaatataaaaggaaacttaaaagccgctaatattacctagcttatcctaattttaggctgaaaaattaaaatgtcaaaaataccctattgttttcaaattaaatgccattaacattacgtttgtaaattaatttttatttccaattgttttcaaattaaatgccattaacattacgttttcaaattaatttttatttccaatcaattaaagcctatt

SEQ ID NO: 171750 - DNA, 584 bp, Glycine max
tgtttttggacaatagcaccccacctgacgtccccaaggtctcctgacccccgcaacatatctccaggtaccactctgtgatcaacgaataaaagtaggaagactgactcttccacactttctcacttcaagcttgtaggattatggggtacccatcatatgtggtactagggggcaatcaggcgatggtgcaagtcgactctccacatccacaaatcacacataaatccaccatccccagttgtccaccttcaactgagctcacgtgctcccacgtagcccttatcctcgttcctctcaacaccgggtccccatcaatccctccaagctttcacaacatccaagaaattcagcatccaaacatcatgaactatccaaaaccaagaaaacagggcataggcagaaaactctttccaaaacacattccaataccacagttttcctcactcaaataccccagtaacattctctttgtttcgattcgttaaccgttggatcaactcaaaatttttactggaggtccctaatacatatatctacagtttgacccgtgggatcttcagaaaactttcataacccaatat

SEQ ID NO: 171751 - DNA, 591 bp, Glycine max
  unsure (1)..(591): unsure at all n locations
tcccacgaccacacaanttctctcttcaacacattatatattggtaactaatatactttncatnnnnnaagagaganttgatctgttgcaccgcgacctctaagttacctgcagcatgcagcttgcaaactacctcaaaactgtgatatgtgaccactttaaacataaaatagaggtgttgtgtttattataaacacccagacttgcgaataaagtggacgaactgcaaaggattccttggtctaatacatcgcattgcacatgatagaaaagggtatgaacagaaggtctcagctttcgacgtgggaataactaacgtcaacgacgtaacattactgaatntattcacaccgaacattatactaaactgttactgaggtagttcgatagaataccaagtaatgaatccgtcatatgatagctatgactctgaatcgggtagtcctgaatgactcatgcaagagagattattggagaagctaagaatttttcctgtatatcatctctgtgtcggagtgaacttgcgaagtcattgacattcattcactcgtataaagaagagggattaatgaataagaatgctcggtcacg

SEQ ID NO: 171752 - DNA, 917 bp, Glycine max
  unsure (1)..(917): unsure at all n locations
agtccgccagaacgatattcaccgacattcatatctctctgcttttagattatatgtataatatctactnccacaaggcacgaatgatgcatccctgcgaaaccaaaaaaaaagaacctaagctccaaactctgaactctatacacggggggagtattacatacatgtgcatctaatacacaccggaactggcattaaaatggctagcggggggtcaaaactatgggagatacgggagaacgttgaagataccacaagacttcaagaatattccccaccccgaacttctcgggcgatgttctaaatttcttactggcgaggaaaaaagtactgccaatcaaacacaatagggtggaaaaagagaacaacagtaggagacctcttatgaagacaacttaagttaaatccggagggcaaaaccccttgtttcaactagaaaaccccctccctaaaaaaggaggggatcattcgggacgaaaaaactcgatagtgctggcggattgacctgaattctacttatgaaacgcatgaattattggcatccacaaaaccatcgagaaccaaggctttgcatccacaatgagcccacaattgaaaatatactctcatttccgaaaacaaaatacagggaagaataaatgtccatatgtagacactacgttaagttattgcatacatccccaacgttaggggaaaaatgagccctttaaatatactctctccaaaccgtgaaaaaattagttgttgtgccatattcgacacaaaaatgaggaacccccagaacgctatcatgtgggaggaaagatttgacattacaacttgctcggtatgacaacacccctatacttcctctatggagaagaaaagatgatcttctactttagaaatcatcttctggaagcgaaaattgtaaaaaa

SEQ ID NO: 171753 - DNA, 431 bp, Glycine max
  unsure (1)..(431): unsure at all n locations
tatacatgattgatacatgatttgggacttgtaggaattgatttgggcaagattggatgagaggaagtgtgattttcgaaatctgcacttatgcagaatttttgctgtgaaattgtgcagcagaattttgcacaagtgcagaaaaatgcttgtgtgtggttggctgtggaaagtctagtgcagaatgagttctggatgtttgctagtagatcccaacggtcataatgtaggcttatgtactagagacttccagtaaaaatttggagtcgatccaacggttaacgaattggatcgaaggaattgttactgtggtctttaagtgagaaaagctgtgattctggttgatgtgttgagcagagttttctgcctttgctctgttntgcttggctgtgatagcttgtgctgtttgaatggttgtttgcttggatgct

SEQ ID NO: 171754 - DNA, 511 bp, Glycine max
ctgagccaaaatcctgactcaccataaaccttgacccagggtgagaatgtcaattcttaccctcggaagcaaaaaaaaaggggagagggaaaatttcccatccaagaggaagccaaaaaggagagaaggaaaatttccaatccaaggaaaaaaagagaggaaagggaattcccaatcaaagagtgggagaaagcaaaaagaaaagaaagaaaattcccaatccaagaatgggagaaagaaaaaagagaagaagaaagggaagaaagttcccgatcaaaaaaaaataatatgcacaaaggtctttggaccggacaatatctgaacaatacagaattgtcaccaaatgaataaaaagaaggaaagggaaccatgacctaaaatggtcttccccctttagttgccaggcaaaatcttgtgcgctagcaaccttttttcgccccgcactaaaccagaacagaaaagggaaaagccagaaaaatcaaaagccaaaacacccaaagcccgaaaaaaa

SEQ ID NO: 171755 - DNA, 444 bp, Glycine max
agcttctcaaggaggtgagctcatttatgagaggggtgtgtgtagctaagctatagcttctcaaggaagttttctcaaagaagcttctcaaggaagttatctcaagaaagcttctcaaggaagctacttagtctataaatagatgaatatgtaacactagatgaaactttgatgaaagagagtcttgtgagacacaactcacagttcaacttatatgccttttctcatccttcaatttcgtgctcccccctctctatttctctccctatttcttttcctccattgaagcatcctctgcaagcttgttattcaaggctcatcttggtggtgaagctacttcttccatggcttattccctagtggatggcgcctcctctcacctcttcttctttgtcttccactgcatctccatggtggaaaatcaccattaaagaacctcattga

SEQ ID NO: 171756 - DNA, 581 bp, Glycine max
taaagatccaacctccatagaagcttctcaaccaagcttccattagtgtgtctgcttcgtaaaggattctgacagctactcgtttatttaacgccttctcaaaattcctagtattcaatatgaaggcacctatactatgaagaagatgactgaataccagatgttagctcatttgactcaactccatgaaactcatcaaaataagaaggctaaagaggaaaaagttgttgttgttgtgaaagaagatgctgcctccatccaagctgaagcatctgctaaagctatagatgacaccattgtatgtgggatcatcattgatcttaccaacactggtgtcatggataaaacttctgaggcatctaatgcagccatagctgatgaagttgaccataatgctttagaacctggtccaagcagtctacaacttcaaatgatgctactaataaaggcaaacatggctcatctactgcaaatttttaagaagggtatatttttcattggcatttgtctatatctcaatgcttaacatggactcattttctttaagagtttcacaagctttaaatgcttgagcggactcg

SEQ ID NO: 171757 - DNA, 446 bp, Glycine max
agctgtgagacaactcaactttcataactttggactcaaatgtctgattacggaccataatatatcaagacgctaaaaattgaacacggaagctcgggcccaattcaaactgccataacttttgacttagatgtctgattgtggaccatattcgaactgccatgattggtgattctgatgtttgactaccgcccataatatatcaagactcttgaaattgattacaaaagctcctcacaaattaaactaccataacttttgattggatgtctgattgtggccgataatatatcaagatgctaagaattgaacacggaagctcctagaaaattcaaactaccataacttttgacttgaatatctgattgcggaccataatatatcaagactcttgaaattgatttcgaaagctatgagcatattcaaaactttcataacttctgact

SEQ ID NO: 171758 - DNA, 542 bp, Glycine max
taggctaaattaggccgaactttcataatctatttaagctaagtctagtccaacaagagggatctaaggatgaaacttagtttaagttagtctaaacctaagagggttgtctaaattgagcccagtccaacaagagggatctgaggatgaagcttggattgattcagtccaactaatgatcgatgtttagtaatttaggctacaacatataacacagaagcatgattgattagaataacacccttatatgcatcagctggtctgttagaaagacccaacacttctacctactgctgttatcataccctaatttcgtccggggaccatttgtttggtggcatgcaaccttcgcttgactgcttcggggtacttaacacccatcgttaggcaatccgtgaagttctgcgacatgcacgaagtcgaaaggaagcattcttgcgcaatccctaaagttcagtaacattccagaagtcaaaaaggggatggttgcgtgatccgtaaagtttcgcgacatttacggaagaaaacaagtatcgttatgt

SEQ ID NO: 171759 - DNA, 446 bp, Glycine max
  unsure (1)..(446): unsure at all n locations
agcttcattctacacatganaaagaggatgagatagttgcacaaaagagaaagcttcctaacaaaaattttcatgcaggtggaccttcttctagtaattctgacttaccgcaacctcctatccgtcttccattcccacctagagcaattccaaacaaaaaaatagaagaagcagaaaaggagatcttggagattgtcgcaacctacccttcggcgggagggcgacgcgtgactcgcgggatgcgtgttccacgaaaggaatacgcgcggagtcgccaccaacatttatttgaggaaaacgtcggaaaaaccggaaaagacgcgatctacgaacttttaagtgaaaggttcgggagttgtatttacgcacggtgaaggtattagcaccccacacgtccgtcacaagggacggcaacctttaatcgaatgtgcaaacatgactttgat

SEQ ID NO: 171760 - DNA, 561 bp, Glycine max
tcacgcctaagccaccttcattcttaggcaaacaaattgtagatcaattgatctatcgaatttggttagaatcccttgtcgcattccataaaatctcctctgtagctttgtcaattctgcattgatcctttctagtgccctaaataattatatatatatatcagcgaaatggcattaaataaaaaaaagttatagtttagttttttttatggcgtgggaaccttctttcatttaacagtttgggagttcgtaacttttctaatattagttgcagatagaaattataaaaaaaaaaaaacttaaaaaatgataaagcactgagtatgtatttggaaattgaaaatttttcattattcaaggtcagcccaaaaagtataagataatataagttgatcattttaggtttttatgtttattataaatatattctaaaagcaaaaactcagtaattatttaatcaataatattaatttattaagcttacataaatatatttatctttgagaaaatctttcatcttattatgagattttcttcttttcataaacatatgtaggggat

SEQ ID NO: 171761 - DNA, 222 bp, Glycine max
tgcggctgcaagctgaatctgtttatacatgattgatgcatgatattggacttgtacgaattgatttgggcaatagtggatgacatgaaatgggagtctcaaatatctgcacttatgctcaactttggctgtgaaattgtgcagcagaattttgctcaagtgcttaatcttgcttgcgtgtggttggctcgcgaaagtctaccgcacaatgagacctggatg

SEQ ID NO: 171762 - DNA, 820 bp, Glycine max
  unsure (1)..(820): unsure at all n locations
cggaacagattgttgccatgctttgttagcgaaccatctagactcagcgccatatctggtgttgctctgaacactctccgcaggctgatggtgatagaggcctttttatctaacccttatcttcacttgaaaaatggctaaccgtgggtttattagcgggggttgataggctgtactttgagttttccaaaatctccatgaaatattgccaaccgcgtcttatgtggatgttctcattttttattttgcgatgaaaaattcgccccacagtctctaattgggtataaggtgaagcaactttgagcaacttttgagctggaatgcgcattttatactgaggtatactgatcctttttttnaagaaaatgcctgccaacattagaggtgggttttggactttaaagaggcttttgagctggtattaccgtcttttgtgtttttttaaagcttagatatgcacatacctattccagggagagttgtgatgtatacaaattgagcgccctacaaataattttttctttctgacatctgagcttggtcgccaaacttcccttggcgagccatattgttgggttgaccttaaccgccccgtgtgtgtttggggttttatgacccccccgccccccacattttggcctcccgcccgaccaatccttaactggtcccgcccgccccaccttatcgcgttcctctaccatgtgagaccagacgtccctttataggccccctcaaaaaaaacgcccccctccccatntgtctcaacatcgcggggcgtcattcccaaatatcccctctcccccggtatccgcccacactc

SEQ ID NO: 171763 - DNA, 422 bp, Glycine max
  unsure (1)..(422): unsure at all n locations
gcaagcttacataagatgttagtatgatccactaacctagaattaaaagaacttaatggccatagcctgaggagattaaataacataatggctgagtgtaactgaaattgtggcaaccaaaagtcacccccaacagccatcaagccgaccaccatttggtctcccaaaaggctgatgcctaaagtgccaattggcccttattacaacttatactaaaccanactaaaggctntntagttgattaacccacaacatatntttggtcagccaactttacaaggattaggccattatatagacaaactaaacactctaaaattgagacatagtgggccatatagtcttcttcatttgggcatgatacactcacaccttgaacttttctctgaactttggttgattcaatagatgacaacactgtg

SEQ ID NO: 171764 - DNA, 514 bp, Glycine max
aaactcagcttcttatccaggctcatcttggtggtgaagctccttcttccatggcttattccctagaggatggcgcctcctctcacctcttctcctttgtcttccactgcatctccatgatggaaaatcaccattaaaggacctcattgaagcttaaagatccagcctccatagaagccccacaatcaagatcccatcagtgaccttgactggtctccctatgatattacctagtgcgagtgacttgacttgctagtgtgtggtttgtcttgtcatgtactcctaagcgcccgacgaggtttttcactgacatggtgccacattgcatataggattgagtcttagtgtatttgttgcataacgcttgtgtattggtctatattgatttatctgatgatattgtgttttgactattgagtatgcgaatgttctgaaaacaaatgagactatggtgaaataacgtgagttacgctcaagtaaattgtattttggtatataataattatacttatat

SEQ ID NO: 171765 - DNA, 437 bp, Glycine max
  unsure (1)..(437): unsure at all n locations
agctntccttcattctctttcaagttaacattttgaataatttttatcatttacaaattatttattttgaagtaataatttttgtggttagaatgaaatttgaacctgaagtttaagtgtagtaatttttggaattagattttttattttgaaattattactaataattatttataagcctctttgttcatggtttttctgccttagaaatttttacatgtgacccttcctgtttttggagttaaagaattattcgtaaattatttaattggagtaataatttttttgttagaatgaagtttgaatgtgtagtttaagtttaatagagcaagacaatagattnttttatttttatcattcacaaattatttattttaagtaataatattttttgttacaataaaattgtaagctgaagtttaagtgtattatatttt

SEQ ID NO: 171766 - DNA, 493 bp, Glycine max
tcgccctacgcctccgaatttatgtcctcttgaacgaaccccttaaatgcaaaggcaaccatctctgtccccatccattcatttctgccgccgaacaggtgatctggatcttgacctccttcccctgcataaaaaggttacagtaaataaacaaagcaccattgtaacataaatatgaagcctgacaaattcacctgtgcagcttaatcttatatgatgatggaagtttgtctgaaaaacataaatcttaatcttgaaaaactctggcaacaaacctggaagaatcaagagaagtatatggagaatgcctgcgctgagaatgcttgctatgaggagaccgcaaaagttgtctaaaaatgaaaccaccgtactgacttggtgagtttaaagtatacaaaagttcataaatacaactcaacctggtacagtgtcaacactccattggaagaagccctattacatacatcctatctgtttctaatgagtatgatca

SEQ ID NO: 171767 - DNA, 432 bp, Glycine max
  unsure (1)..(432): unsure at all n locations
ctcttaagattattgaggctccaatgtccaacaagcggaatcagagcttcattcttgttcaaagtttagaagcttcacgaaaaagatggcctcagctaattccttatttccagaagggaattctatcaatacacctccaatctttaatggagagggttaccactactggaaaacccgaacgcaaatttttatcgaggcaatagatctaaatatctgcgaagccatagaaatagggccttatatacccaccacagtagaaagagtttcaatagatggtatttcatcaagtgaaagcatacccatagaaaaacctagagatagatggtctaaagaggatagaaaacgagtacgatacaacctcatagccaaaaacataataacatctngcctaggaatggatgaatatttcagagtttcaaattgccagagtgc

SEQ ID NO: 171768 - DNA, 550 bp, Glycine max
tctagccaaatggacttaccatgaattaattcatttgatagcccctttgagcctatgttcccctttctttgttttgaagctcattacaagccttaagtgaaaaaccatgatatcaccttacccttaaggaataatggagctttgaaattgttttgggaataagtgtgtgtgtggtggggggggctatgtttcattggaagatatgatttttggccatgcttaatgttttattttggccatgcttgatgaatatatatattgcctaggtcttgctttaatcttcaatttcgtactgttcaatctaaaaaaaacaagtgaaaaaaaattcagtttctgcaaattcttcaatttcgtactgttcaatataaaaagaagaagaaaagaagtgaagttgaataaatgacgtcttgttatgaggactcgatttgtgagccctggttgattttgttgatattaaaagggtttgggtttactaacttgtcttaatttccacttattccccatggctgcactatttctttgggattagctacttatttcatatttttcc

SEQ ID NO: 171769 - DNA, 438 bp, Glycine max
agctttcataagtgaaatcaggtgcagccatctccctaagattcctctcacgaggtggaggttgagccatgttctcagtctgaaaattaacagccgaatgctcaaaatcagaatattcagaatcaccagcaatagaatactcaaagtgattaggatgctcaaaatgcacagaatgaccaggatgcacactatgcctaactaatctatgaaaggttctatctatttcaggatcaaagggttgtaagttacttgaattgcccctagtcatgcactatacgcagcaaataatgtgtttctcaaacaagcaccaggagagggttaaaactacaactatagtcaaacgatatccaaatgagctgaaattgtgtgagcaacacccacaaatcatgacaagatagtacaaaaaatttcaaacaaaaattcacagtctaacaatga

SEQ ID NO: 171770 - DNA, 491 bp, Glycine max
ttgatgatatggtcttcaccgacgaaaggatcaaagtgggtctaaaaagaggaaaatttgatcatcatgctatgataaatgccaaaaaaaaaactggggccaatgaaaaaggtgagaatgagggagaagcccatgctgtgactgccatttctatacaaccaagttttccaccaacccaacaatgtcattactcagccaataacaaaccttctccttttccaccgcccaattattcacaaaggccattcctaaatcaacgacaaagtctgtctaccgcactttcaatgacgaacaccacctttagcacaaaccaaaaacaccaaccaagaaatgaattttgcagcgagaaagcctgtagaattcaccccaattccagtgtcctatgctgactttctcccatatctacttgataattcaatggtagccataaccccagccaaggttcatcaacctccatttctctgagaatactactcgaacgcaacgtgtgc

SEQ ID NO: 171771 - DNA, 433 bp, Glycine max
  unsure (1)..(433): unsure at all n locations
tagctngtgcccnctctctctttcgcgcatacaagctttacattaacatacatttgcttttctttcctaactcatattgacacttgagcgttgaagtcctttattttgcaagtccccgctcctatcaaagatacctctcctagccgcagtatgaagttcggaacctcactcagccacatccaccttgacgcgttacggttctaaattttggtaagaacatttggcgtccactgtggggccacggtaaaacataccccacgacctctcatcaatcccctcacactcatctatggttagcacttagtctgccctatgatgtgagaccccccctaacgaactcccatctttgtccgacagttatgacagacacacatactctacaacaactccaaaaccgcatcgcatggagcaacaccatgaggaagagttgaca

SEQ ID NO: 171772 - DNA, 420 bp, Glycine max
tgcctgtccgatgcagcagtaatgatggcccgagttatgttggggaacggttacgaacccggaatgggtttaggcaaagacaacagtggcataactagcctgataaatgccaaaagaaatcgtggaaggatgggttaggctattaacccactcacgcccatataaagagaagcatcgcgagaacgaagagtggcagtcaaagctcgcggttgagacaacatagtgaaggaagcccaccctgccacataagtaggagctttataagcgccggtctgggggacgaagttgaagtggtcgcgatatacgaagatgatgctccgagtacattggatttggtacgaccatgccctcttgatttccaattgggaaaatggcgagaggaggaacgccccggcttttacgcaacgagcataatgtaaa

SEQ ID NO: 171773 - DNA, 429 bp, Glycine max
  unsure (1)..(429): unsure at all n locations
agcttcatgattgaatcaagtttgagtcatgaatctagatagattcaaggagttctgatgataataaagatgatgacaaaaagcccaagagaatgagttcaagattgagtcacgaacacttcaagaatcaagagaaatttggtttcaagattcaagtttcacgaatcaagaatcaagaataatctagctgaagattcaagaatcaagaaaagactcaatcgagataagtactaaaaagttttttcaaaacattgagtagcacatgaatttttcacaaaaccttttaccaaagagtttttactctctggtaatcgattaccagnttattgtaatcgattactagtggcaaagtttgttttcaaaagctttcaactgaatttacaacgttccactctatttcagaatggtggtaatcgatacaagattttg

SEQ ID NO: 171774 - DNA, 572 bp, Glycine max
taatggtattatgagaaaagcatctatgaaaaatattttctctatgtatctagtgggtaaagaaaaagtgaaattcaacatcatacatcatgcatataatacattatttataggggagacgtctttgaggaagtgtgttgactatcaaatgcattatgtgtcatttcgaggtggcatctaatctaatagtaagttttctcaaaagtagctttggaatttttggaggtggagggaagtgtcgtggaaatagatgttgattttttgaattggaaaatttaatctatctttgccttttgtgtacttaggtatcctaattggggctaaccttacgaggagggaacatgtatgaagcccactatagataaattctaaaaacaattatagaagcatagatggttatctttggtcgggagggtatgctttattaacattaatttataaactttatgtaacactttgacaaaaactacaactttgactgatagaggaaacattgtggttgatcatctgtgcatgaatgtgtgttgtgcgtgtgccgcgctaattttagttaaacttggtatagaaatata

SEQ ID NO: 171775 - DNA, 397 bp, Glycine max
agcttggtgctattatgagagtcgacttcttggtggacaccatggcttgttatcaacatatgcggcagaaatattagtcttgtatattatcaatcgttttcattcatgagtgcgtggtcctctagaggtgagtcacgtcttccatcaataatattatttgcacccttttggcatttgtattttaaatctacttgaagaatcaaaccactgaatcgctactactagcaggtgctatacatatttttagactactatggctcatttgattgggaccataactatgttagtatatgggggccaaaacccttatcatctcttccagaaatcgctggtaagtgttgcaatgtgtaagaaattagatctacttacaatcttcagtccttgatagatcccaatt

SEQ ID NO: 171776 - DNA, 383 bp, Glycine max
tatatggcctaggatgtgggtttgtgactaaattcaatttaaacacaagtcttgcacttgccacattggtacaactccctccatcaatgatcaccatgcaaactttgccattgatcaaacatctaatgtggaaaaagttttgtctttaacttttctccatagacttcaattaatgggcaagtaaccgtctaatcatcaacaaatctccctccggtggtttctacacttcctcctcatcatcctcactctctttttccttttcaacttccgactcactaatgtactctccatctctaagaatcatggctttcttgttagggcactcatgtgcataatgtcccaagccttggcaccgaaagcacttcacataccaactttttttt

SEQ ID NO: 171777 - DNA, 444 bp, Glycine max
  unsure (1)..(444): unsure at all n locations
gcttgcttctatagtacatacacaatatacatcatcacaatgacattnttaacatcaacaaaatgtcatctccaggtcattgtcaacatcaacatcatctcatctcaatgtcattctcaacatcaacattatctcatctcaatgtcattccaacatcaacatcattttatctcaatgtcattctcaacatcaacatcatctcatctcaatgacattatcaacaacaacaacatcatctatatcaacataatcattaataacaacatgatctcgtatcaatattatcataaacaccaacatcgtttgtatcaattattattaatatcatcttcaatatcaacatcattctctatcaacattatcataaacatcaacgtcacctcatatcaattaatgtcattgtcataccctaatttcgtccggcgacctttgcttgatgacatg

SEQ ID NO: 171778 - DNA, 464 bp, Glycine max
ccatgatgaatcaagattgattcacagagttttgatgataacaaagataatgacaaaaagctcaaaagtcaataacacttcatgataacaaagatgatgatctcaagaatcaaagaatgagttcaagattgaatcaagaacacttcaaggttcaaaaggaaatttgatttcaagaatcaagaatcaagtttcaagattcaagttccaagaatcaagatcaagattcaagactaaagattctagaatcaagaaaagactcaatcaagataagtattaaaaagttttttcaaaaactgagtagcacatgattttttctcaaaaaccatagagtttttactctctagtaatcgattaccagattgttgtaatcgattaccagtagcaaaaaggttttcaaaaatccttcaactgaatttacaacgtttcaattgatttcaaaatgttgtaatcgattacaatgattt

SEQ ID NO: 171779 - DNA, 444 bp, Glycine max
  unsure (1)..(444): unsure at all n locations
agctntaatgtttgannnnaaatggtcannaactgctggtaatcgattaccaaatatttgtaatcgattacacagcgcaaattttgaattcaaattttaatagctgttgtaaatcagttttggccactggtaatcgattacatcctctggtaatcgattaccagagagtaaatctcttgaaaaagaccttttttaacttagatttcttggccaaaccttttgctacttcaattggaattcccttcctatttaatgtaatcttcctaagactctagagactgtcttgatcatccatcttgaatatctttgatttctttgacttgaataaaactttgagaagcatgtaatcctttggcatcatcaaaacatcagcttgatcctttgtctacaattacttatgtgagttcttgatttaactcctatntctctcccactgtgacatca

SEQ ID NO: 171780 - DNA, 584 bp, Glycine max
  unsure (1)..(584): unsure at all n locations
tgcctaattaacctaaaattgagagaaaatgattattaaacacacaaaatggatgtactaagtatttattacctatacttaacagaaaatacttataacactacaaaataaccataaattggaggagtttgatacaatttacacaagtttatacacaaaagttagtcgtattgaccgagtaacagtgctgtagctacgcttagtggtaagtgcgagttgagtccataagttccgcttagcgcgattgctcctttaggcacttcaagactttagcctcttttgatttgaaattttacagattttatcattaattccaattaaagagactccaatgacaggtatctagacatatcaagatttatttacaatttcctacaaaagaactataaattggggaaactatacatgttttgaaaaagtttttttatacaaaaattagtcgtataagacgactaacagagcttccttgccatgaaaggctaaaaccctcagttggggattcttattgagtagttgatgtaaaattcttttcatatctaattaaggggntgttagtgtgttcactggctctatctatgcttaat

SEQ ID NO: 171781 - DNA, 442 bp, Glycine max
  unsure (1)..(442): unsure at all n locations
agcttcanagaatttgtttcagataaggacatattgactgtcttaacatgttacagacaaatacaatgataaagctcaaagtcgaaactctcaggatgtacaaggtgttttgagagttgcgttcgaagttagaacaaaatttacaaagaatttgaatgcttaagaatgctttgtccacacgttggtttctctaagttcagctcatcaaatcttcaactatttgtagacttcagtaaaaggtaaccattgtgactgtaatgacctccatcctcatcttcgtctattggtaaaggtgttcgttgaaacatttaatgcatattaccaacttgccaaactaatatgataaaacatgttgcttatcttcatttacctacattccacaagtatgttgttgtgcactcaagtacactgcaacttgctttgttataccattttatggagt

SEQ ID NO: 171782 - DNA, 490 bp, Glycine max
  unsure (1)..(490): unsure at all n locations
gctttatactttgatgtatatgattgaaatttaaaataaatcttgttatcacaaagatgatttatttcaaatgtcatttaaccaaacatgtattcttgttatgaaaatcttcttaagtatgcattttgatgaaagtcattatgatgcttagaatgttctgatgcaaatgtggtatatatgacaacaaataacacaatttaaagaggaaagaaaaaaaggattcaacacaaggatttttatattgacaacaaagtcattatattgattcttcacccttcaagatgagattttccactaacacaaccaacaatatgttggaccagccaactattgttcttacaactaccaacacccttgttgaactttccttgccaaccatggactntacacatctcctcaccacaacaccacaattggtcttagcttggagatcacccactcaaccatgacactcacttagtcatgggagagacaaaccaagtattcttca

SEQ ID NO: 171783 - DNA, 439 bp, Glycine max
agcttatgaagcctatcttgcaatgttatctcccaaatttgagtagcatctctactatgataccagttatgaaaacaatgcacgaattctaaaatgcaacacttagcagaagggtcaatttgtaaagttcatatagcaattcaattctaatccatatataacgtattttatatatattcatattccccaagagtctacttttcaaatataattttattttcatcaaacgttatgtgaatcaaacaaagtaaaaaactatgtgaagtatgtcaaagttgaaatttgtaaaacagcatgtgtgcacaaactttcaacaccaaataatttagaaatgactctaagagcccatactcatggaggataacctcccaaaccaaaattgacattaaagaaaatagaaactctcaataccttgagagatttgaagtcttctagagtt

SEQ ID NO: 171784 - DNA, 555 bp, Glycine max
ttaggagaaaccattaaaactaaggtagttcctaaacaaaaatcaattgaggaagcttcgccgagtgtccccattgaaaaacctttattcaaacctttcaaagttagtgataaggctaaacgaaaaattagggaacttagaaaaactaaatccttaattgaaggcgtaggtgacaatcatagcgaattactaaacaagattagtagtttgcttaaggtcattccagatactccccaagcttcggaaaatacttccaaaatggtaacaagaagtacctccaaattaattaatgttattaatgaagatagtgaccaaaacttagataacacaactgagataggatcagtgtcagaaaagaatataaatccattaaactccaaacactggaaaaccccctccaaattatattatcaacgtccaactgcccctgaccttctattagaagaaagaggtgaaaacaactttaaaagttttagtgcaaataacatctatgaatggaacatagatgcacaaacggagtataacatcatgaatacactccaacatatgaccatg

SEQ ID NO: 171785 - DNA, 381 bp, Glycine max
ttacacagtattcattagtccaacacacactcgacaaatagtcatcatccatgcacaattccaatcaatcatgctcagtatgcacctgacctcatactctcagaagcaatgtgcgtccatccccaaggaaatagctgaagcgtgtacacatgacactttctcttacgatgactattcaatcagcgtcgaggtcaccttgtcgtgcacaggccactcctcccccccagatatctatctgagtactaagggagatccacaccatgtgacatgccccctagtacaagcattccttctcatgagaaattacaagatcttactgacagatggtatactatttccatgttatatacagtatgatacatgggcaccatcaatgctatg

SEQ ID NO: 171786 - DNA, 438 bp, Glycine max
tagacaattacatatcctccttctttgatacagataattcaaaatactttgtttcatggtctgcccaatgaagacccttatgctcacttagctacctatatagagatatgcaatactattaagttggcgggtgtgcctactgatgcaatccagttgagtctgttctcattttctttatatggagaagctaagagatggcttgattcttttaaaggaaacagtctgaagtcatgggatgaagtggtagaaaagttcttaaagaagtacttccctgaattgaagactgcagaaggcaaagttgccatctcttccttccaccagtttctagatgaatcgttgagtgaggcactcatggtttttcagaaccaatacagctcaacatattcatagatgggttgagaccacaatctaagcagctcttggatgcttcagctgggg

SEQ ID NO: 171787 - DNA, 323 bp, Glycine max
  unsure (1)..(323): unsure at all n locations
agcttcaacgttcattctcgagcgtntcgataagttacgggactcaatcagacatgcgagaataaagttattgtcgntagaattaactcagaagcttaacattcgatttcgagcgtctcgatatgttacgggactcaatcagacatccgagtaaaaagtcattgctgcttgcattgtctcagagcttcatcattccatttccagcgcctcgatatattaccagccccgatccgacatcccattataaagttatggtcgctggtattggctcagagctttaacattcattttcgagcgttgcgacatgactcgggactcaatca

SEQ ID NO: 171788 - DNA, 326 bp, Glycine max
tttagccaattcagacaacaataactttttactcggatgtcttattgagtcccggaatatatcgagacgctcgaaattgaatgttgaacctctgagctaactcaaacgacaataactttttactcggatgtctgaatgagtcccgtgatatatcgagacgctcgaaattgaatgttgaaactctgagccaattcaaacgacaataaatttttaatcggatgtgtgattgagtcccggaatatatagagacgcctcgaaatgaatgtggaacctctgagcccattcaaccgccattaccttttactttgaaggttggatggggcccc

SEQ ID NO: 171789 - DNA, 333 bp, Glycine max
ttcgcacatcgttcgtgtgtatgatctccacttcacaagggttgacgtataggagaccttgtaccctataacgcaacgtggcggacaaaagtgggcagttaactggaatgggcatcattgacaatgcggaaggtgttatgcgctttactatccatgtacacacattattgcagcttgtggatacgagagcatgaactactaccaatatatagatgctgtctacacaaatgagcacatcttaaaagcttactacgcacaatggtggcctcttgggaatgaagcggctatttctccttctgatgacacatggacacttatccctaacccaactac

SEQ ID NO: 171790 - DNA, 411 bp, Glycine max
ctctgaagttttatggttttccaaaccttgaaaacttgtgttattcatcttttcattctcttctccctctgccaaaaagaattcaccaaggactaactgcctgaattctttttgtgtctctcttctcccttatccaaaagaacgaaggactaaccgccagaattcttttgtgtttcccttctctcttgtcaaagaatatcaaacgacacagtctgagaattcttttgattcttccctttccctaatacaaaagtgttcaaaggactaaccgcttgagaattcttttgcatccccattcacaaagtatcaaaggtttaacagcctcagatctttgtcttaacacattggagggtacatcctttgtggtacaagtaaagggtacatctacttgggtttgactgagaacaaggg

SEQ ID NO: 171791 - DNA, 430 bp, Glycine max
agcttgtagggttaaagtctcacaattgttacgtgctcatgcaaaaattgtcagtcgcggctatacgagacatcttgccaaacatcgtcaggttagccataactcgactgtgctttttcttccatgctatatgaagcaaagtcattgatcctgtcaagattgatgagctggaaaatgaggccgtaattatactatgccagttggagatgtattttccccctgctttctttgacatcatgattctcttgattgtgcatctggtcatagaaatcaaatgttgtggtcctgtttatctaccgtggatgtacccagttgagcgattcatgaagatcttaaaaggatatacaaagaatctatatcatccataaccatctattgttgagagggacattgcagaacaagccattgaattttggtcacaacacattca

SEQ ID NO: 171792 - DNA, 421 bp, Glycine max
tcccctgcaccaaatggctttttctataaatagccatgttgagggcagggtttaggggctggtaattgaaggaatataaggaaaaatgcaagaagaaagggaagaaaaaaaaaacaaagtcgagacaccaccgaatcgaaccgtggatcattttctacatcctttctctggctagtcttgtaccctgtgcgacagtcggttagtttttcttaagattttgatgtaatttatgtacccttatgggtcctctatgatattatgtgcgcatttatcttctctaattattcgtaaggcttaattctagtagatcactaatgtcatgaaaattggtttttttagtgagactagaaggtgataaacacaacaaaaatgagaacaaaaatccattcacaacttaacttctttttatcaaatattacct

SEQ ID NO: 171793 - DNA, 419 bp, Glycine max
tagcttatccagaagcacttttagaaatagaaatttagacaaaaaaaagtttctccataagttagaaatgatcttatagagaagttatatgacagagttcctataaatgagcttattcataagctaattttagcttatacagaagcttatttcattcttttcttcttatattttcctctcctcctagaagcgcttatggggaagtttatccaaataggccctttatatttcattgttctttctcatttccctgagtcattgctgctgaaagcaactttgacatctctcccagcaggaatatgatcgactaacctctagactcaaccccgatggtaaatcaaagcacatctagtcgagaattttacaccccattgtgtacagtcaccaaaacttacaccttttagtgttgtaatttatga

SEQ ID NO: 171794 - DNA, 507 bp, Glycine max
tggttactctacttctccattcagtttgcaccttctcatattgtgaaagcttgcctaaaatttcttctttttcattccttgatacatctgctctgtgatctgcttcctggtaatagcaataaccattcaatctacagcttactaaatcacgaatgccaagaagttgatttcttatccttattagaccaacatacttgagcaaaaatttcgggaacaatgtgagataagatcaaatgaataaagattttgagtaatgaaattttttcttttaacttttttgcattccaaaaattctccaagttatcaaattaactgttttcctaaaagctacttctgcaacaccactaagggattaattctacctagtttctacattgtaccaacgacattttgccacacaagttgatgacactaatagagttagccgtcattgaaatattttactaatctaacaacttagatgactaattaggaataaatattaatgaaactacaaatttgaaaact

SEQ ID NO: 171795 - DNA, 429 bp, Glycine max
tcaagcttgggctgctcaattgctccaggttgctgcatggaagggcaaaggtctgtatggtggtcatcagaggagcacaaactacagacccttgcgacaggtacaaatttctggttcaaggccagctgggttaccaagttaaccaatgcatccagtttgccttcaagcttcttggtttcagatgatgcaactgaatttgtagctacctcatgcactcctctaatgactatagcatcatttttggtgctaaactgctgggagttggaagccatcttctcaattaaatttctggcttcagcaggagtcatgtctccaaaggcttcaccactggcagcatctatcatacttctctccatattactaagtccttcataaaaatattggagaagcagttgctctgaaatctgatggtgagggcaactgacacat

SEQ ID NO: 171796 - DNA, 408 bp, Glycine max
ttggagtttccaagtgccaaatcgtcttcttcttttgtccagtcttcttctggcttcaattcattagtgggctttccttctgtgtccagcatcttgggatgttcccagcctttgatgacagctttccaggttctgctatccagtgatttgaggaaggccaccatccttgctttccagtattcatagctggttccatccacaatgggtggtctgttcactggtccttcttctttctccatgttcatcacaatttatctccctagatctcactcagtgaattagagtgcccgctctgataccaattgaaattctgatactgaggccagatgtcgtaccggatgtcacgacatcacgcttcagaacatgcagattatatttgactgtctgacagattaaacaagttaataa

SEQ ID NO: 171797 - DNA, 430 bp, Glycine max
  unsure (1)..(430): unsure at all n locations
agcttgaaccttacagaccctattctagtgatcttacaagacttgttgtttccaagtaggaatgaaccaccaacttgttcatcaagctcctcaaaccaagacttgtttggggtcatatagaatgaacacccagagtccaagatccattctgtctcagagttttcatgagacaccattaaagcctcagctgactcataaccatcttcaactagagcagcatttctaggctctttagattgatcttacttgcttcctttctatctatcaggacaaaatctcctagtatgaccttctcttttgcagtggtaacatctaatgtttggtacattagatccagatcgagtttgtgacttggatctttttccttctgtcttatcatccttcgtatactatcttacacgaactgagagttcctacncatgtacataag

SEQ ID NO: 171798 - DNA, 635 bp, Glycine max
cgcccgaatatacgatgcatcacactcaatagccgatgagttgctattatcaacgggtccatgcaagcatgtatacgtaacccgtacaattataaagaggtccatgccattcatgttcattactaacgagtcataacatagattcactggttaaaggaaggaggggaaaggaaagatcatgcgattgaatcattccactaacaaaaactaacaaactaaaacaactaatatttgtccataaaaaaaatcatattcattactattatgccttctaatctctcctgtgtaacttggtcttaattattatgaaagatatctgatacatgtacaaggttgttgttttcttttgttacaatccatcattgttacggttatgccgatgaacactgccctgaacctaactgctgagtgttagaattcttggctcttgccaaaaagaatcacttatagctctagtatcaactatgtaatccccacattgcataattatgagagatatcataatttctttgcttaattgaagccaaagatcaacgttattaatatggaagcatgacatcatttattttctaaaaaataggtacaggtaggatttgttttcaaaaatccttttttataaaaacaaaatgacaaaa

SEQ ID NO: 171799 - DNA, 446 bp, Glycine max
agcttgaaccttgaatcttgattcttgaaatcaaatttcctcttaaaccttgaagtgttcttgatttaatcttgaacatcttgaactcattctttgatgctctgagatcatcatctttgttatcatgaagggttcttgaccttcgtgctttttgtcatcacctttgatatcatcaaaactcctttgaatcaatcttgattcatcatgaagcttgcttctacaatctccccctttttgatgatgacaacttctgaaatcaagagacacacacacacactttttcctagtcgatcactcacataaatttcaattctccccctttgtttttgaatttatgcttctcttaaaattaagttgattactcatgtgagttcttgatttaatccctatttgtctccgcctttggcatcaacaaagagccaaaggacgtaacaaatttgaagcat

SEQ ID NO: 171800 - DNA, 381 bp, Glycine max
tagatgcagttttctaggtgttttgggtgttattctccaatcataatttgtgttttacctagtaatgcatgtagtaaagtatgtattatagattagtataagctattcgaggtgaaactccaattttgattatctgtatttaagcttaatccaagttgaaaatgggtaaggacattgaaatgttaccaaaatgcttcttactaaaatataaataaaactttcatgatatcactaaaaataacctaaactttgaacaaaaaagttgagatagaaattagaccagattctcatacccggctcaaatccttctcagtatcaacaaccatattgtgagttctggttatctgctcaccctgctggtgcaacatgtcaaggggcctt

SEQ ID NO: 171801 - DNA, 95 bp, Glycine max
actcggatgttcgatccatgcgcatagcgtatcgagacgctctaaattgtacaaccgattgtggcgagaaatgcaacgggtcataagtatgcact

SEQ ID NO: 171802 - DNA, 548 bp, Glycine max
  unsure (1)..(548): unsure at all n locations
ttacagcagattntagtaatgacccactaacctagaattaaaataacttaatgccattaacctagggaattaaaaaaacttaatggctagtgtaactgaaattgtggcaaccaaaagtcacccccaacagccaacaagtcagccaccatttggtctcccaaaaggctgatgcctaggttgccaattgggcccttattacaacttgaactaaacctaactaaagcccttttagttgattaacccaaaacatatttttggtcagccaactttacaaggattgggccattatttagacaaactaaacactctaaaattgaaacaaagtggtgtcatttagtcctcctccatttgggccatgatacaactcacaaccttggactttttctcttgaaacttgggcttgtattcaaacagtatggacaacacttgttgaagagcttccttgngctttcttgctctagccctcgtcataagtcctccaagtccttcaagtggatcctttgccttgctcttggtcatgtcctcatcattccgtaaaaaaatattat

SEQ ID NO: 171803 - DNA, 437 bp, Glycine max
  unsure (1)..(437): unsure at all n locations
agcttctacttatgtggcagggcgggcttccttcactttcttgtctccaacgcgagctctgaccactgtccttccttcccgcggagcttcttttcatgtccgcctgagtgggcttatagcctaaaccatacttcccacgatttccttgggtttttatcaggctagttatgccaccattgtctttgcctaaacccatcccgggttcataaccgttccccaacataactcgggccatcattaccgccgcatcggacagacaaggttgcccaaagagggagtccacggaggaaatgctgaccacctcaaaagactggaaagcggtttctaacgattcttctgcggcttccacataaggcatggaggatgggcagcttaccaagatatcttcctcgcctgatacgatgaccaagtgcccctccactacaaatntcagcttt

SEQ ID NO: 171804 - DNA, 393 bp, Glycine max
ttctccgtgaggtacgtacgtcaaaattcgtgtatgctaagatttgttgggagtggtttgacccgaattgggagtggcatcggataataaaaaaaaggtttttgtttgccaatgtacaggctccgctgacgtgcgtgtgctgctggggtctcttcatcaaggtaacactaacttctatacttcatttgacctattttattttttttgggtagcaataagtaatgttgcttgattttagtaaggtgttattctgtttgcactataacagagaatcaaccatgatttctgtagatggatccacagggttcgtgaaaatgcctgcaaatgctttaacattttactgtccaacagagggggcttcactattggttgtttaacataattttttgcttc

SEQ ID NO: 171805 - DNA, 444 bp, Glycine max
agcttaaccaatctccccagtgttattactcatgcccaagtgaaagcatcacttagacgtagtcagcaaattgaattaatggttatggtgagagtggtgctagtcaaaattttgaaaattgatggccaatattggagttgtcctccaaagagattctgctgtatagaaaaccaacaaaattatgaccatttctgttactcctcttcctctctttcacattcacatacccaaaagtcaagcacatgcttgcctactctgctaagtgttttgggcctccataaattgttcaaaaaccagaagcaactcaagcaagtatctgctaacaggacaagtgtccacctctaagaaacgggccacaattattttatttttcattttttattgggaaacctcaaattttcattttcacggtttcatcttcatcaattgcttccttccatgagt

SEQ ID NO: 171806 - DNA, 622 bp, Glycine max
ttacctattttgtaggcttttgtggataagtaatattattgtattcctgacaaattatttttacaacttcaaactgtaattttgcacatctaaataaatcagattaattaactctgtacattccttagttgtattacggctatataagttttaatttaactaggtgtttgataccaaatgccacctttttatggtaacatgctaacccaccagttccataaagaaaccccaagtactgactcaaaatggaaagtattaaaaaacttaaaatgggcattctgggaacgatgcaaaggtaagagctgtcagggacttaagaattatagctcaattcttgaattcttggttagattatcttcatgtcctattatggttgtcaagttttgacgcagatctttcccgtgacacaatcacactttcaatttctgcctattctttctggactggcaacaacgatacaaagctgcttctttttattttcggagatttttaatattcgaagccggtaaactcaaattcttcaacttatctaactagatcaacttatagtggtataggttacatttcctattacaattatggacaattttgtacccaaattattggtttagaattatttttt

SEQ ID NO: 171807 - DNA, 439 bp, Glycine max
agcttctggaggaagcctcttaatgaagcttctatagaaaactacatgaagctgcctcggtaaaaatgctgcccagcctttgttaaacgttggatcttcttgaaatttggtctgctacttcaaaagacacgtgtacatgatctaaccgttgggatctttgagaagatatctggagtgtgctagaagcctcttaatgaagcttctagagaaaactacatgaagctgcctcggtaaaaattcttcccatccttcgttaaccgttggatcttctagaaattttgcttgcaacttcacaagctaattttccatgatctaaccgttgggatcttagagaagatgtgtggagtgggcttgaagcttccgttcccgagagcatctcttatttaagcatttcagcctttgctttcttgtagcttaggaaaaacgtcatttcttcttc

SEQ ID NO: 171808 - DNA, 519 bp, Glycine max
tgtctcagcgtttatgcgagacagagaccaacatgttagctatcatcgccaagtaccaagaagagttaggtctagccaccgcccacgagcatagaatcgcggatgagtatgcccaagtgtatgcggaaaaagaggctagacgaagggtgatccactctttacaccaagaggcaaccatgtggatggatcggtttgctcttaccttgaacgggagtcaagaactttcccgattgttagccaaggccaaagagatggcagacacctactccgcccccgaagagattcatgggcttctcggctattgtcagcatatgatagacttaatggcccacataattagaaatcgttaggaaacttgtatggtctctcagaccctgactagatacgacttcctttttgaaataaaatgaagtggtcccatgttttactccaaaaaaacttgtgccaatcaaatcactcctacatttcatctctagcatgcatttttttttctttaccactcctcacgtttggttttta

SEQ ID NO: 171809 - DNA, 433 bp, Glycine max
  unsure (1)..(433): unsure at all n locations
atcttgcttatatatttaagaaaccattttctgtagaaacgttgattatgttaagaggtcaactctcaatgatctctggtaaagaatgatttgatctctatatgtcatcatctattgcatccaaggatatattgtaacatcctgcaaatttctacccggaatttttgaaaacgatgtattttgaatgattatatatatataagnactattcagtgtacatgcctatatgttcttggcacaagtatgaatagtggaggcaagatacgctagttatgctaattaatgaacagaaatccataactgggaggttgcgggttaattcttaattaatgagttaaaaatcatcgttttgcgtgcgacttataatttatcgaaaccaacctctgaaccacgctcggtgttctattctgagcgtttagaatatatattgctt

SEQ ID NO: 171810 - DNA, 512 bp, Glycine max
  unsure (1)..(512): unsure at all n locations
tgattntgtgagttgattttaaccttagtttctatttatttattagtcaattcaattgagaaagaaaaatcccacagagaaacgtccgattgatttttttgttttattttactaaaagatatttttgattattatattattattttacctcttttttgggttccaacgtggttacggcatgaccgaacggtcggatttcattttaacagaaattaacaaatgttacaattcaaatgatcggtggaaaattattttattttttgattaggcgagaaaatgacttaaataaatgactaaagcacgtcaaaagggggtacagaaattaaatgaaatgaaaataaaagtacgcgaaacaagtggggaccaccaagggtacatagaatgaattgagaagttcaatttcgggaaatttaccactttgaagacccgaagaacgacgaataacgaatgatagactgtggaaaatcttcacgacatcaaccacggaaatgtttctgacgcgttacggaagc

SEQ ID NO: 171811 - DNA, 436 bp, Glycine max
agcttgaacgaatgtaagacacatcttcttcaacctttgtgattcttgactccatttcattgaagcgcatatccacttgcaattccaaagtgtcaaacctctcaccaacaaaggtttgaagaccatcaaacctgtccataatcttcgaaagaagagatgaatcttctccctcatgtccttcttcaccaacatttctagcacccttcttcacccaagagccatcatgctcctttatataaccaaaggatgctatgactgaagcgcctataaggaatgatctcttgattggaacataaggttcagaatcaacagggatgttgaagtgttgaaggaaaaaggtaacaagatgaggataaggcaaaggggcattcgatcgcaatgccttatgcatgcgatatctaacaaggtgtgcccaataaatttgtaaacctttatg

SEQ ID NO: 171812 - DNA, 573 bp, Glycine max
tctttgagaaaacttccttgagaagctagagcttagctacacacacccctctcataactaagctcacctccttgagaagcttccttaagaagattccttaagaagctagagcttaactacacatacctctataatagctaagctcacctccttgagatgagaagctagagcttagctacacaccccctataatagctaagctcacccccatgacaaaaaacatgaaaataacaaaaaaaagtccttattacaaagacaactcaaaatgccccgaaatacaaggctaaaaccctatactactagaatggccaaaatacaaggcctagacgaaggaataacctattctaatatttacaaagataagcgggctcatacttagcccatgggctcgaaatctaccctaaggctcatgagaaccctagggcctcttcttggatctctagcccaatctacttggagtcttttagccaatgcccttgcggggtaggattgcgtcaaccctcacgactttatctgcgtagggacattgtgtatcatgccgccaacatgatacacctttactaaggccaccaa

SEQ ID NO: 171813 - DNA, 401 bp, Glycine max
cttacagtgagcgatccatgcttagcgccactacctgtgctacgcacacttccgatgactttataaagagaatgatgttggcgcttatcgcatcctttcctgctaagcttagcttgaaagctcaacttacataatgaatctggggctgagcacaggatggaacgcttaatgcaactataagaaactctttcacagagaggaagcgacgcttagcgcatcattcacactcaggccattgcttaaggcgcagcttacattgaagatgttgggcttagcgcaatgatgtgcacttagctgaaccattcactcaatcgatcaggggtcttttcgcttagcgcaagcaaactcagcttagcgcgtgaagagatggcgcttaccacaatgttcgcacttaccggatc

SEQ ID NO: 171814 - DNA, 555 bp, Glycine max
  unsure (1)..(555): unsure at all n locations
tatcaaaacccagggcaaacatgtccccgatccaaggctcaacatacccaaggttcacgcttagtgagccctccttatagttaaagttctatctccccatgaactaaaggtacacaaggtctgccaatgatgatattttctattcctaatttttatctgtgtaggaatacaagcctgtcaaaaacccaaggtccaccattggtacgcactcctacaaaacccaaggcttctcttttgtccactcactcgcagcaactacgatgaccatcgtcaacggtccaagttcaacaaaacagactaccacagtactatttggcaagaccttcaatcaagtggaagtcatgccaactccttataaccatcaaaggagaagcttcacgggtcanaatgacccatcaccaaattgagtggcaagacctccaattagatgcagcttgtacatactcntcataaccatcaaaggaggaactcaacacgtcaagcgacctaccccaagactggttgacaaaacctttaatcaaaggcaagtcacacatactcctataagcatcaggg

SEQ ID NO: 171815 - DNA, 147 bp, Glycine max
  unsure (1)..(147): unsure at all n locations
agcttcagctcttgatacaggttctatcctatccaatcttttatttnttttctttgtaatttgtctcaagttcgtgttttgttttgcaactcgcattcttgtatgcatgtctgtttacgtccttttttgcgtcgtgttctccttcct

SEQ ID NO: 171816 - DNA, 453 bp, Glycine max
ttgaggatttggtcttcaccaatgaaaggatcgatgtgggtcctaaaagaggcaaatttgatcatcctactaggacgactgagaaaactggggcaaataaaaagggtgagaaagagggagaaacccatgctgtgactgccattcctatacagccaagtttcccaccaacccaacaatgtcattactcagccaataaccaaccctctccttacccaccacctagttatccacaatggccatccctaaatcaaccacaaggtctgtctaccgcactttcaatgacgaagaccacctttagcacaaaccaaaaaaacaccaacataaaggaattttgcagcaaaaagcctgtatggttcaccccaaattccgtggcatatgctaaacttgatcccatatccactcaataattcaatggtagtcataaccccaaccaaggttcctcaacctccattt

SEQ ID NO: 171817 - DNA, 389 bp, Glycine max
agctatataatcaaatctggttctgaacttggtatcaaagcgggtcgatctcgctctgcctgccgtatgctgtcgcccattatctcctgccaacatcactgccgccagccaccgccattttttccagtgatcactggatctggtgtgcctcaccaagcatggcccagcccagaaggtttcacagtccgaaaccctataactcaccatcatgtgcgtcatttctccgcaactctgtcaagcacatgctgctcacgcgctggtctctggttaccagaactcaggtgcaacaacacagtcagggtcgtcagcctcttcaggtctagtttcaatcttcagatcatcatttctttgctgtttagaaagtgtgactggttttccgtgcatgtaca

SEQ ID NO: 171818 - DNA, 960 bp, Glycine max
  unsure (1)..(960): unsure at all n locations
tcctcgatcgttaaatcagaccaaaccatctaaaattngttaattccctcaataattataattcacacacnnncacagancacgatggatctggactagcgacactaanaaantaaatacttgtagtcctactcttatcataactacccgctcagtgcatttttttctctgtaacaaacattacgcctggcctttaaaactagatccctactaaagagctcccggctagaggacatataaataaagcgaccggtccccaaccatgatttacgaacgcgacccaaaaaatcaccatcacaaaatgatgctatttctcgataatcttttttcttaacaaaaggacacggcatcacggcgtccagaaacactcttccatcttataagtgtgtttccaaaaaaaaaccccgcctaaaaatagggcgactctacgatgcaccggggcttacaaacactccctcacaaaaatactaccctttgaatacgcgggccaccacaaaccgtctatatacgaccaacatacgtcttgatacctccaatacaaaaagaattctcatcggccttcttctaatcacaaacaactggcgaaaggccaaccatatcccattatgagcagttgactaaccccgtacaaacgatatcaacaaaatatgcaatcgttgctgcgaacagaaccctactcttgttcaccactttaaatacccatcccctcacattccacacaacttcaaaataccagaatcgacacccccactcaactcattcactgcttgtaaaacaaacggcccaaatgcatctcggtccaaatacggacgtctccgtacgaagaatttgcttcactctattccacaacgggacaccgcgctccagaaacagtgtggctctacactaccacacggcacacagatatgcgcatgcaacattctcaagcgcatactttagggagacactttccgtcctccc

SEQ ID NO: 171819 - DNA, 570 bp, Glycine max
  unsure (1)..(570): unsure at all n locations
tcactcacccccnctcctcttctctcaatgctctagctctatattagacattcttacataatacacnnnnnncaacccagaggggttgancctgttttggtcgccgtcctgtaacccgagatgcatacatgcgagctgtcgtcggcatattagcaatataagggacgtggtgagcactatttgtgaaatactcagagagtgaaaagtagaagctcatatgcttgaagaacacgcaccataccttgccttgnctaatttgtgattgaatagataaagccattggatacaaacactgcagcagaacatgcgattagcagctcctctcgcaaaagcacatctccatgccgatatagacgcaaggactattgtttgggagatactacgctaactggagatggaagaacggatgcaatatgtgcctatgtttgacgtcgaaaaggactacattagtactcaccccagacgagacccacactttgttaaacgactcatattaaagagcatgcatgaacattatccgtagatatacctataaaacttgtaactcatgataaccctaccacctcagcn

SEQ ID NO: 171820 - DNA, 412 bp, Glycine max
ttcttttggatttgattggaatttctgacttgaaagaattccttggttgctttgacacacaacactcaacacacaattgttttggtatctcaatttggggaagaccatgagccattttcttacttttcaaattacttaaactcctgaaatttaaatgaccaaacctgtgatgctacatccagctttcatcacttatagaagcagccaagcattgaaattctgcagtctgaattccaatcttgaatgctctatttcttgacaaaggggcctctataatcaacctcctatttctatcaaatatctttatttgattggcctccatctgcattgagtagcccttttctagcaactgtctcaaactcagcaaattattcttcatattgggaacatatagcacatcattgataaatga

SEQ ID NO: 171821 - DNA, 573 bp, Glycine max
  unsure (1)..(573): unsure at all n locations
ccctccctctccatctcttcctcaatangtnatatttctttctctcactattnatnntttcctctnctncaagggccagcactgatttgttttcgtcgcgtatcgatgaaccgtacaccgacatgcaagctgcnggcttcaactcttgatacaggactgagcctactcaatgtctactgtttatgattagactctgttacacggacttgcattttcagatcccttgcggaatactacgctagtctctcgacgctctcttaagcgtagcctcattcaggctaatttccgtccacagatcgctactgtgagactccgtgctgactagacaccattatagctgcatcatacttaaggacagaacttaattcactcatccttcgcgtagaactgattgccaagcgtggttcattcaagatctacgcgaacgagtacatttaccaatataacgtcagcgtattatgcctacaaatggatgatgctttcatgatcatgcaatcattaggcacgtgaggaagcctggggcacacaacgcgtaagcagtgtgatactacgcatttacgtcggctgtccgca

SEQ ID NO: 171822 - DNA, 177 bp, Glycine max
cggttatagcatcttcttgcgtatccgcttctggtatttccattttctttataaaaaaatcaacttcatatggcgcggattcatgctctgcacatacacggatttggttgaattcaataactgaacacttccggtgatcacgacttgaacgaccattaaatagatctcaatgtcttg

SEQ ID NO: 171823 - DNA, 425 bp, Glycine max
  unsure (1)..(425): unsure at all n locations
tagagtcacctgaagctgcagcttcctggcctttaggtaaaaagactcgtgatcgctatggatgacaaactctntgggtaataggtcatgctgccagagttgtagagccctaaccaaagcatgcaactccttaaataagagaagaggaaaggcagaggctcctaacttttgactaaaataagctatcggatgtgcctgttgggataaaacagccccaatgcccatatttgacgcatcacactcaatttgaaatgatgttgcgagattaagcataacaagaatgggtgcattatttaacctatggttgagggcagcagaggcctcttattagttgttaccccattcgaaacccacattcttcttaacaacttcacgtagaggagcagccaatgtactaacatccttatccaatctgctatagaaac

SEQ ID NO: 171824 - DNA, 462 bp, Glycine max
tggacttcctgtgttttgggaacctctccttcctcaagtgtacccaaacctcatcacctggttcaagcatgactttctttctgcttttgttggcttgccttgcatagctcgcatttttcttttcaatttgggccttcacttgctcatgcaacttcttcacatactcagctttagcctgtgcatccttatgcttaaacatagcaatgttaggcataggcaaccaatcaagaggagtcaaaggattaaatccatacactatctcaaatggtgaacaattagttgtgctatggacagcccgattataagcaaactcaacatgaggcaaacaggcttcccaagatttaagatttttctttaaaacagtcctaagcagcgtgcctaaagtcctattgactacctcagcttgaccatcaccttgtgggtgacaagtagtagaaaacaacaatttagtactaatcttac

SEQ ID NO: 171825 - DNA, 442 bp, Glycine max
  unsure (1)..(442): unsure at all n locations
agcttacatgaccttccttgtactaggagaacataaactatctctccctctaggaatttatagttggttgaacacggttagggttcgggttttatgttgtgtttttataaggctcccaatgctagggacctatgtgcaattatctttttatgtcattttgctaccaaaattttcataaattgcaaaatagtaattttttaattaatgacctaaatcttaggccattacttcacttaagcatttaaattataaacacactccccgccccacacactctcaatttaaacacatatatactcattttaaaaaaacttactttagtgtaatttgactttaattaaatntccaagtcactaattatcttagaacatttagtttcattgattaaagctattacaaacttattatcaatctaaatgtgtcatgtaaaatctaattctat

SEQ ID NO: 171826 - DNA, 459 bp, Glycine max
tatgcttgatttgcctcccgcaacacatgaacacactggacatgaccctggaacttatggattgcatggatgcttctaaccagattataacaagggtacaagggtgaagaaagcaacaaccattattcactaaatttgtaccaacttgggaatcaaaataaattttgatccgtctatgtcttctatcccaaaccatttgaagaacaagcaaatatggcccattactctgctgccagattcgtacatataccaagctttgccgcaaatccacaaataaagcacttattagtgtgtttgttgacgtttaaactgttttcctttaaaaaaaagtaattttctgttttaatttgagaaaaaaaaatatctgcttattaaataaaacattttttaagaagtatttttttaaaattacttattttaagtttaaacaaattaattcaaaaacttcagaatcatcac

SEQ ID NO: 171827 - DNA, 439 bp, Glycine max
agcttcgtcctcagatccctcttgttggactaggcccaatcgaggcaaccttcttaggtttagactaacttaaactgagtttcatctgcagatccctcttgtaagactagactaagctcaagcagcttacaaaagtttagcctaatttagcctaagcttcgtccacagatccctcttgtaagactaggcctagactaaacaacattattgtaacaacatacttaaaaccaaaacttaattcacagatccctcttgtaagactaagtttcaatcctgcttcaatcaagttctaaggcaacagtacatttcccaataataaagtcacctaattatgcatacaaatggatgatcattccaaaagcatacaaacattaagcattgaaggaagcattgaacatagaaaacataatcaattagatattaggtatttacatcagct

SEQ ID NO: 171828 - DNA, 541 bp, Glycine max
tgaacataattaaaaaatatcaatgaaaactcacaacttcaagtgagattatacaaacttctaaagtctctctcagcttgaagctcaaggactttaacacgtacctgctagttgtatttgcctgtagtgttttaatacacgttttaatacatggtttagacatatacatgtatatataaaaagtagtaacaatgtgctttacctggacttgatataatgaaacagcttccacaagaacaccaatggacaaaccaacttcaactacaacaaagtaattcagcttcacttggagttcatataatgagtaatggcattagaagaagtaaaagccaaaccaacttcaagtacaacaaactaattcagctttttctcaaccaaactatgtcaaaatacttgttggctattaaaagtgttagttactcatgtgacaatcatagtattctagtttctattcatcattaaaattcacaaagcacatatagtgttctcatagcaataccacacagagacaggggtgtagatagcagccacaagcccacta

SEQ ID NO: 171829 - DNA, 446 bp, Glycine max
agcttatagtggagtagcaacttttatatttcttaatttcttttattctcttacgaacttatcctttcccacaagatctttacacaaaccggttttcaaacagaacataaaatttgtgatggacatgcgagtccactttagtctggtggtagtcctaattcccaaggtgggaagcaatagcaatgtgacaaaagcaatttcctttggcagataaaatacatagatgctgaatcaactaatcactaaaaaagagccgtgtcggtgtatatgcttaaatctagccatatctacaacaatatcagacaatcaatctctccaactctcacatcaactgaaattgctcctgagtttagtaccaatatagcttgatattctaacagtattagagtgataatgcagaacaggtgaagatccccatagatctttgtcaatatgagaattttccc

SEQ ID NO: 171830 - DNA, 574 bp, Glycine max
tagcgcaacagccgtgctaagcgcacttccaagaattcaaaaatattaaaagattggcacttagcgcttcctgccccactaagcccagctcaaaagctcaaattacagaatggatctggggcttagctcaggatagcgcccttagcgctgctacaatcaaatttttccagagaagaagtggcgcttagcgcatcatccacgctaagcccactgattaagattcaattacattgaagatattgggcttagcgcagtgatatgcgcttagttgaactattcagccaaccaatcaggggtctctgcgcttagcgcgagcaagctcgggctgagcgggtgaagaatgagcgcttatcggatagacaattgcaaaaattttctaagtctctttttgtctatctcttcacacaagcttacaaccccttgttcattactaaacaagatgataattaatcacaatcacaagcaaggtattctaactacatgcaagagataagaatgaaaaatagaaaagggaaagaaaagtcgggttggcttccagtaagcgcttttttaacgtcactagcttgacacgtca

SEQ ID NO: 171831 - DNA, 341 bp, Glycine max
cgccaaaaccgatgaaagggacgacttgggccaataagatggcgtttttcacccggcgattaccttttttttatgagggtgatttaatcatgacattcacgtactgcccattataatcggaacgcccttaacctgtaaatttttataattattataaacccatagggttcgctctccttacctgtttgatcaccggaaaggcacctgaagggcaactgattgtcgtccatatccaactgtggcggcggtcgattaccactcgtaaataacactactgcccggcggtccctgtaatttcatgctcacggcaaacatgagggattgtgaatactacacaatct

SEQ ID NO: 171832 - DNA, 430 bp, Glycine max
  unsure (1)..(430): unsure at all n locations
agcttacattgaagggaaacgaaggtgagtaatgtgtggcattgaagatggtagcttgaattgttccatggaagaggagcttangtttttcctccattgatttagccatccaatattcacaagaaggaggaaattgaagattaaaaagaaaaatgtagtaagtgtgttttgacttatgagggaatggaggtcaagttacaactgttaacaaagacacatttcatatataaaggttgtaaagtttggtgttgaagacgaagaagcaaagggaaccttataatgcaattgaactgttggaaggcagtttgggaaaacttgtggaattatgcataattaggcgtatagtcacaaccaaccgtcacgtctattctatcccagaatacaagttntcgcttcaagctcaagtttcttaaactcaaatcacaatttt

SEQ ID NO: 171833 - DNA, 465 bp, Glycine max
tgtataaaacctctgcctaaaagggaaaataaaaatgattttttttcttgacaggtgaccatgactaaatttaagaaataaaatatgggacagggtctaaagagaatgccaaaatttttgggctcattgcaaacctgataagtatttgtttgaaagaaagagttggctgatatttggaatgtaagccctcttaaggtctctgtaatgctagatttcccatacaaagtgtattcttcctccccaacagatgtgttgccaacagaagtatttacattattaatgacacttacctatcattcatgcaaagaagaaacttcaatggtattaaaatcaatatgtgcatacagtttggaaagttaaggaagaagcacatttataagaaaaaaaagtaattaaaaaacttaagtaccaaccacttcaggaaatacggaaactttatcaactaggaacttcaacagctctggc

SEQ ID NO: 171834 - DNA, 156 bp, Glycine max
tctctctatgaacgaaatctggagaccacacatgcctgcatgacagagaagaatttactttcgcaaaacctcacactacagaagaggggaacacagggatctctcatcaattttagatctggcacccattattcacagacaccgattactgaccac

SEQ ID NO: 171835 - DNA, 217 bp, Glycine max
tatactgcaaacatctacaataaaccttctcaacctcagcagcttaatcaaccactacagaacaaatatgaccttttcagcaacaagtacaattctaggtggaggaatcattcaaaccttatatggtcgaatcccttccaacaacgacaacaacaacaaccaccttatttttataaagttgctggcccaagcaaaacatattttcctccaccaatcc

SEQ ID NO: 171836 - DNA, 413 bp, Glycine max
gggagaattgaatcatggcttcatattgtaatctctttaccaagtgaagactatcttattcatgccttccctagccttccagtgtatcaaaatataaacattggatataccagctatgtaacatacataagtgggctgataatattcccctcgactttgaattgtgcttgtgaaaaatataatatttctttgaacatgaacattctttcattgcaattgagctctttattaaaaaggtgcacatgtaagtgattttctgaaaactcccacattcaccaaataatataccaaggatatcaatgattatcatggtaaaagagacctaggtttagactatgcataagataaccaatgtatagtgctgaagcactatcgaatatttaaaacccagcgcatatattgccactaaacct

SEQ ID NO: 171837 - DNA, 582 bp, Glycine max
  unsure (1)..(582): unsure at all n locations
tgcttttggctgatccattcggtctataccaagtgaactttctctacctccaaatcttcaatccactcattaaactcctttatgctattatccgcctctcctcgttgacatctgccaatcctttttgaagggtttctgacattgttgaaatcccccaaaatgcaccataatccttcattatgagaatttttcaactgctttatgttctcccatagacttctcttgctctgaacatcacaaggtgaataaatgtttgcaatatgcacctgttgagcctccttaagcccttgacctaacaataaaatgaagccactgcctatgactttactgtgcactttgcaatcttctgcattccataaacacaataacccgcctgatgtgtttactgcgggctgcaattcccaccctacctccgaagtccctcacaaagtatggcacacactcatgtcaatgttttctggtttagtctcttgaatacaccaacanatcgattttttcttttcggacccattctctaaatgcagcccattttacacccctccctaagacccttacattgtaggaaataatattcatgggttt

SEQ ID NO: 171838 - DNA, 315 bp, Glycine max
  unsure (1)..(315): unsure at all n locations
agcttcaccggatgatgccgatcgaacatttcctaatcgacatcatccaactgttattcagggattgaatagaataaacaatgggcggtgtcggtcgttatatggccccgactgatatctttcagccgacattgcgcaattttttttacaaacgctagcgatagtgattgtttttttgtttcttaccgaagatgaagctttttgttttggngctacctagcaaactacaatggttgtcggctaggtttttctgtgagagcctctctgatggtacgttacgaccgacactggcatgtaattcttctcatttaagag

SEQ ID NO: 171839 - DNA, 348 bp, Glycine max
aatttaaattgatgtttgtatttatgggaggtttgtttatgccctttttgctttaagagtgacgccccactggtaaaactaactttccaaatgcttgccttctcaggaatggaccccaagaaacttgcctcatagaggttcacgaaggacaatgcggccgaaggaactagtttcgccccggagtacgacagtcaccgctttatgagcgttgtacaccagcagcgcttttaagccatcaagggatggtcgcttctccgggagcgacgcgtccagctcatggacgacgagtatactgatttccaagaagaaatagggcgcccgcggtgggcaccactggttactcccatg

SEQ ID NO: 171840 - DNA, 434 bp, Glycine max
agcttgtctcagcgtttatgcgagacagagaccaacatgttagctatcatcgccaagtacgaagaagagttaggtctagccacggcccacgagcatagaattgcggatgagtatgctcaagtatatgcggaaaaagaggctagaggaagggtgatcgactctttacaccaagaggcaaccatgtggatggatcggtttgctcttaccttgaacgggagtcaagaacttccccgattgttagccaaggccaaggcgatggcagacacctactctacccccgaagagattcatgggcttctcggctattggcagcatatgatagacttaatggcccacataattagaaatcgttaggaaacttgtatggtctctcagaccttgactagatatgatttcttcttttgaaataaaatgagctggtcccatgtttctac

SEQ ID NO: 171841 - DNA, 530 bp, Glycine max
tttcttcacccttattgcagttctacatcatccgcaccaccttaaccctaaaaaccaacataaaacacatcaaaaccttgaaatagtacacctttatgaaacttctaaaagtgcctatggaagaaaacaaaaatggaggatgagaggggaaaaaaaagggtttcttacctctaaaatcaatccagattcgaaaaatcctttgtgctaaggtttcaagtcactaaaaactaagtgtatgactcttcctcttttttctatgcgcaccgcatagcttcctaagctcacttactccattctatatcactcaaggcccattcatcttagcccaaacattctaaaacagactattcacacccaaacaaggtttttcgcatttgtaaacataacatacatacaagtaccacacattgtcatctcataattaattaattaattaattacaggaacttaattaaagttaattactcttgcaatctaattaaatcacttaatcaaacattacgaagaaacacaatgttacatttatccta

SEQ ID NO: 171842 - DNA, 364 bp, Glycine max
tttctgtcgcatcaacagaagaagcgtcttctcttcctaaagccaaaaccacatccattgctgccttctaataagacaaactacctaatacaacacatgcagtgcaaaaacacagcatggattagcagactgctggggaaggaaacataaattgactgacccctcacctcaagattttgaatggcgatcacataacagagggacctcttaccaatactgtatatgaatgagatctggcaaccacacatgcccgcgagacatatataagactactttcgcgaaacctcacactcacgagccggggagcatagggatatctcatcaatttatgaactggcgcccattattcacagaggttgattac

SEQ ID NO: 171843 - DNA, 503 bp, Glycine max
tgtatagttccccaatttatggttattttgtagtgatttttgtatataaatcttattttatggttaatgttgtctctagaacatttccattggatttaatgatgaaatctgtgcattttcaggtgaaaaagaagctaagttttgaattgcaaaatgtagcagtggggctaagatcagcagttgggctaagcgcatatccaccgctaagcgcagattcagcgcgcttagtgcaaaggagaatctggcagagcatcagcatcaaaggagaatctcccttgcatttgttttcgtcatcttcgccacgggaagccggaaggtctgcatagttttcttaattgcatgcattggacaccatggtaatgactgtaaatgagccatgatacccaatgcattgtgggtaagagagggtggtcttctgggctcttgtgtccatagataaacgtgttttgcatgcatagcataaacattccctgatgcattcatcataccttcttttatgatag

SEQ ID NO: 171844 - DNA, 389 bp, Glycine max
  unsure (1)..(389): unsure at all n locations
ctcatgagccanagatcggtttagctcttctttgtactgccttattatagctagcatgctttgctccgcggcttctaagtgctgggccaaactcctcttggatcttgagcaagcagctaactcctcttttaagaccatgctatgtacttgtgattggtctctctcttcccttcgaagcttgagctcattgttgatgccctacaaagctccacagaatttgtttcggccatgctcttccttgcgagccctctttgattcttgtgcaagggctcttgcggaagctgcattttcttctcgtaactcagcacactctttccgaatgtttgtagtgactaacttgaatgtttctttggcaagtcttgcctttcctagatctggttatagagctc

SEQ ID NO: 171845 - DNA, 523 bp, Glycine max
  unsure (1)..(523): unsure at all n locations
tcttatccaggtaattcttggtggtgaagctccttctgccttggcttattccctaatggatggngcctcctctctcctcttctcctttgccttctgctgcatctccatggtgtaaaatcaccattaaaagacctcattgaagctcaaagatccaccctccatataagccccacaagcaagcttccatcaccggagctctgataccaaatgatatgaaccctcatggcacaagggctgacttatgagcgtctaggatggaaaatgcggaaattgattaaggaaaggatggaaaataaggtggttaatttcgtgggtcttaataaggtggttcttggcataaaatggatgaatgggatgcgtaaatgtatgttaagtggtggctggacagaaatatagaaatggcaataactgaagctacagggcttcaaatgaggtgattttaacacgcggtgaaaggtctcgttttgaaattcaatttacgcttaagaatcacttaatttgagtgcgtaaaatgggagatatg

SEQ ID NO: 171846 - DNA, 477 bp, Glycine max
  unsure (1)..(477): unsure at all n locations
gatccttaagtcacctgcggcatgcaagcttatacccatcctttancatgactcgagccaccatcaaagaggtatcagacatactcgattgtatcggaggagactccacataagcattgttcacaatttccaatgcctaaaatgacatttctagtgactcctccactacttcaacataaggagtataagacagatgactagctagtatgtcctcctcgcctgatactataacaagctaacccctcaccacaaatttcaatttttgatgcaaagactatgggaccaccccagtagaatggatccaggggtgacctaacaaacaattataagcaggagttatatctatgacttggaaggtgatttgaaacgtgcacgagccaatctgaatcaggagatcaatttcccctctcacatcacgccaactatcatcgaaggctctaaccaccatagagcttggcctcatgtatgaggcattta

SEQ ID NO: 171847 - DNA, 445 bp, Glycine max
ttccgccagacttacggaaagatcttagagttgaccatagcagaggtgttcatagaagccattgcagcacttacccaatactacgaccagcccttgagatgcttcacattcggggacttccaattagtaccaaccattgtagaatttgaggaaattctaggatgtcctctcgggggaaggaaaccatatctttcctccgggtgtctcccctctttgagcagaaatgccactgtggtcaaggattcaaccacaggtttggaccgcataaaacagactcggaacggcatagcgggcctgccacagaagtacctagaaaacaaggcgaggggtatggccaatcaaagagactgggtccccgttatggatgtgttagctttgctaatttttggggggcggctcttttcaaacgtggatggtttgatagacctagcagcaatcgacgctt

SEQ ID NO: 171848 - DNA, 439 bp, Glycine max
gtaccaatcatctattaagcccttttccaacatatatcttctagctcagtacactttctgacctccgacttttttacgagcttaaaaagttaactgaactagacctttcatacaacaacttatcaatcaatgtgaatgttacaaatgcagacatgtcttctgtgacaccttctaccccatacatatatgtactatgaaaaggaaaagaaatcatgagtaattaaaagtttttaaaacacattaaaataaaatcctttcagcaggggcaaaggctcacattcactttcttttacatcatattcaaacttgacccaataaatgacaaagtcatcccggctcacacaaggtcgcctaagacttcatacaagtaatatagaaacctataccctaatgtcacatcctatcagagcatagagtcccgacatacttcagcacaaag

SEQ ID NO: 171849 - DNA, 461 bp, Glycine max
agcttctttcggaccttgaacaagcaactaactcctctttcagaaccatgctatgtgctcgcgactggtccctctcttcccttcgcagcttgagttcactattgctaccccatagagctccgcgaaatttattccggccatactcttccttgcgagccctcttggtctcttattcaagggctctcgcggtaattgcattctcttcccgtaacccggcacactccttccgaatgtgtgtagcggccaacttgaacttctccttggcaagtttcgcctttcctaactcgcttttgagagcttggacttcttcgtcctcttccggtgcttcaaaactcttttcgctgacgacttttaacttggcgagccaatctaaacctcgtatatgaactttcagccattcgtggtacccaccaatgatgccattacgaatgcccctaagctcttgatcttttcttaacggg

SEQ ID NO: 171850 - DNA, 444 bp, Glycine max
  unsure (1)..(444): unsure at all n locations
agcttgtaggattatggngtacccatcacatgtggtactaggtggcggtcgggcgatggtgcacaacaagctttccacatccacaatgcgcgcataaacccaccatcccctgttgcccacctccaactgagctcacgtactcccacgtagcccatatcctcgtttctctcaacaccgggtccccatcaatcctctcaagcttccacaacatccaagcaaaacaacattcaaacagcacaagctatcacagccaagcaaaacagagcaaaggcagaaaactctgctcaacacatcaaccaaaatcacagcttttctcacgtaaagaccacagtaacaattccttcgatccaattcgttaaccgttggatcgactccaaaattttactggaagtctatagtgtataagcctacattntgaccgttgggatctactagcaaacatcc

SEQ ID NO: 171851 - DNA, 517 bp, Glycine max
tataagaacaaaattgcctcaatcatttccaaatatgcatgtgaatttggacgcatcaacaagaatcaagccaaggctattgtgcaagcaatcaatggggcaaaacacaccaaatgattatgatgatggatggctcaaattctcacaaaggtaaaatcatcactttcaaattgagctttcaaaactatcatgacatgtagagaagaatcaaggatttcaagtcacaaaatgtcaagaacttttattttcaaaacaattacccatttcttgaacatatcctataattcaaagaaaaacatgcaaagtcgtacgtgcacacaaaattgacccaaaatattaaactaaaaatccgacgaaactaacaacattaacaaattaacacaactaacaaattaacaaaaccaacaaaactagcaaaatcaaagaacactcccccccccccccatacttaaacaacacattgtcctcaatgtagcacaattaaaagattaaaaagaattaaatcattcaagagaat

SEQ ID NO: 171852 - DNA, 437 bp, Glycine max
agcttctttctttaactttctattggatcattggtcgtgtcatgtgtgtaatattttattttctgtgaaataatcatatatgttcaaagtgtgaataatcctcttccttgtgtccctgaaaaaggttggagattttagggacacaaggaataatgatcatacatgtccaacctccttgagtaatctttttatgttacttcaagttgatgcgccaatatttatatgtttcttgtaaatattatattactcgaacgaggttggagatttcatgtgttgtgtgtaatgtcatgggtggacatacttggtttgatgatgcccacagaattattgatttttttccttctttaggaatctggctttgtaaaacatgattgctattctctttgagtttaatcttgattattgcgtaaaagaaagtatgttcaaaagaatgtgtc

SEQ ID NO: 171853 - DNA, 434 bp, Glycine max
tgcctcaaagaggtccaggaaagacaaggcggccgaaggaactagtttcgccccggagtacgacagtcaccgctttaggagcgttgtacaccagcagcgtttcgaagccatcaagggatggtcgtttctccgagagcgacgcgtccagctcagggaggacgagtatactgatttccaggaggaaatagggcgccggcggtgggcaccactggttacacccatggccaagtttgatccagaaatagtccttgagttttacgccaatgcttggccaacggaggaaggcgtgcgtgacatgagatcctgggttaggggtcagtggatcccgttcgatgccgacgctatcagccagctcctgggatatccgatggtattggaagagggccaggaatgcgagtatggccagaggaggaaccggtctgatgggttcgatg

SEQ ID NO: 171854 - DNA, 438 bp, Glycine max
agcttgaatcggacatctgtgtgaatagttatgaccatttgaatttatcaagagcttccgttgttctatttcgagcgtctctatatgtgatgcgccataatttaacatccgtgtgaaaagttgtgaccatttgaatttctcaagagcttccgttgttcaatttcgagcctctcgacatcttatgcgcccgaatcgaacatccgtgtgaaaagttatgaccatttgaatttctcgagagcttccgatgtttaatttcgagcgtatcgatatattatatgccttaatcggacctcaatgtgaaaagttatgaccattttaattgcccgagagcttccgttgttcattttcgagcgtctctatatgtgatgtgccttaatctaacatccgtgtgaagagttatgaccatttgaatttctcaagagctttccttgtttagtt

SEQ ID NO: 171855 - DNA, 782 bp, Glycine max
  unsure (1)..(782): unsure at all n locations
tgaatctccattggagttgtcggttgtagccactccataaccgactcaaacttgttcggatccaccgcaaccccgtccttagaaatcacgtgccccaagaactgcactttctccaaccaaaagtcacatttcgacaatttggcgaacaacttcctatccctcaggatatgcaacacaatcctcaagtgcttctcatgctcctccttattccttgaatacactaggatatcatcaatgaacacaaccacgaactgatccaagtaatcatggaatatacggttcatataatccatgaaaatagccggagcattagtcactccaaatggcatgactaagtactcgtagtgcccataccgagtccgaaacgtagtttttgggatatcttccttcttaactcgaattngatgataccccgatcgcagatcgatctttgaaaataccgttgctcccctcaattggtcaatcaaatcatctatccttggtagaggatatttgttcttgatagtgaccctgtttagcttgccgtagtctacacacactctcatactttcatgctttcttttaaccaacaagaccggtgctcccatggtgatgcgcttggacgaaacaatggttgctcaaaaggtctgcacttgtgctttacctttgtagtcttaccgagacatctatatgtgcgatcacactggatccccccggccccaagcataagggattccctctctttcagggggattacaaaatattccgaaaactctggaatttggcccaccggtaataaaaat

SEQ ID NO: 171856 - DNA, 439 bp, Glycine max
  unsure (1)..(439): unsure at all n locations
agctntaatatttgaattaaataactgctggtaatcgattaccatatatgtgtaatcgattacacagtgcaaatttttgaattcaaattttaatagctgttgtaaatcagttttggccactggtaatcgattacatcctctagtaatcgattaccagagagtaaatttcttgtaaaagactttttaacttaaatttcttggccaaaccttttgctacttcaattggaattcccttcctatttaatataccctttctaagattctagagactgtcttgatcatccatcttgaatatctttgatttctttgtcttgaataaagctgtgtgaaacatgtaaccctttggcatcatcaaaacatcagcttgatcctttgtctacaatctccccctttttgatgatgacaatcctgaaatcaagacaaaccatatacaagatga

SEQ ID NO: 171857 - DNA, 578 bp, Glycine max
  unsure (1)..(578): unsure at all n locations
cataactacgtgtaagctttaggcaaattcacaagataaattctagaaaaagcattacttaactcgcgacggaaagcataaaaacataaaattaaagagcaaagtttagaaatactaggttgcctcctaggagcgcttctttaatgtctttatccagacgtggggttgtggttggggcttcgccgtctcatcctccctaccttctttccttgatcgtgagcaactctgatcatggacctagcacctgttggcacctgccctaatgctttgacaaagaaagtgttaacatgcaaatgtgaagaaatactacaggatgctcatgtagggttgtggntttctctttttcgttgtcattttcaattttacttaacgcttactgcaccctgctgaacatgccgaatggctccggaatatctgtcgtgagagtgagcaaaaacgagagtgtacgttcatgcccaacgacgatataagtacanaggaacaacactagaaggagagatgcacaatattacatcatatttattaatggtgagaatattggttacaaaaaaaacttacgacgtggagattctaatgag

SEQ ID NO: 171858 - DNA, 445 bp, Glycine max
agctagcacttcaccatggattaacctttgcagttcaagaagttgcaacaataaatctttcagctataataactagcacaatagaatcaatattgaacaatgactatgaataatgattataatgcactaaaaaatcatgatagaaaataacaataaatgtctagcaaatagctgaaacaattaatatcaattacacttgcttgcgtctacaacattttgaggtggcatctctttagtcccaatttcaagaacaaatgctcttgaacgatcatgcacctataatcagaaaaaagctagaacttacattaatatataaatacatttatggacaataatcaataaagagactcgtactcgagctagatattaataggatatagtttctctatctatcatatcattcttactggcaatattttacataagagaggaatagctcataaag

SEQ ID NO: 171859 - DNA, 540 bp, Glycine max
  unsure (1)..(540): unsure at all n locations
acctttccaacatttggtccatgaatggcagatgaaaatgacatcattcaacttgcggtagtcaataaaaattcgccacccagtgattgtccgtgtaggaataagatcattcttatcattacagatcatcttcatatcgcctttctttggcaccacctggaccaaactcacccaagtgctatcagagttggataaattagtcttgcttcaagcaacttgaggacttttttgcacacctcctccttcatagatggntgagtctcctctatggatgtctatccagtctgaattcaccttccatcattatgctatgcatgaaataggatggactaatccccttaagatcaaatatgtgtcatcctattgttgtcttgtgcttcttaagaacctccaccaatagtgcttcctcaattgaagacaacgtattattgataaccactagtttaacatcatctgcttcctgggagacatacttaaggtgaggaggtagaacccttaactcaaccttaagtttttctgtaagagtgcctttttttagct

SEQ ID NO: 171860 - DNA, 443 bp, Glycine max
ctgctagcttgacatacttgcagtagccacaccgatgaaagtgaccactctcgacaccaaacagtaatggaccatgcataggggctcgaccgacttgtcctcctcctacttgtcaatgactatctgcttcagacactgaaggacctctttcacccggaagccacctgagaaatcacggggcttatgcattgtacaggacccacaaaagacacgactagacatgctagctggcactccaagacacacgtctaccctgacgcaagagcactgacgtgcatcccttaacagtcaagctgtcaatcgacaggttatctctaacctcttattatattaatatattgccaaatttacatcttcgaattcacaaaatatgaatgtaatccatcctaattgatatctggaggattggatgcacctttgatgacagaatttcttaccgcaag

SEQ ID NO: 171861 - DNA, 452 bp, Glycine max
ttttatcgttttttaagccggtatctcgcctaataattgataaaatgaatttcaaccgatcatttgtggtggaatctcggttaatcactattaaaataaaatccaactgatcgttcacgctgtaacttcgggtaaataaaaaaaagcagaataatcataaaataatcagaatatttagaaaaaaataataataaaataatcagactaataaatcggacgcttttcttagaaagtttccttaaatgaattgactaataatcaaagtgaaactaaggctaaaatcaactcacaaaccaagttttgtgcgcaaaagtcactccaaaccgttttaaggtccaacaccttaaaacggctctctttgcttttattggttaaaatggaccattcaaagcataaaattaacacataactttctcacttttgcaagaatacgtacgtctgatttcctcatc

SEQ ID NO: 171862 - DNA, 437 bp, Glycine max
agcttcggctttgtcctcaatgcttcatgtagacttgcccaaaatcgcgaagtgaacctcggatccctgtcagatacaatactggaaggaattccatgcaaccttactacttctttgatatacaacatccactagcttctccattctatacttcatattcactagaataaaatgagcagatttggtaagtcgatctactatgacccatacagcatcatgtcctcgactagacttaggtaaactagatacaaaatccatggatatgctctcccatttccattccggaattgccaagggcttcaattctccttatggtcgatgatgctccgccttagccttttgacatgtcaaacaccttgctacatattcagctacatctttcttcatgccatgccaccataaacttctcttcaaatcttggtacatcttagtcattc

SEQ ID NO: 171863 - DNA, 441 bp, Glycine max
tgtagggttcaccccaaattccgtcgtcatatgctaaacttgatcccatatctacttgataattcaatggtaggcataaccctaaccaaggttcatcaacctccatttctgcgagaatacgactcgaacacaaggtgtgcttgtcacgaagaagccccggggcgttccattgagcattgtatggctctgaagtgtacggtgcgaggtctaattgatgctggctgaaatttgaggagaatcgtgtgtaaatcctgacattgacaagagatgccacacatggggcaattttgaaagctgttgttagatgtctctaatgactcaccaggattttcaactttcaccggaatgtgggtgtaagccattggtctgtttgctcaagcaacctgcgctcctgagtgttgacttccaagaccgttcaatcagagattactcatcttgcac

SEQ ID NO: 171864 - DNA, 435 bp, Glycine max
agcttgtggtggatgatgcttgttcataatgaaatcaaaatatggctgtagcctatgattttgattttcctaaagcaccttaagtctcgttaagtatccaaagaataataaagaagtatcaaatgcgattaataatgtatgaaatgagttttgtatagctgatataatgatttcctatgcaatatttttttttccattttatacttccttaattaataaataaaaataggatagaatatgctagtaataatttttattattttgaaaaacataaaacttactattaagtgaaatgtcaaatgtgtacaagttatagatcctttaaatctcattatttaacatgtctcaagccactccttagatccatgcccaataatggccccctgatagtcataggctcatctccaaggtgagcagaagtcgatccaaaacgct

SEQ ID NO: 171865 - DNA, 493 bp, Glycine max
tctacttatgtggcagggcgggtttccttcactttcttgtttccaacgcgagctctgaccactgttcttccttcccgcgatgcttcttttcatgtccgcctgagtgggcttatatcctaaaccatactcccccctaacctctcgacgagagccgtcgaaggcccgacccaccattgaacttggttttaaatgggaagcattgaatggtaacttgtccaaagtgctcttatgcatcacgtttaaactggaaccattatcgatgaacaccttgggcacgatatgggccatacacttgactgatacgtgtaaagacatattatgccctctcccctcggcggggatttcttcttcggcgaaggcaaaaataaatgatggccgtgatattgttgaccactcctccgaaaccttctaccgaaatatattgggccacgtgagcctcgttcaccattgttactagcagagcccgatgagggctcgagcttataagtaactc

SEQ ID NO: 171866 - DNA, 283 bp, Glycine max
agcttcttcccaatgaagtcatcaccaacaacaaaaatccacttcctcacctcatcattatatttggcgtgatttatatatgcatttgttatatatgcatttgtatgtcaattatttggataaattatgttgaacttaatatataatttgtggatttggataaattatgtggattagctaggattcaaaagctttgttacaaattatttgaatgtttaatttgatgaataaaagtaaatgttgttcatgatttcagatcatggttagaacaccaggtctacgt

SEQ ID NO: 171867 - DNA, 478 bp, Glycine max
  unsure (1)..(478): unsure at all n locations
cccttcatgatgaatcaagattgattcaaagatgttttgatgataacaaaggggatgaaaaaaagctcaaaggtcaattcatgataatcaaagaatgagttcaagatgttcaaagatgtttaagatgatcaagatgatcaagattgaataaaaaacacttcaagaatcaagaatcaagattcaaggttcaagcttccaagaatcaatatcaagattcaagactcaatattcaagaatcaagagaagacttaaatgagataagtatgaaaaggttttttcaaaaacttagtagcacatggatgttttctcaaaaaatgtttaccaaagagtttttactctctggtaatcgattactagaatattgtaatcgattaccagtagcaaaaaatgattttgaaaaagttttcacatgaatttacaacgttccaattgatttcaaaaagttgtaatcgattacaatgttntggtaatcgattac

SEQ ID NO: 171868 - DNA, 560 bp, Glycine max
  unsure (1)..(560): unsure at all n locations
ccgtaacaccgtctgccantgancacaacgctaaaaaatanagntactccacacantcnnaagcanaagattgactgtaatgatgcgtttcgaanccggngaactctagaggcnagctgtatgcatgcaagcttgacactgaacanaatctgctctatatccttggaaccgcgggaggcctcaccagcctgtcgtacacactacctcgataatgaattctaacatgattattctctggacataatacctataaacaacgatatccctacgacacctttgacccgatacacccaccggggaagaacgcttcgtgttgaatccgaccgcatgtaaaagaatgagccactgatgctgacatcagaggacttgcggctttagtaattgaagtgccctcttaaactagaggcgcgagcattcttgcgatgctttacatgaatcacagtgggcagtgccgtttagaagctgcagaaatacttgacatgcagacagcatcatcaataatttgttcaatgaaaatcacttacatgaatcatctgccgcatggactagaaacaacattc

SEQ ID NO: 171869 - DNA, 334 bp, Glycine max
ttgctatccaacaatgttgcttcatgctttaggatttctatacattggttctctgataaataccttgtgttgtcttcaggagctcatataaagagtgtatgcacacaagccggtatgtatgctatccgtgcccggaggaagactgtaacaaacacagacttgctttatgcaccaaataaagtcatctaaggataccagaacatcactgcaactcccaagtatatggtctacaactgaggtattttttcatctttttccgagaccatagcagctttatctttattttcccctggaaattgaagggcatgcgattctatctaattaactctctgtt

SEQ ID NO: 171870 - DNA, 425 bp, Glycine max
tgcaagcttgtagaatggctagacatgatacatgtcagggtttggtttggttcaaggataaaagggatgccccacattatttccatgacacaaatgcaaaaatgatgatttggaaactttatgcaaaactggtcatgcatgcacctatgcgaacactcaagtgtcaaatttttatggtcatgtgatgctagggctcacgattcgtttcctctattttaatcaacccaatgtttccaaaatatgttcttttatcaatttgtgcattcatccgagtccatttcgggcgtccggggaaatttcacagcattcacccttcaggtgtagacacattttccaaaaattggttatgatcaatgaactttttcaaagaaaagttggaaatcgtttcttttcacaagcatgctgttttttagctagacaaccta

SEQ ID NO: 171871 - DNA, 620 bp, Glycine max
  unsure (1)..(620): unsure at all n locations
tcttatccaaggctcatcttggtggtgaagctccttcttccatggcttattccttagtggatggcgcctcctctcacctcttctcctttgtcttctgttgcatctccatggtggaaaatcaccattaaaggacctcattgaagctcaaagatccagcctccatagaagccccacaagcaagcttccatcagagaccctcgaaggcaatacgaggtgtcgattccgtggcacgatccgactcacggctacttcgttggtacatccaaaggaaccagcacgcacgcttcagtgcactgtggagtggatcttacctacacctactccatatctactagtggagccagtccaagtgattgaggtgacgtcatctaaggaagaccctgaggaggacccagaggagctacctcctgagcctgctgtggatgctcttgactttctagagggtgatgaggacccactccctgaggtggattctcccgaggacgtcatgtcggcatctgaggcagactctaccgaggagagcggtcctcgagggatagcgactagcgaanggtcttattatagcagacggctccttagactaggattatatactttttgggggtgggtgtatctggtac

SEQ ID NO: 171872 - DNA, 447 bp, Glycine max
agcttgaaggacatgcacaaagtgtgactatatgatgtggctatggcgtgtagcaagcaaatgctcacctcccccttaggctggaccaaactttaattgggttgggcttctcccaattcaattaaatttatctcccaacacacatcaaatagggcacttaatgcatgtgaaattacaaaactacccctaatccagaaactagtctaggtgccctataatacaagagctaaaaaatcctacattactagggtaccctccctacactatggagccctaaatacaagtcccaaaaataatgaaatcctaatctaatatgtacaaagataagtggtctcatacttagcccatggacccaatcttcttggagtcttctatccaatacccttgagggatagtgatgtagctccatgtggagcttgtagaccttggatcttcttcatcaatgga

SEQ ID NO: 171873 - DNA, 563 bp, Glycine max
tgtaggattatggggtacccatcacatgtggtactaggtggcggtcgggcgatggtgcacaacaagttttccacatccacaatgcgcgcataaacccaccatcccctgttgcccacctccatctgagctcacgtactcccacgtagctcatatcctcgtttctctcaacaccgggtccccatcaatcctcccaagcttccacaacatccaagcgaaacaacattcaaacagcacaagctatcacaaccaagcaaaacagagcaaaggcagaaaactctgccaaaacaccaaccaaatcacagcttttctcacttaaagaccccagtaacaattccttcgatccaattcgttaaccgttggatcgactccaaaattttactggaagtctatagtgcataagcctacattttgaccgttgggatctactagcgaacatccagaactcattctacattactctttccacaaccagcaaatacacggatttttctgcacttgtgcaaaattctgctgcacaattttacagcaaaatctgcacaaagagcatatttcgaaaaccacac

SEQ ID NO: 171874 - DNA, 452 bp, Glycine max
catgcaatgctttattgtcggtcgaaaacagaatattatatttgagaataactggagctcgcattcgaaaataaaattatcactaccatacatatttaaaatggacctcacaggccaacttgcatggatatctactataaactaaagctaaagaaccaccccataataccccctacaacaacatgtcagggacagtacctaataacttctagggtatctattacactggttagtttatacaattaaaagaaaatatacactatgaagaataatgatacatagatgaaaaggacccaatattttccttcccatgcaaaccagaaatctctattggatgtgttgtttaaatgctagagccagtcatgacatgatgatttgcagcatgaaagaatacaagcatatatacatatgtcatatgtataccactactggatgtacatatacatatgcat

SEQ ID NO: 171875 - DNA, 549 bp, Glycine max
  unsure (1)..(549): unsure at all n locations
ctagtcggatcgtaggagtatntagtgttgtaatggtttttgctttaagtagcaagtttgttcggcttttcacaggcattttttttttaatttagataacagaatttccaacccaaaaaaattgaagcttgtgaagatatgtcaatatctcgttacaaagtcaaaatcttaattatgatgattaaaaaaacatttataaacaaaaaagattaagaaaaaagtgggtatatttactcttacatagtagtcattatttatattctcttttttaatatatgcatttcacatataagtaaaaaaaaaatctctttcaatgatctcaaactatcctcctttatcaagggatttaactcatatgattgagtagtatgtataattaagttgttataaactctttgacgtcaagagttcgactctctcatttgaaaaaaattaatctctttttactttttatttgatcttcttaacccttgcctcattcaatnttttttcataaattgtataanagaatatataagataaattggtttaaagataataaaagaaata

SEQ ID NO: 171876 - DNA, 452 bp, Glycine max
  unsure (1)..(452): unsure at all n locations
aggcatgcaagcttgaatctcccatggagttctgacagttcgaattgcctcctaggtgagagttactcccagactgggcagatttttgtggagaaacaggccccgtaacactgctgctgcgatttgggcctgggttgtaagttgacccaaatccactcctttgacccgacttaaaacccgatcccgttctccccctttcatacaaatgatatgacacatctctttcctttgtccatcttccaaaatcactcagcctctgcgaacgaaaaccccttatctccacctcaatatcccgcgccattttcatggcttgaagccggttttgaggatttatggtttggacccttacctgaatttctggtttgagaccttcaacaaaatatcccaaatattgttcctccagcaaaacgattcacttgagaagagaggaattngaattcagatatgtactc

SEQ ID NO: 171877 - DNA, 580 bp, Glycine max
  unsure (1)..(580): unsure at all n locations
tggttcaaggcaaatttgtaccaaatttggggtagttatatgtcaaaacaaatttgtcccaaatttgggggagacactgggtaacgaaataaaatggtcaaaacaaagcagcatatacacactgttttcttaaaaaaaaaaagaactataagcataaataaaaatgtataaaagtgtgtgtgctgcaaatcaaatcaatgaaagctaagtgcctaataaaaggcaagtatagggtaggaatgaatagaaaaagtaaaggtttatctatggatgaatgctctcctagaatctaagatttttaatccaagaaaaaccattatttgttggcagcctaacctcattacaagcctagaaagtccttcagattcattntgtggggttatttctctatggtatgagatgatatgcaaaagttgggacttgtgttagttgtttataatggaatgagcctaaacagttgagcttgagtgaaacaatgactgcgagggcttggntgatgattctttccttgatatctgccattctcactagcttatttcagttgtgactctaatgcatatgttcctatctttgaaaagct

SEQ ID NO: 171878 - DNA, 441 bp, Glycine max
  unsure (1)..(441): unsure at all n locations
agcttgtacatcattgtagatagctatcctgcattatatatatgttgatatgactatcatggattatagacaactatgctggacttggagtagctacatttggttggacttggacttctctttattggttacctaattatagctactcagattcaaacagattgaagctggagttgtgtgccagtgtttgattttatcatgggaagtgttcaatgagatgggaactcaggatacattgtgttggacaatggtcaatatgtattcaacgtgtggtgacattgatgaggcacaagtattgtttgatggggtgagggtcaaagatgtgtctacttatgattccatgattggaggagtgtgagtgttgccaaaatgcattttctcattcagacagatgctagagatatccctgttgcacctganaagtctgttgttgcatttaaa

SEQ ID NO: 171879 - DNA, 448 bp, Glycine max
tttaattaataaaattaattagaaaaataaggattttttttacgtaaaggctatagatacaaagcttcacactaaaaaagaaacatctcaactacgttgacaaccctcctcctagagatcacaagcaaaggcgtacaatttatttctataaaaagaagaaatagataaccgacactacgaaaagaagttttgtatgatgtctattttaagatggttatcggaaagctatcctcgtttaagtagaggcggcattttcgtaaacaattataacttttgaaagacggtcattgcagaaccgtctttaaaacaacttttcaaagatggtttttgctaaaaccgtccttgaaattagatcctcatcgtcgattatacaaagaaaccattgtgagtggatctttattatctcgtggttacaagcactctcgcactccattcctttcctctcttc

SEQ ID NO: 171880 - DNA, 333 bp, Glycine max
attgcacaacggaagctctcgagaaatttaaatggtcataacttttcagaatggaagtccgattcacgcgcataatatatcgagaaacttgaaattgaacaacggaagttgatgagaaattcaaacggtcataacttatcacactaaaggtctattcaggcgcataatatatcgtgacgctcgaaattgaacattggaagctctcgacaaatgctaatggtcattacttttctaatggacattcgattcatgcgcataatatatcgacacgcttgaaattgaacaacggacgcctcttataagttcaaatgcgtatagctttttacaacgaag

SEQ ID NO: 171881 - DNA, 1116 bp, Glycine max
  unsure (1)..(1116): unsure at all n locations
cgttcgttcgagtcttactctctttaacactatactgtatgttctgtacatcactcttgtcctntatagcccnncaccagcnatgtgatgattcatgcctattctccagtgancctatanaatacttcagcgttggaaatggaacaaccggaagcctctctgagaaaacttcaatttggtcatatactttatttacacaagacctttctatttcaggtcgcatatatatctatccagacagctccgaaaatctgaacaccggttagaggttccaagaaattccaaatgggtcatcgactctggcacaaccgacagtcccgatttaaggggccataaaatatccagtacgcttctaaattgaacaaccgcaagcgtctccgagagaaatccaaatggtcattaactatgtcaacacggaaggccccgtattcttggcgcataagtattatctgacaacgccttgtaaatttgaaccaaccggaaagcctctcgtagaaaatccaaaatgggccatgtactctgttacaacgggaagcgctgatttcacgccgactatatatatcatacaaagctttgagcatttgtacaacacgaacgctctctcagaatatttaatacggctcatatactttcgtcccacggatcgccccgataatggccgccttactcatcttgggacggctccgaaatgtagcatattctgagcgtttctctagagatattcaatagtgcgcgattctctttcatcaccgaaacgccgcatctcctggcctcctacaaatcttctcagatcgcctctcaaattgtcatcactgagaagtcgttctcggtaaatattatatatgcacaatcaactgttgctccacgaacgtctcgaatccgatgcaactcactctcattcacgacctcctctagacttgtaccactcactatctctcgctcacatcttcacaatctggaatataatcatggactcaccgctgatgccgtcgactacatgcagtctacgtatatactcgattcttcgtgacaatgtattcgatctaatatatcttcgtaacaacaccncagaattgctactgactcatctgagctagcgttacgctcgatcaacgt

SEQ ID NO: 171882 - DNA, 446 bp, Glycine max
gcaagctattggacaggtgaatgaaaataacgcccacatgtacacaaagaacttgcagctacatgctatggcaacattcatcccatcgacacacattacacggtactaagatacttcaatgagatataaagaaaataagggggagaagggggcagtttataatgcttaaggaaacagttagtacaggaaaaacaacgggtctgagaaccagacccatgttagcatgaaaatgatccatggttcaaccatataatgcacgccatggttccttgctttcccctgatgccttttttggattccagaccactctgtcttctgaaaactgcagatctgtagtgctagccaaaatctcacctattgcatgaagtatctggcacaatccataataaattagctcttacagacgcactcatttatagaagggaaaaaaaggaagccaaggaaat

SEQ ID NO: 171883 - DNA, 489 bp, Glycine max
taacacacactttcactctattgttcgtgcgaaaaagcggcatctccgcaatgatttacataacatttttctgaacaatagttctatttctgaccatttctttcgaattcaaacaattattgattctctctcgtccattggagaacgtgtgtctaaatctgatcatgttgacattgttcttgatggtttaccagatgagtttgagttgctgtcacttttgtgagtggcaagtttgagtgctgtctattgatgaagtcgcaactctcctattggctcatgagactcgaatcgcttgcaagaaatcacttgcctcatctggagcttccattaatctctctgaaggagcagaacctaattttagccaaattcggcgcaccaggattctcatcctcaagcctatgttgctcaaggttctagctcatcgccgcattttggcatgaactataataattacaatggtggaaataggtacattaaccctggcgctgg

SEQ ID NO: 171884 - DNA, 421 bp, Glycine max
agaggggacgcaccttttcacgttttggagaggatcaataacaatgcctatacgttggacctcccagatgagtatggagtcaccaccacttttaacatttctgatttaattccttttgcacgtggagctgatattgaggaggaggaacaaacatattcgaggtcaaatcctcttcacggggaaggggacgatgcaatccttctctaggaagggaccagtcactatagccatgagcaagaggctctaagatgattgggctagagctactgaagaaggccctatggttctcatgaacctcaagggagatatttgagccactgggcacacggatgggtccaattatatctgtacatatttgactaagatgtcattatatttgcgccttgaatttatggccccatattggaggtagggtatccta

SEQ ID NO: 171885 - DNA, 450 bp, Glycine max
  unsure (1)..(450): unsure at all n locations
tgcggcatgcaagcttgtcggattatggggtacccatcacatgtggtactaggtggcagtcgggcgatggtgcaaaacgattctccacatccacaaatcacgtataacccaccatcccctgttgcccacctctaactgagctcacgtactcccacgtagcccttatcctcgttcctctcaacgccgggtccccatcaatcctcccaagcttccacaacatccaagtaattccacatccaatcatcatggactaacaaaaccaagcaaaacagggcaaaggcagaaaactctgcccaaaacacaactcaaaatcacaacttttcacatacaaataccccagtaacatttcctttgttccaattcgttaaccgttggatcgactcgaaaattntactggaagtctctagtacataagtctacattttgaccgttgggatctgctagcaaatg

SEQ ID NO: 171886 - DNA, 407 bp, Glycine max
tctacttatgtggcagggcgggcttccttcactttcttgtcttcaacgcgagctttgaccactgctcttccttcccgcgatgcttcttttcatatccgcctgagtgggcttataacctaaaccatacttcccaccatttcctttggcatttatcatgctagttatgccgccgttgtccttgcctaaacccattccgggttcgtaaccgttccctaacataactcgggccatcattactgctgcatcggacaggcaaggctgcccagagaaggagtccacggaggaaatgctgaccacctcaaaagactggaaagcggtttctaacgattcttctgcggcttccacataaggcatagaagatgggcagctcaccaagatgtctttctcgcctgacacgatgaccaagt

SEQ ID NO: 171887 - DNA, 433 bp, Glycine max
agcttacacaactaaattggagcacaatgtctcgtgtttataagaggaaaaatgaaaagctgaggagatagcaagtttgtttctgctttgaaatttcaaaatgttttccgttaattcaaagtgcctaataaagcttgcagtatattgaataatatccccttttcactacgtacaataaccagataaatctgaacaatcttgattggaacaggaaattctttttaacatttttttacaatcgcctcccctcctctcaaaagattaaactagttatcattgtcttaacttaaatattggataaaacacttaggtgaagcaggatgtgattagtttaattaatatatgttgatgttttgatggggttttttctccacttctcccccattatcattcaagggagataaggcttcccttatttccttctcggctttac

SEQ ID NO: 171888 - DNA, 567 bp, Glycine max
tcagctttttatcaagtgaaaattatgtaaaggttttatagacattattagtcaaatgtataaggaggaaatgtgtatgtatgtatatagtcaaatgccaattaatgaccgcaaatttaaactgtgtaagccgttccatctaaggaagaaggagaaatcatttgtattcatggagaaaactcaacggattttcttaacctccaagcctcttcgagaaggaaaaactgttttcttaaagctctatatataaggacgaagagatgttgaaactcattgctagaaaggaaattacgatataaatgatatagatcaagaaattgtattgcacatatatatcttaagcttttgattcttgtattttacgccaaactgtccaagactttggagagccaaatccacttagccttagagtgtcgataaagatatatcaagggagacttgttaatggtgtaacattgtggctttttcataatgtatgttaagtgtttaattaacaccacacgaggaattaaatttaaatttatattatttaatgaactacttaataaaatagagtatgttggtcat

SEQ ID NO: 171889 - DNA, 414 bp, Glycine max
  unsure (1)..(414): unsure at all n locations
agctttatgctgcaaaattcctttntggttggtgttttggttcgtgctaaaggtggtgttcgtcattggaagtgcggtagacaggctttgtggttaatttagggatggcctttgtggataactgggtggggggtaaggagaaggtttgtaattggctgagtaatgacattgttgggttggagggaaacttggccatataagaatggcagtcacaacatgggtttctccctcattctcaccctcttcattttccccagatatttttgcatttatcaatgcatgatgatcatatttgccctttttttttcagacccacttcgatccttttgttggcgaagaccaaatccgcaaagcttgaaggtgtgtaacctaccatcattttatagtataatactgacaatgtgtctaccatca

SEQ ID NO: 171890 - DNA, 935 bp, Glycine max
  unsure (1)..(935): unsure at all n locations
gcttcaatcctgtggtcgattattactacaattntantttgctgtaaagtgattctatttcaactactgngtgattgttcattccacctctctctctccgggccgccttgatgcgtctttccgcgacctagagaaactcaagatagttggagtatgggggacccctcacaagaggtactatgaggcggtcttgccattgtgtcccacaagttatccacatcctcgatgcgcgcataaaaaccccctcccctgttgtccagacacatatgtgctgactcgctgacccattgagcatctgcttatatctataagctccgggttcacatcaatagcttctagctttctcaacctacaatcacttcatccttctaacaccgcatgctatcccagctaaataaagacgggcgaaggcgaaaaactatgcccctagaccaacctaatgacagcttttttttatttgggacgccagattgcaattctttaaatcctattgatgcaccgaggtgacgactgcaacatgctacagggggtaaatacaacaacatcttacattgaggcccgggggaactactatcctaaatgcagaacgcgtattagataactggttcctctaacaccatattcacgggtatattctgttcttgtgcaagattcagtgtgtccacgttaaatcgaaactgctcaaatagcatatgtagagaaccaccatattcctcacctaatattgtcctaacttagatgtacaagtgcgccctctggtattttgataggctttaacaagataaaggtgctcctcaggaaccctaagacaggggttttaatcccgagtccaaggggttcctcgtattaagagggttgatatgaagaaaaacttgcagcctttccctcgcccatcttttcttttttgcactgtcgcccggatttatactaaatcc

SEQ ID NO: 171891 - DNA, 380 bp, Glycine max
  unsure (1)..(380): unsure at all n locations
ctgctacaccgaactataacgctatctctaccgtaaaaaaatattgtcggtcagcgtttgtaaaaaaaattgcgcaatgtcttttgaaaaacatcagtcgcggctttacaatgaccgacgtcggcaattgtaatttctattatatccctgaatattatttggatgaagtctattagaaatgttcgatcggcgtcattcggcgatgcttcttttttaaaccctgatcggtcatctttcctaactgacgtcggctagaattcttatagatcagtatcggtgaatcaaaattttttttccgaggttcgcaaatatttntccttccaagcaaatgaaaacatgccagtgtcagccgacacacaacttcagttgtgctcgaacga

SEQ ID NO: 171892 - DNA, 1234 bp, Glycine max
  unsure (1)..(1234): unsure at all n locations
ctacgtcatccgtactanagtccgatcttcgtcacnantctcnttcactctcnacactcanntatcactccgttctntatatcacanctactntantcgtngctcgcacaccnacntnacctcancncntatcntntcacggcncactgggagttgattgntcgtgnctactctcatcgcgnataccacgcngnaanacnctatannaaatatcttctcaccgttctaaacaatatagactattcggagaccgcgtcacngagtaatactattacattgctacatcgtatattcactgaccntactccgatgtcaaaacaacgtctacctagatantgctcttgcacagatcttgatctcaggaggacatagctactcagtctcctaatacaccgaagtcgcatacatgtatactaatctaacggcggaccctcaaatcaataccagtncgacacgattacaaaacgtctaatagtngcgccttagaaatcaattctacactatgcatacccgttgatcctcggttatcctagccgtaatatatgtacttaccaggagctttatctagacaacacccgtatataatccacctgtcgccccgaaaattgcttcagagactaacataaaccaaatgtcccgtcggctgacgtaattatacgccaccccattcagacataccgttcaaaaaagcttttcgaagatagacattaccttaaaagcattaatcatataacaacccgactgtctcaccactaatacggtacgtcacactcacgagcacagcgctacatttagtaggtgtgttgaacatgaacaacactctccgactttaattttcagctccgaccgtcaaaaacaatgaacttcttccgacgccactgcccaaaatatttctagacgtgcccaactttggttactgccctatatgcgtccatttcaccagtcgtttctataacatgaacgatgaactcacttctcgatacacttggtccaaatagagaatgcagcagttcttaaaatatgtgcgctgatgctccatctctaacagctttcgtagcaccctacaatataatattctcgacagcgtcgtatcaacaaatacaacacaagacaaacactctctctctctattcacttaagctgtctaataacgcggtttttctcccacatactgtcatcatagataataatcgcgctctcttcaccttacatctctgtctgcacactaaatacc

SEQ ID NO: 171893 - DNA, 444 bp, Glycine max
agcttgtagaattcaccccaattccagtgtcctatgctgacttgctcccatatctacttgataattcaatggtagccataaccctagccaaggttcatcaacctccatttctccgagaatacgactcgaacgcaacgtgtgcttgtcacggagaagccccggggcgttccattgagcatggtagggctctgaagcgtaaggtgcaaggtctaattgatgcgggctggctgaaatttgaggagaattgcgtgtaaatcctgacattgacaagagatgccacacatggggcaattttgaaagctgttgttaggtgtccctaatgactcatcagggtttccaagtttatgccattattgtaaaccacagctacaatgttaaatgaaatggataaagttgatatctttgtccctcatcctctcacaaacgcatgtttgcttattcaac

SEQ ID NO: 171894 - DNA, 482 bp, Glycine max
tgtaggattatggggtacccatcacatgtggtactaggtggcggtcgggcgatggtgcacaacaagttttccacatccacaatgcgcgcataaacccaccatcccctgttgcccaccttcatctgagctcacgtactcccacgtagcccatatactcgtttctctcaacaccgggtccccatcaatcctttcaagcttccacaacattcaagcaaaacaacattcaaacagcacaagctatcacagccaaacaaaacagggcaaaggcagaaaactctgccaaaacaccaaccaaatcacagcttttctcacttaaagaccccagtaacaattctttcgatccaattcgttaaccgttggatcgactccaaaattctactggaggtctatagtacattatcctacattgtgacccgtgggatctactagcaaacatccagaacgcattttacattactcttttcacaaccagcaaatacatg

SEQ ID NO: 171895 - DNA, 447 bp, Glycine max
agcttgtaattgaataccttaatgataaccaactatcctgtttcacagttcttaaaacataaccaagaacaatttaacatattacaacacctcataatccattataacatgttatcaaatacaattttaagcataaaaaatcaactttgttcatacaactataagtacacaaagattacaaaaatattaatgttgcttcttattctattacttttattaataaaaattaattactttaaaatcatataaataataagatctaattaattgataatataatttttagtcactaataaatgcatatgaaactcactctttttcttcttctcaaaatcacctgctaatatatatattttttgggtttctattctacattaaaacatagtaccctatttatactaatcactgactattatgctcatatagtgaacccaatttatattaatc

SEQ ID NO: 171896 - DNA, 489 bp, Glycine max
tcttatccaggcaattcttggtggtgaagctccttcttcttggcttattccctagtggatggtgcctcccctctcctcttctcctttgccttccgctgcatctccatggggtaaaatcaccattgaaggacctcattgaagctcaaagatccagcctccatagaagcccctcaagcaagcttccatcaaaagcccttggcaacaagcctagctttgtacttgttgactgaaccattaggattctcctttactcttaacattgacttactccaataacatttctaaaggataggagataaaccagagaccaagtggattcttgattaaagttgcatattcagtttgcatggctgagcgctaagagggattattcaaagctactttagtagacttaggttcaagatgagcaaggagaacggtagggttaattctatgtttgacaattctagattttgcacgagtgcaaatgggatgggtatctgtgggtct

SEQ ID NO: 171897 - DNA, 444 bp, Glycine max
agcttcaagtctgtcatctttggagggtaccaattactacccagatctctctccttcaatccgtttctcggtcgcagtggcaatgcaagaacttacacaagcgagcaattctacaacgagttttatgacatgctgcagtctgatctgaacagaataaagaggagtgatagcaatagcatgaacaggtcaagagatcatgcaattggagatgccgcatcaaacactgaaatccttaccaagcaaagttcgcaaaagagcattgctgaagagggagtagtactgaaagagaagaacagcaaagggagctgtgaattgggaaagaaggaatgcttgaataattcaaaaagcattaacgagggagttcatgatttgacgcaaaagatgaaggaattggagatgatggatacgggtgatgttgagcacgtgctagacattgaagaagca

SEQ ID NO: 171898 - DNA, 625 bp, Glycine max
caaaattggataggaatgggataaaaataagttaaattaatagataatatagaaaataacaatacctcaaattcaaaggagagggtctgttcctacagcatcaacattgtcgtaagaagcaattagcaaactagtcaggtcatacttcatagtaacatatttcataaagctaaaagcatgcatggcaatatcaagaaattggcctacccagacatattatgcgaaaacccttttcttcccgtaataaccaagattaaattaaaaaaaaaaaaacgaaatagcttgattgttggattaatgacacgattttgatcttatgtttcataagctttcttaagacatccgtcctttcgagcataatcatatacaacgttttttcaacttcttatatgttggactcactcaggtgcatgctttctttaagaagttatatcaacagaagaactccgacatattgatttttaattttgaaggttaaaatatatttattttcccaatgaatttccttattatagctaaaaataaaataatacatacgtaatattgttcactaacttatttttataagaattgataagcctcttaaaaaatgataaatagaaaagaacgatttaaatgggctttg

SEQ ID NO: 171899 - DNA, 440 bp, Glycine max
  unsure (1)..(440): unsure at all n locations
agctngcatgatttacattctccccctttctcatgcaaattcttaattcttcttgacatcatcaaaatcttcatgatttacattctccccctttttgatgatgacaaccacctgtaggttaggagcaacaacaaagaaaaaatatctatttgcatatagtttactcccccttggttttgcaatgattgcttatatgagacagttgaagatttcatatttttcatatgtaaacaaattgtctcataaacaatagataatttttcttactattttatctccccctttgtcaacatcaaaaacaaatcatgaatagagaggataaagatgttaccacttgttgcaatgtatgagaatcaagcgataccaaaaggcattaaaacaatcattcaatattaatcaagcaaaaacaagtacaataacacatcaatcaaacacaatca

SEQ ID NO: 171900 - DNA, 528 bp, Glycine max
tcgcgctccatcgaccgctaccagcaggaacttacccaccgggagctacaaaagcgtcttcgccagggtccgcttttcttttattctttctttcttttctttttttgggacattgggtttgattgagccattcattttctagggttttgaatttttttcgttgttggggtaatttgtgttatttgttgcttttggtttagttgcttatgttttggttgatttttcattttcctttgtagaacaggaagatgacaaggaccggaagccgcaacccggacaagcttcaagcacagatgctgttactgagggtatgttttttttttttttttaaattataatatgtagtgattcctgttatgggtcaacattggagtatgtagggttctattttgttgcatggtaatggtaggattaaatgggcaacaaaggtatggatgggttgaaacttgaaaagcaagcttcttgctagtagggattttagtgatattttgtgactgctccaagaaagggctattaaactgatctata

SEQ ID NO: 171901 - DNA, 439 bp, Glycine max
agcttctgaagccaacattgtttgcttaccttgtcaatcaatatccgaaaactttaaccctataggaattctggcaactgtgatgtcaaaggagggtaatttaccataagaatttgcatataattcttcatactgtttagtagaggattgtccaaccttttggaatagattctcacttatggagaagataagttgaaaaattcttattcacaataatgataaacttcgaagtcaatgttcttctcaccatataagcagaaaatcatcaaatacaattgggtcttaagtacaatcccaaaatatgtaaactagcataaaattcatgatcagctaataaaatgatcccttatctattacaagcctaatttaggttataatgttggcgccttgttataaactcaagcaattagtaattaggttataatggcctgtttatctc

SEQ ID NO: 171902 - DNA, 507 bp, Glycine max
tgcatttttaatttcatctctaaatatcacagcaagtggaagaagaagatagggaaaagaaacttaaggccatggctatgtaaagcttgttctgcattctgagtcgtgggttggtggcgatgcatatagccgccgggaacatgcaatgattgagactggactcattacaatgttcagaaatggctcttcacggtacatctttttttaacttaatcactcggatcaggtaaccggtaaacaatctacaccgtttattataataataatatatccaacgctaactttttgtgattcaccggtgcccaaggattttaagacttcaccctagaatccacccgaagtttaagggatttcctacaagcatttcttatgaagaaatatatactttaaacaggaaatagaaaagtatgtgaatgtgcttttttaaaaaaaaaaaaataataaaaatttgtgacattagactacgttgactgttgacatataccgaagcaagatcgacataaaatc

SEQ ID NO: 171903 - DNA, 386 bp, Glycine max
agcttgctctattgatgaaagacacatggcttatatactaccatgactgatggataatgacttgaaaataaaatgcattaacctgtatctgtattgcatttattggtcaccaatacatacctgccgggcccttctacttattcccaatacacaagccttctcttcaatattgatggagattgtctatctaactttttgcaaaccctttcttcatcatgttggaatatattgatgatataatatgacaaaccgatcgatgacaaagagagacactcatgctgctattatttaactgcatttccttagtttgtgacgagtgagcaactaataatctgtttacaacatgatgatattcggataaacaatgttatatgaatatactgaac

SEQ ID NO: 171904 - DNA, 503 bp, Glycine max
tgtaccaatataagaaacatcttcttcgaccttggtgattcttgactccatctcattgaagcgcatgtccacttgtaattccaaagtattaaacctttcaccaacaaaggtttgaagaccatcgaacctatccaaaatcttttgatgaagagaggaatcttctccaccatgtccttcttcatcaacaggccgagcaccctttttcacctaagagccatcatgctctttttgataaccaaaggatgcaatgacagcagcacctattagaaaggatctcttgattggaacataaggttcagaatcaagagggacgttaaagtgttgaaggaagagggtgagtagatgtggatatggcaatggagcatttaatcacaatgccttatgcatgcgatatcggactaagtgtgcccaatcaatttgtcggcctttatgaaaagcccacataacaataagatcttcttcaaaaacctgtgcaaggtgtgaagatcttggaagcaagatac

SEQ ID NO: 171905 - DNA, 433 bp, Glycine max
agcttaccacctttcccatgatgcagtcaccagattgcgaacttccctttaaactcatgtgtgatgcctctaactatgcacttggggttgttttgtcacagagagttaataaactatcccatgtcattgcctatgcttcacgcactttagatgcaacccaagttaactacaccaacactaagaaggagcttttatctattgtttttgctttagagaaatccagatcttattttctttgctctcgtattattgtctttactgaccatgcagctttgaggtacttattgaagaagccttatgctaaacctagattgataaggtggatgcttcttcttcaggagtttgatattaagattaaagacaggagtggtgcagagaacttggttgttgatcatttgagctagattgaggaacttattgatttctttcctat

SEQ ID NO: 171906 - DNA, 488 bp, Glycine max
tgaaagctcaaaagaagactcaaagtgtccttggctgcatactgcaatgaaaaagtcaacatgctcacaggatgaagagaaaaaattgaagccatgagaagtaataaaaaattaaaggacaagaagaatgttgcacacatgaagatttgcacaatgaacatgacatgaagaataatattgttgcaacagacttagagagtaatttcatcaacatgatgagttcattctaaacattgtatctagagttcaagaaattcaattgagttgttcttggtgtctatgtaaatcttgaagaaatatcttcaagtttcatgaacaagtcgtggtttgatactatctagatcatggataaaattaagcctgaagttctagatgctgtgttgcctgggcaacttaatatgtgtgcattaatttgaagattccttgagctattaaagtgcatttgagaggatctcaatggaagggaaacctatgataaatatttcatg

SEQ ID NO: 171907 - DNA, 434 bp, Glycine max
  unsure (1)..(434): unsure at all n locations
agctnttcaaagataggagaaagaagctagtaatcatgatagaaatcaaggaaggatcatcaaccaaaatctcacagtcattgtttcactcaaactcaagtgtttaggcttaatccatcataaacaaccaacacaagttccaacctttgcatttcatctcctatcatacaacaatgaacatacaaaaatgaatccgaaggactttataggcttgtaagggggttaggctgccaacaattcatggtttttctaggattcaaaagcttaggttctaggagagctttcatccatagaataaccttcactttttcattcattccttccctatacttgccctttgtttcttaggcacttagcttccatacctgaaattttagcgtacacacttattaactttatttatacttacagtttctctttatcacacaaagcat

SEQ ID NO: 171908 - DNA, 430 bp, Glycine max
tgtttaccccatgttgaatttgcttacaatagagttgttcataatgccactaattgttctccttttgaagttgtttatggttttaacccactaactcctcttgatcttttgcctatgcctaatgtttctgtttttaagcataaagaaggtcaagcaaaggcggactatgtgaagaagcttcatgagagagtcaaagatcaaattgagaggaaaaataaaagctatgctaaacaagccaacaaagggagaaagaaggttgtcttctaacccggagattgggtttgggtgcacatgagaaaagaaaggtttccaggacaaataaaatctaagcttcaaccaaggggagatggaccatttcaagtgcttgaaagaatcaatgacaatgcttacaaagttgagctgcccggtgagtataatgttaattccacct

SEQ ID NO: 171909 - DNA, 422 bp, Glycine max
agcttatgtctggtcgagtatacatctaagcatatataactctcccaacaacttatgcatatggaattgcttccatttttttcgttccaattcatttctaagacattgtgcgagactaaatttgtctcctttctgaattggaatgggtgatgttgagcacttttccatcctgaatctctctagtactttattgatatatgatttctgagacaaccctaacaatccttgtgatctatttctgaatatttttatccctatcacataacttgcctcacccatatcttgcattttaaagatgctagagagaaacttcttagtctcatgaagtagaccaagatcattagttgcaagcaaggtatcatcaacatgtagaattagaaaaataaccttactcccactgaccttcaaatatatacactgat

SEQ ID NO: 171910 - DNA, 547 bp, Glycine max
tgcgatttttttatagaaaattataagttagaactacatctttttattaataaatattttaataccatattaaacaattttaattattgaaaaaataattattttttaatataataaatatttctatttgaatttctttctttttatttatctaaataataatgataataataataataataataataataataataataataatagtaattttgattataaatgatattttttttcaagtgatatatttatttatataaattttataattcaagcgatatttttttgtacaaattaatatgagtaaaatttaatttatattaacatagtttgaaggatttacagaccctctgtgtttttcatctaatatatttgcataattttaggaaactcttggttcaaactttaatttcatttatagatactcaagttatatttgctcttgatagggaaacatacatgttggacatttttttttttaaaatgcatcctcctgataatcaacttctaactggaaaaaaaaaaagccaaataaatatcttttttt

SEQ ID NO: 171911 - DNA, 427 bp, Glycine max
agcttgagattgagataagaacatacatattttaaatatttttacattaccgtatatcacaccatatagtctttcaattgatgtattgtgtgaatttggttcattttaaagtaaaaggaatgtattttagagaatataaaatactaataattattattaattcaaaactaatgattaagattatataattaattataaaatttattatatttctatttaaatttctctgaaatcataatcgttaattttttttaccataatcataattaaaattaattattagaagtataatttattttttaaagtgcttgtatacttttgactataaaattctactagtttctgtttgttttcgtcgtatttagcacaaaaacgaagggcctgtattacgtcaaagcccacaagttacagttaatttgtaagatac

SEQ ID NO: 171912 - DNA, 61 bp, Glycine max
tggagaggatgcttcaatggaggaaaagaaagagggagagatatagagggggggggggggg

SEQ ID NO: 171913 - DNA, 396 bp, Glycine max
agcttgatcaaaaaaattatctaatcattccaatccactcaaatcatacagttgctcattcaaatcattcgcagacactcatttcatacaaaacaatccactacatatcaaattcaactagttcactgttcaaacaagctttttgtacaagcaatcaactcacagtactgaaatttaaatgactgaacataaatcataaaatgactgagataaaacaaattgttcaaaatgcacaaatttaaatgtcctgctcctgtgatttctcttgtgcatgctcattgagatctaacacctgagcggctggtgaatactgagggataggctgctttaactcagatgctgcggcagatggcatggaatcattaggtatggatactagggatggctctgggatct

SEQ ID NO: 171914 - DNA, 207 bp, Glycine max
catgccctactttctagaatggcaatggtcttgcatggtatcaagagtggcgcacctcactccatattatatcttttgagcattatgcgacgccacgtgtgtgtgctaagactattgcttcatatggcagaagtctttaatctaatcgggaactaccttatcgaactcggttacacaagtggtttctggctagcaaagctatgactc

SEQ ID NO: 171915 - DNA, 374 bp, Glycine max
agctttcattgttcaatttctagcgactctatatcttatgcgcctgaatctgacctgcgagtgaaaagttttgaccatttgaatttctcgagagcttccgttgaccaatattgagcgcatcgatatattatacgcctgtatcggacctccgagtgaaagactatgagcatatgaaatgctctagagcgtccattgttcaatattgagcgactcgatttattatgcgcccgaatcggaccttctacgtgaaggttatgaccattggaatccctcgagagcgtcgggtgctcaatttcgagcgtctggatatattatgcgcctgaacatgacttccgtgtgaaaacttctgaccatttgtatttctcgagagcttg

SEQ ID NO: 171916 - DNA, 229 bp, Glycine max
tttcactctgatgtccgattcaggcgcagaatatatcgagaagttcgaaaatgaacaaaggaagctcttgagcactatcaatgatcataacttttaactcggatgtccgatttacgcgcataatatatccacacatatcaaattgaacaatggaagctcttgagaaattcaaacggtcataactatttactcggagggccgagtcagtctcactatatattgagaccct

SEQ ID NO: 171917 - DNA, 443 bp, Glycine max
  unsure (1)..(443): unsure at all n locations
agctntactattcaaagaatagccaagaaatataccttcatatgattttgcatcaaacttgcccaagttgtctttcccattatttatcacaaagcatttacatcaacaaatatgaagatgggaaatatttggttttcttcctttgtatagttcatatggtgttttctttaagacaggtataattaatgcttattcattatatagcatgcaatattaacagcttcagcccaaaaatatttaggaagatttgtatcattaagtaaagttctagctaattcttctaatatctattttcctctcaactactccattttgttgagaggttctaggtgtagaaaaattatgttctataccattttcatcacaaaataattcataatatttattctcagattctcctccatgatcacttctaatggatgcaatgttgagattnttcttat

SEQ ID NO: 171918 - DNA, 528 bp, Glycine max
gaccttgaaactcagcttgtaaagtctctcgctcttagtgtctagaagacaaagaaggaataatcgtctagaccatcattaagaggtccgtccaaagcaccaagtgtagctagctcctctaatgaagacttcaaaggacaatctgatgaggacgacgagctagccttcatctcgagaaaaatctgaaagatgtggaagaacaagggtggatctaaatagaagaacttctccaagaaggtgttcaatgaaaagaaagacaaagataaaagctccatcattgctatgagtgcaaaaagcctgaacacttcaagtctaagtgcccagatctggagaagtccaagggaaagcatgaataatacaattccaagggtaagaaaagcctcatgagcacctgggaggacctggatggcacctcgtccaataaaggagaggaggaagccaacctatatctaatcgctgctacaacctctgaggaatctgaatcataacaaacttatcctgaactactctctaacttgttgattcttt

SEQ ID NO: 171919 - DNA, 430 bp, Glycine max
  unsure (1)..(430): unsure at all n locations
agcttttgttntcaatttcgaccatctcgatatattaccagactcatccggacttccgtatataaacttattgtcaattaaattttctcagagctttggatcaaaattttgagcgtctcgatatattacgggattcattcagacatccgagtaaaaaattattgtcgttagaatttgatacgagcttccgttttcaatttggagcatctctcgctaaattgcgataggctatcgggcatccgagaaaaaagttattgtcgtttcatatttctaagagttcccgttttcaatttggagcgtcttaatatattacgggactcagccggacattcgtgtataaagttattgtcatttcaattagctcagagctcttagtctcaattttgagcgtctcaatatattacccgattcaatcggacatgcgagtaaa

SEQ ID NO: 171920 - DNA, 525 bp, Glycine max
ttgagcaaattgaaatgacaataactttatacacggatgtccggttgagtcccgtaagatatcgagacgctcaaaatttagatccgaagctctgagaaaattgaattgacaataactttatacacggatgtccggttgagtcctgtaatatatcgagacgctgcaaattgaaaacggaagctcgtaggaaattcaaacgacaataactttttactcggatgttcgattgaatcgggtaatatatcgagacgctcaaaattgagactagaagctctgagcaaattgaaatgacaataactttatacacggatgtccggttgagtcccgtaatatatcgagacgctccaaattgagaacggaaactcttaggaaattcaaacgacaataactctttactcggatgcccgacagagtgtcgtaatatatcgagagacgctccatattgaaaacggaagctcgtatcaaattcaaacgacaataactttttactcggatgtctgattgagtcccgtaatatatcgagac

SEQ ID NO: 171921 - DNA, 442 bp, Glycine max
agcttgagctcgttgctgctgccccataaagcccctcagagcttgttcctgctccattcttcctttcgagcccttttggtttttccgctctaaggcttcgaccatagtcatgttgacatctctcagcacatcacactttttccagaccctagtgactaccatatttagcgcctccttgaccactctcattttttcgagctccactttcaaagcttgcacttcttcactttcctcaaggacttcagcttctttcccacttaggccttttagctttgggagccaagttatcccttgcgtcctagacttcaaccacttgtgatagccgccgatggcgccattgctacttcccctaagctccttatctttcctttccactgtattccatgctctacggattctttgaagtatcttctccgatggtacacctctcatagggtagcct

SEQ ID NO: 171922 - DNA, 480 bp, Glycine max
tgctacaagaaaggaaaagaaaacactgttgcagatgctttatctagagtgtagggttctgaattaatggtgattgcagtttccatcatttccagtgagttgatggctgaaattcaaggtagctgggagatggatccacatctatccgagcttatacctcaattgcatcaagggttgaagcctaaatctccatatatgtggattgaggggcaattaaccagaaggggtagaattgtggtaggccaggccaaggactttgttttctctacgaacgtagtaggcaatgagccaccagatggtggtggcggtggtcaaacacgagtctcttttaaagaaaaggctatggcaaatagggaagcactacctcagcgaccaaaagtggacctatcaaggaaaaattggccaaaatagtctttgaggatgataatcacttgaagcctattgttcatattgatgattctgttttcaatggcttatatg

SEQ ID NO: 171923 - DNA, 440 bp, Glycine max
agcttaaaggtgaattatcataaatataatccaagttcaaactttgacctttttgctgagaaacatcatttgatttctcttttactctgctggcatcagtatccatcattctcttttcttctttgatggcattagtacccatcatgttcttttctatggtcgcagtagtcattgtttcgattctgacgaccacaatatttgcttctctaattttcatggccatagtagctttgttttcttttccgacggccacattagccgttttttcattttcgatgatggcagtagcaatgtattctttttcgacaaccatagtagttgtgttttctttttcgacgattgtagtatccatttttttcaatgaccacagtgtttgtttgctttttatttttggctatgtaagtcgataagcaagccatgaagctcgcatatgtttctgt

SEQ ID NO: 171924 - DNA, 491 bp, Glycine max
ctataaaactaagcttatgctgcaacatttacatagacctcctcaacctcagcagcaaaatcaaccacagcagaacaattatgacctctccagcaacagatacaaccctggatgaaggaatcaccctaacctcaaatggtccagccctcagcaacaacaacagcagcctgctccttccttccaaaatgctgctggcccaagcagaccatacattcctccaccaatccaacaacagcaacaacctcagaaacagccaacagttgaggcccctccacaaccttccctcgaagaacttgtgaggaaaatgactatgcagaacatgcagtttcagcaagagaccagagcttccattcagagcttgactaatcagatgggacaattagctacacaattgaatcaacaacagtcccagaattctgacaagctaccttctcaagctgtccaaaatcccaaaaatgtcagtgccatttcattgaggtcgggaaagcagt

SEQ ID NO: 171925 - DNA, 428 bp, Glycine max
  unsure (1)..(428): unsure at all n locations
agcttgtctaaggcgcagaagcatcagcaaaatgtttacataattntgcttgacagttccagcatcagcatattcctaacatgacatgacatcatgcacatgtcaatagtggacttcaaaaatagcttaccaagaaaatatacttacatgaagtcatgaacaatactattatcaaatgctcccacttgatttgagttggaaaaataggcgcaaccacattacaaataaaatattatagaagtcacatgagattcctttgtaaagacaaaccatacctgaaactgtgcacgtgaatcagcctctagtttggaatagaaatcacgttcctccatagaaaaatcaacttttttcagctctatatacttaggcggcaaggaaataataggttccccgtcaagaagtgtacctacagagaatgatcatcacat

SEQ ID NO: 171926 - DNA, 474 bp, Glycine max
tgaaggactgtaaatattgcctatgtttgcctccccttggacttttgccacgtctgaaggagctttcaattgaagggtttgatgggattgtgagtattaatgctgattttttcgggagtcgctcttcttcatttgcatccttggaaacactggagttctgccagatgaaggaatgggaagaatgggaatgtaaaggtgtgacaggtgcttttccacgtcttcaacgtctttttatagtgcgttgtcccaagctgaaagggttgcctgcccttggacttttgccatttctgaaggagctttcaattaaagggcttgatgggattgtgagtattaatgctgattttttcgggagtagctcttgttcatttacatccttggaatctttgaagttctccgatatgaaggaatgggaagaatgggaatgtaaaggtgtgacaagtgctttttcacgtcttcaacgtctttctatggagt

SEQ ID NO: 171927 - DNA, 374 bp, Glycine max
  unsure (1)..(374): unsure at all n locations
agctntagtgactgtgtgtaaccacagattttacattgagtgtcctcattgatatgttctacagttgattttgcatgaatttataattatcctaacatatgattcatggatatgatctaggcattctttctttcgttacattttaagccactggccaaaaagctatcccgatgtatactgttttatcatttgcaagccctttgaggaaaacacttcatattctgttgggaacactaaacatatataaaacatttctaccttaccttaggttaggagagcaaaagtgttctgttaaagatttttatcatttggtggctaatgtgatgtaaatactctgtttttgtgggtattgagggaaattaactatctaacat

SEQ ID NO: 171928 - DNA, 453 bp, Glycine max
  unsure (1)..(453): unsure at all n locations
tcttctgctggcaacaatggatttcaacttgcaagtagtgcagacaacagtacaccaaaatataaaagaccgcctgatgatacttcatccccctttggattatctgaaagtgaagaatctggagcgggggaaaacaaaataaaagaaaaagctgtgaatggaagtgactttgctatggccgcagataaggctggggcttctgtgtttcaaatgaggaagaataagatatcaactgatgaatctggagatagtgtgcatagacaaggaagaagtggaaggaatttatcattagtaaggccagacctcccttctgggagggagaagtcagagaatgtaccaacaatgaagccagtacaagacatgaagcctaatgataagagtaaaacgtaagctggatttattnttagatctagttcatcctttctacttctattttccaaaactgtcctcata

SEQ ID NO: 171929 - DNA, 439 bp, Glycine max
gagctttgactgacccctcacacttatactcctaacacgtcccgctaactaataaatcatcatttggcaagtacccatccttcttaatttttgaatgaagatcatgacgtatatgccccaggggctcatattgagagcgtgggttatcaccaactacgaatacttgcactgtatcgacaacttctatccaactacaacctgcctgcttttttaaccccatgtccttcattctcatcctaacgatcgctgcttctttccatttccctactgaagcatacatatttgaaagtaatgaataggtgcctgcattctgtggatcaattttcaaaattatctctgctacaagcttcccaatatcagcatttccatgcacattacatgcagcaaggagcgctcaccagacagtcaatggcacctcttccccaagcccctgaatgat

SEQ ID NO: 171930 - DNA, 422 bp, Glycine max
tctgaaatagtgaattttatcagtaacgatgaggacaaacaaattataaattatgtagtaatgatctataactcaaataaactaaaaagaattgtcttgaattgcttacatgccattcttcactgttttgacatctttatagaagcactgatagaattacacggcatttccccataaaacaaatacatggaaaatcattaaacaaacaaaaatagaaataacaactcatggatgcttttgttagcaaatagaacagagacaaacaacaaacagtggcaaatatttaaatttacaataaattactcattaccaagacactctcagcagtcaactgacaagagatataaggagttgagtcaatctgatggaacatttagacgtaaaaagcttcacggcccaatgatacaggcacccgaaaaaat

SEQ ID NO: 171931 - DNA, 437 bp, Glycine max
agcttgtttaccccatgttgaatttgcttacaatatagctgttcatagcaccactaattgttctccttttgaagttgtttatggttttaacccactaactcctcttgatcttttgcctatgcctaatgtttctgtttttaagcataaagaaggtcaagcaaaggcggactatgtgaagaagcttcatgagagagtcaaagatcaaattgagaggaaaaataaaagctatgctaaacaagccaacaaagggagaaagaaggttgtcttcgaacccagagattgggtttgggtgcacatgagaaaagaaaggtttccggaacaaaggaaatcaaagcttcaaccaaggggatatggaccatttcaagtgcttgaaagaatcaatgacaatgcttacaaagttgagctgcccggcgagtataatattagttccaccttca

SEQ ID NO: 171932 - DNA, 473 bp, Glycine max
ttgagaaaattcaacaacaataaatttttactcggatgtctgattgagtcatgtaatatttcaagacgctcgaaattgaataccgaagctctgagcaaattcaaaccacaattactttttactcggatgtctgaatgagtcccgtaatatatcgacacgctcgaaaatgaatgtttatgctctgagcaaattcaaacgacaataactttttactcggatgtctgattaagtctcgtaatatatcgagacgctcgaaattgaatactaaagctctgagcaaattcaaacgacaataactttttactcggttgtctgagtgagtcccgtaatatatcgagacgctcaaaattgaatgtttatgctctgagcaaattcaaacgacaataactctttactcggacgtgtgactgagtcccctaatatatcgccacgctcgaaatagagtcttgatgctctgagcaaaatcaaacgac

SEQ ID NO: 171933 - DNA, 413 bp, Glycine max
agctgtatgagataccatataaactaaggtcgttcctagaccttaatgctgagaagaagcttcggcgagtgtcctcattgaagaacctatattcataccttataaagttattgatttttgctgagcgaagaaccacggaacttacaaaaactaggtccttaattgaaggcgtacgagactgtcatacccaattactgctcatgattagtagatggcttaaggtcatttcgtatactccccaagcttccgaaaatacttccaaaatggtaacaataaggacctccacattgattaatgttattaatgaacatagtgaccgagacttatataacacaactgagatatgatcattgtccaaagaaacataagatcgttagactccaaacactggataagcccctccataatatatt

SEQ ID NO: 171934 - DNA, 549 bp, Glycine max
ttcattgttgcacttttctgttacaccaatccttctttgtatgatgcaatcaaattttataatctctacaggctgatattactaatcaaggaaaaatagacattccttggtttctaatttcattcatttgttagaagtttttcccaatatctatgggggtgtttgttccaaggtttctaattacattccttggattcttatttttggtggcattactatgagcaagaactccattctctggtattttaggaaaaaaaaaccatttgcttagtgtaccgtccagatatgtcttgactaaccatgatgtggccctttatgaagctccatctgtgttcagagcttcaaggactgtgtaccatggtactcggatataactcagtcaatcctgatgtgcccccctatcaggctccattgcctctgttgagtgaacagcttgggcctttgcatcatctggatatagaatccaacatgttgtactcaacctcaacccatcccgttgacattcactttatacccctcagcctgataaatgttctgccctataaaaaa

SEQ ID NO: 171935 - DNA, 323 bp, Glycine max
agcttgagatgaggaagtgtataaaggtgaaacttcctgcttttattcgttgaccacagagtggtacctggagatatgtcgcgggggtcaggagaccttggggacgtcaggtggggtgctattgcccaaaaccaagcttgaccaatcctgacccaacctgtgcatagtcggtcagtgagaacctgtgatgtacctaagcaggcgagctcctgtcagtcaacagataaaaggaacatagaccacaaagcaaggaggcttgtggtggctggccacctatgaacttgattgatgtgtgagatatggactctggtaatcgattacca

SEQ ID NO: 171936 - DNA, 590 bp, Glycine max
  unsure (1)..(590): unsure at all n locations
gacactataaaactcagcttctacaagtgttctcgagtcttcttccctcaaagctttggtaagaggctcttgatcttcattctcttgattcctcaccatttttgtgcaaaactctcattcttggttccaaatttctttcttcatcctttgaagcttgggagcatccagatctgagttcttggttcatccaagcattttcatgcaagcttcatcaaggtagaggggtctttccacttcttgaaccctaaccttgttgtctttggaagctagccttcattgcctgttgttttgatgttcaaatattcgtagctattgtcttggctggaactggaggatacattactttctattnttatttttttgaaattttaaggttaaaaatgatttctttgggcgtcaaaacttatggttagcctttaaattcacttaaatcggagtttaaggatattttgtacgatcgaatctgtcacgaaatttaaatggtgcgtatgactatatggaattttttccctaaagatttgacttaaaaatgagtttgctaggtgtgaaaatatagggtagcatgctaaaattatgaaaaatcgattttc

SEQ ID NO: 171937 - DNA, 415 bp, Glycine max
gcttgaagcttaaagaatatcttgaatacagttttgaagacagtttgatttttacatgcccaactcccttaagtggcatttgtattggtcgttatcttggttgttgcatcctactacatttgatatctgtattgcattatgcatcatcatggtttatgtgaagaaaagtttctaagttagaataatttcgattacactgttgtttgagacaatgactaatttattcgagagtctatgctctaatcgattaccaagtggattaatcgattacttctctcttgtttaagcgttcagaggttagcaagaacatttaatcgattacttatggcatctaattgattacattgttcttgagttatttctacatgttgtgatgaacactttaatcaattgcttagataatctaactgattac

SEQ ID NO: 171938 - DNA, 552 bp, Glycine max
  unsure (1)..(552): unsure at all n locations
tccatcaatatgtgtgcattttttgaactttgatcttttgaaaattaaacttcacatttcagagctcttttagagcacaaaatttcgngctcttctcttcctctcccttcattcatctgcttcttcctcccagctcttatacatgacctcttatggtggggagcttcttctagactcatcttctccttgaagtgcatctcctctctctctcttccttctccattccgctgccattcatcttccaagaagcaaaggaatccatagatgaagaagatcctaggcctacaagctccaatggagcttacatcatgtggtatcaagagcatcttcatctaggagatgctctttttcttcctctatctctttgctctatgaagtctctttaattccttggtcttcatcttattctccatgtatatcctacattgtcttgtgggttggcgctgcttagagaatatttcgaaaaaaataaaccaattaaatcttaaatctacacctggtttttgcatttctattggtcagaatttgtagatctactcttgaatcatgttt

SEQ ID NO: 171939 - DNA, 419 bp, Glycine max
  unsure (1)..(419): unsure at all n locations
agctagatacttctattgcttgctttaattgtcctttagtgtatcacggngtgacttctcttgttaatcttatatgcttgcctttgtctggtttggatgtcatacttggtatgaattggttgtcttcaaattgcgttgtcataaattgttcagataaaactatttccattgctaaacaaccaatatcaatttattcttctatctccaattccattgtttctattgttgcctgccttaagtctttagttgagggggctcaaggatacatccttttgttctctactaaagtagaggttgaaagaacgtgttagctatacctgtagtgtgtgaattctaagatttttttcttggggaagtctctattttgcctccacacacggaagttgagtttaacatagaccttgtacctgngagtggac

SEQ ID NO: 171940 - DNA, 562 bp, Glycine max
  unsure (1)..(562): unsure at all n locations
tctcaaagaagccacgaggaagcctcttaatgaagcttctcaaggaagctacatgaagctgtctcgataaaaacgcttcccagccttcgttaaccgctggatcttctcaaaatttggtctgcagcttcacaagacaatttttcatgatcttaccgttgggatctttgagaagatgtctggagtatgcgcgaagtttccattcccgagagcatttctcacttgtgtgttttgagccttgtagtccaagtagcttaggaaaaatgtcatttcttctccttctttcttccaaaaccatttccaacattctaagctctttctccatcacccacagccaccattatccaccacataccaccattgttctccgttaagaccccacacggagaggaacccttcaaccgaagtgaaatctttcaacttgcctcgcggtttcggtagaaaacaaaaacctaatctgacctttcattttctttgaggtaaccatgcttctatgcttggtccttgtttgattcagcttgtctttgcatcttttctgactntggaaccgtcattgcatgtttta

SEQ ID NO: 171941 - DNA, 452 bp, Glycine max
  unsure (1)..(452): unsure at all n locations
attgaaccctttganctcgngatctctgagtcacctgcggcatgcaagctggctcggtagtgaagaaggctttcttattatatggaggtaaatactatggtcatttggcccacattcttgtggggacggcgacaaaagataagactcctctcagccgaatgacatgaactcacaagatgaaggaaaagcgggatgaaaacaatgatgcatgtaagtttattctatgactttatcaatntcaattttatgatgcaataagtgaaagaatggtatttcttttttaaatattgcaagtaatatataatttggttggttctatttttgcgctcacacaattctttgcttgtagcaagaaagataaagatcccctactcaagctgaaatattcatttgaactcgacanagtgcanatggtaaaaacccaatggatgtagaaacaaatgatgcatttn

SEQ ID NO: 171942 - DNA, 284 bp, Glycine max
tcaggactaaaacagcattttaactaaaacaaaatatataaaaaaaaaaacggcgtaaataatcaaatttgcccctaaaagtgtcatgggatgacaaattatttccggaaagatggaaaatacaaatttagtcccaaaatgtggaaaaaaaaattgacaaattaatattcaagaaccaattccacaataagttatattcttcaaggatcaattcgaatttgtcattaaattctctagagaactaatcacatcttcaggacggagttagcatcaccccccccccc

SEQ ID NO: 171943 - DNA, 260 bp, Glycine max
taatgtaatcacttactaacattgcattttgaaaaccccccttcaagaggtaaggaatagtggagcaacatatgtcaggcagtaaatccagacacatcttgctaccgaagttcaaatagatcctcgccccccaaaaaactttaacattcaagatatcaagtacaaaattgcatgaaggcatgaatgaataacacaggttgcaagtgatcaaaaatatttttcaataccttcctcacaatcgttaattttggatttagaac

SEQ ID NO: 171944 - DNA, 397 bp, Glycine max
  unsure (1)..(397): unsure at all n locations
ntacaaccatgaacattgtctaattcgttctttattaaaggaatcattaaattatttatataatattttttaaacactgttttttttatttcttttattactatcattcattatacgttttcactttttaataaaaaaaaaacatatgtttataaaatattatgcaattaacatgtctttggttaagaagaagattgagtaggcacctattttagatatgtggtgacaaaaaatatgtctttgcttcttggtgattgagtaggcacctatttgtaatttactgtgtgtgaattgtgagttaatgattaatgcttgtggtgagtggagaaaaagcaataagaaaagggggggaacaaaaacagctgtccggcgtacgggtacgggcgtattagacagc

SEQ ID NO: 171945 - DNA, 461 bp, Glycine max
agcttcacgagctgcaatagaaaaggtttgatttctgagtcatgtgttctctgtaactctcttggttattaaaatgagttttaatttgatgtcttttgtagatgacaagaaccgttgatatagaacataatatggagattattaaagaacttgaaagtttgagtggatgcacgctatcttataaggccgttggcggtagaaatggctacaaagttgcattggagacattggataaacatcagtttgagaacccatgggagcggcttggtttatttatcaaggaagacttcaccacagatcttgatgaggaggttttgaacggaggctttgaagaaggggaaatttttaactgaatgcaccttcatgcagttctgccagctctaagtgtttatatcccttttagacatggaaacagacaattattgtaaatgcacatattgtttggaatcaagtctttcgac

SEQ ID NO: 171946 - DNA, 361 bp, Glycine max
taacaatattgcatagtaattttgtaaaaaaatacaatattgcataatagtttaaattttgctaagttttacaagtgaaaaaaataggttaaatttcacttttgattctttatttttttattttattcaatttgatctcttatatttttaaaaatttattttagtcatttatatttaaaagtagtttgaaatgttccttttgttagtctagagttaaccatggtagtaattcaaagatatttcactacaaacaatattgtttatgagtgtaatctatattttataatcattagtaaagataattatccattctgatatacacattacttattcttaaattatcccttaatatatataatta

SEQ ID NO: 171947 - DNA, 378 bp, Glycine max
  unsure (1)..(378): unsure at all n locations
tcgaatgtctgattgagccccgaacatatcgagacgctcngaaatgaatggtgaacctttgagctaattcaaacgacaataacatttttctcggatgtctggatgagtcccgtagcataatcagacgctcgaaattgaatggtgaacctcttagctaattcaaacgacaataacttttttcacggatgtctgatagagtcccgtaacatatcgagacgctcgaaattgaatggtgaagctctgagccaattcaaacgacaataactttnttctcggatgtctgatagagtcccgtaatatatcgagacgctcgaaattgaatgttgaaactcttagccaattcaaacaacaataactttttactcggatgtctgattg

SEQ ID NO: 171948 - DNA, 322 bp, Glycine max
tctacattcaatttcgagcgtctcgatatgttacgggactcaatgatacatcccagtaaaaagttgttgtcgcttgaattggctcacagcttcaacattcaatttcgagcgtctcgttctattacgaggctcaatcagacatccgagtaaaaagttattgtcgtttgaattggctgacagcttcaacattcaatgtcgagcgtctcgatatgttactggactcgatccgacatgcgagcaaaaagttattgtcgtttgaattgtctcaaagcttcgacattcaatgacgagcctctcgatatattacgggactcaatcagac

SEQ ID NO: 171949 - DNA, 467 bp, Glycine max
  unsure (1)..(467): unsure at all n locations
gcaagcttatgcgttagctgactcanatcttgattcagagtcttcaaagtatgtgatctgtctcttggaggaagctcttagatgccctttagatggtcttcggaaaggacaagtgagtgctaagttttggattaaacattttatgctgatatcagtgctgaagtaatgtatttatatttgttattcttttaaattgtaggcactgaataatctagggagtgtctatgtagactgtgataaactggaccttgctgctgactgctacatgaatgcactcaacatcaagcatacacgagcacatcaggggttggcacgtgtatatcatcttaaaaatctccggaaagcagcatatgatgagatgacaaagctaatagaaaaggctcggagtaatgcatcagcttatgagaaacgttcagaatattgcgaccgtgacatggcaaagagtgatcttagtatggcatcacaat

SEQ ID NO: 171950 - DNA, 366 bp, Glycine max
ggaatgaatttgttttctagcaaaacaaattattatacctatagttcatattgctaaatggaccaatctaagttttgtgcttttatttgttttttgcttagctagtctcttcttaagtaatctcccttgtttttcttgaacaataggtggcagaacgtaacaatgatcctcaattggcagacttcattgagagcgagttcttgtatgagcaggtaaaacttgcagttgaattcatagtatggttggatttcataagatataagactccttgaccattgtatgtaatacaatactctgaactctttacgttctaaaataattggtgtcttttacacggatcaagaaaataataataaataaatgaat

SEQ ID NO: 171951 - DNA, 407 bp, Glycine max
  unsure (1)..(407): unsure at all n locations
tactttctgacagacatgattacagaatttatattttcatattggtaaatttgatctgtaaacctttatactttataaaatatgcaaatatagtcttctttttctaagaattcatcatggtttattagagttaaaaaaaaaaagagtaaatgcatatatattctaaagcttgaaaatcacattattaataaaattacaagatttcaattacaattatgttcggtgagatatttcagtaagtttctagtattttttattagctgaaaaaattatttgactattcgataaataaaccatntttaatagttcttaacattttttgaaacattatttagaataatattttttaaaacgttaatgtttaactttttatatnnttttattnttatctttgatatatttattca

SEQ ID NO: 171952 - DNA, 378 bp, Glycine max
tcaaggaacattcaaaccaagtgtatttaccccaaggtctacactccaaagagtcctttagagcctctatctcctgattcaggttcaacccataaaacattttatcatgcagactctatctatgaaatatacaaaatacacgactcctcaattattctcaaaataattttaacttgtcgtgcctcaaagtaattaaactcgtcaggttcccacaatgggtcctatcacaatactcgttgtgtattaactcgtcgcccttaaaaagtcttacaattgtgtgattatacgattcatagctcacaactcaatgcacataacatctcaatacacatgtgtgatatcataatttaacacatactcaacttgtcacttgcacat

SEQ ID NO: 171953 - DNA, 395 bp, Glycine max
  unsure (1)..(395): unsure at all n locations
ctcatttagtggatttcagggttgagaaatgaaaatgagaatggggtaaatttggagcaaactctcacctcacacaagtctataaccctaatctaaactttctcaaactggttttacgcctaaaattccaccaaatcaaaatttgactcctcaacacccaatttaccctagaaatggctcttgccttcactttggtcattcattntcctcctttgtacagcccaagctttcccgcagtcctaaatgaaatttcaaactgggatttactcactctaacctcccattaccactaaatccagaattggcttttcaaatcctcanagcatcatacttttccactcatatcactacattctcactttttaaccctagggtaattctacccttcacctcta

SEQ ID NO: 171954 - DNA, 390 bp, Glycine max
  unsure (1)..(390): unsure at all n locations
ttcatctagttctaccaaatataatcaagtgtctagctctgatggttgaataaaatacgtaagttcttattaaccctctagcatatattttttattctcatccataaaaaaataagaatagcttgatgtatatatactattaattaagaatttttattatttatactaattatatgcaattacttacaaaagttactttttgacagaatatctcatatattgaatctagttggaacgattcaaaacacaacttaaatatgttttcaaattatattgagattgacttttaaaattaaaatcatcaaattaattttatgccaaaaaaattagtgagatggaacaagtcataattactctgaaaaagagtngaactttatagttttaactttt

SEQ ID NO: 171955 - DNA, 430 bp, Glycine max
  unsure (1)..(430): unsure at all n locations
agcttatgcacggaaaatggtattatgaaattgtatatgcccgaagaaaacaccatttctagtaaccatgcattangtaccatgttcaattatttttgtttggtggtgtatggtttttttttttttaaaaatgggtttatgatcccatcatggttggctcatggtgcctaacacatgcaactaagaatgtagtgtgaagtttcacgcttccccttttttgtttttgttttgtagaggaaaacgcaaggatgagcaaacatgaaaacaaatggtatgcaattttgcagatcaaaaagcttggtgaactcatatgcatgatgatgccatgactcanaaatgtgaggctggaatatgataacggacaaatgcaggaacgatatgttcattatgatgttatgaagagatgcttatgcgatgcatgatatgaatg

SEQ ID NO: 171956 - DNA, 355 bp, Glycine max
tgccacccagctcgcccaggcgagttatgttgcttcctccagaaggcaccgccttctggagaacttcctggaaggtccaagtgggcctgattggtatttgcacccccctttttactaaacacacccccttgcctttttttgctgattccttttccgtaacgttacgaaaacttacgaattacgtaatgatacttgtttcctttccgtaatgttatggaaccttacggaatgcataatcatccctttttttgccttccggaatgttacggaactttacggattgcgcactaaaacttccttttaacttccggcatgtcacagaacttcacgaattgtgctacaatgctttcttttg

SEQ ID NO: 171957 - DNA, 448 bp, Glycine max
ggctgcagctttaattcaatctttgaagcatgacttacgcctaggatatctaagtttggttttgaatgtaaaaaggcatgaatattacgacatgttcgagaggctgttgttagaatttaaatttggctgccccatgaggaatactttgcatctaggtagcatggaaaatacctttcaacggtatgtatatatgtgaatatatatagcatgaaaatgccttgcataatatagcatgaagtgccttacaaagtgttggatgggtagcgtaaaagtgtttttttaaaaaatatgtgtatttgtgagtaggtaacaaaagaagccttccaaaaaaatgtgtgtatatatataggatgtagcatgaacaggttcgtcaaaaaatatgtacatggataggtgtctaaaatgctcacacaaaattttatgtggcaatacgtatgtgtataaaata

SEQ ID NO: 171958 - DNA, 357 bp, Glycine max
  unsure (1)..(357): unsure at all n locations
ttgcggatttggtctttgccagtgaaaggatcgatgtttttctgaaaaaaggcaaatttagtcatccagcttggacgaatgagaaaactggggcaaatgaagagggtgaggatgaaggagaagcccgtgctgtgactgccattccaatacagccaagtttcccaccaacccaacaatgtcattactcagccaataacaaaccttctccttacccatcgtccagttatccacaaaagccatccctaaaatcaaccacaaagcctacctaccgcacttccaatgacaaacaccacctttagcataaaccaaaacaccaaccaagaaatgaattntgcagtgaaaaagcctgtagaattc

SEQ ID NO: 171959 - DNA, 423 bp, Glycine max
  unsure (1)..(423): unsure at all n locations
agctggtgcttaatcattgtaatttcaaaattcatgttaaagatgaactgcccttctgttctgcttgttgtatgggcaagattcatagatttccttctaagctttctcaaactgtatacaattctcctttggaattaatatgcagtgatctgcagggtccttaaatagagtaaatctacaaaagctttctcaaacagagctttatttaaaatacgacaaatgattatatatcaggacttgaatagagtaaatcaacaaaagcactcataataactcaaggtgattgaaggattaagagtagaaagtaactagccttaccttgagagctgaaaagggtgcgccgacaaccaactttcttaaaatcttatgcggntagatgaaggttcgagactagttatatatctctaaccccctcacatcaat

SEQ ID NO: 171960 - DNA, 355 bp, Glycine max
tttaggggtatttgactaatgagggtttatgggtagtttattaattagggtttagtgttacttaaccaattagggtttatgggtatttgaaaaattaagctttagtgttacttcaccagttagggtttaggattatgagacaatttataattacttgattgatcactatttaggggtatttgaaatttgggattcataggttacttgataaattggagtttatgtgcgtttatctaactagggttatgaatacttgactaattagggtttagttttacttgatcgataattaagggttatcgtacttgagtaattaacgtctttgggtacttgacaaattatgatttatgattac

SEQ ID NO: 171961 - DNA, 436 bp, Glycine max
  unsure (1)..(436): unsure at all n locations
agcttcttatacctatgtaactttaacctacttctgttcctaggcatttcagntgtgtcaagaaatcttatataattaaaaatttctgtattggaagctgggtgcaaaaacttcattcccatcccagatatgacttagtctgtgacgtccaccaggacatattttatgttatagtaatcatactttacttttttttaccatagaagtacctaaatgttaccataaggattctttgntagccagatataataatacaatcatagtcagtagtgcctctcagcctctgttaatcaattatcagaatgttagtctaagtagcctcgatggaggttaataaaaaaatttataactatcaacagggcttggtgcatctagttttcttcactactgccaataacagaatcttgacatangcatgctgagaaactgtgacatg

SEQ ID NO: 171962 - DNA, 328 bp, Glycine max
tcacgcatttggggaacctcctttctccactcgctcatgctcctcgcgtgactcgtcaacgacgataccccttttctttctttcactctcgaactcatcatcatcgatcatcgatcatcgatcatcgtcaccaccatcttcaatctcttctttcaggtaccctctctcaacaccacacaacctaaccctcttccttgatttcttctcttggcgtttcaccatcattaatcaaatttatgctcatgtgtgtgtataactgtgtgagagagggacatgatgtgcgcaatgaagtagaaattggatcggaattggaaagagagtttgtatt

SEQ ID NO: 171963 - DNA, 437 bp, Glycine max
  unsure (1)..(437): unsure at all n locations
agcttgccacccagctcgcccaggcgagcaggtgtgcttcctccaaaagcaacagccttctggaggaatctttnggagggcccaagtgggcctggttgctatttgcacctctatttttactaaatacaccccctttgccctttntttggagattcttttttcgtanagttacgaaaacttacggatttcgcaacaatacttgttttctttccgtaatgttacggaaccttgtggattacataatcatccncttttttgacttacgaaatgttacggaaccttactaattgtgcaacgatgcttccttttgatttccggtgtgtcacggaaccttacggattgtgcatcaataccttcttttgatttctggcatgtcccggaacttcacaaatttcccaatgatgggtgccaagcacctcacaaggaccaaacaaaag

SEQ ID NO: 171964 - DNA, 351 bp, Glycine max
tagcccaattcaattcaatctgaattgggttaagcaatagtacattcgcttagcgcatcatgtttagtggctaagcatggtgcacttatgctaagccctattctttgcagccaaatcaatggtttaattgagctaagcgcaacgcatacgcactaagtgaacttccttgcggcctggatagcgctaagctagcaaccactcgctaagttcatgcccccttgtacacagggtgcagtatattcgctaagtcgactaagagtgcagcttaatgagagttgcaggttttcttatctgcacacgtcgcttagcgtgctgcttttcgctaagcgcagttttatgtgtaaaaaaaaa

SEQ ID NO: 171965 - DNA, 234 bp, Glycine max
  unsure (1)..(234): unsure at all n locations
gcttgactgagtcatcagagatatanattgtgaccatgggcatgagttcaatgaatgatctctcatctatcatctatctttcaatctatctttcaatatcttctttcatctctttcaacagatctttctaaantatttctcttcatttttctaaaaggttttttcaacactttctcttcccagaaaagttntttggtcaaaaacttgtgctattcatctttttcattcacttat

SEQ ID NO: 171966 - DNA, 255 bp, Glycine max
tgcccttggtttagacatgattggtacatgatttggtacttgtaggattcaatttgggcaaaattggatgagggaaagagtggttttcgaaatctgcactttatgcagaattttgctgttgaaatgtgcagcagaattttgtataagtgcagaaaaatacttgtgcatggctggttgtgaaaagggtagtacatatggggttgtggacattttctatcatagcccatcggtacaaatgtttacttttgtactata

SEQ ID NO: 171967 - DNA, 310 bp, Glycine max
  unsure (1)..(310): unsure at all n locations
aacacacttcaatcaaaatgggtttggccctaggtgcacaagatatggaatggaacaacttgatgtgaggatactttcttacatggtaagctngaaaaaaaatccatatgactcatgcagaaagttntctcccaaaaggtgaagaaaggcaggtatgcttgctaaaaatgtcactttatggccttaagcaatcacctcgctagtggtacaaaagggttgatactttcatttttaataatggctttaaaaggtgcgagtatgatggttatgtttacttganngacaatgagcatgatgctattgtctactt

SEQ ID NO: 171968 - DNA, 396 bp, Glycine max
  unsure (1)..(396): unsure at all n locations
tgttgattntaacgttaaggatgaaatgggaattgaatggaagacgcatagcaaacaaacaaacagatctttaattatataagagtaaaaaatcaagaatatttttgagttgcttcggttccacattgagcagtctttgcataagagggacaaatacagcaaactagaagcaacaaataacgcatcacgtacctttttctgacttgatcccggaggagtgcaaagcaacgtcggtggtgccggtgccggaagagtggaggtggcgtccatagttgatggttggagttagaatgttgcaattacaactggaaagaacccatgtgcaagtagaagaagagtctcataaggtaaagctcattaataaataaagcatctatcttttgtgatcattgcatt

SEQ ID NO: 171969 - DNA, 446 bp, Glycine max
  unsure (1)..(446): unsure at all n locations
agatggaccatttcatgtgcttgaaagaatctttgaaaatgcttacaaagttgagctgcccggtgagtataatgttagttccaccttcaatgtctctgatttatctctttttgatgcagaaggagaatccgattngaggacaaatccttctcaagagggagagaatgatgaggacatgaccaagagcaagggcaaggatccacttgaaggacttggaggacctatgacaagggctagagcaaggaaagccaaggaagctcttcaacaagtgttgtccatactgtttgattacaagcccaagtttcaaggagaaaagtccaaggttgtgagttgtatcatggcccanatggaggaggactaaatgacaccactttgtttcaattttagagtgtttagtttggctaaataatggcccaatccttgtaaagttggctaaccaaaaatat

SEQ ID NO: 171970 - DNA, 359 bp, Glycine max
  unsure (1)..(359): unsure at all n locations
tgacacagcttttaaactttcaactttgcttttagctattatgctttgtcaaccagctcgggcatatgttcagttagataaaattcaatttaaccttgtgtttggattatgaatttcaaaatttcaaggaatttgaattgctttgattttaattttcttcatttttcaaatgctttgtttggataaatcaattcaaatttaatttcttccattttaaattctttgtttggatagggtaatttaattttctccatatgcaaaattttaattttatattttaaatagatgaaattttaatattaaactttatagaaaataaacacaatctaattntgaaatattaattaaaaaatattttc

SEQ ID NO: 171971 - DNA, 418 bp, Glycine max
  unsure (1)..(418): unsure at all n locations
atggacataacanacacatccttattatgtagatcatgacagttgtgatgagntttaaggagatgaaaggaaagggaatcaatatctagaacttacaatggaaggcagttaatcaagaaaaaaactatagacaaagcttcaaaacaaaaataaaaggggaaaatgcttgaagaatgaatgtcctggtcacatcaagcagatcttgattcttttgctcatcaatgccattnttgttgtggcatataaggacaagagtattgagatataatacctttttgttgcaggtatntttgaaaatcatgagaaagatactcatttctagagtcagtgcacaagatcctagtgcttgtgagaaattaattctcaacatatgccatcaaattccgaaacattgtgaaaaccctaactatagagcaaa

SEQ ID NO: 171972 - DNA, 289 bp, Glycine max
  unsure (1)..(289): unsure at all n locations
tgngaggattgatggggacccggtgttgagagaaacgatgatatgggctacgtgggagtacgtgagctcagttggaggtgggcaacaggggatggtgggtttatgcgcgcattgtggatgtggaaaacttgttgtgcaccatcgcccgaccgccacctagtaccacatgtgatgggtaccccataatcctacaagcttgagatgaggaagtgttgaagggtgaaacttcctgcttttattgttgaccacagagtggtacttggagatatgtcgtgggggtcaggagacc

SEQ ID NO: 171973 - DNA, 458 bp, Glycine max
  unsure (1)..(458): unsure at all n locations
agctntctttggctatctctaagactcanagcatgatagcacgcagatactaatgttgtcttctacaccctttgtcaatcgcggccaacaaacccgttgacacatggagatttacgtcatcttccgcgcagacaaattttgtcaaactgatactggagtcacgtgacatgcggagatacccgagtggttatccgtaacaacttttgctatctctaagactcgaagcatgatagcaagctgagtgggtaaacgcgcagatacaaattttgcgccctttataattcatgaatgacaagctgagtgggtaaacgcatagatacagattctacgccctttatcattcaggaacgacaagctgagtgggtaaacatgcagatacagattctacgccttttatcatttaggaacgacaagctgagtgggtaaacgcatagatacagactttgcgccctttatca

SEQ ID NO: 171974 - DNA, 382 bp, Glycine max
tctttgtttcagatgaggcagatgagtttgtagctacctcatgctgtgagttttaagccatcttctcaatcaagtttctggcttcagtaggagtcatgtctccaagggctccaccaccggcagcatctatcatacttctctccatattactgagtccttcataaaaatattggagaagaagctgctccgaaatctgatggtgagggcaactggcacatagttttttaaatctctcccagtattcatatatgctctctccactgagttgtctaatacctgagatatccttcctgatggccgaggtcctggaagcatggaaattttttttctaaaaatactctcttaaggttatcccagctcgtgatgaaccttggagcaaggt

SEQ ID NO: 171975 - DNA, 393 bp, Glycine max
  unsure (1)..(393): unsure at all n locations
tgatctcttttaaaatgtagatctaccaaaatcctgagactaatttacatggcaccaaaacactgtcacaaacaggctttaatgacagaaatggattgcctaaccccctgcctgagaaaacaactgccacatatagaatataactgtctcgtacatgcctataaaaaaaaactgtcgtacacaaattatgactgctttttatttttactttttgacatgaaccttcaattagaaatatttgcttaccaaaaaaaaactctactttagaaatatcttacactttngcaattaatgatttagctatccctaagattaacttcaacatgcctttggactaacaaaaatgaagntactcattatctatatccatttctgactagaccaagttctaat

SEQ ID NO: 171976 - DNA, 413 bp, Glycine max
  unsure (1)..(413): unsure at all n locations
gacactatgaaactatgcatctcagctttnagagcagctccacacctacatttctccatgatagaagaaaaataaaatgtcttgatgaggaatgtcctcttaactggtagctagttcttgtttgaacctgagtctactgttctcttaactgatatggtatatttaaaattatgcttttgtgattataacattatttttttgggcatgctggctttttttttttttatctaattatgtgatatgagaaaaacattctactgaaaaagaaatttgttcttaaggtgattataatttctgtagatttttcttacaatcacattttgtttactatactaactttaaaatttttgttttatagattttattgtagtggtttacattatagattctttacaggcttgggacatctcatg

SEQ ID NO: 171977 - DNA, 209 bp, Glycine max
  unsure (1)..(209): unsure at all n locations
agaagatggtgagaggactaccctctattaaccaccttgatcaactctgtgaaggatgtttattggcaagcaatttagaatgagttttccagaggagtcaaacgcaagagctaagaagccacttgagctaatacatgctgacgttngtgggccaatcaagccaagctcactaagtaaaaataactatttcgggcttttcattaatgatt

SEQ ID NO: 171978 - DNA, 364 bp, Glycine max
tgcacaataagtaattaattctatttttttaaaaggaagtaactaactaactaacttccactaatatatagagtgactactcataagaaagggatgagaattgattaggcccatctaatctacctaataaaactaacaaagctcaaacttgcagcccaattattcaagtgtagaggttacaacttccaagctcaatttgaccctcgaaatgacagaattggccgaaacttatttgtgacttaattgaatctctttttcttaaatttccatagactactcacatgctccatttgtagttttgtagtgtcctataggccctacataaagcagataggtcaagtaagcacaaaatctaaaaaatagc

SEQ ID NO: 171979 - DNA, 457 bp, Glycine max
  unsure (1)..(457): unsure at all n locations
agtcatttatgatcaggcttggaaagggattgatganaataagtggtccaagatattttgagaatggccaaaccaaaggtccttgcgttttaataagaacctcttcatggtctaaatccaggaaggaccactttcagaaagaaaattattaactnntttaagaaaaacttataaacccctatttgaaaaaaggtaaaaacctttntaaaagagttacatcttttgatattttnttttcagaaacagtcactggtaatcgattaccaaattagtgtaatcaattacacaaagcttttgagtgaaagaatgtgactcttcacattntaaattgaattccaacgttcaaggacactgggtaatcgataccaaaacattgtanntcgatacaaccttttgaaaataattggaacattgtaaattcagtttgaaaactttntcaaactcattttgctactgg

SEQ ID NO: 171980 - DNA, 199 bp, Glycine max
tagggatggaatacttacttgttggtgattatacaaaatctcaaaacggaatcaaaaaatgcgaaaaaggatgaccctaaggctgcaaattcgtcaatcccgcgggtatggcttttgaaaggggggaaaagaggtttttgaatgtaaaaacgccccccctttcgtcatttttataatttggtgcacgggtggctcaata

SEQ ID NO: 171981 - DNA, 332 bp, Glycine max
  unsure (1)..(332): unsure at all n locations
agcttcgtcattcacctatatgntgtagcaagtttgataatgatgtcggttnttccctttttatacattacgttttaaatttaaagatattctatatacttctcaatacgaacataattcttattactnttttacttctacttttggttaaactaaatcactttttatatattttattacttacgttgggggggcggngtgttataaaggatgaaacttgatcataagttntgatttattgctagactcggtcgcagatggccagatggtagtattggagtacctccacacactgataatatattatgatcataggatctaaactcttcatt

SEQ ID NO: 171982 - DNA, 350 bp, Glycine max
tttattagccagtattatttataaaattattacaaaatttaaacatatttattataggaaaacgtataaaatatgataaataacataattagctgtctcttgataaataacaatattctcaagagtatttaatttttaattaaagaaaaagttagttgcggagaggcccaagcctcttggtcattggtcctccctcccctatctatctctattcttacacgcttatttcttattttattttaagaaaagttaaaaaaggatccacggtgggacctgaatgaaaagaaggaccgaatcttcgttaaagcgtagatacagataagccttgtggggttgacgcgttcatcacg

SEQ ID NO: 171983 - DNA, 386 bp, Glycine max
  unsure (1)..(386): unsure at all n locations
agcttttaccagtgcattaaaaaatctccactctatctcanaaagatctcacctctattggcaacctccatgcataaatgtatgtgaaagatcaagtcactgcctacccacctggattgcacatctcaagggccactaatgttaagattgttgctgacaaggggtgtccatgactacctatatgggatgctttaagttgtactacaatgaagagatgccttcttcaaggcagatgaagatggaattggtcaactaccctagaaattggagttcattgttcaataggaagaagctggttcgtgatcttgatgcttacaatgtatgactttctggaatcaaatcttatggacgaacactcagnaagcctacacctctagttatgatgg

SEQ ID NO: 171984 - DNA, 384 bp, Glycine max
tgccagtgttgatgccaggggatgatgtgccaaagtttatagccatgccgtgtccgtgccagccttcaagaccagacagcatcgttgtcaccgtcgaaatggagaagccaccgcccaaaccgccgcaactaccagtccctttctatttgtaattagctgcttccaaggtttcaaaatgggccaagattcttctccacaaccacaattttcaaaatatcaattatcaaagatcacagcgaatcttctggaaccacagtatcatagatcacgacaaaacttctgaaacctaaatttaaaaatcttggctagttgtgctactgcttctcatcacatgtttctatttcccaccatttgttgtactaatgtatattcattttgttcacc

SEQ ID NO: 171985 - DNA, 420 bp, Glycine max
  unsure (1)..(420): unsure at all n locations
agcttgtcacccagctcgcccatgcgagcatttatgctttctacancagcaacagccttctggaggaatcttttggagggcccaagagggcctggatgctatttgcacctctattgttactacatacaccccctttgccctttatttggagattcttttttcgtaaagctaccaaaacttacggatattcgaacaatacttgttttctttccgtaatcgtacggaaccttgtggattacataatcatcccctttattgacttacgacatgatacggaaccttaactaatgtgcaacgatgcttgcttgtgatttccggtgtgtcactgaaccttacggattgtgcatcaatacctttcttagatttctggcatgtcccggaacttcacacatcttccaatgatgggtgccaagcacctca

SEQ ID NO: 171986 - DNA, 355 bp, Glycine max
tagcccaattcaactcaatctgtattgggttaagcatgagtacattcgcttagcgcatcatgtttagtggctaagcatggtgcacttatgctaaaccctattctttgcacccaaatcaatgggttaattgagctaagctcaacgcatacgcgctaagtgaacttccttgcggactggatagcgctaagctatcaaccactcgctaagatcatgcccccttgaacacagggtgcagaatattcgctgagtcgactaagagtgcagattaatgagagatgcaggttatcttatctgcacacgtcgcttagcgtgctgctattcgctgagcgcagttttatgtgcaaaaaaaaaattg

SEQ ID NO: 171987 - DNA, 400 bp, Glycine max
  unsure (1)..(400): unsure at all n locations
agcttttatcaagagncttctttataaccattatgaagcagaaaactaactaaactacccatcatatctnccaaaaccccatacccacgaaaatcaaaggagaaagaagtccacccaaacctgaaatttcgaagtccctctcgtagacacgcacttcacgaccccgaaaatgctctcctttcacgatttggggcagaaatgatggccaaaggttgaagctttgcttggagcttcaatggagaatgaagaagaagaaaatggaaacgtgagggagagagagagctgtctgaaaaatgtggggctgagtgaagagagagagagctgctttttggctttaaataaaaagggggttctctttttctattattttatttaagcaatgccacatgtctccatttga

SEQ ID NO: 171988 - DNA, 330 bp, Glycine max
ttcattggtgaaatcaggagcagtcatttcccttatatttctctcatggggtggaggttgtgccatgttctcataatgttcaaaatcagaatgttcaaaattagaatgttcaaaactataatactaaaaatcaagatgttcaaaattaccaaccatagaatgcttatactcaccaataacagaatgctcacgatgctcataaggtacaaaatgatgcctaactaatctatgaaatgtcctatctatctcaggatcaaagggttgtaagtcagatgcatagcctctagtcatacactacattcagcatgcacaactagtttccttcttatg

SEQ ID NO: 171989 - DNA, 418 bp, Glycine max
  unsure (1)..(418): unsure at all n locations
atcttagagataaaatcctatatactggttactaaaaagataagaggtttcctagaaataagctattaaagatataaatcatatcccttaaatctccacactatcataacaaattcatatcatatgtcaacaacatgaaaggaatgttagtttttaattttaagttgtattgaaatattttttactccactnttttctaatttgggttactctntctgataacattatctttctttcacctttcttactacttgatcctttctttgtgcttgtctaattaaattagtaaatattactggttgatgcatatctttgttgtactttgccattgacattgatacatctttagggcatacccatgtggcagaggcacttataaatccaattcatattntnttcacaatgccatggacgtaag

SEQ ID NO: 171990 - DNA, 397 bp, Glycine max
tcatgcaactggaacatggaaagaagacagtatatactatgcattgaagatttctcaaaccttatcacccatatcggcaattaaagaaagcttttaatggaagccaagagaatgaaagtacaccaaaaagccttaggctgaaataaagtttatgattgggtaaaggacatcgtaagtatctttgggaagaacccaaagaaggaatcatttgagaagaacatatggaagaaaaggtcaatattctttgatctttcatactggtctgatctagatgtacgacaatgtatagacataatgcatgtcatgaaaaatgtttgtgatagtttaattggcaccattaacattaaagacaagacaaaggatggtttgaaatgtcatcaatatttgattgacatgg

SEQ ID NO: 171991 - DNA, 467 bp, Glycine max
  unsure (1)..(467): unsure at all n locations
ttaagtcacctgcggctgcagcttaagaaaagatggctaganattcttattttccgaagggaattctatcaatagacctccaatctttaatggagagggtaccactactggaaaacccgaatgcaaatttttatcgaggcaatagatctaaatatctgggaagccatagaaatagggccttatatacccaccatagtagaaagagtttcaatagatggtagttcatcaagtgaaagcataaccatagaaaaacctatagatagatggtccgaagaggatagaaaacgagtacaatacaacttataagccaaaaacataataacatctgccctaggaatggatgaatatttcaaggtttcaaattgtaagagtgctaaggaaatgtgggacactcttcgataacacatgaaggaactacagatgttaaaagatctaggataaatgcactaactcatgagtatgaatta

SEQ ID NO: 171992 - DNA, 393 bp, Glycine max
taaagggtgtgcagtgttgtaacaatgatttacatttatagaaacatattcatccaaaagcagtaagaaaccacagatttgcaaaaagcatgttattgcttctttttcttttatgctttttgattaactagaaacaacattaattgaatccttactgccaggttgcttttcaggttcagttgtattgcttatttccctttaggaaaacttataaccaaaatgcttcaggaaggtctttgggccgagatgtctatttttttttttaagtgatgtgctctagttatacatgtatgcattcattagtaatattgattatttaccaccttccaaaaaataaattgattatttaccatcagcatactaatagctacatacaaaaaagtgtttgatgca

SEQ ID NO: 171993 - DNA, 459 bp, Glycine max
  unsure (1)..(459): unsure at all n locations
gctttattgtcggtcgaaaacagaatatnattattgagaanaactgtagcttgcatttgagaataaaattatcactaccatacatatttaaaatggacctcaaaggccaacttgcatggatatctactataaactanagctaaagaaccaccccataataccctctacaacaacatgtcagggacagtacctaataacttctagggtatctattacactggttagtttatacaattaaaaaaaaatatacactatgaagaataatgttacatagatgaaaaggacccaatattttccttcccatgcaaaccagaaatctctattggatgtgttgtttaaatgctagagccagtcatgacatgatgatttgcagcatgaaagaatacaagcatatatacatatgtcatatgtataccactactgtatgtacatatacatatgcatatgggctttcatatg

SEQ ID NO: 171994 - DNA, 369 bp, Glycine max
actcaagctttagtcggatcgtaggagtatttagtgttgtaatggtttttgctttatttatcaagtttggtcggctgttcacaggcattatttttttaatttacataagcagaatttccaacccaaaaaaattgaagcttgtgaagatatgtcaatatctggttacacagtctaaatcttaattatgatgattaaaaaaacatttatttaccatttagattaagaaaaaagtgggtatatttactcttacataggaggcattatttatattctcttttttaatatatgcatttcacatataagtaaaaaaaaaatctctttcaatgatctccaactatcctcctttatcaagggatttaactcatatga

SEQ ID NO: 171995 - DNA, 446 bp, Glycine max
taagtcacctgcggcatgcaagcttgtttcttgatttgacatataaggatctatgtgctctttttatcttcctcagatggaacaataactgctttatagccatcaagtatctctgcccacaagattgcagaaaaccatacaatcagctattcttggtagataactattcttttgtcatacataacgaatttcatataagtgacagttatgtataaaccatggcctaggatttgaaaaggctatagatgatatgcctgccatttccacagtatcaactagactaaggtaaatagctcatgttaaaaggaaatcttatttaccctgttcatttgccatatcaagaaaagcctgaagcttaatagcccgccggtagtacatcattccccttactgcattaatgtataagtacaataggaacaatattaatccaccaaaccctgtctgtg

SEQ ID NO: 171996 - DNA, 360 bp, Glycine max
tgggaaagtccttctgattctgtttatacatttttgactttatggctttatatgaagtacaaagattagagcttttgctagttgttattaatgaatagcttaaacacttgtgcgtgagtgaaacaatggccgtgagactgtggttttagctactttccttgatatttgtcttatgcctaacttcatctaattggtcaggttacattttattcttctctttggataactgcatgtcttgtaaaagacaagtgatgagggcattttgcttcattctcttatcatgcaatcaataacttttgttgcatacacctttgtacatagtaactgcatgttattgtcacttggggaccaatgaactgt

SEQ ID NO: 171997 - DNA, 434 bp, Glycine max
  unsure (1)..(434): unsure at all n locations
agcttgcctaattaacctaaanatgagaganatatattattgaacacacaaattgaaaggaggtcctactgagcgacttccgtttcttcttggtgcggcttcatctctcggtcctactgagcgaccatcctttctagcttagggggaaattccataccttcgtcttcttcaacctcaggccgattcacatctcattcaaaatcgatggtagggtcctcagtattagtaccttcacaggactcgtgatctgatctgtatcgtttaaacgcaacagaaaataaacatgcaaatgaatgagaatgggtgaaggccaagaatagatgaaggaaagatctttatattatattttttaatagcgaaagacataacaccttaacaaggagagaaaccctaaagcctatgcccagctgtagggttaaagctaaagcattaca

SEQ ID NO: 171998 - DNA, 385 bp, Glycine max
  unsure (1)..(385): unsure at all n locations
ntaacctcatcgtctctcacagtctttagatttgggagccaatccagtccttgtgttcggactcttagccacttatgatagccgccgatgatctcattactgcttcccctaagctctctgtcctttcttcacgccgcatcccatgccttgcgaactccttggagtaccctcgcgttgtggtcactgaaacctcgtgcgatgaaaggcgtgatgctttcgtctgatggcactcctctcatgggacatccttcgccgctcttttcacatccccggtcgaacgtgtcatacatggccaaaatggcgacgaccgggcttttcttgccatgatgaaaggcgaggaaagcgtctatcgctgctatgtacactaaccccttccatattcgga

SEQ ID NO: 171999 - DNA, 87 bp, Glycine max
tgtacttgcagttgctcagcttaagcatgttcctgatctctgccgctctattggggtaaatcacaaaatgccacggtggtggtcttt

SEQ ID NO: 172000 - DNA, 410 bp, Glycine max
  unsure (1)..(410): unsure at all n locations
agcttgcttggggngcttctatggagactagatctttgagcttaaatgagggccttcaatggtgattttccaccatggagatgcagcggaagacaaaagagaagaggtgagaggaggcgtcatccactacggaataagccatggaagaaggagcttcaccaccaagatgagccttggataagaagcttggagaggatgctttaatggaggaaaagaaagaggggggagcatgatattgaaggaagaaaaaaaagggagagaagttgaactttgagttgtgtctcacaagactctcattcatcagagttataacaagtgttacacatgcttctatctatagactaggtagcttccttgagaagctttcttaagaaaacttccttgagaagcctctttgagaaaacttcctt

SEQ ID NO: 172001 - DNA, 385 bp, Glycine max
  unsure (1)..(385): unsure at all n locations
tcagactaaagcaacacaaaatctatgtatccaaaacccctcaatttaatggattttcaaggtttgagaagtgaaattgagaatggggtaaatttggagcaaactctcacctcacacaagtctataacatcaatttaacttgttcaaactggatttacacctaaaatttcaccgaaccaaaatttgactcctcaacacccaattttaccctagaaatggctctttgttcactttggtcatttgtttttctctctagcacagcccaagctttctcataagtcctaaatgacatttcaaactaggattaactcactntaacctccaaataccactaaatccagaattgggctttcaactctcaaagactcactctttttccactcat

SEQ ID NO: 172002 - DNA, 402 bp, Glycine max
  unsure (1)..(402): unsure at all n locations
catgggtggaatatagattangagtttcaaactaatgaattggataaattttttgaattgaaatggataatcattaatccatttatgatccattaaaaatgtactacaaaaatctaatccatccataacttatttcataaaaaaaaagggtccaatccatccattatattttatttttctaaaacaaagtttaatatttatacacattcttacacccaaataccatagaatccaatatttgtctcataaagacaaacggttcattgtctatccaatagcaaatggtgatccaattcaactaatctattaaggtttatttttataattgaatagattgattggttgatttatacgtgatggatcggacggttagtggataaacagatngaatntccacatatg

SEQ ID NO: 172003 - DNA, 355 bp, Glycine max
ttacatgtcaaattcttgttcccaccacattatgagtttttaagtttaatgggcagcatgttgatatactgaaagattcaatgttccaaatgaataataatcaagtggcctagtgcatctgaatttttgataatcaaatcaatgcataagccctttaagcatgttttgatgtcctagaaatagtagatttttaacatttgagcaagaaaatcaaaacatacagtcatcactcctgttgctgcactgacaccagcttcaccaaacatagcagttgctgcttcagtgacaagagcagttgccccaatattgaccaccctgcatacaacaaaatactagcatgagaaacattctatac

SEQ ID NO: 172004 - DNA, 430 bp, Glycine max
  unsure (1)..(430): unsure at all n locations
agcttatgaacccatactagtcgcttcaatgctttgaaacangttcttttttggctctagagctagaaaaacatgacaactacgactttcttgtgagagatcttgctccaatttgggtagccccatgtatgatactttacatagaggtagcatggaaaacaccttgcaatagtgtgtatacataggtgaatattagaagtatgaaatccctagcaaagtgtgaatgattgtcttcctatatgaatgtctgatagtgtggaatgccttttttgaatgcaaatatgtgcaggatgtaattattttctcattatgcatataaataaataggagtgaaacactaaagacttgtatggtgtacttcacctgtatgtaatgtagttgttgatacagatgtctatgatataaattaggtgtgaagtttgacgcaaca

SEQ ID NO: 172005 - DNA, 354 bp, Glycine max
tctgttgttcaatttcgaacgtgtcgatatattatgcgtcttgaatcgtacctccgagttaaaagttatgaccatttgaatttctcgagagcttccgttgttcaattacgaccgtctctatatattatgcgccttaatcggacctccgagtgaaaagttatgaccatttgaattggtcaagagcttccattgttcaatttcgagcgtctcgatatattatgcgcccgaatcggacatccgagtgaaaagttatgaccatttcaatttcttgagagcttccgttgttaaatttcgagcgtctcgatatattatgtgcctgaatcggaccttcgagttaaaagttatgaccatttg

SEQ ID NO: 172006 - DNA, 168 bp, Glycine max
  unsure (1)..(168): unsure at all n locations
agctntgagttggtatctggtcttagaattaattttgctaagagccaattcggtgtggtaggcaaatctcaagattggtgtagtcgtgctgctgattacttgcactggagccctctgcagtttcctttcttgtacctagggatgcctataggtgttaatcctaggagg

SEQ ID NO: 172007 - DNA, 387 bp, Glycine max
tgtcccctgctctaacggcactatcccactaatcccttttctacccttacgcataatcttgaaggtaagctggcctcattactctccttttgggcttttccatattctgcacctctgctgaatgttctctttgtacccctactctgtgatctgtgttttccctatcatcccgcggcccttgggaaatcaccttgtcctcaaggtgatagtcattaagcaaagcagaccaatcctcccaagacgtatcatctggggataagccatgccattgaaccaagacttcccaagcttctgaaggggttctgcgataatccacaattgctgccggagtgagaaggggttgatcattatgaaattgagcacgtagaggcgcgaaggaagtgatgt

SEQ ID NO: 172008 - DNA, 337 bp, Glycine max
tggcctagcccacatcacatgttatgtgcaatgcaattgcatacaaatgctgacttttccttttaaaaaaataataaaacaaagatatttgcgggtcccatgttgctcaaaacgtttcgttatcagttttcacatcttctgtaggtacatgaacatgtcctgcaagggcgagagctggcccatttgatactgaacagtgccaaaaaggtaatcatccacggaaaggttattatcgtccaagtaattaaactgacaatcaaacgcgttttctagctttaggtccagatcatcgttccacttggggtcgctctgcacctccctctcgcacgtgacatcg

SEQ ID NO: 172009 - DNA, 426 bp, Glycine max
  unsure (1)..(426): unsure at all n locations
agcttgtataaagcttcaagtggatcatcatcttattaaggggcgaaacacgattcaagggcttgcaaccatggttgtcaaattctagagtcaacttgtagactcttacgagattaagagtttaattggtccctatgaatgaaattggaagtaaactcatttttttatcaaactcagagcagactcggtgaactcgtgttagactcatgtaaactcgcgagtctatcccgagtcacacgggtttagttgggaattattttttttggcaataaaatcgaaagtaaacttgttttgtgcccactgcatcgtgaaaaaagttgatcgcgtttagggattattcttcttttgttccactcttgattgtcccaatttgtccctgttcttcattcatgacgagttggaggcttaaagctgntcagcagcagc

SEQ ID NO: 172010 - DNA, 347 bp, Glycine max
tctgcatgtttagagatttctagttagagaatgttttattcgggttgcttggggactggacgtaggcacaagggtgtggccgaacctgtataaatttgagtttgcactttcttttcccttaatctcctttatttattattgctttatattcatattcaaattgttttatttgaatcaatatttaagaagattgtcattaagggaattcataacttgaataaaaagtgaaatacatttttaattggggaagtagtttggaatatcttaattcaaccccccccccttcttaagatatctgaggccgcttgtctaacaagtggtatcacagctttattcttgtataaagt

SEQ ID NO: 172011 - DNA, 389 bp, Glycine max
  unsure (1)..(389): unsure at all n locations
attggcaattccaactgcatcaatgcatctttaacaagcataccacgaaccagagcagcaaccaagttgaccttctttggactctaaaataccatagaaaacaaggtatgtaaaatgtgcaactagtcagatattaatcagatccttcttaaaccataaattaagggcatttccacagcanaccagggaaggcatttcaatggctaaaaaattagatgccaacttttctgcaaaataacatgttggttaaaacacagaaatttcttagcatgtagctaggcagtggcaccacatanatgtaacaaaacattgtaatttttcaatatttatgttatggctaagctgaacatacttgtgataatacttatgttcactttagcatgcatact

SEQ ID NO: 172012 - DNA, 360 bp, Glycine max
  unsure (1)..(360): unsure at all n locations
aactaagcttcataacatttagctagagggagtgtgctagaaaatctttaaaacattttaatatcatagacaatagactttattctttgctatatcaaatgatgaccaccttcaaggtcacatcaactatatttgtttggaacttttcacaatatggaagatgacgaaaaaatgctgatagtgaccacaacaatgcaaaattttataatagtatgttacaacggcctatggggagaggaaaagaaggaatataccacggcccgggcccacgatgcaacatactaccttaatcacaaaataaacattattttgtcactcactatggaattntgcaatccacaaacaacaacatatggggag

SEQ ID NO: 172013 - DNA, 428 bp, Glycine max
  unsure (1)..(428): unsure at all n locations
attttcttgttttctaagtcttgacaaacaacaattcattcaccagttttttcaaattcaaaaaggacgaaccaaaagtatatcatttggatctatggtacgatagatgccagcaaggtcccttagagtgatgttcttcaagctaggaatctaatctatggcagagtctagatgaccatttgtcaaatagtttgcatttgaaaaagaagatcataatagaaaaatattaatacatagatatcataatcataagggacttgctaattagtatacttggttattagttaaagaactaaaagaagaaaatgatattgcttattgaattacatactacactgctatngtaagacatagtctgcttttccacaattatgttacatggtaggtagagtattaatgacaactgagcaataatagattgaaccctt

SEQ ID NO: 172014 - DNA, 395 bp, Glycine max
  unsure (1)..(395): unsure at all n locations
gcttgtgcattcaatatcctgatgagggtgttccatatgttctcaagactgttctaatacattcgctgcccaagcatcatggtcttgcaggtgaagatcctcataagcatcttaaggagttccatattgtttgttccaccatgaagccccctgatgtccaggaagatcatatctttctaaaggcttttcctcattctctggagggagtggcaaaagattggctttactaccttgctcccaagtccattttcagctgggatgaccttaagagggtgttcttggagaaattcttccctgcatccaggaccattgccatcagaaaagacatttcaggcatcangcaacttagtggagaaagcctgtataagtactgggaaagattcaagaaattatgt

SEQ ID NO: 172015 - DNA, 456 bp, Glycine max
  unsure (1)..(456): unsure at all n locations
gcttgtgactgtaatagtatgacataaccacctataactctaccattctctgatgatttctgacatagntctctgtacaggttttctaaacaagcaaaaccccaactatatttttttatgttgtcaaagtcatgtaataggttcaaatacattagatgaactctatttccagatttatcaagtattaaaaagccaccaattatgtacattatgtaagctctacacctacattgtagttggggtattgttggttctttaggtaatggtgtgcacaagatgttaagcaaccatgtcagcttcagtgtggctcccttacatgcattatttggaggcacttcaccgagtaactcgtcgcataactaatcccaatgtaagaagctaggtcctgtcacaacacaaccatcgaccctaatgcctagatgcagtgcaacatcttcaagtgtgatagtgcactca

SEQ ID NO: 172016 - DNA, 360 bp, Glycine max
tgccacccagctcgcccaggcgagcaaggttgcttccttcagaagctttagtcttctggaggaaggatttggaaggcccaagtgggccagattgctatttgtaccccctttttactaaatgcacccccttctatttttttggtaattctttttccgtaacgttacgaaactgtacgaattttgtaacgatacttattttccttccgcaaggttacgaatccttacggattacatatttactcttttttagctttcgaagaagttacggaaacttacggattgcgcaaaaatacctcttttcgacttccgccacattacagaatttcacggatagtgcaagcttgctatcttttgatttct

SEQ ID NO: 172017 - DNA, 396 bp, Glycine max
  unsure (1)..(396): unsure at all n locations
gcttgagatgaggaagtgctgaagggngaaacttcctgcttttatggttgaccacagagnggnacctggagatatgtcgcggtggtcaggagaccttggggacgtcaggtggggtgctattgcccaaaaccaagcttgaccaatcccgacccaacccgggcatagtcggtcagtgagaacctgtgatgtacctaagcaggcgagctccttgcagtcaaccgataaaaggaaaacaaagaccacaaagcaaggaggcttgtggtggctgaccagctgtgaatttgtgtgatatgtggagtatagtctctggtaatcgattaccaagggtgggtaatagattacaaggcttanaaatgaagacaggaggctaagatggtctctggtaatctattacca

SEQ ID NO: 172018 - DNA, 364 bp, Glycine max
tgtccacaaaaataggtttttgaaagtttatcatttcatcttcttactatagtaaaaggatcatttttaaggtccaacgccttaaaatgatcacctttcaagtaaaaaagagtcacttgattcacgcataagaaagaactatgtaggtatgatttcctcatcccaattgaggaatacgtagcagtaaagggaaatacccttgtcgaccccaaaaagagaaaaaatataaaaagggtataaaggatataaggacgtaaaagggaacataaaaatctaagtcatgtttgcacatttgattataggctgccgtctcttatgacggacgtgtggggtgctaataccttccccatgcgtaaatacaact

SEQ ID NO: 172019 - DNA, 466 bp, Glycine max
agcttgtctcagcgttggtgcgagacggagactaacatgctagctatcatcgccaagtaccaagaagagttaggtctagccgcggcccacgagcataggattgcggacgaatatgcccaagtatacgcggaaaaagaggctagaggaagggtgatcgactctttacaccaagaggcaaccatgtggatggatcggtttgctcttaccttgaacgggagtcaagaacttccccgtttgttagccaaggccaaagcgatggcagacacctactccgcccccgaagagattcacgggcttctcggctattgtcagcatatgatagacttaatggcccacataattagaaatcgttaggaaacttgtatggtctctcagaccttgactagatatgacttcctttttgaaataaaatgagttggtcccatgtttctactccaaaaaacttgtgcaaatcaaatcacttcta

SEQ ID NO: 172020 - DNA, 397 bp, Glycine max
tctagctctataatattatattctatcttactttcctttctcctcctcccccatgttctcttcactttccttcctcctcccccatgttttgtctttctttcttttctgattacgcactcactcacatgcatgtgtaacaactaaaataattaatataactattttaaaaccattactaaagctttttttcataatagcgtttttagcacttttattaagacaaccctaacactacaatctatatcccgtgcatgtcatcccatatgtggctagaggtttgtattgtgttgtggtcaaggctgcttacgcactagtgttcctgatgaaacactacaatttctacagttgccactttagaattttggaaaatcaactaatgttgttagcactctaaatt

SEQ ID NO: 172021 - DNA, 451 bp, Glycine max
aggctgcagctgcccagagaagagtcacggagatttcttaccacctcacaagactggaaagcggtttctaatgactcctctacggcctccacataaggcatagaggatgggcagctcaccaagatgtcttcctcgcctgatatgatgaccagatgcccttccactacgaatttcaacttttggtggagtgtagagggaacaactcccactgagtggatccacggccgccccaacagacagctgtagggggggttaatatccattatttggaaggtaacttgacaggtgtgagggcctatctgtaccgggagatcgatctcccccctaacctctcggcgggtgccgtcgaaggcacgaaccaccattgaactcggctttaggtgggaagcattgaatggtaatttctccaaagtgctcttaagcatcacgtttaaactggaaccattatcga

SEQ ID NO: 172022 - DNA, 378 bp, Glycine max
tgagtcacagccgaaatgtaaaagaaatctacattatttaaacactgaatgtggaccccatccacttgatggggctaaaaccacattcgaactgagaatcacaagacaagacaaaaagcaactaaaatatccagctaatgcaaccaaacaaacctaaccgaaagctacagtttcaaaggtatccaaaagcaaatttaaaccagaaagcagcagaagaaactatatgaaaaagagaacaccaaatccatcatgcacaatattgcatcttaagcttttctatagatcatctccatgagatccatttccttcttcatctgaacctccggcgccatctccatcgcaacatcataaccccatgtgccatcttccacagcagca

SEQ ID NO: 172023 - DNA, 412 bp, Glycine max
  unsure (1)..(412): unsure at all n locations
agcttggagttgttatcttcgtgagtctaggtttcaactctctcatccacccaaaacacatgtcanttgaaccattcaagagtatcaacataaggcgattccaaaagtttcctgagaccctaacacacaacaacacattcacattaaccctaatccagttcaattcaattgaatcaatcactattaggttcaaacaaaaaaaaaggaacatttaaaaccctcaccggagatatcggcaaacaataaaagcccctctttcgaaagtgaatntgttggagagatcgaagacttatgcggctagggacacgacaagaatccttttttcgaagacctcgacaaaaaacattattgatgctttcacttagggggcaggtcttttgggattgacgatgctaacactnttgaatctact

SEQ ID NO: 172024 - DNA, 386 bp, Glycine max
  unsure (1)..(386): unsure at all n locations
acctatgcaagactcaagctttagccctttaccatcctccatatgaactttccaatttatcgagtagttacatttatatattcattttttttcacaaaagtgacagtaaggtttgatcataaaactttgtataaactatttaattctcctatcactagactgatttagtggacatatatttactctttctttcatcttaattttactgcacttttttattntattttttatcataccacttattagttattacatctataactttctttataacaatcaaatccgcccccaaaatgtgtttatgtttatatttttcgtttactcttgtttgtaggtttttattctttccgatgtaatgctcttttttttaaagatggaatggaaaa

SEQ ID NO: 172025 - DNA, 231 bp, Glycine max
tgcaacaatgcataaccagctaatgggcattagcaatttgtgtataacaaacgagggctgaagcctcactctatacttaaccactcaagacagcttatttaccaataacagtgcattaactcgcatataagaaaaagcaacgctatctctcattagagagaaacaagttgacctgtagcttagccaccaaaacagaaccatcacgatatctgaaagcgaaaccgccataac

SEQ ID NO: 172026 - DNA, 439 bp, Glycine max
  unsure (1)..(439): unsure at all n locations
agcttcgtatccaagacattctctngggggtgtatcttcttcttccatggcttattccctaggggatggtgcctcctctcacctcttttcctttatcttccgctgcaactccaaggctganaatcaccattgaaggacctcattgaagcttaaagatccagcctctatagaagcttctcaagcaaacttccatcattccttaactcctttgttaatgaactacttttcattatcggagatcanagtgttaggaatttccaaatggcaaacaatgttnttccaaatgaatttttgaacattngttgctgaaatggtgctataggctcaggctcgatctattttgtgaaatgatcaatgccaactaggagaaactntacttgtccttttgcangggaaaaggtccaagtatgtctactacccaagaggcgagaggccatga

SEQ ID NO: 172027 - DNA, 353 bp, Glycine max
tggagaaaatgccaactaaaaagtgaaatgaaggaagtttcttaaagataagagataaaagaaaaagaggaaacgattgaggaagagaaagagaaagatgaagaaagaaaagatttacgaatagaaagagaaagatggagaaagaagagtgaacaataaataggggctgtggaaatatcataaatgcccccgtttatactacgtgtcaatgctgaagacaggggcaaagtcgactacttttagagtgaaaaagacaataaaaccaataaatgtgtaatatgtcaacaaagtatccagtgcaaaaaaggattattgctaaactattcttttcatatagatatattagatagata

SEQ ID NO: 172028 - DNA, 434 bp, Glycine max
  unsure (1)..(434): unsure at all n locations
tgcccctttgaccactgaatgactgcattgcacnncccnnccgaanacncacgcttcagcgagcgctnaaaangagaggggttttgtaaatgttgattttttttcagacatccgaggaaaagatattgtcgtttgaattttgcacgaccattaacattcaatttcgagcctctcgattattacgcgactaatagacatcgagtaaaagttattggcgcttgaatttgcaacgaccatcaacattcaatttcgagcgtgtggatatatacgcgactcaattagacatcagaggtaaaagggtattgtccgttgaatttgcaaccaccaataacattccatttcgagcgtttcgatatatttcgcgactcaatcagacataccgagttaaagttattggcgtttgcatttgctcagagctttagcatgtagtttcg

SEQ ID NO: 172029 - DNA, 194 bp, Glycine max
ggaatgagaggaaacggcttgcctcagttcttgattatgcacatgaactattgaggacctttcctggatccacagttaagatcaacacagtgccaaaatcacaaggtacaccacacttttagaagcgatatatttgacctgccgcctgtcatatcgggattggtgctggacgcctaccattcatacgtctagat

SEQ ID NO: 172030 - DNA, 286 bp, Glycine max
tgtactccatcgcctgctacgtttgaatacgctttcctattcctttccctttagaggggcacaggtgtcctcatcattgtgccaaacattacagtcaatgctggaaagataatgtaagctgctgcttttaattcattatatctactgttcctttaataaaaactactcaaaaaatgttattactctctattgttgtacgaacaaaaaaccatactgattactatgtgacaagacaccaaacgcatacaaagtactaggagtataaaaaattgaaatcttaccttat

SEQ ID NO: 172031 - DNA, 473 bp, Glycine max
  unsure (1)..(473): unsure at all n locations
cggatccttaagcacctgcggctgcaagcttgaatatttaagcaagagtntggagtgcacattgaagttactaagatgtggagagccatgaaagaagcaaagcaactagtggaagggaatgagaggaaacaatatgccaaagtatttgattatgcacatgaattattgatgagcaatcctggatcaacagttaaaatcaacacagtgccaagtccagaaggtccaccacaattttagaggctatatatttgtcttgctggctgtaagaaggggtttggtgctggatgtaaaccattcataggtctagatggatgtttactaaagagtgcatttggaggaaacttgctttcttgctgtgggcttgatgacaataaccacatctttgttattgcttatgctgntgnggacattgagaacaaagacaattggaaatggttttaactttgntgcatgaagatcttggggattacata

SEQ ID NO: 172032 - DNA, 393 bp, Glycine max
  unsure (1)..(393): unsure at all n locations
tccaagattattttgatgacgccaaagattgttnnaggattcattcacgactagagtaattcaatccgnaanattcaatgaaaattcaagaaaaactcaagatatgcaagaacttcaagaaaaacatcaagataagtataaaaagaatttttcaaagaaaaaattgaatatcacaaattttccaaaagaannngcgggggaaaaatcttttaccaaaatttttactctctggtaattccattaccaaaangccctaatctattaccanaancccaaaacagttttatacgggatttacaaagtagtaatcgatttccatgggcatgtaatcgattacaaatatttttgaacattgaatttcaaatttcaagagtcacaacttgtgataaaaca

SEQ ID NO: 172033 - DNA, 307 bp, Glycine max
agcttccattggttgaatttgagcacctcgatatatatgcgcctgattctaatctccgagtgaaaagttacgaccatttgaattcctccagagcttccattgttgaatttcgagcgtctcgatatattatgcacaagaatcggacctctgagtgaaaagttatgaccatttcaatttctcgagagcttccgttgctcaatttctagcacctcgatatattatgcgcctgaatcggacctccaagttaaaagctatgaccatttgagattctcgagagcttccgttgttcaatctggagcgtctcgat

SEQ ID NO: 172034 - DNA, 357 bp, Glycine max
agcttctatataagctgaaccattatatcaataaacacaagttgagttttattcagaaaattagagtttatctcttttatcttagtgagagtgattctcctaaattcttgagtgattcaagaacaccttgcctgtatcaaaggactttcacaacctttgtgtgttgccctcactggaaagagtgattctttccttcctttcatgatcacccttgttctttcaaaccacaattccagaaaatccacctctgcccagaattatctcgtggccataactcccattttacgcactcaaattaagtgattcttgagcctaaattgaatttcaaaacgagacctttcaccttcgtttggaatc

SEQ ID NO: 172035 - DNA, 442 bp, Glycine max
  unsure (1)..(442): unsure at all n locations
gcttgctaacccatggaagctcctaatatctcccacactntntaggttgtgccattcttggatggccttgattntcttagggtccacttggaccccatttctaccaactacaaaacctaagaaaactatattatctatacaaaaggtacacttctctatattttcatagagggtgttnttcctaaggactgaaagaacttgtctgagatgtcctaagtgatcatctagcctcctactatacactaaaatatcatcaaaataaaaaactacaaatctacctatgaaatcccttaagacatgatgcataagcctcataaaggtgcttggtgcattagtgagcccaaaaggcatcactagccattcatacaaaccanacttggtcttgaaagcagntttccactcatcaccctttttcatcctgatttggtgataaccactttta

SEQ ID NO: 172036 - DNA, 363 bp, Glycine max
tgttgaattaccgaaaggaaataaggtagttgtagcataatggatatttcataacaaattggacgaaaatggtgaggttgtgagaaacaaggcaatattagtctctaaaggtgactcacaataggaaggtataaactacatagaaacttttgcacatattgcacgtttagaagcaatacgcatcttactttcatttgcaacctatagtaatatgaagttgtattaaatggatctaaaaaacacatttttaaatggattaatccaagaagaagtttctattgaacaatctcctggatttcaaagtgaaacccttcttcaacatgtttttaaactcaacaaagcatcatatggacttaaacaagc

SEQ ID NO: 172037 - DNA, 463 bp, Glycine max
  unsure (1)..(463): unsure at all n locations
gcttatgctgcanacacttataatagacctccttaacagcaaaaccttcttcaatagaataattatgacctttcaagcaatagatacaatccaggttggaggaatcatccaaatctgagatagacaagtcctccacaacaacatcagcctgtccctcctttccaaaatgctactggtccaagcaagccatatgttcctcctccaatgcaacaacaacagtagcagtcacaacaaagacaacaagcaactgaggctcctcctcaaccttccttagaggatttagtgaggcaaatgaccatccagaatatgcaatttcagcaagagacaagagcctccattcagagtctgacaaattagatggggcagatggctactcagttgaaccaagctcaatcccaaaattctgacaaattgccttcacaaactatgcagaatccgaaaaatatgagtgccatcaccttga

SEQ ID NO: 172038 - DNA, 366 bp, Glycine max
  unsure (1)..(366): unsure at all n locations
ntgtgggagtcagagttgtactggttagatatgtgttgaatgtttactgtttagggtttgatttttactgcttttagcacaagaataataaaatcattcaaaaatattattttctgagttctggtttggtcatttgaaagaatgccataatcggtcatcctatgcccttattgagaatttgagaaattggatggagaaagggtcaaggctcaaaatatggaagcagtctgatataactcgaaacattcattaacttagctctctgttggttttccagttttcatcatgtcatcatttatgtgtgatctgtccattcctagaaaatcggtcacacacacacacaacactnttagaaaatcatatatt

SEQ ID NO: 172039 - DNA, 430 bp, Glycine max
  unsure (1)..(430): unsure at all n locations
agctntgagctaattcaaacgacaataatgttttgctcggatgtctgattgagtcccgtaatacatcgagacgctcgaaattgaatgttgaagctctcagcaaattcaaacgataataactttttactcggatgtttgattgagtcccgtaatacatcgagacgctcgaaattgaatgttgaagctctcagcaaattcaaacgacaataacttttttactcagatgtctgatagagtcccgtaatatatcgagatgatcgaaattgaattctgaagctctgagctaatccaaacgacaataactttttgctcggatgtctgattgagtcccgttatctattgagacgctcgaaattgaattctgaacctcagagctaattcaaacgacgaataacttttactcggatgtgtgattgagtcccgtaataca

SEQ ID NO: 172040 - DNA, 360 bp, Glycine max
tcagaattcaatttcgagcgtctcaatatattacgggactcaatcatatattcgtgcaaaaagttattgtcgtttgaattagctcagagcttcagaattcaatttcgatcatctcgatatattacgagactcaatcagacatctgagtaaaaaagttattgtcgtttgaattagctcagagcttcaaaattcaatttcgatcgtcttgatatattacaggactcaatcagacatctgagtaaaaaagttatggtcgtttgaatatgctgagagcttcaacattcaatttcgagcgtctcgatgtattacgggaatcaatcagacatccgagtaaaaagttattgccgttggaattagctc

SEQ ID NO: 172041 - DNA, 383 bp, Glycine max
  unsure (1)..(383): unsure at all n locations
aatcgattacacagntatattntgaagggtcatgacttttgaatttgaatttcaagagttccgttgctggtaatcgattacaaatatttgatcatcgattacaagttcaaaattcacattcagaaccctttttaacattacccagaggcttggatgtctcggaaacactttgttttgaggcaaggcttgatctttagtgaatcttgaaacaaggctttntttgttgaagcaatcttgtattaatcttgaagcattgcttatcctttgaagcaaccttatttgattcttctttggcatcatcaaaatcatgtatgcatacattcacattctccccttttttgatggtgactctcattatcaagcaaattctttctgacatcatc

SEQ ID NO: 172042 - DNA, 388 bp, Glycine max
tgacacttcgagacttatacaatactcaagcttcccgccaatggtatttgaggtttaatgataccattatttcctttagatttaaggaaaatactgtttatcggtgtatgtatctgaaggtcagtgggagtaaggttattttctaattttgtatattgatgatatcttgcttacaactaacgatcttggtcttcttcgtgagactaagaaatttctctctagaaactttgaagtgaaagatatgggtgaggtaagctatgtgatagggataaaaatattccataatagatcacaaggattgttaggtttatctcagacagtatatatatcgataaagtgctagagagattcaagatggaaaggtgtttaacattgcctactctaattt

SEQ ID NO: 172043 - DNA, 449 bp, Glycine max
  unsure (1)..(449): unsure at all n locations
agctntaaggtgtgcaactccaccattttcatattagaacactggtaatgggtctactatcattgttatcatttatttctccatcattgaggtgccacttgagctgccaggtctctccacctttgggtgtattctttgaaacatttgtgcccctttttgcacatgttctgtagttgcatcctatctggagccatatcagaattgtactgacactgcctaacgaaagcaactattaggtccttccaagaatggactcgggaaggttccaagttagtgtaccaggtaacagctaccccagtaagactttcttgggagaaatgtatcagtagttcctcatcttttgcgtatgcccccaccttccgacaatacatctttagatggttcttggggaaagtagtccccttgtacttgtcaaagtccggcaccttgaacttgggaggggtaatgat

SEQ ID NO: 172044 - DNA, 364 bp, Glycine max
tttctttctcaatcaacctgtctattgtctaacaattctaattgcaagttcaactttttgttctttttatgtctaacatacatatttgctcaaacttatgaaaagaaacacaaactccatcacaatcatgcatttaatccaaaatcaaatcataacaccaatgaaacatatttgctagcgcttattacaggatcaacaaatttcaaaacttgtaggctaatgaaacttgaaagaaagtttggagaatcaaagctccacaaagaatgagagtctttattttgcagcctagacatgataggctatctttcaaattctctaatctgagaaccgaaccaaacacaaatgttttttttaatttctattt

SEQ ID NO: 172045 - DNA, 435 bp, Glycine max
  unsure (1)..(435): unsure at all n locations
agctntgagccaattcatacgacaataactntttactcggatgcctgattgaggcccgtaatatatcgagacgctcgaaattgaatgtggaagctctgagccaattcaaacgacaataactttttactcggatgtctgattgacgccccgaatatatcgacacgctcgaaattgaatgttgaagctctgagcaaattcaaacgacaataactttttactcggatgtctgattgagtcctgtcatatatcgagacgctcgaaatngaatgttgaagctctgagccaattcaaacgacaataactttttactcggatgtctgattgagtcccgtaatatatcgagacgctcaaaattgaatgttgaagctctgagccaantcaaacgacaataactntttactcggatgtctgattgagtcccgtcatatatcgaga

SEQ ID NO: 172046 - DNA, 358 bp, Glycine max
tcaacattcaatttttagcgtctcgatgtatgacgggactcaatcagacatccgagtaaaaagttattgtcgtttgaattagctcagagcttcaacattcaattttgagagtctcgttatattacgggacacaatcagacatccgagtaaaaagttattgtcttttggattggctcagagatttaacattcaatttcgagcgtctcgatatatgacgggactcaatcagacatccgagtaaaaagttattgtcgtttgaatttgctcagagcttcaacattcaatttcgagcgtctcgatatatgacgggactcaatcagacatcccgagtaaaagttattgtcgtttgaattagctc

SEQ ID NO: 172047 - DNA, 428 bp, Glycine max
  unsure (1)..(428): unsure at all n locations
agcttgcaaccattagaagaaaaagaacatgttattagaagtatgactganaatgttagtcagtttgtcagattgattgcgaagaaatgcattgatcgtatcctggtgagagtgtgatccttaaattntgagagaaacgactatcatttagtactaattnttgcatgaatctctgaagtatggactgaatgcatgaattgaggatgatgaaggccatgctttgattgtgatagctacttagccaaaaagctgaccttgtgcttgaatgatttatcccttgcacccagtttgagttgaatgaattattgattgattgaaccttgagcctatacagtgttatctcctgctaccttgttntaggttgtaggagagcatcatccacagaaagcttgattcatagtaaatttgtcccannattgggggagtaa

SEQ ID NO: 172048 - DNA, 351 bp, Glycine max
tcaaaccacagcaacacaaaatctaggtgtccaaaacccctcaattcaatgggttttctaggtttgaaaagtgaaatttagaatgaggtaaatttgaggcaaactctcacctcacaccagtccataacatccatttagacttgttcaaactggatttacacctaaaatctcaccgaatcaaaatttgactcttcaacacccaaatttgccctagcaatggctctttgttcactttggtcttttgtttttctctctagctcagcctaacctttctcacatgttctaaatgacatttcaagctagtattaactcactctaacctccatttaccacagaattcagacttagcct

SEQ ID NO: 172049 - DNA, 446 bp, Glycine max
  unsure (1)..(446): unsure at all n locations
agcnttgaccaaacctcatcagtagttgtttccttagagacttgccttaacaccttgtctctgacactaaggataattgcactgtgtgccttctgcagtagtgctttcttatccccatcatccatcatcttttcgagtttggcttttccatcaagtgcttccaccaggccctgctgaacaagaagggctctcatcttcaatcgccataacccaaaatcatttttccctttgaatttttcaacctcatacttggccaagcccattgcttgaatcgagcccaaaatcatccacgctcacaaaaatatgagtttcttgtttgaacaagaatgagcaaaaatgtagaanaagatgaacaaaagaacttcaaagaatcgtgattngactagagtaaaaaatcaactctcaatctcctcacaataaccactnttatttaaactctgaataat

SEQ ID NO: 172050 - DNA, 388 bp, Glycine max
tgacgtacgctaagcctcgcatctcaggtaagcgcatgttgcagaaagatttttggtgttgcagaaagcgctaagcaccgctgctgcgctaagccccaaatacttactggaagttacaacttcaagttgggcttagtgtgaggctaggctaagtgccagtgttttaaacttaaacgtcacgttggcacgctaagcgcgccatatgaaatttagtttttaaaaagtagaggcagagacacttgggttgctaccttggcacccaaacctctacactctcacatccttgagcattctcttttttctgttgtgtgctactgaccctctgcatcatttgcttcttcattctctgcgttacacaatccaagtaagtctattgatttcttttact

SEQ ID NO: 172051 - DNA, 427 bp, Glycine max
  unsure (1)..(427): unsure at all n locations
agcttctagtcgtccatagacctcctctgtgttacggtctagcaaacgttgcatctgtgcattcatcgcatccactaacagacgttgagcgccgtccaactgatggtactcgtcaccaccaccacctgctccagccataattcaacaggaaaaaaaaatgtgcaataaaaattattaaggtttcaggacctcacaacactctactcacgtctcttagatggtagtacactcgtgtttaatgctctcaataggcttttgtgtaatgtattccctcttgccttttaccactcgtgtttcctcttaagttcctggatggaccanattagacacacaaggtaatataaaataaaaggaaagacaatataatgatcacaaacagatttgatttgggataacaacttggactngattnggataataatatatt

SEQ ID NO: 172052 - DNA, 310 bp, Glycine max
tcattgcctaacaagccaacttacaacagcaagcccctttagactcagcataaggatgcacaggtcaaagttgagtatgtgaaaagattgtatgaccaagtgaaagtgcaaattgcaaagaagaatgaaagttatactaagcaagccaacaagaaaaggaaggaagtggtacttgaaccccgtgatgatcctggacatttgaggacaaatgtttttcaagaaagagggaatgatgagaatcatgaaacaggccaaatacagtctaaaggcccaagtggagaaagacgaatgcccaagtggagaaggacaa

SEQ ID NO: 172053 - DNA, 435 bp, Glycine max
agcttgtatttctctcccatggttgatataatatctatgatggtatcaaagctcttcctttgaagagccctgctgcgctacttatattcttcctctcgattatcatatccttcattcttacatcatgagtgaacaacaacaagatcaatcacttaatgtacacagtccttattacctttatctgggagaaaatccagcgatagctttggtttcttcggttcttgattcatccaattataattcatggagtcgatctatgcttattgcattaagtgcaaagaacaaatctgagtttgtcgatggttttattcaaagacctgcatcagatcatgcacttcatgcagcttggaagaggtgaataatatggtgatttcgtggttggttcattcaatctctctttcaattaggcaaacatactatggatggataatgcac

SEQ ID NO: 172054 - DNA, 354 bp, Glycine max
ttatattttatattagtcctttctcacgtgatcgttttcttcaaagccttcagatccatgacactagcactgcgttcacacttcacgcaggcacaataaaaagctaaagtatccaccaaaactgtctttcttcttctaagtgcaattaaatatggagataatcaaatcaaatttgactacaatttttgtttcctaagctgtttgagaagccaaaataattggttcgttgcgtagttatgtcacatcaagctgaaccagcttatacatcttctaagacgaatacaataaataaattaaccaaaggtggacctaagaataattaagataagctctttgcaatagaccgtgaacccc

SEQ ID NO: 172055 - DNA, 526 bp, Glycine max
  unsure (1)..(526): unsure at all n locations
ntgaacnacccgtnncactttgancccttttattatgnccttcgtannnaccgcggcannctnaaagaatagctggaggcatgccagcttctaggctccatatatctctctcgnggttctgtcancanacgatgcatctgtgcatgtcatctgatacacttacagacgttgagcgccggccanatgatggtactcgtcaccaccaccacctgcttcagccataattcaacaggaaaaaaaaatgtgcaataaaaaatattaagggttcaggacctcacaacactctacttacgtctcttaaatgggagtacactcgtggttaaagctctcaataggcttttgtgtaaagtattccctcttgcctcttaccacctcgtgttcctcttaaggtcttggatggacccaattagacacaccagggtttatataatacaagcgaagacaatattatgatcccccaccgatttggtttgggataccacctggacttgatttcgaatataanatattacatatggagttggcn

SEQ ID NO: 172056 - DNA, 281 bp, Glycine max
  unsure (1)..(281): unsure at all n locations
aagcttgcttgcggngcttcaatggaggaaaagaaagagggatataaagatatagggggggagcacgaaattgaaggaataaaagagggagagaagtggaactntgaagtgtgtctcataaaactttcattcatcaaagatacaaccaagtgttacacatgcttctatttataaactaggtagctgtcttgagacgctttcttgagataactctcttgagacgcttgtttgacaaaaagtacgtgagaagctagagcttaactacgcacacccctctcata

SEQ ID NO: 172057 - DNA, 461 bp, Glycine max
  unsure (1)..(461): unsure at all n locations
agcttatgctacanacatctacaatagacctcctcatcctcagcggctatataagccacaacagaacaattatgacctctncagcaacaggtacaaatccgggtggaggaatcatccaaccttagatggtcgaatccttcacaacagtagcaacaacaataacaggcttattttagaatgttgctggcccaagcagaccatacgttcctccaccaatccagcagcaacaacagcaacagccccagaaacaacaaatagttaaggctcctccgcaaccttcctttgaagaactngggaggcaaatgactatgcaaaacatgtagtttcaacaagagaccagagcctccattcagagcttaactaatcagatggaacaattggccacacagttaaatcaacaacagtcccagaattctgacagaataccttctcaatctgtccagaatcccacaaatgtgagt

SEQ ID NO: 172058 - DNA, 391 bp, Glycine max
  unsure (1)..(391): unsure at all n locations
acactcgaaactaagcttaatttttggaaaattttcatgcagaagattttatttatccctttatgctttattgagacattcttagtcaattccaagtgtgtacataatagtttgtgaattataaagaagaagtgaagttgatttttataatgagataatgaaattcactttcatataagaatttggtgtggtgaaagtaagaattcaaggtgttgaaatatcttactatgctatttgaactatagttgggtccataagtgtaatgaacatataaatggtgaatttatgatatggtatcctctttttggtgttgaatgggtgaatatgattatgatggtgtatgttgattgttgaatgaactancatatcatgcatatatggataaatgaca

SEQ ID NO: 172059 - DNA, 300 bp, Glycine max
  unsure (1)..(300): unsure at all n locations
gcaagcttgagcagantcanacgacaataactnttaatcggacggcatttgttcccctaaatatcaaactgctccaaattgaaaatggaagctcgtagcaaatttaaacgagaataactttttactcaaatgtgcgattgagtcacgtaatatatcgagacgctctaaattgaaaacggaagctcatagcaaatgtaaaccgtaataacctttaactcggatgtccgattgagtcctgtgatatattgagacgctcaaatatgaaaacagaagctctgcgcaaattctaacaacaataac

SEQ ID NO: 172060 - DNA, 346 bp, Glycine max
tgtaggattatggggtacccatcacatgtggtactatgtggcggtcgttcgatggtgcacaacaagttttccacatccacaatgcgcgcataaacccaccatcccctgttgcccacctccaactgagctcacgtactcccacgtagcccatatcctcgtttctctcaacaccgggtccccatcaatcctcccaagcttccccaacatcaaagtaatacaacattcacacagcacaagctatcacagccaagcaaaacagggcaaaggcagaaaactctgctcaaaacaccaaccaaaatcacagcttttctcacttaaagaccccagtaacaattccttcgatcca

SEQ ID NO: 172061 - DNA, 215 bp, Glycine max
agcttagatcaggcatccgagtcaaacgttatgttcgtccgaatatgcatgggcattccatttcaacttttaatcgtgatgatatattacgggcctcagtcggacatgcgagtcaaaactttatcccgccagaattcacccgagtcttccatgttaaattttgagcgtggcgataggctacttcgcttattcgaagatgcggaggataagttatg

SEQ ID NO: 172062 - DNA, 399 bp, Glycine max
ctaagcttaagaaaaagatggcctcagcaaattccttatttccagtaaggaattctatcaatagacctccaatctttaatggagagggttaccactactggaaaacccgaatgcaaatttttatcgaggcaatagatctaaatatctgggaagccattgaaataaggccttatatacccaccacagtagaaagagtttcaatagatggtagttcatcaagtgaaagcataaccatagaaaaacctagagatagatggtctgaagaggatagaaaacgagtacaatacaacctaaaagccaaaaacataataacatctgccctaggaatggatgaatatttcagagtttcaaattgcaagagtgctaaggaaatgtgggacactcttcgattaacacatg

SEQ ID NO: 172063 - DNA, 391 bp, Glycine max
aattcaatcaatagacctccaatctttaatggagagggttatcactattggtaatcccgaatgcagatccttattgaagccatagatttaaatatatgggaagccattgaagttggtccctttattccttcaaaggtagtgggaaatgcaactatagaaaaaccaagagaggaatggaatgatgatgaaagaagaaaggttcaatacaatttacaggccaaaaatataatcacttctgcattaggcatgtgtcgcaacctacccttttgcgggcgagcgaggcgaggctcatcgggtgcttcttccaaaggaggaacatgcgcggagtcgccacaaacgtttatttgtggaaaacgtcggaaaaatcgaaggaaaccggtcatgaagaata

SEQ ID NO: 172064 - DNA, 380 bp, Glycine max
aagacttgacgcttctataatgggacaactagagaatcttgttacgagacatgcaagggaggtagagctggacaaaaataaagtgtgggtaaaaccttataaatcacactacattgaacatttgtatatgatattaacaatgacatctattttgtaacctagaatatctaataaaagacacatttaatagcatgtgcaagcaacttatcttaaccaggagcaaggtcacgaaccaaaccaatacacccaaatgcacatagaggagcatggtataatggacctttgaggaaataagttgatagggaattgatcaaataataagcaggtaaaacaacttcaccacaaaattataaaatgatattttcatgtaacaataaatg

SEQ ID NO: 172065 - DNA, 167 bp, Glycine max
  unsure (1)..(167): unsure at all n locations
cagattatccgctgatgtttacataggatgcatttgtaaacagatacaattctcttctctctctctctctctctctattattttctcatataacatacacatgtgatgtgaggttgaatttgtggtcaaggagaggtgacctangctgtacggggcaaatggcattg

SEQ ID NO: 172066 - DNA, 306 bp, Glycine max
tcatattcatcaaagcaggataatcaaatttgcctcttcttatatccagatcgatcctttcccaggcgaaaaccaaatttgcaaagcttgaaggcatgtaacccaccatcttttcatagtagaacaccggtaatgtgtctactatcattgtaatcatctccctttcaatcattggggcgctacttgagctgccagatccctacacctttgggcgtattctttgaaagattcatgctccttcttgcacatgttctgtagctgcattctatttggaaccatatcagaattgtactgatactgcctaat

SEQ ID NO: 172067 - DNA, 234 bp, Glycine max
tctcatgatgaaaaatcaccattgaaggacctcattgaagatcaaagatccagcctccatagaagctccacaagcaagcttccatcaagttatgaccatttgaatttctcgagatcttccgtggttcaatttcgggcgtctccatatgtcatgtgcctgaatcggacctccgtaagaaaatatatgaccatttgaacttctctagagctttcgttgtttaatttcgagcttctc

SEQ ID NO: 172068 - DNA, 354 bp, Glycine max
tcattgcctaacaagccaacttacaacagttagcccctatagactcagcataaggatgcacagaccaaagttgcgtatgtaaaaaaattgtatgaccaagtgaaggtgcaaattgcaaagaagaatgaaagctatgccaagcaagcccaaaagaaaaggaaggaagtggtacttgaacccggtgatgatcttggacatttgaggacaaatgttttccaagaaggagggaatgatgagaatcatgaaacaggccaaatacagtctaaaggcccaagtggagaaggacgaaggcccaagtggagaaggacaaagcccccgagtggagaaggatgaaggcccaagtggagaaggatg

SEQ ID NO: 172069 - DNA, 300 bp, Glycine max
agcttgcctcatagatgtccaggaaggacaattctgcagaatgttctagttccgctccggagtatgatagtcaccgctttatgagcgcggtacaccagcagcgcttcgaagccatcaaggggtggtcgtttctccgggagcgacgcgttcagctcatggacgacgagtatactgatttccaggaggaaatagggcgccggcggtgggcaccactggttactcccatggccaagtttgatccacaaatagtccttgagttttatgccaatgcttggccaacagaggagggcgtgcgtgaca

SEQ ID NO: 172070 - DNA, 346 bp, Glycine max
ttttaaagtagaaacatgggaccaactcattttattttataaagtcgtatctagtgaaggtctgagagaccatacaagttttctagcgatttctaattatgtgggccattaagtctatcatatgctgacaatagccgagaagcccatgaatttcttcaagggcggagtaagtgtccgccattgccttggccttggctaacaatcggggaagttcttgactcccgttcaaggtaagagcaaaccgatccatccacatggttgcctcttggtgtaaagagtcgatcacctttcctctagcctctttttccgcgtatacttgggcatactcgtccacgaccctatgctc

SEQ ID NO: 172071 - DNA, 235 bp, Glycine max
agctggagatgaggaagtgtagaagggtgaatctttctgcttttattgttgaccacagagtggtacctggagatatgtcgcgggggtcaggagaccttggggacgtcaggtggggtgctattgcccaaaaccaagcttgaccaatcccgacccaacccgggcatagtcggtcagtgagaacctgtgatgtacctaagcaggcgagctcctggtagtctacagataatatgaaaac

SEQ ID NO: 172072 - DNA, 389 bp, Glycine max
tttctcagtcgtctgtaaggatgattgtgtgttagaaagcgacgatccctactgtagactgtttttctgccatgtttaagttgtatgtaacttgtattttcttcacagatggggcatgcatgatgacccttaacactgtaaccgctgagattcccatatgctggaaagtcattaatggtacaaaaaagcattgcacgcatttcaaaggtctccttgtgaaacacatcaaacactacaaccccctcgtcccacaactttctcagatcttcaaccaacagacttagataaacatcaatgtcatttcctggctgtcttgggctcgatatcatcatagacaacatcatgtattttcgcttcatgcataaccaaggaggcaaattgtaaattac

SEQ ID NO: 172073 - DNA, 490 bp, Glycine max
  unsure (1)..(490): unsure at all n locations
atgaccccttganttgannctttgagccttgangcgcgatcttaagcgactgagcatgcactttctaagcgccatcttgtgacttgttttggcgatttcgtctgagctatcatgagtaaagaatcgttacccactcattaatacaactagcttattgctagcaacaacgagccatattcatagctctgatgctctcaatggtaattccttattatggcaatgcttcctccgatgatgagatggcttttgatctgacgatgaatccttctccaccccaaaaaggatcctgcagtgcacgattgagcaaagatgaccaaaaaaaagccatctgagtccatctttttacaaaggagtacactctttccaacggaaacgaccctctaaagagactgcattccctactaacaatgtgttgactgatactttagaccaaatctattggctaaggcacaaactgcatcttatcttattgcgtttaaccaatgcatcg

SEQ ID NO: 172074 - DNA, 350 bp, Glycine max
tgtaggattatggggtacccatcacatgtggtactatgtggcggtcgggcgatggtgcacaacaagttttccacatccacaaagcgtgcataaacccaccatcccctgttgcccacctccaactgagctcacgtcctcccacgtagcccatatcctcatttctctcaacaccgggtccccatcaatcctcccaagcttccacaacatccaagcaaaacaacattcaaacagcacaagctatcacagccaagcaaaacagggcaaaggcagaaaactctgctcaacacaccaaccaaaatcacagcttttctcacttaaagaccccaataacaattccttcgatccaattc

SEQ ID NO: 172075 - DNA, 379 bp, Glycine max
  unsure (1)..(379): unsure at all n locations
acctctgagacacctgcggcatgcagctttataaaaaaaaccttccatanatagtgcgcgaatcctgaatagaantactaactatgcatatgtcaacatacaatctcttcattaacagactcagacttctcgccacagncatcagtttttccttttgagtttgacttgtcgtctccagcttgtctgtcatagaacagttggcagaattccaaaatgaaagacaataatgtcatatatctgtattcctaacacattctctagcgagtgcaaattctcgtattacgatcatggtagtcaaactctagattctactttgactcagacaggagccatagaatcctaataatgtgaaatcatcactcacagcgtaagactctac

SEQ ID NO: 172076 - DNA, 354 bp, Glycine max
gttaatggtagttatagtatctattatgaaactttcttgttctaggtctatagcctttttgtatgagtaactggacatgtaggtacaataattggtaatgaagatatcgatagtattaggtggcctggttctgaatgtagatgactcaaggtaatcagattcttttcaagtctttagatttatgcacttacacatgaagacttgtcaattagaagctcaaacctaagattggtttgatctatatttgcttctgattctattttgcgctgtactacttttgagaatttcttaatagcttggttttaactttatctaggcacctactttgctgtagaatttagtgtttgctttggg

SEQ ID NO: 172077 - DNA, 482 bp, Glycine max
ttaagcacctgagctgcagctatgctgaaacattataatagacctctctagcagcaaaaccatctacaatagaataatcatgacctttcaagcaatagatacaatccaggttggaggaatcatccaaatctaggatggacaagtcctccacaacaacaacagtctatccctccttttcagaatgctgctggtccaagcaagccatatgttcctcctccaatgcagcaatagcagcaacaacaacaaagacaacaagcaactgaggcccctcctcaaccttccttaaaagagttagtgaggcaaatgaccatccagaatatgcaatttcagcaagagacaagagcctccattcaaagtctgacaaatcagatagggcagatggctacttagatgaatcaagctcaatcccaaaattctgacaaattgccttcacaaactgtgcagaatccaaaaaatgtgagtgccatcaccttgaggtctgg

SEQ ID NO: 172078 - DNA, 344 bp, Glycine max
tgtaactctcggcagtttcttagtcacttaaaaagatattactttagaaatatatcttcagaaacaagtcacttgaagaattgtgacttttggaaatgtatttttcgaaatcagtcactgggaatcgattaccattgacgtgtaattgattacacatcaacgtatgtgactcttcattctgaattttgaaaatcttaaagttttaaaacactagtaatcgattacagctttgtaaatcagtttgaaaaacaatgcgcgctactagtaatcgattactaccttctggtaatcgattaccagagagtaaaactctttggttgaagattttgtgaaaacgtcatgtg

SEQ ID NO: 172079 - DNA, 290 bp, Glycine max
  unsure (1)..(290): unsure at all n locations
agcttcaccagatgatgccgatcngaacattctcttaatcgacatcatttatttgtattcagggatngactagaatanacaatggccggtgtcggtcgttattatggccccgactgatatctttcagccgacattgcgcaatntcttttacaaacgctggccgataatgtttttttatttacggtagaggaagttttttgtttggtggtgcctaaaaaattacaacgtaggacggctaggtttttccgtgcgagctcaaccgagggttcgttccgaccgacactggcatg

SEQ ID NO: 172080 - DNA, 349 bp, Glycine max
  unsure (1)..(349): unsure at all n locations
tctatataagctgaaccattttatcaataaagacaagtttagttttatttataaaattagagnttatctcttttatcttagtgagagtgattctcctaaattcttgagtgattcaagaacaccctggctgtatcaaaagactttcacaacctttgtgtgttgccctcgctggaaagaaggaatcttttcttcctttcatcttcacccttggtctttcaaaccacaattcccgaaaattcacctctgcccaaaattatctcgtggccataactcccattttacgcactcaaattaagtgattcttgagcctaaattgaatttcgaaacgagacctttcacctcgctttgg

SEQ ID NO: 172081 - DNA, 407 bp, Glycine max
  unsure (1)..(407): unsure at all n locations
gcttgtgcagctgactatgctgcattgttttaatattactttgttaaatattatatacaagnatgaaatgagattattggtttgtatcacggcatcactattatgcatgagaatcaatttcccaaacaattacaagtgtattatggaacgaagaatgataagggaaattagttttaaaaggcggcaattagaagaattagctcgctaactgttagtgtgggggttctctattataaataggcatgtcaatactgacgcacgagtatgctttgtaagaacttggatatacaactgggattatccagtgtgagaggtgagcgctcctcttggtataactgcgtacatctgtttgtccttattgaacacaattctgacaatgcttttagacatctttctctttgactcta

SEQ ID NO: 172082 - DNA, 374 bp, Glycine max
  unsure (1)..(374): unsure at all n locations
ntaagttcaagttttgcaaacttctttccctgctttcattttaaattatacaagaaaaagagtcagtcatttttacaaaaagtatgcatgagcaacaaaaacataattaccttgttcagtatgttcctgaaatggtccataacagaatcctctgacaagacatgttcataggacttaaataactctattagttttttcatccctttttcagtaaacgataactgagagagacaataagatatatattcccattgtctaacatctgcagagaaataaaatcatgatcactattagcaataaactacaaacttctcttggttttgaattgatttcaagcccttcagaattacaagaatataactcatgctttaact

SEQ ID NO: 172083 - DNA, 303 bp, Glycine max
atctagtcaaggtctgagagaccatacaagtttcctagcgatttctaattatgtgggccattaagtctatcatatgttgacaatagccgagaagcccatgaatctctttcggggcggagtaggtgtccgccatcgcctttggcttggctaacaagcggtgaagttcttgactcccgttcaagggaagagcaaaccgatccatccacatggttgcctcttggtgtaaagagtcgatcacccttcctctagcctctttttccgcgtatacttgggcatactcgtccgcgatcctatgctcgtgag

SEQ ID NO: 172084 - DNA, 377 bp, Glycine max
tttcgattcaatctatgtacccgtagtggtccacattgtgtttcgtgtatttttattctcgttttgtttactttttataccccctcttgacgtgcttgagccattttacttaagtcatttctcgcttaacttaaaaataaaataaatttccaccgaacttttgaattgtattatccattaacttcggttaaaataaattccgaccgttcggtcgtgccgtaaccacgttggaaatcaaaaagaggtaaaaaataatataataatcaaaaagacatctttagtaaaataaagcgaaaaatcaatcgggcgttttctctttgggatttctcattcttaatcgaattgattaataactaaagtgaaactaaaggctaaaa

SEQ ID NO: 172085 - DNA, 343 bp, Glycine max
  unsure (1)..(343): unsure at all n locations
gatggcatcctactagcatcatacgatttagtgttgcaaaatagttatatcgcaatttatcatgaattctgggtgtcctaaggtgatatatgagtaatcttggtatgcaacactggaaagtagtaaaatgtattatgtgctaatttaatagaacaagaaatcgcatgttttcatatcgaaattctacaagtttagagatcattgngtattctaacttcattntttacagaatatcttaatagcaatcactctacataagaagccatcaggtgtttattgggacaatattttagcagtctcattaaggattaaaccaagtaaaagtttgttgacataaagtatt

SEQ ID NO: 172086 - DNA, 255 bp, Glycine max
cttgatgtgagaaagtgtggaagagtcagtcttcctacttttgtttgttgaccatagagcggtacctggagatatgtcgcgggggtcaggagaccttggggatgtcaggtggggtgctattgcccaaaaccaagcttgaccaatcccgacctaacccgggcatagtcagtcagtgagaacctgtgacgtacctaaacaggtgagctcttggcagtcaaccaataaaagaacaaagaccacaaagcaaggaggttt

SEQ ID NO: 172087 - DNA, 418 bp, Glycine max
gttatactgagaccacatgactgatgcgtaatcaaacatcttatgcacgcagtgtcactctaacaaggctttgcaacctactgctacttgatagaccatcgatcgtactgaactgtggcaatactgtctatagatggctatcgagacattactacatgatgatcgaaatgaccaccatttgacactcttccttctcttaacttcacagccagtaatacttgctactgcgaagagtgtatattcttgaagcctaacatactttaccactcttcttgagacatcaccactctaatccgtgcactcctagaatggccatcgcttcctctctcaccttaataaccactatcataatatatgagtcgtgaacctcaccttctctttgatgctatgatccatccctggtgcttcttccatcttg

SEQ ID NO: 172088 - DNA, 259 bp, Glycine max
tgaacgggatatatccgcaatgacatatatggcatggtattaaagacttggaactcattgaactgagatggtgctgggacatcacgctcaactatgtgcgattcacactgagagtacattgatttcatctacgctattatcatagtgctacgacatttacttagcacgtgatagatacatcctgagaggtgcgtagaaatgcgcgcatattaacgaacttctgtatcgtatgccaacggccattgtttcttagagacgc

SEQ ID NO: 172089 - DNA, 409 bp, Glycine max
  unsure (1)..(409): unsure at all n locations
agctntagatctaaattttcttccaaaatattgtttagaaaaataacacacaatctaagtgtaaatcacttaaaccatgttgtcttagaatcatgtttagtcatagtaattgtcacattatgttctaagtttgtgttgaatttttattttggttattgaattctagataaatttgttaagacaaagttctcaggcggttagtcctttgaaactttgtgaaggggaaacaaaagatatatcaggcggttagtcctttgaaatcttttgttttagggaaagggaagaatcaaaagaattctcaaactgtgtcattttgaattctttgacaagggagaagggagacacaaaagaattcaagcagttagtcctttgttcttttggaaaaggcgagaaagagacaaanagaatt

SEQ ID NO: 172090 - DNA, 343 bp, Glycine max
  unsure (1)..(343): unsure at all n locations
ttcataagtgaaattaggtgcatccatctctcttatagtcttctcacgaggnggaggttgagccatgttctcagtatgaaaattaatagccgaatgctcaaaatcagaatattcagaatcaccagcaacaaaatgctcaaaatgctcaggatgctcaaaatgctcaaaatgatcaagatgcacactatgcctaactaatctatganaggttctatctatttcaggatcaaagggttgtaaatcatctagatttcccctagtaatgcactatatgcaacaaataatgtgtttctcaacaagcacctaacaagggggtaaaactacaactatactcaaacaatat

SEQ ID NO: 172091 - DNA, 426 bp, Glycine max
  unsure (1)..(426): unsure at all n locations
cagatgatataccttcaggttggttcatataaacctcctcctctaaatcaccattaagaaaagctgttttcacatcccattgttgcaactcaaggtcaaaatgagcaactaatgccaagattatacgaagagaatctttcttagatactagagaaaaagtctctttgtaatctattccttccttttgagtaaatcccttagcaacaagtcttgccttatatctctcaatgttgcccaatgaatcccttttggtcttaaagacccatttacatccaatggcctttgccccattaggcaactctacaaggttccaaactttgttactctgcatagaattcatctcatccttcatggcatcataccatanattngactctttacaactcatggcttgatcaaaagtttcaggatcattttcagctccan

SEQ ID NO: 172092 - DNA, 372 bp, Glycine max
agcttcggttaatctcaaagctacaaaaacataacctcgttttaggattaccaagtatgtcatacaaagatgatttactttatgaggcatgtgaaaagggaaaaaaattaaaaaactcttttttcaagaaaaaacattgtttccacctcaagaccttacatattgatctgtttagtccaaccaaaagacatctatcaggggaaaaaaggtattgactcatcagagccgatgactactctaaatggacatgggttaacttcctagcctagaagaatgaatcttttagtgtcttctttaaattttgtaaaagaattcaaaatgaaaagaattatgcattaccttaatcaaaagtgatcatatgggagaatttga

SEQ ID NO: 172093 - DNA, 433 bp, Glycine max
  unsure (1)..(433): unsure at all n locations
agctgtgctttgtgccaaaattgaactgtactgngaatgccaaagttgccgatttaggaattcctccttaagattnaatgtgttttcccaaatgaattgatccttcctctggntactaatagggaaaacacacaaggataagtgtaagaagaggcttcatgagcaccgaanatcccctgaagaccttccaacccattgttctaagagattgcaatagtaaacccaaaactttagttctgtcgattccctagttcctttcccctcataatgggtggaggattnttctccaagaatttgaattcgtagaatatgattggtcatggtgacgtttctgttgtcgtccaagacatcatgggtaatgtcaaccccactcctaattgggtttgctactccgagctgtaacaccctgaaatattactaattataaattgat

SEQ ID NO: 172094 - DNA, 370 bp, Glycine max
tatagcttacttattatccacaaaaagcttcactccattactttccttgatttttaattcttgtaataatgtgtccaacgagacagcttggcaagcactcattgtagctggaacatacttagcttcacatgttgataaagccactatggattgcttcttagaactccatgatattggtgttgcaccatacatgaatatgtaacctatagtactctttctgtcatctctgtctcctccccaatccgcatcagtatatcccactaattcctctgagttgttgttgtctttatttggaaatagaattccagtattgatggtcccttttatgaaccttagaatcctcttagcagttaggagatgaggaattctg

SEQ ID NO: 172095 - DNA, 412 bp, Glycine max
  unsure (1)..(412): unsure at all n locations
gctttttgttcggattgcctaaaaatttgtttgtagttcggctaggtttcttcgtgcgagctcaaccgaagttgtatttcggccgacgccggcattttgtcggccaggataacattagcccacctcggcaaaaaaaaaacatgattcaccggtattgacagaaaaaaatgctggccttagtcggccaggaaagatgaccgatcgaggtctaaaaaagaagcatgaccggattacgccgatcgaacgtttcctaatagatatcctccaagtattattcagggattgaatggaaaaaacaatagccgacatcggtagttaaatagccgtgactggatattnttcagccaacattgcgcaacttctttcacaaacgctggccgataatatttctttacggtaaaggatgctttcg

SEQ ID NO: 172096 - DNA, 341 bp, Glycine max
  unsure (1)..(341): unsure at all n locations
tcggttntcaatttcgagtgtctcgatatattacgatacttaatcagacatccgagtaaaaagttattgtcgtttgaatttgcaacgaccatcaacattcaatttcgagcctctcgatatattacgcgactcaatcagacatcagagtaaaaagttattgtcgtttgaatttgcaacgaccatcaacattcaatttcgagcgtgtcgatatattacgcgactcaatcagacatcagagtaaaaagttattgtcgtttgaatttgcaacgaccatcaacattcaatttcgagcgtctcgatatatttcgcgactcaatcagacatccgagttaaaagttatt

SEQ ID NO: 172097 - DNA, 405 bp, Glycine max
  unsure (1)..(405): unsure at all n locations
agctnttgattctatggccatatacaaccagtctatcccctcgcgggcaatgattttgagcagaaaataccggacattagtgagctcatggattgaaccattacaagaggaggctgaacttggctatgagattgattatcattctaggtattgtttctatttcagcaatagatgcatttcttntattttgctgttggtgtttctgctattaatttattattattttatttgtttgcatatatgattgttatctattctcggctatggagaattgaaattattataatgatttgacttggcttttatttatttaatttatttctattggctttttttctcgaatgtacttatgctgtacaagagcagtgtgcataccaaatgcatgttattctagctcttgatcgt

SEQ ID NO: 172098 - DNA, 356 bp, Glycine max
  unsure (1)..(356): unsure at all n locations
ttgaggatcgccacaagaatngaacaattntttataatatcaaatggntcaaggaagaatcctaacaaagacaattctcacacttcaatgtcaaaggttcctttccattcacttcacaattgatttatacaaatcaattcttctgtatttgatagaaaataaaagaaaaataaaatctcaacattgtaagcataactaaaatacctttgtgattaagtaaggcataattaagtttgaggtctaaatctcaaaactagctctctcatacaattagattgtcctcatattagtcactatttgttgtaaaacctcttgggtctttttagcccttactcttgtcatggccctcttatgtc

SEQ ID NO: 172099 - DNA, 433 bp, Glycine max
  unsure (1)..(433): unsure at all n locations
agcttctagaaggagatcaacttgatgttctatgcttcttgaagggggcagtccatgaggaatctccttgngaaagacatctttaaattcctgcaataagggttgaacactatgagaaacataaatagttaactgattagaattatcactctctctctcttgngtatcactcttttcctcgggtgtatcactcttctttttcatattcctttgtggtgcctcactattttctttctcttgttctctcttttctctcattctgattgggtcatcacacactcttctaggggatagaggtttaagagtaaacgaggaagatttggctattcgtctgtagggctcttctttgttacggntcaacaaacgtttgcattgtgtagtccacgcgttcaaaaataagcgctgagattcgtccaattgatgatatacacca

SEQ ID NO: 172100 - DNA, 369 bp, Glycine max
ttcactcgcatgtccgattcaggcgcatagcgtatttatacgctagaaatctaacaaaggaagctctcgagaaattcaaatggtcataacttttcactcgcatgtccgattcaggcgcataacatatcgagacgcttgaaattgaacaactgattttctcgagaaattcaaatggtcataacttttaactcgcatgtccgattcaggcgcataacatatcgagacgctcgaaattgaacaacggatgttctcgagaaattcaaatggtcataacttttcactctcatgtgcgattcaggcgcataacttatcgagacgctcgaaattgaacaacggaagctctcgagatattcaaatagtcataacttt

SEQ ID NO: 172101 - DNA, 437 bp, Glycine max
  unsure (1)..(437): unsure at all n locations
tgtgggttctattaagaaggcaaatttgatcattcctacnntaggacgactgcagaaaactgggggccaaatganagaagggtgaagaaaagagnnggagaaacnnccatgcgtgttgactgccattctctaattacggccaagtttcnnccaccaaacccaaccaatgtcanttacttcagtcaataacaaaccttcctccttacccaccacccagttatccacaaaggtcatccctaaatcaaccacaaagcctgtctaccgcacttccaatgacgaagaccacctttagcacaaaccaaaaaaacaccaacaaaaaggaattttgcagcaaaaagcctgtagggttctccccaaattccgttgtcatatgctaaacttgatcccatatccactcaataattcaatggtagccataaccccaaccaaggtttctc

SEQ ID NO: 172102 - DNA, 369 bp, Glycine max
tcattaagaggcttcctctagaagcttcctcgtggcttctttgagaatctacatccttatctatccacccctctattaactaaattaacttccttaaaaataattacggatgaaaataacgcaacaaataatcaaacatcaaacataattactaataatatatagatatatatatatcagggtgttacaattatcactcagatcttgactagttaaactttctgaataaaatgagtttatcccgcgtttttactccaaagatcagtgcgaatcaaatcactcccacattttatctctagcatgcattcatatcatgcatcgcataagcatctcttcatggcatcataatgaacatattattcctgcatt

SEQ ID NO: 172103 - DNA, 459 bp, Glycine max
  unsure (1)..(459): unsure at all n locations
gtcacctgcggcatgcaagcttgtgttctanatatgttngaatttgttattctttaggtgtacatgtttgtaggttataatattgnttagaacttttcttagtatagatcaggtcatgtgggttaactagtgactcactaggttgacccatgactcaatggcctagcaccctgactgtgtcaatcaccatctgagtctaataacatggaacacatcctatctacaccactcaaatccctcatgatcaatatgattcattacaggcccaattactagctgtataatcatcctgctatagatgatgtttgatagcattgtacgaattgtagattgttcaagtcgaaagattactatctcataatggttgccatgagaaacaattatgacacttacataactattatgaagccttctcatagagagcttgccttttataaatgttactcctaatatntatac

SEQ ID NO: 172104 - DNA, 383 bp, Glycine max
  unsure (1)..(383): unsure at all n locations
gcttctatataagctgaaccattctatcaataaagacaagttgagttttattcatataattagagnttatctcttttatcttagtgagagtgattctcctaaattcttgagtgattcaagaacaccctggctgtatcaaaggactttcacaacctttgtgtgttgccctcgctggaaagagtgattctttccttcctttcatcttcacccttgttctttcaaaccacaattccagaaaattcacctctgcccagaattatctcgtggccataactcccattttacgcactcaaattaagtgattcttgagcctaaattgaatttcaaaacgagacctttcacctcgttttggaatcacctcatttggagccctgtagcttcag

SEQ ID NO: 172105 - DNA, 311 bp, Glycine max
tacttcgggcgtgtattatagagcaacaaggtagcttgatggattgtttgccattgattgagtttacttacaacaatagctaccaagccagtattggtatggctccttttgaagctttatatggacgaaagtgcaaaactcctaattgttggtatgatgatggagaagcagtacttcttggacctgaaatgctacaacagattaacgaacaagtgaagttgatttgagagaagataaaggcatctcacgataggcaggagagctattatgatagaaggaggaagccactatattctcaggaaggagaacat

SEQ ID NO: 172106 - DNA, 399 bp, Glycine max
gcactatcgaagacactatacaatgctcttgctatgaaggataaaattttgtgcaatacacgcgctattgtgcattcaataacgggctaaaatatgttttcgttctttctgtagaatattcaaagtttatttttagtctctgcaaaaaaaaaattatccatttttcatcattgtaaaattaaaatatgcgactttttgattaagaactaagtttgaacgaatataaatctacatggcactttttaatttaatttttaaaatacaattttgggaattaaaaaccacaacaaattatagaaaagaataagaaaaatataatttgtggcagttaaaaagcgcccaagtttaatgaaaattcaagagtcaccatggcttttaactaaacaccacccctccaat

SEQ ID NO: 172107 - DNA, 399 bp, Glycine max
  unsure (1)..(399): unsure at all n locations
agcttgagaaagtccttctgattttgtttatacttttctgacttgatggcatgagatgaaatgcaaagattggacctcttgttagttgttatcaatgaatagcttaaacacttgtgcttgagtgaaacagtagccgtgagattgtggtttgagctactttccttgatatttgtcttatgattaacttcatataactgtatagttcacattttgttctcctatatgtctagctgcatgttctgtgaaaacaagtgataggtacacatttcttcatctttctcatcatngcaatcaataaatttgatgcatacacctttgtacataaacactgcatgttntaccacttgaggacaagtgagttgttctcttttgcttgaggacaagcaaaactgtaaattt

SEQ ID NO: 172108 - DNA, 244 bp, Glycine max
tgtgctttgaaaattatgtgcatggaatatttttgagtttagaatgctgaactgggatcatccatttctattttctagtttagttattaattcatgaagctgcggtaaaactggtttaccttacagtttacattggaggttaaaaaaagataatgacatttatattatgggttatttaaggctcatttaaagttaagcatagggtttggttatgagcttctctctctctcccggatttagggag

SEQ ID NO: 172109 - DNA, 433 bp, Glycine max
  unsure (1)..(433): unsure at all n locations
agcttgatcttttagttttttatctntaatctttaatccctgaacgaactattcaagtttgtaattcgaactttaattatcttttaattcgttcctaaagatagatcgccaaatctgttgctaactgcacattaatctgttaaagatataacagatttatgtgtccagtattttcgggcaagatgtcctggacatcgtatccgacatcgtggatcctgcagcttcaattcttcatttgacattntatcttgccttgtgcattgtgcagcccaatctgattccttgacataacgttggacatcatgtgcagcaactctagctttccttcattatctaagtgcttatggtttaacaaaattttagccaatcttttaaaactcagtaaagctaagcactaacaatctccccctttggcanatttgtctaaacatac

SEQ ID NO: 172110 - DNA, 321 bp, Glycine max
tctcgatatacaatagggcttaatcggacatccgagttattagatattgtcgttagatttttctcagagcttccattttcaattacgagcgcctcgatattcaacgggactcaatcggacatccgagtcaaaagttattgtcggttgaatttacttagaagttctgttttcaatttcgagcgtctcgaaatattatagggctcaatcggacatccgaattaaaagttattgtcgtttgaatatacttagagcttttgtattcaattacgagcgtctcgatattctacaggacacaatcggacatccgagtcaaagatattg

SEQ ID NO: 172111 - DNA, 423 bp, Glycine max
  unsure (1)..(423): unsure at all n locations
cacttcttacaaaactttgattggaatgtctctattatgattgggttggtaagtcttgtcatcttctagttgagcttgagcacaaagctttgtgagtagtgaagcttctcaattatgacatgaaggtagctggtgagaaaaggaagctcgattagaatgaagtggatgaaattcgtttgaatgcatacganaatgccataatttacaaggaacagaccaagagatggcatgaccaactcattcactggaggcaattcatagaaggagacattgttctcctttataattctaggttgaaactatctcttggaaagttaaattcaaggtggcctggaccttttaaggttcagaaggtgtttcttaatggagctatggagattgaaagcccanaaaactagctcactcaccgttagccggcatacg

SEQ ID NO: 172112 - DNA, 95 bp, Glycine max
tctcccctaattttctataaataggggaggaagtgatgtatatataggttcagccccatagacactgctctctatttcgaattcgcttgcaaaaa

SEQ ID NO: 172113 - DNA, 445 bp, Glycine max
  unsure (1)..(445): unsure at all n locations
agcttatgctgcanatatttacaacagaccttcttatcctcagcagcagaatcaaccacagcagaacaattatgacctttccagcaacagatacaaccctggatggaggaatcaccctaacctcagatggtccagccctcagcaacaacagcagcctgctccttccttccaaaatgctgctggcccaagcagaccatacattcctccaccaatccaacaacaacaacaaccccagaaacagccaacagttgaggcccctccacaaccttccctcgaagaacttgtgaggcaaatgactatgcagaacatgcagtttcagcaagagaccagagcctccattcagagcttaaccaatcagatgggacaattagctactcaattgaatcaacaacagtcccagaattctgacaagctgccttctcaagctgtccaaaaccccaaaaat

SEQ ID NO: 172114 - DNA, 332 bp, Glycine max
  unsure (1)..(332): unsure at all n locations
tcgatacagatcaactgaattttgcactagtgtatattctccaaattgtagaagcgtaagaatctacaacaatatatcaaagcattacaaataatctcatagtcaaatattgcaatgcctttttccgttaaacagcagaaggaaagacacttgcagtctatattaatcatgttattgaagcttgcgaagtatagtgaattagtgattaggacttangagaatggcttcaactagaattacaactttattggtagagcatatatatgtatcttggcatagacagcaacatctggcactatccatctttagctatcaataagaaataatttatg

SEQ ID NO: 172115 - DNA, 434 bp, Glycine max
  unsure (1)..(434): unsure at all n locations
agctntacagcagattttagtaatgacccactatctctataataanataacttaatgccattaacctagggaattaanaaaaacttaatggctgagtgtaactgaaattgtggcaaccaaaagtcacccncaatagccaacaagtcagccaccatttggtctcccaaaaggctgatgcctaggttgccaattgggcccttattacaacttgaactaaacctaactaaagcccttttagttgattaacccaaaacatatttttggtcagccaactntacaaggattgggccattatttagacagactaaacactctaaaattgaaacaaagtggtgtcatttagtcctcctccattngggccatgatacaactcacaaccttggacttttctccttgaaacttgngcttgtattcaaatagtatggacagcactt

SEQ ID NO: 172116 - DNA, 374 bp, Glycine max
tagtgaaaaaattccttcgaataattttttatatttattatactcaattttaaaactttatttgagttctattcaacttgaccatcaacacattggtaaatattttacttaaatgggttaagtagatttttagtctttaaatttttcaaaatttaaattttaatccttgaataaaagcttaactagtcaagtctcaacttcttttttgttaaaattttagtctttcaacaaaagcttgaccagatccttaaactttttaaaaattttattttaaatttttaaataaaagtttaaatttcattattttatttatttatttatttaataagattttagaaattaaaaattaaaattttaaaaaccttgatgaatac

SEQ ID NO: 172117 - DNA, 239 bp, Glycine max
acacgatgcttaaccactcaagacagcatcaaaccaataacagcgcttaacccccatatattgtagaatcaacataccttaaccatccagagtagaagcttaacatggtgcttaaccacttagactgaagcaaaacaatatttgaatgcttacccaccataaaggcagaagcaacacaccaatgcttaaccacaggcagaaatgtgacatccatacttaaccaccatggacagaagcta

SEQ ID NO: 172118 - DNA, 293 bp, Glycine max
tgttccgaagagcttacggaaatacctacccttttatataattcgggaaccccggaagaactcgcgaacttcttccggaagatccatagctacactacttcatataaaaagcggccatgttaatcttgaaccataagagggtcaaagcttaccatgtaccccctggggcaaaaccttattctagaccaggttcacctttttctatggtaaaaattcagtcgttccacaaaagcctgggcagaaccttaaaacttttaaaacatttatcattggaatgttaaacaaaacgttaa

SEQ ID NO: 172119 - DNA, 463 bp, Glycine max
  unsure (1)..(463): unsure at all n locations
ctacttgattagtcttaattattgataatttagaaaataataatttatattcagtttagagctagagatagaagaaactagatggaaagggataaataattaacaatatcaactatttttgataaatataaaacaaatgtaatttgaaatagttcagaaagaagaaaaagttgctaaagaaaaaagatttcaggagcagaagcagagataagacaaaagggacaattgtgtgaacggtacagctaacacatagtttgaccaagttttaataatttccaacaactataatcgacgtagttaaattacttgaactccataaaaccacagtcatttgaaaaaaattattacaaggaaggaaaacaacttacttggggtaaacctaanacaaatgtgcttctagagaacaaaatgtgctcttgaatagagtcttccatgtgaaaacactctactttttgtccactat

SEQ ID NO: 172120 - DNA, 277 bp, Glycine max
accttcttcgaacgaaaattacaacatcctgcttcgttgtttcctttgctgccactaccacctccttcaatgagcgaaaattctcaaaattctcctcatttcatatcctatttgccactccctccaccaccagtaacttataatcaatccccttctaccgaaaattctcagagatctcaaacttttcttcaatgtcacaaaacacctctatcgcatttcataagcctcccaatagttatattcgagcacaaactccttcatatgaggaagttgatat

SEQ ID NO: 172121 - DNA, 458 bp, Glycine max
  unsure (1)..(458): unsure at all n locations
tggagaggatgcttcatggaggaaaagatagagggagagaatgagtggatgaaataagtcaagatgaaagaaagagaataagagaggaagttcatacttagcccatgggcccgaaatctaccctaaggctcatgagaaccctagggccttgtcttgcatctttggtccaatcttcttggagtcttctatccaatgcccttggggggtaggattgcatcacgtagttcttacaaaagcggtaaagttacacgttgattttatgcttttgaatagtccatgttaaccgataaaagcaaagaggaccgtttaaggcgttggaccttataacggtttttagtgattgtttgcggacaaagcttgatttgtgagttgattntagctgtagtttcactttggttattagtcaattcaataaaggaaacttccaaaaaaaaaacctccattggattttttgatga

SEQ ID NO: 172122 - DNA, 403 bp, Glycine max
agcttagcaagcaacaaaatgctcattttatttgtatcccaatcaaaacccagttgcagatatctctgtaaaaggccaagagaatgcttgatcaaaatcatgaatatctagtaatatatcaatatttaaaggaaacagcatatagtaatagacctaaagaaaattgaagggcgaagaagcaaactaccttagaagcaatggtaatagaagtaggaaaatcaaatataatcatttaggtagcatttggtgaggctgtacaaaaggttcatagattcattaattatgatcttttgaatgtttaatttgtaagtaaagctttagtggccacttgctcctatagatcacaaaagtagtggtagtagaagaggagagggcaacaaaagcagcagaagtaccagctcct

SEQ ID NO: 172123 - DNA, 438 bp, Glycine max
tcagtgaatagataatataattactaatctacaatgcacatgttttaaataccttatattaactaaagaggtgattgtacaaagttaatttttgttttatcccatgtttaaggtgtgcttgagagagggagttcctttgggaaccattttgttgggagttcacttctactcttgggggctcacttagctgtttctttacctatccaggtttactttggtatgcttgatgctctattggctgctgaggagcttcctgaagagtacagggaccgctatcaggtattacttgtctgttaaatatttatttgttcacagaatttgtaaatttaatctaaaaatgagaaattaaagtgtgttatatgttgtgttttctaagcattcgaggaatcttgtttgccctcgcctacctagctatttcttatgatttttcttatttat

SEQ ID NO: 172124 - DNA, 403 bp, Glycine max
  unsure (1)..(403): unsure at all n locations
agcttaacaaccataaattcctattntacatttaacaactatcaaaatttgactatggttcaattatacattntatacgcgtctttatttcacttttacaaattgagctcagatccattatgataactattacataggcccagaaaaaatggggatcatttaagaaaaagggagataaaagaaaataatagcaaatcgtgtatggtacctaatagagcttcttccttcatcaaactcttcttccatatacaaattattctcaaaattatgtcaccaaaaaattcatttccttcttttctctttcaaatcaatttttaaaattatttaatgtaaagaaaaaatgggcatcattttggaaaaaagggtgagaaaagaacataataacaaggaaattcatgttatg

SEQ ID NO: 172125 - DNA, 464 bp, Glycine max
  unsure (1)..(464): unsure at all n locations
ntgtgaccacccaacatatacgctatcacattgcacattactcttgactggttccaacaataattcaaccaatttttcatcctccagtactgcaattctttgcatggtacatattgatgagttaattagaataatggtggaaaaggagtcttttgacattatattactactttcttcaagtaacaactgttctctatctgccagcttcaccttctcttttgcagtgtcaccattttcagatacatttgattccattttattgttagagacaatggaaaggaatgaatgtagccagggttcctcaacaggctggtaattctcagaaagaacattagtagactggaaatccttgtcgttcgcaatcgccatgtcatcattgttgtaaagtaattgatcttccaaaccgagtgactcanactntatgacatcattntcaaggagactctcaatccttccatcatctg

SEQ ID NO: 172126 - DNA, 396 bp, Glycine max
agcttgatgtcaacaacaaccaccttgaagggaatcttctaaatgaattttctaatcttaacaatctgacccttatggaccttaggaataataggttcactggagggttgacccttatgccaccactacacatggctttgctctctggttgatgttttgagcaaacaccactgaagcaaatagaaacaaaaaaaaaaacaaaacaagacagaacatgagcacccttctgaaaccaaggtacaagagtggagccaatttgttcctccaagatctaaagggccaggttgctagctagcttcaatcaaaattatgaccaggatatataatactaatacagattgggtctgagcctaactggcaaagttatgaatcaatcagggaagagagagagacaca

SEQ ID NO: 172127 - DNA, 437 bp, Glycine max
tatttaagaggggaattatgcaaggttgtaaacttgtaatgtattgtgattataatttgtactattataagttgtaagcttttggagaagcaaagttgttgaagttatggaaggtaatggtagaaggaggaggcgccacttcagcagaatccatgcattctcttgtggaaaagcttcattcaaaggggagcattcactcataggcggtcctggattctcaaggatagtgtactgcaacgaagcggaacgcggtgaggggagtcttgtgagctatggtgacaattatgtgagtactactaagtatacagtggccactttccttcccaagtccttgtttgagcaattcaggagggttgccaatttttacttccttatctgtgcaattctgtctttattcccggtttctccttactcggctgtcagcaatgttgttcctc

SEQ ID NO: 172128 - DNA, 334 bp, Glycine max
gcatgtatgaaaatgtacaggtaaaggtgacttaaaggaattcattggtactacctataccaacaatgtgcatatactttttcgtagcccatcacttaagaacttcatagttaagtgtgtttggcataaaacaattgaggattaggtgaccttttgagaaattcctcgagaaatgtgtgagtaagaacaaagtatactaaaaattctttgctagtttatgaggacaatcaacaattccaaaagcaatcatgcgttacaatagtatcctagacatttatatttcttttgctcaatagtcaggaggttatgagagagtacaatttgaaaagaagaa

SEQ ID NO: 172129 - DNA, 459 bp, Glycine max
tagagcctcgggtagttcattaaatatttgtttcatttcatccaagctcatattgtccaaaacggagggtctaggggcaaccctcacaatttcaccaccttttggttcctgaactcgtgcgtcggctttaatgactagttctgaattagagtttgcaccacattttattataaatggtgaggtcgagccagtattaaattggagtacattccactgtgtaacgtcagtttcagatccagagcccagatctgttgatggcatgcgatcatgagatatatcttgaatggggtcatcttcttcaggaattgactgtatcataacaaaataaaggattcaggcatcaaagaaaatcaatccaaattaattttcatcagttgagtcctttagcatattataaaattgttaccaacttggacaacggatgaaagaagttaagcatacaatacacaatacttcgca

SEQ ID NO: 172130 - DNA, 348 bp, Glycine max
attatcgatgtttctatcacaatccagtgattggtgacatctccatgtgtgtgtacaatgtgattatggtttcatttctaggattcatttggaatatttgttggtgattatgaataagtgaccaatcttttttttatttaaaatttttgtctcctagtcaatcgactattaatcttttgatgtgctgattatcttccaatcatgccttgttaaactgcttgataacctatcatgtttttacttctgttatgaatagagagagactttgcccttgccaatcacgttaaggtgtttcgagaggaaatacttgagtaggcattatccttgctacttgtaaatgaaagtcaa

SEQ ID NO: 172131 - DNA, 460 bp, Glycine max
  unsure (1)..(460): unsure at all n locations
ngcacgtattgcaaaggcttggaatgggaaacgtattggtgcactgtagtagaggtgacatttttgggcggaaaattgagttaaccacaacacgacacgtaggcatctaggatcatgtttgtataatgatatatatatatatatatatatatatatatatatatatatatatatatatatatatatatataaactagagggatgaatatggattaaagagaccctgattataaatttgtgaaaacaacttacgtggaaattgatagttttgaatagtatttagattttagaagttaactgcacacgtcctgatcttgaaataaaaaaaaatcattgcgcgagttgataataaaaaattacacactcctctaactgagaaaaataataatataactgcatataaaagtaaaatatatgttgatggagaaataagattagaatatttttctaattaaagtaa

SEQ ID NO: 172132 - DNA, 393 bp, Glycine max
agcttcttctgcttccgtttttgttttctctgccaattcaaattcctcctttctcgggaaaatcttcacgctgcgttttcccgggatttctcgttccccgttcccgctaatcgtttcagagatcgaaaccaccgtttcaatctctgctcaattccctcgcctttccgtttccccgtgagttcgcaaaaggtaaacagaagaaaaaaaaaacaacatcaatccacacataccttcgttcattcattctcttacgacttcattgttcaatttagggtttcaaaacttccttctgcggttctcgtgcgttgcaggatccaaaacacgtgacaataacaggatatattacgaatttgcttaagcgtcgtgaggaattgcgcgatttttggcaacggc

SEQ ID NO: 172133 - DNA, 397 bp, Glycine max
actcagctgggaaattatgttctaatatgactatctttgatctaagctattataaagcttgttgcaagctcgtaatttataattgaaagttattaacttgacttattgaaatataaatgtttgaataaaatatatactggaataattgatttaaataaaataattaaatcttataaacatattcatatgatattcttatataatttttaacttttttatgtcaattagtaaaatataatacacatatcatctatcgataacaatatcttgatgtaatgctgaaataataaaataaatatcgttaatattataatggataaacattgtaatataaaaatatccgcataatattaatataataaatcacacatacattattatctatcattattaatat

SEQ ID NO: 172134 - DNA, 388 bp, Glycine max
  unsure (1)..(388): unsure at all n locations
agcttgtggagaatgaagttagggtcatttccaggcatgtcggatgtgctccaagcgaacaattgacattgctcaagagcacttgttctactttttttcgtattgcatccttcatttgcttaccgattttggtgcattcatgtgactccgttctgatttggaaattctcaacaatgtcttcaattgggggtggtcatcgatcttcagaatctaatcgggggttaagatcctttaatgagttgacaacaacattgatattggagattggcgccttggtgtntttattgtctctcactatattgtatggttcaatcttgcaactctttacatagcattcacaagcatccgtctgatcaactttgacaatgacaatttcccttgtggatga

SEQ ID NO: 172135 - DNA, 459 bp, Glycine max
tgactcgattaataaatacagtctaacttgaagtgtgagcttgtttattctactacaaagagttcaattgatcaatcaacatgttgaatttaaacaatacatgaaaagctaagtttagttttattatatccctagctgtaacaattatcatgtgattgaacatcatcaatcttccatcaaaacaaagaaccaacttatttcatggacctaaactaaacttccctttaaatttcatatgagtaatacttatccctttcatttcgaaccaaaagagacttcaattaccacactaactactcaaacacgaaacataggggaaaaagaatttaggctgatttgtttcctgcatatttccctaaatagaatgattctaattctataaacttatttactgtacaattatcattcaaatacaacacatgttattcagtccaacacacgttattcataaactttgat

SEQ ID NO: 172136 - DNA, 385 bp, Glycine max
  unsure (1)..(385): unsure at all n locations
ttggcattttcctactaatcatgaggaagaagagcagaatgatgctgcaggatcaagtggagtcatagccattgaacaacaacaacagcaacagcagcagcagcagcaacaacaacaacaacaacaacaacaacaacaacatcaacagcaacaatcagagtcttgtggttacaactttcagctccaaaggcaattgggagccttcatttcaacacatgttgacactgaccacatcaatttccaaaccaacaacaacaactnctcagaagatctggcctatccttcattggtttcaaagacacccttgccttaattaatggcaaacaccacaaaaagggtggaataaaacaccttctttcaatggacaaccaattccaccaaaccc

SEQ ID NO: 172137 - DNA, 436 bp, Glycine max
tcacttaagcatgacaatgggacacagaaggacgagaacatgtttaatgttttccatcccaaaaaaatatatagtaaatttgattagattgtcatacccaatattttttaaaaaataatgcaaagaacacattactttgaatacatattttctattaattacaatttttcaaaaaacaatttttaaatgtcaaatctttcttaagagtctctcttttaatcttattagttttcattaaattttaactaaaacatatgttaagaaatatattaaaaatgtgttagtaacattttttttctcattatctttcatccttccctgtatagtccaattttacagtatttttgtttcgatagattttgaatagagaaaagtgtgagagtgaatgaatttatttattgtatgaaaaaagtggaaaatgagagaagagaaaaat

SEQ ID NO: 172138 - DNA, 379 bp, Glycine max
atcagcttggtacatgtaaaattattccccaccaaaaaaaactaagaattgagctccgcttaaaaagacaataggtggaatggcaaatcagtgatcttgatgaaatcggggagcattgctagaaagagagaattggaatattcatcaacctaagaaaagcaagttctgactctattaaaagcattgtatcgaaacttcagaccaatattttgaagatgactcagggatctttttgatatcggggaatattgctaggaagagagagctcgagtatccatcagcctaagaaaattcaaagcaagttcagatcttcttaaaaccaagatttggaagcttcaaacaaatattagtgaatacccaaaattattttaaacttgaa

SEQ ID NO: 172139 - DNA, 409 bp, Glycine max
  unsure (1)..(409): unsure at all n locations
tccatcaagtggtaatcaaagcacaagagcttcaagtaggtgctccttaaacctccattaattntttttctttaccttctcttccattgatgattcttcatttttctccatgtatctcctcacatttcttgttctaaatgttgttaacatgattctttagagtttccaccgattaaacttgctatagaagctagatttgattttctatggttcaaatttattgttcttgttcttgaaccatgaattgtgttgagtttaggttcctttgagttttgtcttgttatttttttttggctgaaacctaaaccataaatttcttacaaaaatattaaagtagaagaaaacctcanaaatctagagtgacttgttcacctattgtagttttgtcatagaagtcatgtctagtcat

SEQ ID NO: 172140 - DNA, 378 bp, Glycine max
agcttgccacccagctcgtccaggcgagcatggttgcttcctccagaagcaacagccttctggaggaatcttctggagggcccaagtgggcctggttgctatttgcactcccatttttactaagtacaccccctgccttttttttggtgattcttttttcgtaaagttacggaaacttacgaatttcgtaacgatacttgttttctttccgtaatgttacggaaccttgcggattacataatcatcccctttttgacttacggaatgttacggaacctcactaattgtgcaacgatgcttccatttgatttctggtgtgtcacggaaccttacggattgtgcaatcaatatttcttttgttttccggcatgtcccgga

SEQ ID NO: 172141 - DNA, 345 bp, Glycine max
cgcctcacagaggtccaggaaggacaaggcagcacaaggaactatttccgctccggagtatgatagtcaccgctttatgagcgcggtacaccagcagcgcttcgaagccatcaaggggtggtcgtttctccgggagcgacgcgtccagctcagggacgacgagtatactgatttccatgaggaaatatggcgccggcggtgggcaccactggttactcccatggccaagtttgatccagaaatagtccttgagttttatgccaatgcttggccaacagaggagggcgtgcgtgacatgagatcctgagttaggggtcagtggatcccgttcgatgccgacgctat

SEQ ID NO: 172142 - DNA, 267 bp, Glycine max
acttttatgctgaacaaatgatggcttgaatgtgaaaagcatgttgaaatgagaaactttgaaaattttaaaattggaaaaatttcagaaaatggtttctttagacatgaaggctttctttttaaaaaaaacaaattgtgtgtgcctaaatgttctactaaaaatttgcttgtttgtgaagcacatgaggaggtttaatggggcattttggggtccaaaagactctataaacattacaagaacagttttattggcctcatatgaaaa

SEQ ID NO: 172143 - DNA, 464 bp, Glycine max
  unsure (1)..(464): unsure at all n locations
ntgaagatattcaaatgaaaataccttntaactcggatatttgagtgagtcccataatgtattgagacactcgaaatagaatacagaagctgtaagcaaattctaacgtcaataactttttactcgaatgtccgaatgagtcacgtaatatatcgagacactcgaaattcaatacagaatctctgagcaaattctaacgacaataacttttaactcagatgtctgatcgagtcccaaaatatatacagacgctcgaaattgaatacagaagctctgagcaaattcaaacgatgataagttttaacttagatgtccgatcgagtcccacaatatatcaagatgctagaaattgaatacagaagctgtgagcaaattctaatgacaataattttttacttggatgtccaattgagtcgtgtaatatttcgagacgctcganattgaatagagaagctctgaggaaa

SEQ ID NO: 172144 - DNA, 408 bp, Glycine max
  unsure (1)..(408): unsure at all n locations
agcttgtaatatcacatcggcgtgagtcattgcattcccatctaatgtcttttggtttcaatgctattcttaactcaccaaatgaactcttggaaattaattttttgtatgtatgtttaccaattttcctagatttaaaaatgtgttttttcttgagtctgataaattataaggtgttttacctgaatgagttacggaatttttgtgacaatcctatatatgaagaagcatgtgaacaacatgaacatcgctgataaaaactaagtttctccttttctcattttgtttatcttctttctatgataacattgatgtcttttttaatgaatttgctctgataaacaaaacatatttttgaaaaacagagttaanagaaacttcttttgcgcggatcgtatcacanacttt

SEQ ID NO: 172145 - DNA, 461 bp, Glycine max
  unsure (1)..(461): unsure at all n locations
aaactcagcttctatccaggcaattcttggtgttgaagctccttcttccttggcttattccctagtggatggtgcctcccctctcctcttctcctttgccttccgccgcatctccatggtgtaaaatcaccattgaaggacctcattgaagctcaaagatccagcctccatggaagctccacaagcaagcttccatcaagtggtaatcaaagcacaagagcttcaagtaggtgctccttaaacctccattaattgttttgctttaccttttcttgcattggtgtttcttcatttttctccatgtatctcctcacatgtcttgtgataaattttgttaacatgattctttagagtttccaccgattaaacttgctataaaagctagatttgattntctatggttcaaatttcttgttcttgttcttgaaccatgaattgtgttgagtttaagttccttttag

SEQ ID NO: 172146 - DNA, 398 bp, Glycine max
  unsure (1)..(398): unsure at all n locations
agcttagccagttgcccatacgtgcttattctacacatgtgcacttagcctgcacttgtgcgcttactccaaatacgaaatattttanaacatggaattctttgggcttatcgcagcgtgcaagcttagcgcaacaaaacaacatgtgcttgctaagcgaacacatgcacattgagcgcatagcataatcagacaacaaacaacaacaaacatttgcacttaaatcaactaacacaaatattcatagagtcatgagcataaccaaaatcaacctaacatcaacacacaaaccaactaacacaattattaaacaagttacagaaaagaggagaaagacacaaaccaactaacacaattattaaacaagttacaaaaaagaggagaaaaagggtataaat

SEQ ID NO: 172147 - DNA, 453 bp, Glycine max
  unsure (1)..(453): unsure at all n locations
acattaatgtttgtgtttattggaggaggttgtatgccattnttgttttaagagtagcattccttggtaaaactaactttccaaatgtttgccttcgcacgaaatggccccgaggaagcttgcctcaaagaggtccaggaaggataaggcggccgaagggactatttccgctcctgagtatgacagtcaccgctttaggagcgctgtacactatcagcgcttctaggccatcaagggatggtcgtttctccgggagcgacgcgtccagctcaaggacgacgagtatactgatttctaggacgagatatggcgccggcggtggacatcactggttacccccatggccaagttcgatccagaaatagtccttgatgtttatgccaatgcttggccaacagaggaatgtgtgcgtgacatgaggtcctgtgtaaggggtcagaggatctcgtttga

SEQ ID NO: 172148 - DNA, 405 bp, Glycine max
agcttatgctgcaaacatttacaatagatctcctcaacctcagcagcaaaatcaaccatagcaaaaaaattatgacctctccagcaacagatacaaccctggatggaggaatcaccctaatctcagatggtctagccctcaacaacaacaacagcagcctgctccttccttccaaaatgttgctggcccaagcagaccatacattcctccaccaatccaacaacaacaacagccccagaaacaacaaacagttgacgctcctccgcaaccttccctcgaagaacttgtgaggcaaatgactatgcagaacatgcagtttcaacaagagaccagagcctccattcagagcttaactaatcagatgggacaattggctacacaattaaatcaacaacagtccctgaa

SEQ ID NO: 172149 - DNA, 465 bp, Glycine max
  unsure (1)..(465): unsure at all n locations
tctagactntatacaagaatgaagctctgacaccacttgttagactagtgtcctcagatatcttaagaagggggttgaattaagatactacaaactatttccccaattaaaattctatttcaatttcaatgcaagttacaagttcccttgaaaatgaactcttaaataatgattcaaatagaacaatatgaatataaatgtaaagcaataacaaataaaagagtttaagggaagagaaagtgcaaacttagatttatactggtttggtcacacccttgtgcctacgtccagtccccaagcaaccggcttgagagtttcaatatcttgtaaaattcctttacaatttctgaacacacaaggacaatacttcctttgtgttcagatttctttacaacaagagaccctcggtctctcaatcccctttgagaatttagaaagaagagaagaataaatctctcttgaaag

SEQ ID NO: 172150 - DNA, 300 bp, Glycine max
  unsure (1)..(300): unsure at all n locations
agctntgataccaattgagaagaacatcttcaaaatcacattacaagttagttttgtaattggccttattataaacactagaccagaatcccatgctttcaatgtaggacccaagtctcatacctagcaattggatcctacaagagttgcttgattcattattgccgctattgtcactgtagaagcactttctcaccagtcatgccattacagtgtttctaaaggtagccatataatgcttcattntgctattgatacttgtttttattatattgactcatgatgtttacatttaaatgg

SEQ ID NO: 172151 - DNA, 459 bp, Glycine max
  unsure (1)..(459): unsure at all n locations
ntaagaatgaatttttatgacatcttttgataaatatgtataatactaacctcatttcagtcatcaatatatgtccaatacacacaagtatgcattttaattagtagattgagttaatgtcattggcataactatccaatgtgaatgactttatgtctaattgattgtagtactaggtggcataacctcgttagtgctaggtatttcattgacaaataaatagtcctaaggagtagtatgtatgtatgtttttcttttcttaaaattaaaaaataggtggatgctgacttacttctcatagtattaatcaaatacggngctgctcatcacgacccgttccattgcaaagaggctaagaaggaaacagaacatggcccttgcaaaagaacttatgggtttttcctcatttgtttctgcttcctacaaagtgtttctgcacaacaagcatggcaccttctg

SEQ ID NO: 172152 - DNA, 390 bp, Glycine max
agcttcaggatgttcaattgcttcagattgttgcacagaagggcaaaggtctgtgtggtggtcgacagacgagcataaaccacagagtctggcgacaggtgcagatttttgattcatggccaggtgggttaccaggttaaccaaggcatctagtttacctttaagctttttagtctcagctgatgaagatgaatttgtggctactttatgcactcctctaatgacaatagcatcacttctggcactaaattgctgggagtttgaagctgtcttctcaattaaatttctggcttcagcaggggtcatgtctcgaagggctccaccactggcagcatctatcatacttctctccatgttgctgagtccttcataaaaatattggatgagaag

SEQ ID NO: 172153 - DNA, 457 bp, Glycine max
  unsure (1)..(457): unsure at all n locations
ctgtccgcanaaatcactataaaaccgttttaaggttctacgccttaaacgggcctctgtgcttttatcggttaacatggaccgttcaaaagcataaaatcaacccataactttaccgcttttgcaagaactacgtaggtctgagttcctcatcgcaattgatgatacataggagcaaaagccccacttttgtcgaccaacccaagagatcgttaatggtccaacgccttaacgtttctctcctttcatattcaaaagatcgtttaatggtccaacgccttatatgacctttgtttggttaaaattgatcttgcggaaaaatatcaaaacaacttaaccaatgtttagttctgaaagaactacgtaggtctgatttcctcatcgcaattgaggatacgtaggagcaagggaaacacccttgtcgaccacaccaaaattaanaaacataataagcata

SEQ ID NO: 172154 - DNA, 400 bp, Glycine max
  unsure (1)..(400): unsure at all n locations
agctttgcggatttggtcttcgccagtgaaaggatcgatgtgggntccgaaagaggcaaatttgatcatcctactaggacgactgaaaaaactggggcaaataaagagggtgaggataagggagaaacccatgttgtgactgccattcctgtacgaccaagtttcccaccaacccaacaatatctttactcagccaataacaaaccttctccttacccaccacccaggtatccacaaaggccatccctaaatctaccacaaagtctgtctaccgcacttccaatgacgaacaccacctttagcacaaacccaaaaacaccaaccaagaagtgaattttgcagcgagaaagcctgtagaaatcaccccaattccagtgtcctatgctgacttgctcccata

SEQ ID NO: 172155 - DNA, 460 bp, Glycine max
  unsure (1)..(460): unsure at all n locations
tgtcaaacgcaaggtcagcccttggtgagccccttttttgctatgtttcatctctataggcacttaaggtatgcatgatttacccattgacaatattttatattcctaatttttatcggtgcagaaatacaagtctacaggaacatcaaaaacctaaggtccgcccttggtacaaaaagccaaggtctacctttgttattgaaacccaaggtccaaccttggtacaaaatcccaaggtccaccctgngtacggactcctacaaaacccatggtttccccttggttagctcacttcttaagaaccacgatgaccgcagtcaaaggtccaggttccacatgatgaactgccactagactagtcgacaagacctttaatcaggtgggaagtcacattaactcctcacaagcatcanaggagaagctctacaaagcanaaggaagcatcatcacatgagtgaaa

SEQ ID NO: 172156 - DNA, 389 bp, Glycine max
agctttgaaaaatgttgtttttcaccttctcgctaagtcaatctgttggcttagtgagcgtccactaagtgcaacactcatgggctaagcgcgaggaagactctggaagaagatgagctatacaggttcgctaagcacaccgcttcatctcactaagcgcaccgcttcaattcatccgctaagcgagaaaggcacgcactaagccaaaattcactaatgtgcgctaagcggtccataattgtgctaagcgcacgagcacgaacaaggccacctatttaagcttgaaatcatattttagagggagagtttggactaggattcagagctttgcatgtctagagtttctagagagagaggggtccaagttccagagagttttgagagatttt

SEQ ID NO: 172157 - DNA, 458 bp, Glycine max
ctgtggagaaaactaaaagagaactcgggaagaataatatagcttatgacacaagaggtcttgtggcaataaatacaccaattgatgaaatggatttatctacatctaaggatgctaaagttgaggcagtgagcgatagctatattgggactaacaaacaaaccatgtcttaatgaatattatcacatggaattgtaagggaacaaactctaaaggatttagttctcttataaaggacttatctaaagagtatgagtatgctctatttttccttttgaaaatgcatgcaactagtgtgtaagctgaccaaatttttccgcgaatggatttcgatggcaagttctttgtagatgctcaaggtcaatcatgggggatatggtgtatgtggaaaacacatatgtggcaggtagaagttcttcaaagtggagaccaatatgtgcacatgagagtggcatgga

SEQ ID NO: 172158 - DNA, 388 bp, Glycine max
agctttgatgcaacatttggagaggttaatgaaacaacgagatgatgcgctccatgagaggttggatcaaatggagaatagagatcataatgaagaagaaaggaggagaagagggaatgatggtgttcctagacaaaaccgaattgatggtattaaactcaacattcctccatttaaaggaaaaaatgatccggaggcctacttggagtgggagatgaaaatagagcatgttttctcatgcaacaactatgaagaggaccagaaggtgaagcttgccgccacagagttttccgattatgctcttgtgtggtggaacaagctacaaaaggagagagcaagaaatgaagagccaatggttgatacatggacggagatgtaaaagatcatg

SEQ ID NO: 172159 - DNA, 454 bp, Glycine max
ctgacatgagtcatcaagagattataaatatgtgaccatggaatgagtatcaataatcaattatcaatcatcaatcatcaatcatctttgaattgtctatctttcaatcttttttcaacatcatctctcaaacatctttcaatcaatctttcaatatctttctacagaattttctaattcatttctcttcatctttctaaaagttttttatcaacactttctcttccaagaaaagttctttgttcaaaaacttgtgttattaatctttttcattatcttctccctttaccaaaagaacgaaggactaatcgcctgaattcttttgtgtctctcttctcccttacaaaagatttaaaggactaaccgcctgagaattcttttgattcttcccttccccttaagcaaaagatttcaaaggactaaccgtctgagatatctattggttcccctttac

SEQ ID NO: 172160 - DNA, 290 bp, Glycine max
agcttctatcttcgagtattcaattcattataactgctacatagtattgaacagttttgaacgaattgcacgaaaacaggttgcggctgttttatagaataactcaatttcaagttggtgtttttacggaaaacatgttgtgccatttagaattttccttactttaatacagttacatattgatctgttgggtgtgcagttggcctggagccgtggatttatagtttcatgtgggatctgattctcaaatttcgattgacttggtaagcaaaggttattccaaaacgcat

SEQ ID NO: 172161 - DNA, 448 bp, Glycine max
tgcttgcctgagtttgtctaagtgctattgccacatcatattctgttatgtctttgtgttgagttcagtcattcaacaacaaaacccttttccgacgaggtgaggtccgctacgtggatcatatgatgccatttggctcggttaaagaccatattgtttaccatgagacccatctcaataacttccccaatgtccttgttggggtaaaattgcatcattgctaattgtagcttctcattattagcttaaattatgataggtttttttttgctcagctaaattatgataggttgactatcctgaagtctccagctggtctgagtttatcttgatatcacaatcacgatattttgcttgtgcagttcagatgagatggcctcttcacataatgttgaattggaggctgctaagtttctgcataaacttattcaagattctaaagatgaac

SEQ ID NO: 172162 - DNA, 387 bp, Glycine max
agcttctatagaaggttcgttcctaatttctctacaatcgcatcacctctcaatgagctggtgaagaagaatgtggcatttacctggggggaaaaacaagagcaagcctttgctttgctcaagaaaagcttactaaggcacctgttctagctcttcctgacttttctaaaacttttgagctagaatgtgatgcctctggagtgggagttggagctgtattgttcaaggtgggcaccctattgcttattttagtgaaaaacttcatagtgccaccctcaactaccccacctatgataaagagctttatgccttaataagagccctccaaacttgggaacattaccttgtttccaaggaatttgtcattcatagtgatcatcaatcact

SEQ ID NO: 172163 - DNA, 173 bp, Glycine max
agcttacaagcggtcttgaatggaatgttgctacaacggcttcaacgcaggtagagcttgacaaattgcaacaatacattgtgagacttgttataggacatagaagccacctatgttgctagcgcttctacatctcttgatatggatagggacgactacttgctagacgagtt

SEQ ID NO: 172164 - DNA, 386 bp, Glycine max
  unsure (1)..(386): unsure at all n locations
agcttgtcaaagaatccaacctctcatggtagaagcaaacacatagaaacaagatttcactatcttagggatcaagtgaacaaagagaaactgaaagtggagtactgctacacatttgatcaacttgctgatattttaaccaaacccctcaaaggggagaggtttaaaatgttaaggggcataattggcttgatgaacttaggagatcagaattaagggaaggtgtgagagtttaattttgttttgtgtggggtagatttgtttgtgctttgaatataagagagagtaacagaattttaaaattctgttataagtactagcctaagtgtgaagggttattactctgtntttgcttgtataaaagggcatacatacatcttaataaa

SEQ ID NO: 172165 - DNA, 288 bp, Glycine max
tgccaaccctctcatcttcatgctagtagatttcgtcatctctatgaataactgcttacttttgattatggacttggaactctatcttattctaattgctatagttgaaagtcaaattagaatgacaacttaactctataattacgtagggttagcatcactttacagttactcaaataacatgctcattgtaaatgaagcactcactattagaaaatatgcttcttacatcggttatttatgactttctacaacgagtcttaaccgatgttgatagtaccgatggcg

SEQ ID NO: 172166 - DNA, 366 bp, Glycine max
  unsure (1)..(366): unsure at all n locations
acatattgtcctttcatggtgattttcagccttggagttgcagcgtaagataaaggaaaatagganatatgatacgccatccactatagaataacccattgtatgagaagcttcaccatcaagagagtgccttggataaaatgcttaaaaaagaagcttcaatggtggaagagaatgacatagagagaggggggggggggcttatctcattccatcctattctcgttattgctgtctctctctctcccctactcatctgtacattccttattatatacaccctgttactctacaccagtgtcacaatctcctatgtttattatcctatcatcatcatgtaactattagttgtgtactttctctacg

SEQ ID NO: 172167 - DNA, 465 bp, Glycine max
  unsure (1)..(465): unsure at all n locations
tctagattagtgtaccagatgaccgctgccccagccaagttatattggaagaagtgcatcaacaacttctcatccttggaatatgcccccatcatgcgacaatacattttgagatggttcataggacaagtcgtccctttgtacctatcgaaatcaggtaccttgaattccggggggatgacgacgtccgatactaagcaaagatcagtcatgttcgcaaacggatagtcgccaaagccttcaacagccctcaatctctcttcgatgagatcgagtttcctcttttcttctgctgcctagggtggccctcctgcggacaaaaatattggctgtgttggggggttttgaggttctcccgtgaggttaggctgaggtagtgtgttaggtgtcggcccctcggtggggaacggngagtaggaatcgatgtctccctgngcatgctctcgacgatcctcatggacctcg

SEQ ID NO: 172168 - DNA, 406 bp, Glycine max
  unsure (1)..(406): unsure at all n locations
agctttcntcaccactagatttctgagcaactccttcttccatatttctatgagggacttaacaaaatggagaggagtatgattgatgctggcaatggtggaacccttggtgatatgactcatgctgaggctaggaatttgattgaaaagatggcttccaactcccaacaattcagtgcaagaaatgaagctattgttcttagaggaagccatgaggtggccacagattcatcttcatctacagaaaataaaaagctttgaggaaaacttgatgccttggtccacctaataactcagcttgccatgaatcagaaatctacacttgttgcaagagtttttggtctatgttcttttgcagatcaccatacagaactatgtccttctttgctgcaatctggaatcaatg

SEQ ID NO: 172169 - DNA, 467 bp, Glycine max
  unsure (1)..(467): unsure at all n locations
tccaattaaccctctctaacatttggaacatgtgttcctctaaaggttcaatactttntatggagggtgttgcaccacaagcttccaactagacagaatctaccatggagggggactgttatgaatgaaaatacagagcaagatgcaacaaaaaagcttgaggcagaagcaaaagaagaagaagagcacaaaaggtcaaaaagggtaattagtaagccacgataccttgaggattatgcaaccaaatgaggctgagctgggaatgttcttctagaagcagaatccacgaatcctctgtgccgttaggggctgtctccttgttagcacaatgtccaaattcctccaaggcatataaggccaaaatctgttagaatttgtatctagaatatgcagtagaatatctatatatatgaggatatgtaattctaatggaaaaacaaagcaataaaatagttntatccttacct

SEQ ID NO: 172170 - DNA, 400 bp, Glycine max
  unsure (1)..(400): unsure at all n locations
agcttgtaatgagcttcanaacaaagattggggaacgtatgctcanaggtgatatcanagggaaataattcaagggtaggtccaatttggtaagaagtttataagaacaaaattggcctaatcatttccaaatatgcatgtgaattaggaagcatcaacaagaatcaagccaaggctattgtgcaagcaatcaatggggcaaaacacaccaaaagattatgatgatggatggctcanattctcaaaaaggtaaacttatcactttcaaattgagcttccaaaactatcatgacatgtagaggaaaaacatggatttcaaatcacaaaatgtcaagagacttttattttcagaacaattacccatttcttgaacatatcctataattcaaagaanaatatg

SEQ ID NO: 172171 - DNA, 467 bp, Glycine max
  unsure (1)..(467): unsure at all n locations
tctatggaggttggatcattgagcttcattaaggtccttcaatgttgattttcaaccatggatatgcagcaggagataaaggagaagaggtgagaggaggcgccatccactanggaataagccatggaaggaggagcttcaccaccaagagagtgccttggataagaagcatagagcggaagcttcaatggaggaaaagaatgagagagagagcggngcacataattgaaggagaaaaaagagggagaaaagtggaattttgaagtgtgtctcacaagactctcattcatcaaagttacaacaagtgttacacatgcttctatttatagcctacgtagcttccttgagaaacttccttgaggagattccttcagaagcaacaacttagctacacacacccttctaatagctaagctcaccttcttataaagcttccttgagaagctagagcttagctacacacccct

SEQ ID NO: 172172 - DNA, 107 bp, Glycine max
  unsure (1)..(107): unsure at all n locations
tgcttgagatgaggaagtgcgaaggattaaacttcctgcttttattgccgaccacagagtggtacctgtagatatgtcgcggnggtcaggagaccttgtggacgtta

SEQ ID NO: 172173 - DNA, 447 bp, Glycine max
ctcagcttgagagtatgtctcgtatcggtttaatcaatacaactttatcataatcaattgcatagttgttcttaagacaatgactgatttattcaggagtctctgttttaatcgattaccatttgatataatcgattacttctctttctataagtgttttagaagtgaacaagaatactttaatcgattactttgagtatctaatcaattacattattcttgagttgtttctagattttggaaagaacactttaattgattaaaaagataattcaatcgattacttcattgaattaattgattaccttgtagatttaatcaattataggtagttataattgttttctctataaataactggcttgtgttctcttctaaataataatgaaataagtttgtgtttgagcaaagatcacgtgctgttatcagataaagaaagaagaaaag

SEQ ID NO: 172174 - DNA, 358 bp, Glycine max
aatttctcccacacttttggggagggccattgctggatggccttgaatatactagggtacacttggaccctatttctaccacctacaaaacctaagaaaactattttatctacacataaggtactcttctctatatttgcatagagggtgtttttcctaaggactgaaagaacttgcctgagatgtcctaagtgatcatctacgctcctactatacactaaaatatcatcaaaataaacaactacaaatctacctatgatatcccttaagacatgatgcataagcctcataaagtgcttggtgcattatggagcccaaaaggcattactatccttcttacaaaccacacttggtcttg

SEQ ID NO: 172175 - DNA, 461 bp, Glycine max
  unsure (1)..(461): unsure at all n locations
tctcgaacgtgatcaatacattcattggcatagatagatggatttagttgtggtgcgagatctattttggtgtcaccctgatgcagtaaagttatgcaatgcatgttatctggtgttttttatagacagtacctacaaaacaaacaagtacagactcccactacttgactttgttggggtgacaccaacggcgatgacattctctgttggatttgcatatctggaggctgagcgtgttaatattattgtatgggctatggaacgatttcgaggactatttttaagaaacgatcgcctccctgttgttattgtcactgacagagacctagcactgatgaatgcagcgaaaactgtgttctcggagtgtacaaatttgatgttcacgtttcatatcgataagaatgtgaaggcgaagtgcaaatctttaatcggtcaaaaaaatgcttgngactatgtaatgg

SEQ ID NO: 172176 - DNA, 249 bp, Glycine max
agctacaatataaagatggcctcaacatattccttatttccagaaggaaactctatcaataaacctccaatctttaatggagagggttaccactactggaaaacccgaatgcaaatttttatcgaggcaataaatctaaatatctgggaagccattgaaataaggccttatatacccaccacagtagaaagagtttcaatagatggtagttcatcaagtgaaagcataaccatagaaaaacctaaagat

SEQ ID NO: 172177 - DNA, 485 bp, Glycine max
gacaccagacaatactcaagcttgcacgcaattggtaaggaaaagaagagacggtagattaagagcctctttcctaaggtactatggcagaaacctgatgagcacttgtatgaagcttgcacgaatagagaggtcgactcatctctcctttggttgagcttgcgtccaatggagaagacagagctcccatctgttctttagaagagacatgatgatgatgcttaccgcttaagctgacaatcttacttgacaacatgaatgacgaatctccaacccatggttaacgtgccgagccatgctattgtagtgcattatgccttttgaggtgttacgcagcaatggctaaagtaggtctaagccattaaatggaaagttctgcttttgctgaaactagtaaaccctatcctaatccactagatggacgtgttaccctttcttggattaagcgtaatctgagtggacgttgcacaaagtccactctcaca

SEQ ID NO: 172178 - DNA, 394 bp, Glycine max
  unsure (1)..(394): unsure at all n locations
agcttatttctagaatgttttatgtttcttaaaataaaaaagagaatacgttatgtcaattttaatacttttttcggtctttttacatgaagaaaaaaaaaacatgagtccattttgttggtcttaattcacattaaatattgcagtattatggttactacgtaaatcatttaattctgagtattttttaaataattttttaatttctgacattattaaaattaagtaagttgcctatttgtaaggacgggaaggaatatgtattgaaatgacccgaagtataatccaaaacctacctaanaataaactgtctaatttctcaaacataaacctgtcaaaagtttctttgaagcatatcgaatcaatgagatggattgggtcaaaaacaccccta

SEQ ID NO: 172179 - DNA, 457 bp, Glycine max
tgtacttgtttaccactctgatgatttcaacttctctcttatatgacggttaagcattgagatttttttttagcttatgtcttgagtagttaagtatcacatttagcttctgctattgatggacaagtttcatggttttcgcctttattaattattaatcatcatataacttttaattgatttatttctgactttttttataatgtattttgctttgacgtaatatacacctgtattgttcatctcaaaagttaaaagtgattcgaacatcttccaacttgtcctcaacaatatcttatagaggtctttagtttatatttttttccctataaatactgatgagcaacagctaggcagaggatagaaatcaaactatgtgaggacggatccaccaaaaaatagacctaaaataaattttactttatataagaaaaatatatattagagtctttttatc

SEQ ID NO: 172180 - DNA, 266 bp, Glycine max
agcttcaacacctccctttcgatgttattgtgctccctactctttagattgaattttggagtttttctcattgaacagcgttttccagtttagtgatttttgaattgtgaggttcgatgatgttgatatgagcatgaattgaagggataaatgaataacttggttgtgtgttgaagtgggaatattgattaattacgttttttttgttggtgagtttatgcatatgatgcttcgagattgcatatttctgatgcggatggagaggc

SEQ ID NO: 172181 - DNA, 515 bp, Glycine max
  unsure (1)..(515): unsure at all n locations
acgcgcnntttgaattgatggttgatacacctatcagacnacctggaanactcaagctctaaacaanaagtggatgtcactgccagatgtgaggttaatgctgtgtttagggccccgacggaaaattagaatgatattcactagcttgcctcaatcaaaataagcaagggcaataattgtcaccattattaagtgattgaaacaactcactttgtgatcccacatccacgaactaagatgcatgatactaagatgtaactccaaccggctacactttattgatgcaagatgggtacacacctctttaatatggacgggcattacaggtctgtgattaagactacacagacctttccattgacacataacaagaaagagacaaggtcgatcatgtcatcacacaatagcatcaaccatggtactatctaagacaatcagtcacaaatagtttcaacagagttatgatggcacctgtatcctaatattaatgcactatatgtattggatcaagtact

SEQ ID NO: 172182 - DNA, 403 bp, Glycine max
agcttgataacccattcttctttccttattacatgatgcataagcctcataaaggcgcttggtgcattagtgagcccaaaaggcatcactagccattcatacaaaccaaacttggtcttgaaagcggttttccactcatcaccctttttcatcctgatttggtgataaccacttttaagatcaatttttgaaaaggtattggcaccatgcaactcatcaagaaaatcatcaagtctaggaatggggtgcctatactttacagtgatgttgttgatggccctgcaatctgtacacattctccatgtaccatcctttttgggcaccaacaacactggcacaacacatgggcttaggctctcttggacccaacccttctccaacaattctttaacctgagactcta

SEQ ID NO: 172183 - DNA, 448 bp, Glycine max
  unsure (1)..(448): unsure at all n locations
ctgccgatttagttntcaccagcgaaaggatcgaagtgtgtcttatataaggcaaaatttgattatcctgctttgatgaataggaagcctgnggcaaatggagaaataagaaggagggaagaacccatgtggtaactaccgttcctacatggccaaatttcccaccagctcaacaatatcaatactcagccaatatcagcccttctcattacccaccaccctatcatccaagaacacccaatcatctacaaaggccacccctaaatcggccacgaaacccgcctgctgcacatccgataccaaataccacccttaacacgaaccaaaacaccaaccagtgaaggaattttccagaaaaaagcctgtagaattcaccccaatttcggtgtcgtatgctaacttactcctatatctactcaataatgcaatggtagccataatcccaaca

SEQ ID NO: 172184 - DNA, 389 bp, Glycine max
  unsure (1)..(389): unsure at all n locations
agctntagtgactgtgtgcaaccacatattttacattgagtgttctctttgatatgttctacagttgattttgcacaaatttctaattgtcataacatatgattcatgaaaacaatggaggactttcccaaaaactagatgagttcagatgtttttgcatggacttgataaaaaaaacatttgaaacactgatttgatttgaatatggaaacaagccttaagttttagtgattgtgtgcaaccatagattttacattgagtgttctctttgatatgttctacagctgattttgcacaaatttctaattgtcataacatatgattcatggatatcatttaggttttcttgctttctttacattttaagccactggccaaaaagttatccc

SEQ ID NO: 172185 - DNA, 293 bp, Glycine max
tctcggctcatgcggagaacgcctctagtacaacacccgtgctttctaaggcacccacccagagggaagctccccaagtttcatactccgaacacgactcgaccggtcgtgtattacaacacgacaaggaacttccctccgaggccatagccggaatacaccccgctcccaatgacgtgcgaagatcttctagcatccctgatcgccaatcatttgtacgtggtaactcccggaagggtcctccaaccccctttaccgaagtcggatgaccctaatgcaacttgcttgtacca

SEQ ID NO: 172186 - DNA, 362 bp, Glycine max
  unsure (1)..(362): unsure at all n locations
agcttgataggaagatctgctgagagcttttgcttttgtaaaagttntaaaaaaataaccaaacactcttaaaaaataaaaaagatcttttttcagtagataagataataaaagatcttttgggccacatccaaacgggcccgatatatgatcagattgtatatatacattaacgttgtatttcatctcattttcattttattttattgttcgattctttttattacatcacttattatatttataaactttttagtttaaatatattttttccctatattatgatgatattattgtgtatcacattagcacaaaagtcatatcattgaccgacatatcatcattacaaaaaaaaattaaaa

SEQ ID NO: 172187 - DNA, 299 bp, Glycine max
cgtctgataaagagaaaaacgtgtactatgctgtgagtacaaagcaaatatatgcacatgattggccatatgttatattgggagaagaaaacacatcatgaacagcccatatgaggaacaataatgtaagatgagcagatgaattccgtacttggatatcttaattgcttcattgatggatcgatcgtaatcatctgcgatgacagcgactgtaaaagttaactcaatgtacaagtagcaaatactgatactagagaaataaagtttacttttgtccaaccaaagaattaagtagttca

SEQ ID NO: 172188 - DNA, 234 bp, Glycine max
  unsure (1)..(234): unsure at all n locations
aaaaagtattcctttgaaaatgatgaaagatgttggcctttggtgccaattttttaaaagcttcggccccatgcattntggttaaaacatgagctttgaagtgctcaaacccaagtttgggcgcacgactctcgatggccatgccatacaaacattctatagaatgcagtagtattgctttggcttggaacctaaaaagaagccacctattggttcttatcatcattaaattga

SEQ ID NO: 172189 - DNA, 467 bp, Glycine max
  unsure (1)..(467): unsure at all n locations
ctanagaagttgggtttctaagcttgggattacatttgggcacctattttgactttcccatgctgtctctacatacataaaacagccgcactatccccattctgcaaaatcatatttatatatcattggggcatttcatcgagcacttggtgggcgcacgtttagacataaattgcaagagaatgggagtaatgtggcatgccccattgcttcagaacacaacctaggcctaaggccttttcattcaaatcctcaattcaagaaaacaagcaccaaagcaaaccaaaactgccttacaaatataagcatgttctcacaatttaaggcaccaaaggatgaagaaagcacatcaatggaaagcaaaaacaccaaggatggaatacttacttgttggagtgaattgaaataccaaaaaatgaaagcaaaatgcgatcaaaaggcttatgggagcaagataccacaagcct

SEQ ID NO: 172190 - DNA, 405 bp, Glycine max
  unsure (1)..(405): unsure at all n locations
agcttcaacgctcatataagaaacatctataanatttatctctgatttgtaactcttaagcaaacattctaaaatgacaaggaatagacataagtaaaaaaagtatagatggattcacacatttcaccttaaaccttctatattgtttatttccattataataagtaatcatcaatcttccacttaagattccccaaatttaagaagatttacacactactatgcttccaatcctacaataaacttattcattttgacttaccacctaagaagcaaaaacaatggacacaagcacaaacaactcatttaccagattcaaaagtaatacaaaattgaaattttaattgaacttacaatggtaaaggaaatttgaagcatgcatagttattaaattagatgcaacta

SEQ ID NO: 172191 - DNA, 461 bp, Glycine max
  unsure (1)..(461): unsure at all n locations
tgatgtgaganagtatggaagagtcagtcttcctatttttgtttgctgaccacagagtggtacctggagatatgtcgcgggggtcaggagaccttggggacgtcaggtggggtgctattgcccaaaaccaagcttgaccaatcccgacccaaccccggcatagtcagtcagtgagaacctttgatgtacctaaacaggcaagctcctggcagtcaactaataaaagaacaaagtccacaaagcaaggaggcttgtgtggcggctggccaactacgaatcttgagtggtatctggaaattggcctctggtaatcgattaccaagggtgtgtaatcgattacagggcttaaaaatggagacaggatgttaagatggcctctggtaatcgattaccaagggtatgtaatcgattacagggcttataaatggagacaggatgttaaaatggcctctggtaatcga

SEQ ID NO: 172192 - DNA, 400 bp, Glycine max
  unsure (1)..(400): unsure at all n locations
agctttctgaagttttctggttttctaatcattgaaaacttgtgctattcatcctttttattctcttctccctttgccaaaaagaattcgccaaagactaatcgcctgaattctttttgtgcctctcttctcccttttccaaaaggacgaaggactaactgcctgaattcttttgggtctcccttctcccttctcccttgtcaaagaattcaaaacgacatagtccgagaattcttttgattcttcccattccctaatacaaaagcgttcanaggtttaaccgcatgagaattcttttgtatccccattcacaaagtatcaaaggtttaacagcctgagatctttgtcttaacacattggagggtacatcctttgtggtacaagtagagggtacatattc

SEQ ID NO: 172193 - DNA, 453 bp, Glycine max
tatagaattcaccccaattatggtgtcctatgctgacttgctcccatatctactcgataattcaatggtagtcataaccccatccaaggttcctcaacctccatttttccaatcatacaactcgaacgcaacatgtgcttatcatggaggagttacagggcattccattgagcattgtaggaccctgaagcataaggtgcaaagtctaattgatgttggatggctaaaatttgaggaggatcgcttgtgaattctgacgttggcaagcgacactatacgtggggcagtttgaagcttgttgttagatgtctctaatgactcattaggtttttcaagtttatgtcattattgtaaaccacagttacaatgctaataatatggataaatttgacatccttgtctctcaccttctcacaattacatctttgcttatttgacttccactggaatatg

SEQ ID NO: 172194 - DNA, 336 bp, Glycine max
  unsure (1)..(336): unsure at all n locations
agcttgcactaagatttctgattcaggttcctaatgtatcgagacattggttattgaacaatggaaactcccgagaaattaaaatcgtcattacttttcactcggatgtccgattcaggcacttcagatatcgagacgctcgaaattgaacaacggaagctctcgagaatttaaaatggtcattactttacacatggaggtccgattcataaacatcacatgtcgagatgctcgaaattgaacaacggaagctgaagagaatttcaaatggtcataacttttcacttggatgtccgatncaggcgcatcatttatcgaggcattggttattgaaaa

SEQ ID NO: 172195 - DNA, 469 bp, Glycine max
ttaggacacttgaaactcagcttcttatccaggctcatcttggtggtgaagctccttcttccatggcttattccttatgcgcctgaatcgaacatccgagtgaaaagttatgaccatttcaatttctcgatatcttccgttgttcaatttcgagcgtctcgatatgtgatgttcctgaatcggacctccgtgtgaaaagttatgagcatttgaatttctcgagagcttacgttgttcaatttcgagagtctcgacatgtgatgtgcctgaatcggaccaccgcgtgtatagttatgaccatttgaatttctcgagagcttctgtcgttcaattgcgagggtctcgatatgtgatgtgcctgaatcgaacatccgagtgaaatgttatgacaattctaatttctcgagagcttccactgttcaatttcgggcgtctcgatatattatccgcctgaatcggacatccgagt

SEQ ID NO: 172196 - DNA, 130 bp, Glycine max
agcttcttgaacgggatcaatatattcattggcatagattaaaggatgattatgtggtacgtgatatcttttggtgtcaccctgatgcagggaagttataccacgcatgtaaattgaagttttgatagat

SEQ ID NO: 172197 - DNA, 455 bp, Glycine max
  unsure (1)..(455): unsure at all n locations
atgcctactccagataataataataataagaatagacagttaacaattggtttctttcaaaatggatagctatgagcattagttcaaataattgaaatttgaaaagcaaaggcaacttgatatataaaattgtcccaattaaatatacaacggttacactttaaattaaggaaaatacatcttttgttatctatattattcatcaatatccctttcccagcttatatctattagcaatgtaaggccacaagaatttatattttatttgtattacattctaagtcagggttcaattatttctctaatcccttttgtttctaattgtattaccattttaacacagtcagctgtcttcccttgcatgcatcattntaaactgtctttntttctctgttgattcttttgtcttcacttgcatagtttatccatattaaacatatctnttgctagcatgc

SEQ ID NO: 172198 - DNA, 389 bp, Glycine max
  unsure (1)..(389): unsure at all n locations
agctnttgcaagctggaatcatttatcctatctccgatagccaatgggtgagtcccgtccaggtagttccaaagaaaatcggcctcaccgtgataaaaaatgagaaggaggagttgattcctactcgagtgcagaacaattggagagtatgcatcgactataagaggctgaaccaggttaccaaaaagaaccattttccactgcctttcattgaccagatgcttgaacgcctggcaggtaaatctcactactatttccttaatggtttttttggttatatgcaaatcactattactcctgaggatcaggaaaagaccacattcacctgccccttcggcacttttgcctataggaggatgtctttcggcctgtgcaatgcccctggtacc

SEQ ID NO: 172199 - DNA, 454 bp, Glycine max
  unsure (1)..(454): unsure at all n locations
ngaaggtgcataccccaccattnttcatagtaaaacactggtgatgtgtctactattattgtgataatctctttctccgtcattggaggtgccacttgagctgccaggtctcttcacctttgggcgtattctttgaaagatttgtgcccttttttgcacacgttttgtagttgcatcctatccggagccatatcagaattgtactaacactgcctaacgaaggcaaccattatgtccttccaagaatggactcacgaaggttccaagttagtgtaccaagtagcagctactccaataagactttcttgggaaaaatgtaccaatagtttctcatcttttgtgtatgcccccaatcttctgacaatacatctttagatggttcttgcggcaagtagtcccctgatgcttgtcaaagtccggcaccttgaacttgngaatgaccatgttcgggtac

SEQ ID NO: 172200 - DNA, 389 bp, Glycine max
agcttgccacccagctcgcccaggcgagcaaggtggcttcctccagaagcaaccgccttctggaggaatcttctggagggcccaagtgggcctggttgctatttgcacccccatttttactaaatacaccccctacctttttttttggtgattcttttttcgtaaagttacggaaatttacgaattttgtaatgatacttgttttatttccgtaatgttacggaaccttgcggattacataatgatcccttttttgacttacggaatgttacggaacctcactaattgtgcaacgatgcttccttttgacttccggtgtgtcacggaaccttacggattgtgcatcaatactttcttttgatttccggcacgtcacggaacttcacaaa

SEQ ID NO: 172201 - DNA, 427 bp, Glycine max
  unsure (1)..(427): unsure at all n locations
ctnttggagtagaaacatgggaccaactcattntatttcagaaagttgtatctagacaaggtctgagagactatacaagtttcctagcgatttctaattatgtgggccattaagtctatcatatgctgacaatagccaagaagcccatgaatttcttcgggggcggagtaggtgtccgccatcgccttggccttcgctaacaatcggggaaggtcttgactctcgttcaaggtaagagcaaaccgatccatccacatggttgcctcttggtgtgaagagacgatcacccatcctctagcctcttttccgcgtatacttgggcatactcgtccgcgaccctatgctcgtgggccgcggctagacctaactcttcttggtacttggcggagatagctagcatgttggtctccgtctcgcataaacgttg

SEQ ID NO: 172202 - DNA, 389 bp, Glycine max
  unsure (1)..(389): unsure at all n locations
agcttattatgatacaatattgagcttatttaacaagggcgaatgttattggagctaaatcttgtatcctaaccagcctgctctatggtcgaatctgcagtcacacatttaacttaaaggtgtggaggctttgaaagcccaatatttgaccacaatcagtctttgcaaagactaaaacaactcacaatcttgtaaacatcacgcataaaattatgaaggctttggaaactcaacctctaaccataattaatatttacgaagatcgaataacctacaaagcattttgtacaacctcataacaaaacattgtgttngggtttaccccatagttgatttcattattattagtgtaatattaaatgcttacagagaacttgataataataaaa

SEQ ID NO: 172203 - DNA, 432 bp, Glycine max
aaccattatacatcttgaaccaagccgaaaacgaacaacaaacaacgtttatgagcaaataggtcgaaccttatggtttgcttttgtgcgaaaaaagtaaaaaaccatcatacatgtcgaaccaagctgaaaacgaagaacaaaaatgaggaagaaaaatggaagtgcaaacgattgctgacagaaaagaccaaagcggataatggaaaccatggagagcaaatccaaaggggagagaattgaaaggcacaatagaaatcggaaaaatgcaaatgcttcaacagtgtagacccaagtggaactcgaagaggcaaaacaataagttcagcgtgcctcgagaccacaaaatgcattggtaactgaaccggcagtagaaaacgatcaaaaacaataaatgcacagtgaaaagacatttttgggcagcaaagtggg

SEQ ID NO: 172204 - DNA, 299 bp, Glycine max
agcttgcctcctatagtagtcgtaactcttgcacgagccttagtgaagaacttcatgactattacgaaggaatgcataggtcacatcttacacctcactcccatagaggagagaaggaaagaaagcctcaagaggctaacattaacctcccatacttccaggggaaggacaatctacaggctaacttagttttggaaaaagggcccagcaccttcttaaaaagagagccccgcccagatctatgggctctcactcttatccaaagaaataccaaggtcaaggcatcttaagggtgacac

SEQ ID NO: 172205 - DNA, 443 bp, Glycine max
tgcttctacaatatctccccctttagatgatgacaacgcctataatcatgatacacatacacattctttttcctagtcgatcactcacttaattctccatattctccccccttgtttttgagtttaagcttcacttgaaattaagttatttaattatgttatttcttgatttaatacctattttctctacccctttggcatcaacaaaaagccaaagtacgtaaggcatacataatgtaatgtagaagcaaagcttcatggtgaatcaagaatgattcacagatgttttgatgataacacaaatgataacaaaatatgattacaaaggtgatgacaaaaagctcaatggtcaatcaaaggatgagttcacgatgttcaagaaggaatcaagagcaattcaagactcaagaggagaagttgaagaacacttcaagattcatgaa

SEQ ID NO: 172206 - DNA, 286 bp, Glycine max
agcttctaagaatcaagatcaagattcatgactcaagattcaagaatcaagagaagacttaatcaagataagtatgaaaaagttttttcaaaaactgagtagcacatggatttttctcaaaacttgtttaccaaagagtttttactctctggtaatcgattaccagattattgcaatcgattaccagtagcaaaatggttttcaaaaagctttcaactgaatttacaacgttccaattgatttcaaaaagctgtaattgattacaatggtttggtaatcgaatacc

SEQ ID NO: 172207 - DNA, 456 bp, Glycine max
tgtgcattcaatatcctgatgagggtgttccatatgttcttaatactggactaatacatttgttgcccaagtttcatggtcttgcaggtgaagatcctcataagcatcttaaggagttccatattgtttgttccaccatgaagccccctgatgtccaggaagatcatatctttctaaaggcttttcctcattctctagagggagtggcaaaagattggttatactaccttgctcccaggtccattttcagctgggatgaccttaagagggtgttcttggagaaattattccttgcatctaggaccacttccatcagaaaagacattttaggcatcaggcaacttagtggagaaagcttgtatgagtactgggaaagattcaagaaattgtgtgcaagctgtcctcaccatcagatttctgagcaactccttcttcaatatttctatgagggactta

SEQ ID NO: 172208 - DNA, 390 bp, Glycine max
  unsure (1)..(390): unsure at all n locations
agcttataagaaanaaattgcctaaattatttccaaatatgcatgtgaattaggaagcatcaacaagaataaagctaaggctattgtgcaagcaatcaatggggcaaaacacaccaaaagattatgatgatggatggctcaaattctcacaaaggtaaacttatcactttcaaatcgagttttcaaaactatcatgacatgtagaggaaaaacaaggatttcaaatcacaaaatgtcaagagacttttattttcagaacaattacccattacttgaacatttcctatatttcaaagacaaacatgcaaatttaacacaacaaaactaacaaaattaaactagaacccaacaaaactaacaaaattaaacttatttaacacaactaacaaa

SEQ ID NO: 172209 - DNA, 285 bp, Glycine max
tatacgagatgcctattgagtgcgacaaggttatgctagccatctttcgaagcgcatgatctctctttccaacatttaataatgcctgcatttatgtaaattgctaacctttgagtttgagggacgaactcaataaaagagaattctaggtatttatagtatattcctccgacgtcatttgttacgtctataaagagtacatggagaggtctttactattattcctttcctgaccaatacgagtgagccacgtcgccttaccttctagagcgagacaatacacat

SEQ ID NO: 172210 - DNA, 377 bp, Glycine max
agcttcacataatttttttttcacaaactttagttttggaagaccaattactaaatctttcctaactagatgattgagatgatgcatgtttatgtgtgcagtcctacaatgccacaaccaagaatcatctttcttacttaccaaacaactcagttcatgaaacgatgcatgttcaatgtttaacatatagatattacctatccttttaccaatatggacaacctcactggatatggcttcactagtaaggcaacaattcttgttgaatttgattttgaagcctttgtcacatagttggctaatgctcaggaggttatgctttagtctatcaacatatagaacattctttgtttgtgttttgtactaatttccaatat

SEQ ID NO: 172211 - DNA, 440 bp, Glycine max
  unsure (1)..(440): unsure at all n locations
cttgtcatcacctagaaaaccatttttaaggtccaacgccttgaaatggtccttttcgcttttattggttaaacgtggattntaaagacctaaaaccaacacataagctttgtcacctctttcaaaaaaaccaagagatcattaatggtccaatgccttaatgttttctctcctttcaaaagaatcgaaagatcgtttaatggtccaatgccttaaatgacctttcattcaatcaaaatatatcttgcaaaaaaggataaaaacaatttaaccaacgtttagttctcaaagaactacgtaggtctgatttccttatcacaattgaggaatacgtaggatcaagggaaacacccttgtcgaccacaaanagataaaaaatatatnaggcattaaaagacataaaaagtgtaaaaaggagaaaataaaacaaattgaagtca

SEQ ID NO: 172212 - DNA, 287 bp, Glycine max
  unsure (1)..(287): unsure at all n locations
caatgggttttgactttttcaaaattgggttcaaggttttctaaagtcatactcttctaaatggtccctcttgacccagacatgaaagagtctataaaagcaaggcttttgtttgcattntaagacaatctaatcaatccaatacaatcttttacaagccttgaatctctttgaacttcttcatcttttttgtgccaaaagctttccaaaagtttctggttttttaaaccttgaaaacttgngttattcatccttttcattctcttctccattttccaaaatgaatt

SEQ ID NO: 172213 - DNA, 446 bp, Glycine max
  unsure (1)..(446): unsure at all n locations
tataaggaaagactntctaagatgattgtttgtaatcaccgttttagaaagtatacattcaaagacagttattacaaaataaccgtcttagaaagcatgctatgccagactttctaatacggttgtttgtaatgactgtcttagaaagtgtacattctaagacggttattacaaacaaccgtcttagaaagtctttccttataagttttctaagatagttattttgtaataactgtcttaggatatatacgttttaagacagttaagagttaataattatctttaaaaacctcatgtttcaacgacgattatttatagaaccgtcgtaaaatatattttacttttaacgacgttagcaacaacaacgattgacaatcatcgttaaatgtttatttcaaccgtcgttaaaaaggttatttatagtagtgactgtaaaagattntaat

SEQ ID NO: 172214 - DNA, 406 bp, Glycine max
agcttcttatccaacgctcatcttggtggtgaagctccttcttccatggcttattccctagtggatggcgcctcctctcccctcttctcctttgtcttccgctgcatctccatggtggaaaaccaccattaaaggacctcattgaagctcaaagatccagcctccatagaagctccacaagcaagcttccatcaatagttgcgtgatagcctccctctcggttgttctcgcacagttggtcacccttcaatatcagggggtggcccaggaactgataaaaggaaacggtggccccataaccaggagcgcaagtcttggttaagcatttaaaggcaaaggaccttaaattctcttaaggtgcagatgtggagccctctgaaagcgaggatgcgtagccctctaaagg

SEQ ID NO: 172215 - DNA, 447 bp, Glycine max
  unsure (1)..(447): unsure at all n locations
tggcatatcttggaatctgcttgatggcatctagcagaggtatgttcacctctactttcttgaaggtctccaagatctccttttccgcttcttccattttttttgtttggaattgctttaggtgggaatggaagagggataggaggctgctgtaagtcagaattactagaagaaggtctacctgcatgaaaatttttgttaggaagctctctcttttgtgcaactatctcatcctctttttcaggtgtagaatgaagcttgacaggttcangtgcaggtgctgctacttatggaggcacttgaatttggttgccagacctcaacgtgatgacactcacattntttggattctgcacagtttgtgaaggcaatttgtcagaattttatgactgagcttgagtcatctgagtagccatttgtcccatctgatttgtcagactctgaatg

SEQ ID NO: 172216 - DNA, 393 bp, Glycine max
  unsure (1)..(393): unsure at all n locations
agctntatcaaatggatgttaaaagggtttttctaaatggcttaattcatgaagaagtatatgttgaacaacctccataatttgaaataacagataagccaaatcatgtttatagattgaaaaagactttatatggtttgaaacaagccccaagggcatggtatgaacgtctaagtaaatttcttttagaaaaagatttttctagaggaaaagtggataccacactattcataaagagaaagtatgatgatattatgttagttcaaatatatgttgatgatataatatttggatccactaacgattcattgtgcaaggagttctctcttgatatgcaaagcgaacttgagatgtcaatgatgggagaactaaattacttcctgtggttacaaa

SEQ ID NO: 172217 - DNA, 201 bp, Glycine max
ctcaagcttagggacggaacacttacttgttggtgatgaataatagcgcattactgaatcaaataatgcgaacaaggatgaccctagggctgcaaactcgtcaatcccgtgggtatggcttttgaaagggggggaaaagaagtttttgaatgcaaaaacgccccccctttcgtcattcttataatttggtgcaggggtggc

SEQ ID NO: 172218 - DNA, 402 bp, Glycine max
agctttgcggatttggtcttcgccagtgaaaggatcgatgtgggtccgaaaagaggcaaatttgatcatcctactaggacgactgagaaaactggggcaaatgaagagggtgagaaagagggagaaacccatgctgtgactgccattcctatacggccaagtttcccaccaaacccaacagtgtcattactcagtcaataacaaacctcctccttacccaccacccagttatccacaaaggccatccctaaatcaaccacaaagcctgtctaccgcacttccaatgacgaagaccacctttagcacaaaccaaaaaaacaccaacaaaaaggaattttgcagcaaaaagcctgtagggttcaccccaaattccgttgtcatatgctaaacttgatcccatat

SEQ ID NO: 172219 - DNA, 434 bp, Glycine max
  unsure (1)..(434): unsure at all n locations
tgcctcacagaggtccaggaaggacaaggcagccgaaggaactagttccgctccggagtatgacagtcaccgctttaggagcgctgtacaccagcagcgcttcgaggccatcaagggatggtcgtttctccgggagcgacgcgtccagctcagggacgacgagtatactgatttccaggaggaaatagggcgccgacggtgggcatcactggttactcccatggccaagtttgatccagaaatagtccttgagttttatgccaatgcttggccaacagaggagggcgtgcgtgacatgagatcctgngtaaggggtcagtggatcccgtttgatgccgacgctatcggccaactcctgggatatccgttggtgttggaagagggccaggaatgtgagtatggccagaggaggaaccggtctgatgggttcgatg

SEQ ID NO: 172220 - DNA, 322 bp, Glycine max
agcttcttgaacggcatcaatatattcattggcatagttttaaggatgaacatgtggtacgtgatatcttttggtgacaccctgatgcaatgaagttatacaacgcatgtaatatgatgtttttgatagataatacctacaaaataaacaggttctaactcccactacttgactttgttggtgtgacaccaacggggatgacattgcttgctggatttgcatatctggaggctgaacgtgttaataatgtggtataagctttataacagtttgaggtttttttttaaaacgcgatgtctttcctggagttattgtgattgac

SEQ ID NO: 172221 - DNA, 496 bp, Glycine max
ggcatgatcgtgcttacggccttaaaactcagcttatatatatacgtcgctgggttagtggttgtagaacaacaagttgaaatagcaagcatctatatacatacatacatacatctatatacatatatatatatatatatatatatatatatatatatatatatatatatatatatatatatatatgtatatatatagacgctcacacttaatttttttctttatttatttggctaggaggaaattaataaatttagtacacacgaattaagagagtctaattttaaaatcacaccacttgcaaaattattttaattaggttatcatttgagttgtcatatatatatcaaggtagtattcatatccttatgttcaagcggattgttttggtagaatgaaatggagaaaatatatttaaattaaagtagtatagtgagatttttatgtaatagaaacatttggcacacaaaaagaagtgtgataaaagtgtgaatct

SEQ ID NO: 172222 - DNA, 396 bp, Glycine max
  unsure (1)..(396): unsure at all n locations
agcttgtctccctaagggagaaaggaagctcgtctcctttttcttctctttgctgcgtggatgggtttctttttgtggcttcattgcggattcttagggtttgaaggtggaaaaaagctctatctcgatcaatggaggccgaggcagagaacaacgacgtgaagaaggaagaaaacatctttgataaccacaacgacaacaacaacaacaacaacaatgaaagtgacaacaaaattaggaattcgagcgagggtctgagcaagcccaagcgtcaaatgaagatgtcgtttcagcttgaaatgctcgagaaagcttatgtgggtttgttatcgctaacctttcttattttattttttttcttggtcaatttctagggntttttattgctcatttttt

SEQ ID NO: 172223 - DNA, 433 bp, Glycine max
  unsure (1)..(433): unsure at all n locations
ggtttgatgataacttttatgataacaaaagatgatgaagaaggtgatgaccaaaatctcacagatcaatcaagaacaattcaagaggtcaagataagaatcaagaagaattcacaactcaagaagaaagtctagagacaagaatcaagattcaaggttcaagatctcaagaatcaagatcaagattcaagaatgaagagaagactcaatcaagataagtattaaaaagttttttcaaaactgtgaatagcacatgagtttttgacaaaaccttttaccaaatagtttttactctctggtaatcgattaccatattgttgtagtcaattaccaatagcagaatgagtttgaanaagttttcaaattgaatttacaacgttccaattattttcaaaaggctgtaatcgattacaaagttgtggtaatcgattac

SEQ ID NO: 172224 - DNA, 391 bp, Glycine max
agcttgcattatggtatttattgtggtttcaaatatatttttgcctgaggtctggttattaccatgagacaagagatgttgcccaatcatcacatcaatttgctcctttggtacatactgtggtcactacttatttactaatttatgatgtagtctttcttaataatttacttatttctgacagttgacagagtggattaataaaggagggatggtaccagaagagattgcagctgccgcagcatctgaggaatgtgaaagaatattgattctcattacccattgacttatgaaattcaagtacataaaaaatttatacaaaaaatatagaaaataatgtttaatttccaactatcaaagggtataaattgttggtggttccttatatttt

SEQ ID NO: 172225 - DNA, 438 bp, Glycine max
tccatattctcacctcccatacctgatttcatagaaattcattgttatgacaacaatctattgtataatctcactcatcaatgggaaaactaatgattgatattatgttattctgcagaacaaatcatatatgtatcaaaatcaaaacgttaaccattgatttttttcatcaatgactaagattagcagatcaaatactttatccttactcactttaaaggactcaaattcgtaagcgatatactttatcctatgacatgcgaaaaatagcgtatgagtgcctaaaaatctaaacacgtgatgattcattatttacacccaaaaaaatgtctaatctactgaatattttctcccaggattactaggttggtgaacacatttcaagggaagctaagggacatgccagaattaatcgatattacgatgtaagccatgccc

SEQ ID NO: 172226 - DNA, 395 bp, Glycine max
agctttaaaatttgaattaaaacgttcataaactgctggtaatcgattactatatatgtgtaatcgattacacagtgcaaattttgaatttaaattttaatagctgttgtaaatcagttttggccaccggtaatcgattacatcctctggtaatcgattaccagagagtaaatttgttgaaaaagacttttttaacttaaaattcttggccaaaccttttgcaatttcaattggaattcccttcctatttaatatcctttctaagactctatagactgtcttgatcatccatcttgaatatctttaatttctttgtcttgaataaagctttgagacgcatgtgaaactttggcatcatcaaaacattcagctttatcctttgtctacaaatttgg

SEQ ID NO: 172227 - DNA, 353 bp, Glycine max
gcagaggaccttagagtatcttaaggtgcggatatggttccccctgagagcgaggacgcgtattcctctaaaggcgagggcgtgtacccctctgaagttcaggacgtgtcgccttttgaaggcgaaggagtgtagtcctatgatggcaaggacgtgcaatcctctaaaggtgagggcatgtccccctttgaaaatggtgaacatgtactcccctgatggcgaggacgtgtagtcctctaaaggtgatgacgtgtattcctctgaaagtgagggcgtgtcgccctacaaaggtgaaggcacatgaccctttgaccgcgaggacgtgtactcctctgaagtgaacgacatgaccc

SEQ ID NO: 172228 - DNA, 389 bp, Glycine max
  unsure (1)..(389): unsure at all n locations
agctnttaactgggaaagtctctcatatactttntgagatgtttaaggatgtctgaaatgaaaataaaaggtcatattggattggaagatttgtctaaaacaatttgttaccacattggaatgcacctgggtatcgttccaagtgtgcgcaagcaacaaataaaaataaaaaaattgggcatctgaagaagggtgggtgtatgcgcataagtggttctattagcttggagtatcacaccattcgctttgtatgtacgttaaaaatataatacatacttctttgtacttggttaatttaccacttatttttttattttataatgtttgttaatagtcagagacgctgggtcgattggcatacacatatgagctctttcagcaaactcatt

SEQ ID NO: 172229 - DNA, 446 bp, Glycine max
ttctgcacatattcaaggacctatgaccttatccatgcatatggtttctttagcttgtacaagaatgtgtaagctgacttctctctcatttccttttatattcccagatgaaatgtaggttccatggctagttgtactttcctatgcacttggatataataaacgaagttcggtaaccataaagataattacaatttggtgagcctgctaaatgtttataagggaccgtgtagtggaacatctttggagacaggtgtgcgagggaaacaaactacttgctgactcaaatgatcaatgcagatgtaatgccgaagacattctattggaaatggaccgtatcttacagcctgaaggagctgtgatattccgagatcaagccaacatgttaatgcatgtgaacagaactgtgaaatgaatgagatggaataccagaatggtggatcatg

SEQ ID NO: 172230 - DNA, 357 bp, Glycine max
agcttcttttggaccttgaacaagcaattaactcctctttcagaaccatgctatgtgctcgcgactggtctctttcttcccttcgcaacttgagttcactattgctaccccatagagctccgcgaaatttgttccggccatactcttccttgcgagccctcttggtctcttgttcaagggctcttgcggtaattgcattctcttcccgtaacctggcacactccttccgaacgtgtgtagcggccaacttgaacttctcctttgcaagttttgcttttcctaactcgctattgagagcttggacttcttcgtcctcttccggtgcttcaaaactctcttcgctgacgacttttaact

SEQ ID NO: 172231 - DNA, 450 bp, Glycine max
  unsure (1)..(450): unsure at all n locations
tcaagttgcttggacatcaacttattntgggccaacaaggcatcttgtgatgaaagctctaataaactcttcttggtaggaatatgaactctatcatgcaaaattgcatggtcactggcagccacattttcaattaagtccatggcttctttaggtttcttcaacttaatttttcctcttgcataaacgtcgagtaactgctttgattgcggccgtaacccatcaatgaagatgttcagctgtataggctctgaaaaaccatgagtgggagttttccgcagcaagctacggaatctttctaatgcctcactcaaagattcatcaggaaactgatggaatgaagatgcaggtctttaaactgttgcccttgaatgaatgcaaccatctcttggcctccccagataaagaaaatgaaaataggctgagcctaatagcatatccaggtacatc

SEQ ID NO: 172232 - DNA, 385 bp, Glycine max
agcttttgtcgtttgaatttgctatgagcttctggtttctattacgagtaactcgaaatactacggaacgcagtcaaacatccgagtaaaaagttattgtcatttggatttgctcaaagattctgttttcaatttgaagcgtctcgatatattacaggactcaattggacatccgagttaaatgttattgccgttttaatttgttacgagcttccattttcaattacgagcgtctcaatatattacgggactcaatcggatatcctagttaaaagttattgtcatttgaatttgctcagagcatctattttgaatttcgagtgtctcgacatactacgggactcaatcatacatccgagtaacaagttattgtcggttggatttg

SEQ ID NO: 172233 - DNA, 361 bp, Glycine max
  unsure (1)..(361): unsure at all n locations
ctgagcaaantcaaacgacaataactatctactccgatgtccgattgaggaccgatagacatcgatactattgtagttggtaacacatgctccgagcagattcctacgactttagaccgttactcatatgtgagacgatgtcctgtatgatatctatacgctcgtgcatactatcacgaagctatatcaaaattcgactgacactgcttttagatcgcatgcatgatggactgctataatagatctcgacactggtaattgattactgtagctctcgacagatggcctagacacactctcttatgtcggatgtacgatcaatttctgatatatatcgagaggctccatattgagaacggca

SEQ ID NO: 172234 - DNA, 386 bp, Glycine max
  unsure (1)..(386): unsure at all n locations
agcttatggcggcaaaggataagctactctacctgaagcatgttgatgttggtgtttaagaacactgtatccttgaaaagcaaaaaaaggtcagcttctcaagggcaggtaagactcctaaagttgaanagctagaattggtgcacacaaatgtttgggggccagccccagtgaaatctgttggaaactcacgctattatgtcacttttatcaacgagtctaccagaaaggtatgggtttattttcttaaaaataaatctgatgtgttttctgtgtttaaaaggtggaaaatagaagttgaaaatcaaacaggtctaaaggttaaaagtctgaaatctgacaatggtagggagtatgatagtcaggagtttaaagacttctgttca

SEQ ID NO: 172235 - DNA, 445 bp, Glycine max
  unsure (1)..(445): unsure at all n locations
tcttatccaaggctcatcttggtggtgaagctccttcttccatggcttattccttaatggatggcgcctcctctcacctcctttcctttgtcttccgctgcatctccatggtggaaaatcaccattaaaggatcccattgaagctcaaagatccagcctccatagaagtcccacaagcaagcttccatcaaaaggttcgggagttgtttacgtacggcgaaggtattagcaccccacacgtccatcgcaagggacgacaacctttaatcaaatgtgccaaatcatgacttcaaactttattntattttccctttcttatgttgntatttttttggggtcgacaaaagcagggctcttgctcctacgtatcctcaattacgatggngaactcagacctacgtagttntttaagtctgaacatttgtgtgtacattgatttatcttt

SEQ ID NO: 172236 - DNA, 406 bp, Glycine max
  unsure (1)..(406): unsure at all n locations
tgcaagctngaaatgaggaagtgtagaagggtgagacttcctgcttttattcgttgaccacagagtggtacctggagatatgtcgcgggggtcaggggccttggggacgtcaggtggggtgctattgcccaaaaccaagcttgaccaatcccgacccaacccgagcatagtcagtcagtgagaacctgtgatgtacctaagcaggcgagctccgggcagtcaacagataaaaggaacaaagaccacaaagcaaggaagcttgtgtggtggctggccagctgtgaatcttatgtgatatgggttatggcctctggtaatcgattaccaagggtgggtaatcaattacaaggcttaaaaatgaagacaagaggctaagatggtctctgataatcnattaccaaggggt

SEQ ID NO: 172237 - DNA, 465 bp, Glycine max
  unsure (1)..(465): unsure at all n locations
ctgagggtgcgcagcccaccatcttttcatagtagagtaccgataatgtgtctaccatcacgattatcgtctccctttccattattgggggtaccacctgngccgccagatccctccaccttttgggcgtgttctttgaatgatccgtccccctttttgcacactttttgtagttgcatcctatccggagccatatcagaattgtactgatactgcttaatgaaggcaaccattaggtccttccaagaatggactcaagaaggttcctaagttagtataccaggcgacagttgtcctagtaagactttctcaggaaaaatgtatcagcagtttctcatcttttgcgtatgcccccatcttccgacagtacatctttagaaggttcttggagcgagtagtccccttgtacttgccaaagtccggcaccttgaacttgggaatgaaccatgttgggtattaggaaca

SEQ ID NO: 172238 - DNA, 409 bp, Glycine max
  unsure (1)..(409): unsure at all n locations
tgcaagcttgcagaattggtcttcgccagtgttatgatcaatgtgggtccgaaaagaggcaaatntgatcatcctactaggacgactgataaaactggggcaaataaagagggtgaggatgagggagaaacccatgctgtgattgccattcctgtacggccaagtttcccaccaacccaacaatatctttactcagccaataacaaactttttccttacccaccacccagttatccacaaaggccatccctaaatataccacaaagtttgtctaccgcacttccaatgacgaacaccacctttagcacaaaccaaaaacaccaaccaagaagtgaattttgcagcgagaaagcctgtagaattcaccccaattccagtgtcctatgctgacttgctcccatatctactt

SEQ ID NO: 172239 - DNA, 456 bp, Glycine max
tcctgctctgtaagaaagatagagaacaataaatattaatgtaatagacaactaaatgcgtccataggaaaagaaatatctgaaaacaaatgcagagtataccaagagcaacagaaaactcaccattaagacggagctcgttgatccttttccatgcataagctgcttttctcaaggtgttgttaaacaactccttcctatcaagtgtggctctatcatactttctgaacgcctacaaatgatagtgaacaaaccagtcaaggtttcagattttcaaagaagctaataatcatcatgtatcaccaaactaatagaaaaggtgaaggaaacggatagcgagctacttcacatgctagagttgaagtgttgaacagctatctgtgaaacatttactacctgctgacagaccctatgtaaaaataatcattctttaacttattggagaaggttaattca

SEQ ID NO: 172240 - DNA, 457 bp, Glycine max
aggccggagatatatcggtgtaacgatacctaatcactcattctattttctctcctccggcaccagtgcacgtgaactttggaccggttatcctatgaccgagctgcatctattgacaagggaacggggtttagggagcgcaatcgttctcacgaatcgcggccggagactacatcacgtggacactcaaggcgaaataatcgccggggggccaacacttgaacaattgggtaatttgaggggacagaaggtcatatccacgctcggtcgcactccacattgcaatgcccggcctggaagcgaggaactgctcagctgagtgctggaatattgaatgggcctcaaacattctccattgctaagaccagcgatcatgccttgtggtggatccaaaccaatggcccttacaatttaagggcctaaggaaccttaattgattgctaaatagaccttcaac

SEQ ID NO: 172241 - DNA, 475 bp, Glycine max
accttaaaactcagctcgcaagcatgatgaccatctaaaggaggcagcgaatttaatgatgaatagagaattatttacacaagtttaatggattactaactattttagatcatttgtcgaactgctattagaaacttcacatacattcataatgaattacaagatgtttatatgagaatacactttgattttatatttttattatcaaacattctactacgtatatatttttctttcaaaatattcattcgatctgatatcatataattaaagggcatttgagcatatagactatttttttttcaaataacaaggattaaaaatatcaattttaaattcagatgataataaacaaacttatactaaatctagagaactaagaatattcttaaacttttatgttttatataaaaatactaaaggtataattctataaagtttaacacggcgacaattaatgctatcgctgtgaatt

SEQ ID NO: 172242 - DNA, 362 bp, Glycine max
  unsure (1)..(362): unsure at all n locations
agctntgtgagcttcaaaagctcagcatgttcactaccctgaagaacattgcaagttgagttctgcaaggtaagaacagggattgcaaagattgagtgtgcagttcttccctcagacaacaataaggatgttatgccacttgatgcaactgttaaaataatatgtccctttgaacgaaatgcagaggctagtgtcttccgcatgaaagtttttcaatccccctataaccataaaggaagaaaatgccaccatattgcatattaacatcattcattactatatcaaagatactttnttgctcatctgcaccaaggaaagttgaaaatattcttaattacttaagatatataaataattgaatt

SEQ ID NO: 172243 - DNA, 459 bp, Glycine max
  unsure (1)..(459): unsure at all n locations
gggacgaatcatanaatagtctctaaatcctattttcaagacatcattgtagactgcaaaattttgtgttgaggaacccgaggtttcaaacttcattttgtaaaaaagacaaggtaatagagtggcccacaatttggcccaactagctttttctcatcacaatcatgtttggagtaagcaaatgcaacctcatattgatgctcttatcctatctaatgtaaatatggattgtttggttgaatcaaattcagtctttgcatataaaacaacatattatgaaaatcaaagaaatattgaatggacttatacggatgttttgagaagatctaaagcctagaagcactatagttntgagcctttnttttatcttatttcaattatgtcattatttttttttaaaggagcctcgttatgattgaatttgaaatggaaaatgttttataatttttctttcaacat

SEQ ID NO: 172244 - DNA, 244 bp, Glycine max
agcttatttgggctgtggccaggttagatgaagtatttgtagagggaagctcattctcgatagggtttgagtttgcggccgcattctcggcttcaacgatgagaatgaaaaacttagaggagcaccggtgccctcgagagaacttctcattgcagttgaagcacaaacccttttcctggcgtatcggcatttctttaagtgacaggcgtttaaaagggaggggatgtggtttggctggaagcga

SEQ ID NO: 172245 - DNA, 454 bp, Glycine max
tgcatttcgacttgcgaaagccccactccatcattaggattattacctatcatttcaaacaaacaaatcaaacataacaagacaattatagtcgctgtttgaatacctcacccactcaagtgtagcacacaattatggattttctctaatgaaaacactcttgccttttaccactctaattccccttgagttcttaggcaattcaagagattatggtcacaacaaaggacaattcaccaatatgcgtaaggtaaggctagagagacaaggaaaaggttaacaatgtgtttaggcacaattgaaggaaataaaatttagaatttaggaattcaagtaacaatccttcatacaaccaatatattaccttatagagattgtttttttcttatacgaattgatgtaagaagatgagtctagaagaagctcaccaccatatgaggccatggataagagc

SEQ ID NO: 172246 - DNA, 394 bp, Glycine max
agcttgacaccattgcttggtgctttcattgctgattcttatgctggaaagttctggactggtactgttgcttccattttataccagatagtaaagatcctctcccgactctttttcttatgattgacaagtattacttatatatcaaattttaacttcttggtgttccaatcatgtattttgtattcttaccattcgagaaaagtagaatgttatctgcagtgatatggatattattattagggtaatggagctagaggatcaagggaaccctttccctaaccctaattttattgaaaattgtatcggaatattttggtttttattgggtagctattatgaatatttttattaggttttaatagtgagagaaatttaaatttagtatctcttt

SEQ ID NO: 172247 - DNA, 459 bp, Glycine max
  unsure (1)..(459): unsure at all n locations
gtngtctgtgctactactaagacagtacacactgtgactcattttatcaatcggcgcanatgtcttagcgtagttgatcccttctacttgatgattatcgagtataactaaccgggctttaaaaggttcaattgtcccatccaagtgatacttcatgcggtacacccatttgcacctgagagctttcttttcgggtggtagttgttgcatggtccacgtacgatttcattcaagagcttgaatctcagattgcattgcttctttcttgtgagcatctttcactacctcatgaaaatagagtggttctttttctgcaataataattgcaaggaaatgtctatgtggcaaagaaaatttttcacaatttacataatgcgagataggataggatgcacctganaaaatgagattaagccgatgaacgagtgataggagataacttcttaatcatgtgtatga

SEQ ID NO: 172248 - DNA, 391 bp, Glycine max
agctttgcagatttggtcttcgccagtgaaaggatcgatgtgggtctgaaaaaaaaaggcaaatttgatcatcctactaggacgactgagaaaactggggcaaataaagagggtgaggataaaggagaaacccatgctgtgactgccattcctgtacgaccaagtttcccaccaacccaacaatatctttactcagccaataacaaaccttctccttacccaccacccaggtatccacaaaggccatccctaaatctaccacaaagtctgtctaccgcacttccaatgacgaacaccacctttagcacaaaccaaaaacaccaaccaagaagtgaattttgcagcgagaaagcctgtagaattcaccccaattccagtgtcctatgctgac

SEQ ID NO: 172249 - DNA, 460 bp, Glycine max
  unsure (1)..(460): unsure at all n locations
tcagaccaaagcaacacanaaatctaggtgtccaaaacccttcaatttaatggattttcaaggtttgataagtgaaattgagaatgaggtaaatttggagcaaactctcacttcacacaagtctatatcatcaatctaaacttgctcaaactggttttacgacgaaaattctaccgaatcaaaatttgacttctcaacacccaattttaccctagaaatggctcttgccctcactttggtcatttgtttttctctctagtacagcccaagctttctcataagtcctaaatgacatttcaagctaggattaacccactttaacctctatttaccactgaatccagatttagccttccaactctcaaatactcactctntttccactcataacaccatgttctcaccttctaactctaggttaactctacccttcatctctaacagttttccataagcaatt

SEQ ID NO: 172250 - DNA, 280 bp, Glycine max
tcaagcttctttatatatatatatatatatatatatatccctttggcggatcaaaatacataaaaaatattctgagccttgtggacgagaatctagagggtaattcgaagaaaaagatcatcgtaaagcagttcgtagctattctgttgcttagagaaaatgattaatttggacttaccatgttcactagagcagacttggctttaacttttttagacaggctcaaattaattccatgttttattatcaaattgatatgaagcacatgatcaaatctttt

SEQ ID NO: 172251 - DNA, 456 bp, Glycine max
  unsure (1)..(456): unsure at all n locations
tgtggtgaatanttattttggtgattgaattctagatatatttgttcatgtattcttgtcattcttagcctatcttttgaattttgagtctaattcatgcatgttatttagttcataacatcttctaaatcaattcctagaagtagtcttgttgttgaactcttttttttttttctaactttcctacatgatgcctatgatgaagttgagttgtggagctgagttgtggctggatttgtgaatcaaaataggtcttaagctctcttgaattgtgttattcaatataattgagcgtaatcaaacacagattgtaactatccaagccttaagcaacataaacactactctcgatttctatgttgaaatcgctggtgctggcagcttgaacatacgaacttgtataaattactggcgaatggtcactacgtgttttgagctgaaagttctactgaattt

SEQ ID NO: 172252 - DNA, 367 bp, Glycine max
agcttatgcgcatacttcttcacgaacgttcacttacactagacattcttataactaagagaaatgcacccatatacaatcaaggcaccttcgttacctagattatttacatgtacttccaaggagtatttgttacctacatcacacacatttcctttgctaaattcacatacatgcatactctaagcactttggctatcgaagattgcatatgcgcacattcctggtatttttataacctatcatacccaaacttatgataatcttgactattacacaaaagggctactttatgctctcttttttttttttcaagggtttactactaaagcccattcaaattaagtattttttctttggtactaaa

SEQ ID NO: 172253 - DNA, 379 bp, Glycine max
gcgaaagctacattcatctgatgattcattccattgtcgcggggagaggctgcctagagcagaatacaactcttagcatagatgtacttttcacctattagtttagacaaactaggaacatcactataagaacaacgaacggtactataagattgaagcctcagatgaatatgttataagagccttgaaaaatgagggaagtttattataagtgccgggatgaaggtttctttattttaaattctcgagatattaaaatctttgttttatatctctatcatcaggtaagtgaagacatatgagcttacaaactaattctctaaatatcatcagtgaggataatagcgtcacgtcatcacatagctaacaagaaagactc

SEQ ID NO: 172254 - DNA, 383 bp, Glycine max
  unsure (1)..(383): unsure at all n locations
agctntgaattcattctatgcacccttatgggtccattcttgctttgtatgttttcatcttcattcttctactttcagtatttcttttcttcgttttaagcgagttttgaccgatcgtttaagccgtaatttcacttaatcgatgtttaaaggaatttcaatcgatcgtttgtgtggtaatctcgtttaatcccccttaaaataaaatccaactgatcattcatgtcgtaacctcggttaaataaaaaaagcaaaaataataataaaataatcaaaatatctgaaaataatattataataatagaataataaaaaaaccccaatcggacattttacttttgaaagttcctttaaatgagctgatnnatataaagtgaaattaa

SEQ ID NO: 172255 - DNA, 440 bp, Glycine max
  unsure (1)..(440): unsure at all n locations
tgaagaggatgctntaatggaggaaaagaaagacagaaggggggagcacgaaattgaaggaataaaacagggaaagaagtggaactttgaagtgtatctcataagactttcattcatcaaagttacaacaagtgttacacatgcttctatttatagactaggtagcttccttgagaagatttcttgagaaaacttccttgagaagcttctttgagaaaacttccttgagaagctcgagcttagctacacacacctctctcataactaagctcacctccttgagaagcttccttaagaagattcctaaagaagctagagcttagctacacatacctctctaatagctaagctcacctccttgagatgagaagctagaacttagctacacacccctataatagctaagctcaaccccatgacaaanaacatganaatacaaa

SEQ ID NO: 172256 - DNA, 166 bp, Glycine max
agcttcttttggaccttggacaggcgattaactcctcttacagaaccatgctatgtgcacgcgacaggaaccttactttccttagaaacacgagataactatagctaccccatagagctacgccataaatgttacggccatactctttcttgcgaaccctcttggt

SEQ ID NO: 172257 - DNA, 292 bp, Glycine max
tgtgcacctatagtctatcaatggggggagatgtgacgtgcaataggggtcagcctcggacgcacttatgtgtatttcgaatgtgcataacaaacattgaattcgacacgaagagctatgcggccgcgcttgcgcaacgtttacgagaggaatttctcgaatgttgtgaccgaacaatgcagttctacattgcgccataatcatacctctatcttacacgcggtaaggacctataacgcatctgttcgatttcatatatgaacctgaggtggtgcatgatgtatgtcatgtt

SEQ ID NO: 172258 - DNA, 175 bp, Glycine max
  unsure (1)..(175): unsure at all n locations
agcttgaagaaattnttagaggaagaacaagtcatcaagtgtatgaaaatccaattctcctcaagagaaagaagaacttagagaggaagggagatgagtatgaaaagaatgggaggaaagggaggctgttacgctttacatttgggaaagaagggatggttgctatttgcatgtt

SEQ ID NO: 172259 - DNA, 434 bp, Glycine max
  unsure (1)..(434): unsure at all n locations
tccttagacactcatcacaagaatcattagaatataaggaaagagaaatagaactacctggaggagtgggggttttgggaggcttccatctagtcaactttttgtagaagaaaactccaataagagatagcttggaagcttccttcttgacgtaggccatgtcttccaaggattaagcaagagcttctctcatcctttgaagctcagcctcaatgagtctgacataatcctttgagggtggaggctcatagactcctatagcaagaacaagctgatatgttgcatcttcaacatcagaatccactttttcaataataggttgaacatgatgagtcaagatgaatctggagtgaggtagacacacaataaaagagaagttgcatagcaccaaactccctcnttcacaagaagaccattngaaaggagtctcaatt

SEQ ID NO: 172260 - DNA, 402 bp, Glycine max
  unsure (1)..(402): unsure at all n locations
ggctgcagctgtcgttgaatctagacctgtgttttgttgaaactaaagatatatttgaacaagctgaaatgattattatggatgaaaatgttgtcttatttaactttcttatgttaatagatattgtatggtgttataataatttgttttctgattattacctttggactatgatttttgttcttgcaggttgacaagattcatgtccttataagaaaagaggagttaaagacatggaaattgactctaaaggagaacaacacttatatgatgcacaactntaaaatttttaacaacgagggccagtataagctatgtttgcatccatataagttgattnttactggtgtcactattgtcatagaagtggaccttcctaatatccctttaaaggcatatgag

SEQ ID NO: 172261 - DNA, 457 bp, Glycine max
  unsure (1)..(457): unsure at all n locations
tctgaatntaaaaggtaaagtatgtaatttcaattaatgatgaatataatcaatagtgaatattatgtacacatatatgataagttatgaatgtattgaaacgttatttattaatttaattctcctcaaggaccgagattatgtattttcctatgcacatttaacagaatatttgcaagtattgattatacattgagactctatgtagaaaaagatataaacacaatttttataaaataaaatttcataaaattcaactttataagatttattcttagttcctacaatgcatatatgcgtgtttcagtgctttttaactttccttatatttgcttcaaaaatatggtagattttagagatatatgaacttagtccaccaattaaattataacttgtatgtgtccttatttctcanatattatagtaatgcaacattctcaaatactcacatccttct

SEQ ID NO: 172262 - DNA, 405 bp, Glycine max
agcttccatcacctcggttttctttaacttcgtgggacacccttttcagcacaaggtccccctcattcaacttgtgggggcgcaccttcttgttgaacgcgttctttatcctttgttgatacaggcgcctatggctcatgggcgtcaaacgcttaccttcaataaggttgagttggtcgtagcgtgtttgagcccactctgattcttctaggcccgattctgctagtatcctctgggaagggacctctaccttaaacgggagcactgcttccatcccataaaccaaggagtacagtgttgccccagtagaatttcgtaccaaggttcggtacccatgcagggcaaaaggcaacatttcatgccaatctttgtacgacactgtcataccctaatttcgtccaagga

SEQ ID NO: 172263 - DNA, 453 bp, Glycine max
  unsure (1)..(453): unsure at all n locations
tgcaatacttcaacaatataccattcacatacatccattcttattntttcttttcacattnggatgcattgctcattgcattctttccttgaaatcagaaccgtaatcattgtaatcaaaaggaaacaacacgctttatggtgcccttacggaacgcatgccagagctagagtaaggagtgaaatagaggaggtgcaagagcagatgaaggttgacatggaggccatgaaagagaaaatgaccacaatgatggaagccatgatgagtatgagaaggatgatggaggtaaatgcggctacagttgttgccacaagtaccaccatagaagtggacccgactcacccacccggcttcaatgaagtaaatcatctagcctcggatatcgtaggtcagggaggaaaagcattangaagtacgggcggcccctattntgtgcaggtttagaacaagcat

SEQ ID NO: 172264 - DNA, 300 bp, Glycine max
agcttgccgccacggagtttttcgactatgctcttgtgtggtggaacaagctacaaaaggagagaacaagaaatgaagagccaatggttggtacatggatggagatgaaaaagatcatgaggaagcggtatgtgccggctagttactcaagggacttgaaattcaagcttcaaaaactaaccccaggcaacaaggggttgaggagtatttcaggaaattgatgtgctcatgattcaagcaaagattgaagaagatgaggtgatcaagatataaccaagggcaaggaccatgaagcacttg

SEQ ID NO: 172265 - DNA, 462 bp, Glycine max
  unsure (1)..(462): unsure at all n locations
tctagccaaatggacttaccttgaattaattcctttggtagcccttttgttccttgtttccctttccttgttttgaagctcactacaagccttaagtgaaaaaccatgatattaccatatccttaaggaattttggagctttggaattgttttgggaataagtgtggggggtttttgtttcattggacaacttgttttgttggctatgcttcatgatgtattttgggccatacttgatgtacattgtatattggttaaatgttggacatgctgaatgaaatgttgtttctcaaaggctaaaaaaaaaaaaaaaaattcgagaaaaaaaaaattcggaaagaaaaaaataagaaaaaagaaaaaaaaaagaaaagcaataaagttgagtgaataagatcttaaatggcacaagaatgatgaaactcttggttctactcttcatgtttaattnttatctttact

SEQ ID NO: 172266 - DNA, 242 bp, Glycine max
agcttgcatgattcacataagtctattatcaaacggtttaattcagttggttgaataaagtgtgagtgttataatatcgtatttgtcgcaacctaacatcacaacgggacgacgaaagacaataaaagagattttttttcctaagaaggaaacgagagggagtcgccactaacatttatttaggggaaacgttagaaaaacaaaaaagaaagtctgtgaaatttgaaaagagaggttcgcga

SEQ ID NO: 172267 - DNA, 336 bp, Glycine max
aataaaagtacgggtgagggtaagtaatatagatatctgtgtgtgatagcctatctctaggctctgacattgcgaaggttgcatggcctcatccatgtactaactaagccatccacttggacatatgaattataaattaaaccttgatggccttatcttatataaccatatgagctgttcagctcagtcatactccaaagactcgcataatgatgcatacttcccagtactcttgcatgcgtactatttacattaataatatacgtcagctaccatgcactttgtatatttgcaacgacatacttaatcaggccatttaattagtgactagaatga

SEQ ID NO: 172268 - DNA, 395 bp, Glycine max
  unsure (1)..(395): unsure at all n locations
agctntggaaaatgatntgtatacaaaagttagtcgtatgaagcgactaacacacctcatgcattatagcctcaaaaccaacgacaggcaatgtaaacaagggagaattttcctaaaatatttagacaaagttatgttgtgaaactcaaagtagaaaaaaataggcaatgcatgtcttttaagttttgggaaggctatgtaaacaagggagactttgcccaaattttcctaaaatttttagacaaatttatgttgtgaaactagaagtagaacaaaataggtaatgcatgtcttttaattttagtgtgagcatatgctattgcctttagtgttttggaaaatctaaccattttatttttgtgaaacttgtcttaaattaaattgacacacaatga

SEQ ID NO: 172269 - DNA, 457 bp, Glycine max
tgccacccagctcgcccaggcgagcagggttgcttcctccagaagcaacagccttctggaggaatcttttggagggcccaagtggacctggttgctatttgcacccccatttttactaagtacaccccctgcctttttttggtgattcttttttcgtaaagttacggaaacttacgaatttcgtaacgatacttgttttctttccgtaatgttatggaaccttgcgaattacataatcatcccattttttgacttacggaatgttacggaacctcactaattatgcaacgatgcttctatttgatttccggtgtgtcacggaaccttacggattgtgcatcaatattttcttttgttttccggcatgtcccggaatttcacaaattgcctaatgatgggtgccaagcacctcacaaggaccaaacaaaagttgcatgtcatcaggcaaaggtccccg

SEQ ID NO: 172270 - DNA, 387 bp, Glycine max
agcttgtcataggctcaataggttccttcaattcaatgaaggtcctagtcaccattattgacaatcaactccttttcaaaagaatcataatatatgaaaatttaacttaccaacttgggcgtaacaaatgcaacacaccttctccgaataaaaccaaaacttaataaagcattcataaatcaatattagttccttccattccacaattaccaacaataatcaccactctcattatgaacttgtacaaagtacaaacaaaccaagaatacctgatcttagcatctgcacaaaaagactcaatgcttgagaggcataccctctctgggaataagctgatatcatagccgtccacgacaccacattcctctgcggcattacatcaaacac

SEQ ID NO: 172271 - DNA, 438 bp, Glycine max
  unsure (1)..(438): unsure at all n locations
tccatcataggttcaccagttgagataggttgcaatctatactacaaaaggaattatcaacattaattgaaacaaatttgcccaacattgtccaatacgaaaggaactaaactaaaatttaatgcccgtcaaatgcgctggtctgtaaggcaacaaaacacagacacgcaacatcaaatgcccatcaacattaatcagtgggtgaagagtttaatttgaatgaatgatagagatccattgagacatatgttgggagaagggaaaataagagaaatcgaagacccaaatgtagaaatcgattttaccttgacgtggaagctgtcctgaccttgtttcacttcaaaatcaatttcaacgaggtgaatcgcgtacagcgaagaagccaaacatcacaatcaactgattntcccacgtttgaccacgaaatacacgcgtcaa

SEQ ID NO: 172272 - DNA, 288 bp, Glycine max
agcttgttgttcggcatgttttttatgtattccattgccatgcatgctatgatggaacaaagatgattcgcctttgttttgtttctgtgccaatctttaatgttagatgcataattcttttcttcaaatcattagtttttaatgtaactacaatacctatgtaagtcttcatctacctttaattattggatcatcatccttttggtgaactctacatgaaaccataaaaaaaggaattctatgtgaatggaaatttcaagattgtccttgaaagacattatggatgct

SEQ ID NO: 172273 - DNA, 409 bp, Glycine max
cgtttgagcttaagtcgtaagccatccagaaactgtattcacttttaactttcaccatctctccgttgataagggggatagtatctcaccagctcctaaaacttggctgcctattccgccacgaacatgttacctgcttgagctccaagtacaacatctctgtcggtgttcctaacataccgaacaaagtgtttctccaaatataccctcttgaagacatcccaggacacatgatgaccttcagcctctaggcattggcgagtattcgcccaccaatactaagcttcttccaccctagtgtatgtaccaaaagcaactttattcccttccggacatgccatcactcggaaaatcttctcaatttcccttatccagatctgagcaccatcagggttgtatcccccattga

SEQ ID NO: 172274 - DNA, 124 bp, Glycine max
agcttgactaacaccaatatgacaggttttacaggctttcatcaaagctcttaacaaataacttggataagccataaccctagtaaaactaccactcttatttccaaaacccatcccttgaaat

SEQ ID NO: 172275 - DNA, 375 bp, Glycine max
  unsure (1)..(375): unsure at all n locations
tctcgcgcaattgtctatanataggtcgagaagcgaagtgatttatggtttatccccttacgcacttctctctctttctaatatgcttggacaaattgtcaccgtgatgaacattgcccccgaagcgctgccacaacgtgatcgtaacgtttacgtgaagaatttgtcgatcattcttcgacgctcttcattcggtcatcatcgttcttcgatcttcaacgggtaagaacctctaaccaagctctacgattcattctatgcacccaggggggaccacattgcgcttcgcgtatgatgattctcagaacacttactatcgatacccccttctgacgtgctcaaaccagattatataagacggttctcgcttatact

SEQ ID NO: 172276 - DNA, 159 bp, Glycine max
agcttcttttggaccttgtacaggcaactaactcctctttcagaaccatgctatgcgctcgcgactggtccctttcttcctttcgcaacttgagttcactattgctaccccatagagctccgcgaaattgttccggccatactcttccttgcgagccct

SEQ ID NO: 172277 - DNA, 451 bp, Glycine max
tgcttgagaagtttctatggaggttggatctttgagcttcaataagggtgcagtggaaaataaaggagaagagatgagaggaggcaccatccactagagaataagccatgaaaggagaagcttcaccaccaagagagtgccttggataagaatcttagagagcgccatccactaaatgtgcttaggtgtcatgaggcatgtaaagcatgaaggacatgcacaaagtgtgactatatgatgtggcaatggggtgtagcaagcaaatgctcacctccccctctaaaatttaattggattgagcttttcccaattcaattaaatttatttcccaacacacatatcaaatattcacttaattcctatgaaattacagaactacccctaatacaaaaactagtctaggtgccctaaaatacaagggctgaaaaatcctacatttctagggtaccct

SEQ ID NO: 172278 - DNA, 297 bp, Glycine max
agcttcccgtatccgtacttggaaggatctgattactgccttcctaaggcaatatcagtacaattccgatatggctcccgaccgcactcaactgcataatatgttcaagaaagagggtgaaacctttaaagaatacgcgcagcggtggagagatttggcggcacaagtagctcctcccatggttgagagagagatgatcaccatgacggtagacactctgccagtgttctactatgagaagctagtaggttatacgccatccagctttgcggacctagtattcgccggggaaagaat

SEQ ID NO: 172279 - DNA, 373 bp, Glycine max
  unsure (1)..(373): unsure at all n locations
tcctgatcatgagggagctaaacanaatgttcatgcacgtggaccttattctaataattctgacttgcagcagccccctatccctcttacattcccacctatagcaattcctaacaaaaagatggaagaagtggaaaatgagatcttggagaccttctggaaagtacaggtgaacatacctctactagatgccatcatgcagattccaagatatgccaagtttctaaaggagctgtgcacccacaaaaggaagctcaaaggcaatgaaaggatttgcatgggcagacatgtgttagcattgataggtaaatctgttcctcacattcctgggtaatgtaaggacccaggtactttctgtataccttgcattatt

SEQ ID NO: 172280 - DNA, 272 bp, Glycine max
cccgacgaagacactgacaaaaacttatcttctcctttttggacaaagtatgacaagcagggggcaagtaaattttcttcccatcagaccttggatgcaagtgtgatcgtatccccatctcatctagatcttgacgggtattcaagtcatccttcatcttgccttgaatgttaaggagcatcccaatcacattgtcacatacatttttctccacatgcataacatcaatacaatgtctaacgtctagattagaccagtccgaaagatcaaag

SEQ ID NO: 172281 - DNA, 452 bp, Glycine max
  unsure (1)..(452): unsure at all n locations
tacttgaatcagtaagtagtatttatgcaaattcttgttaaatatgtttgaattataagtagctaattttttttaaaattcagggcccattggcagttgcttgtactgtgtccaacaaacaatgttgttgcctgattttgttcattatgtaagaagtctgatattcatatcatagccgcaattaacaagttaagttttatattctaactaatttaatatattataatctttgaatgaccaatttttaatcatacacgttaatgttttatttttctccccaatgcaatgaaggcagtaaagaacactatggatggtaaaaatgatcaaggaactcctaagtggattgaagcgaaggttagtcatttatatgtcatgcttatttatggctggtggtgtgtacatagtaacttcagtacagntgttcaattcaattatgaattatattaaatgta

SEQ ID NO: 172282 - DNA, 258 bp, Glycine max
aacaacatcttactaaagaattgaaaccttgagaaagcggctaacacctgaccaaatctttgcctctataatcttcttgattgaagtatgacttcctcactatcatagatcaagcgaaacttggggaggaagcatgttactctccgagggatcacctaatggaagaatgcttactctaacgattgattacattgacttacgggcagaaaaaggagcaaaatcaccatcaaaggaactcatagtggataacacattcct

SEQ ID NO: 172283 - DNA, 105 bp, Glycine max
  unsure (1)..(105): unsure at all n locations
tggagatgactggtaccttcggctatctgttggaccatgtcgganagatttgagagggaaccacttagtgtatagacgactaaaatgcgtggacgcagtgtagat

SEQ ID NO: 172284 - DNA, 395 bp, Glycine max
agcttttcctcccagtcttgtcaatgatgtaaatgcttcagaattgaaccaaatgcattgaggccagctgtgatgagtgacaaaaacaatgctgtcctgttagatgcaaaaccagccaactgaacaatggtgggactataatacatcacagtgttgattcccacaaactgctggaagattaagaggcccacaccagcatataaacctcttctcacagctgaagttcttaaaagtttgactatgttgatcttctctgatgattctgcttccttaatttccatgtcaactgattctttcaaggcctgaatttcgccttcaacttcatgtggtggataaatctttttcagaatcgattttgcttcctcttccttaccctgtgggaacaaaaatggaac

SEQ ID NO: 172285 - DNA, 448 bp, Glycine max
  unsure (1)..(448): unsure at all n locations
tcatatatgttatctatcattagtatactttngttccttgaatttatccttcacttgtgcataagggatatcatgaaagttaaaaagcattgatgggtgttgaaagatttcaagaatatatcagtgacttttctttcatgtgtaaaatcacatctattggcaaatggtgatgaaaaaaaggtgttttcagcttaaaaatttcagatacattggctatcattggaaagatatccatattacttgataccgtgttttgcatgtttaggttgctgataacaacaaaatttgagtttaattgatagttaattttggctaagaatgattaaaatttctccactttctgttgtttttaatgaaataataaggaatttaatatcattgtaattgtttatcagcaggattcataagaaaaaaaaattcaagtgctttggagggagaatgatgcaaa

SEQ ID NO: 172286 - DNA, 382 bp, Glycine max
  unsure (1)..(382): unsure at all n locations
agctntgagggtgcgtagcccaccatcttttcatagtagagtatcgataatgtgtctaccatcacgattatcgtctccctttccatcattgngggtaccacctgggccgccagatccctccaccctttgggcgtgttctttgaaagatctgtccccctttttgcacatgttccgtagttgcatcctatccggaaccatatcaaaattatactgatactgcctaacgaaggcaaccattaagtccttccaagtatggactcgggaaggttccaagttagtgtaccaggtaacagctaccccagcaagactttcttagaagaaatgtattagcagttcctcatcttttgcgatgcccttatcttccgacaatacatctttggga

SEQ ID NO: 172287 - DNA, 461 bp, Glycine max
  unsure (1)..(461): unsure at all n locations
tagtgtttcacttacaacagcaatacaccttatataaatacactaaatacaaggtctggatattagtgtaaagatgaaatacctatatttttgttgattatgtgtgtcctattagcattgtgatgtttagttcttgctaaacactttccttgcaatatgagttttcattttaatcttgcagctttagcatgaaatattgtattagaaaccttttcttccatgtttaattacctgcaaaataaatgtggtttaataatgaactaatattattgaaacattaaataaagaagattcataggtgttaaaaatctggaataaagatagctgagtagaatatgattcacaaaaattattaatcaccttttgaagagtaaaataattgtttggtttgatatatggttttttggatgttctatcactaaaacatcaagtctaagcgacctaccatctatganactatt

SEQ ID NO: 172288 - DNA, 408 bp, Glycine max
  unsure (1)..(408): unsure at all n locations
agctttgatggagaacaaccttaggatgtagagggtacacgcatggagaagaagaaagcgcgagcaaaataggtggcgtctaatataatttaaattgtaagttcaacatcaattttcaataaaaaaaaccaatgttaacaaattcatgttaacgttaacatcggttttattcaataaaccgatgttaactgatcatacgttaacatcggttttcagaaaactgatgttaacgaactaaggctaacatcggttttctgaaaacccgatgttaactaattaatgttaacatcggtttttccagaaccgatgttaaagtcactttgttaacatcgattntattcaaacccgatgttaaagtatacacaatattcacaattatgccacgacgtttatcttaacattggtttt

SEQ ID NO: 172289 - DNA, 461 bp, Glycine max
  unsure (1)..(461): unsure at all n locations
ggcatacgggaaanaggatttgagtttgagagctacatattgcatgaatttgttatagtaccaaacgatcctaattgctcatgatttagctaaaacatctaaataaaccgagtatgtttttataaataaattaaaaagttattgagtaaaattactctatcataatctcctctcacacattttctaacataaactacatcagtatatttaaaggtaattattaattataaattagtaacgcactttgacaaaaaaaaaaaagaagaaagaatttaatgtacactaacaaattctactggctttttgttaacgcatatttactgtttctatggttggaaaacataagatataggaacacattttcattacaaacttctcatcaacagttcaacacccattnttttttatatctctattnttattatattataatacctatcatatttacatttgtctctctt

SEQ ID NO: 172290 - DNA, 274 bp, Glycine max
agcttttaaaatggcccaggtttagatttctctaaatgccattgaagtaatttttttataattttccatgttaatcgagcacccgattttcattcttcggttttttttcaccaaaaaatttcatttcctgttttttatttatcatagaactaatacaaagtagtttccattgagaacggtaccggtaaaaattaattaatcacatttaataatattaattttaaataaaaataataatttttaaaataatttatcattaaatcttgatatcaaa

SEQ ID NO: 172291 - DNA, 435 bp, Glycine max
tagtgaaccatgaagcttgatcgagttcatctaatacttcatcaatcgtggggattggaaatcgatcgcggactgtaacaacattaagagacctgtaatcgacacatatgcgccatgttccatcctttttcttcacgagaagaactggagacgaatatgggctcgtgcttgatcttattaagcctgcagataagagttctgcgatttgcctctcaatctcggccttttgaaagtgtgggtacctataagcgcgtacgttgaccggagctgttgcagggagaagggtgatacgatggtttacttcgcgtgagggaggcaagcttctgggtggttggaaaagtttatcgtatcggagaagaaggtttgcgattggtgtgataatacgtggaggatgtgtggctgtacctgtgggggtttcagataagagacataagt

SEQ ID NO: 172292 - DNA, 339 bp, Glycine max
  unsure (1)..(339): unsure at all n locations
agctttagctntcttgttgttcatgttgctccccttatctctaaaaaattcattgttacatacatccatcatccttagagtatgtgaccggttaacgtattctattattcatggattagatgcccagaagtcctatgtattcccttgcactctattacatgttgaaaaatcctttggaagacaatcccttattgcagagctttgtggatggagatgatgcttataagaacctaggatttaagttgataccatatatttctaaggttcatttatactaaaatgtgacatgtaataaacaccaacaaaaaaaatgcaggatcaggataataagcgtatcta

SEQ ID NO: 172293 - DNA, 455 bp, Glycine max
  unsure (1)..(455): unsure at all n locations
tgacgaggaagccatcttgcggagcnttggatgagattntgagagattgtgaggtttctagaggtggaggagacatccccactacttgtatttcttctatctttcatcttctcttctcactgttgtaaaggaagcttccctgctatggagagttaaaccctcagttggttcttcctatagggtacttgatgtaaatagttgtatatctatctaatgatgttttatgtgttcactatgctatcagtacttaattctagtgtgtctttgccttgatcacgcaactacatgcttagttagggtcactcaacattgggaaatggtttgatcgttagaacctgataggacagggctagcttatcttattttcacgagacatcgggttacgaataacctagttttgttatgttatgtcttaatgcagttctggttaagtttagtccaacaagagacatctg

SEQ ID NO: 172294 - DNA, 388 bp, Glycine max
agcttcatgtcttcattgtaacttacctgtgttgttatattgaaaacctaggtctgtttcgggaactcgtggttaacccaaggaccttttttggtttatgctgcaaggattgaggaactcgtgacctgaggtaccaggtaagcttcatgtctttgtgtcattgtcactgatctcactgccaatcttgttgccattgtcactgttgggttcaaggtaagctttgtgcctccgcgtacgtgctaaatttgagaagcaatgctacctttttctaactcatgagggatacatagacaataatatatttagaaatgttgcagtagttttgtttgtttcactcgctcaattttaattcaaataaatttctttagtaccaaattactacacttta

SEQ ID NO: 172295 - DNA, 458 bp, Glycine max
  unsure (1)..(458): unsure at all n locations
ntaggatatctaatttatattntaggatatgtaagttatttgtttgtttttcccttttattgccttagtaccatccttttgcatgatctcatattgttttttttgttccttcattctgtatcagatttgaccgtgactggaaaaagattgaagcatttgttggatcaaagacagtcatccaggtaatttcaaatgcaagttgtgactggatatttacattagctgttgtttttgggttgttagccataagtgttctggattgaattaggcatgttatggtttttaaagtgtgtttgattatgttacattaatgattttggcactttccaaataaataattggttattggacatggaatgccaaaaaagaagatttcaaggcatgaagtgcttccatttgtcaattcacctatnttggtgtctctaggtggctatttttgtccctctccttctcaatta

SEQ ID NO: 172296 - DNA, 358 bp, Glycine max
  unsure (1)..(358): unsure at all n locations
agcttattaatgtatgattaaataacatttaagacaatttgatcagttaattcatatttaaatatttttataactgttaatttgtttattaatttcaaaaattattttaacaaataaattaattcaaacattttgtatattttaatgaggaaagtatatgattcgatattatcattttagtgatgtattcaagtttctttgaaatatatgattagataacattattttatcacgtattcacataatttaaataaaaagttacaataacgtgaggaatagtgaaattttgttacgcaagataatgaaatttgatatattcttattaaattgatatagaatgaaatataanaatttaaaa

SEQ ID NO: 172297 - DNA, 451 bp, Glycine max
gctgaggcttgcggctattttctcccagaacagtatacatatattaaacataaacaagaagctttcttgatttggctggccattttgacatattcgtgcatatttacatagagactaacccattgctaatagtctatattgagacgggtcaatggggttttatataactatgttaattgctaatagtcaatgcctatcagtatcatcacataatccaatgaccttagacttcattgtataatagtaacacaatcatattaacataataatttacataatatggttgtcattatgaggatcaatctctcagacaaaagtcaaaaggaaggggggacactaggacagatgcactttacaatccgattatgttcttatatcgtttcaatgagacagagatgatatttcatcactttgagtttcaatgtatgacaatctgtgcaccaagtggaca

SEQ ID NO: 172298 - DNA, 339 bp, Glycine max
agcttgaaggggtgctctggacagaaactcaaatagcaaagtgaaagcttcctcaataaaattacttgcccacattatgcaattcctacaaaggttagtcagattctttgtgatatggaaatactatcataatttgcaattgtcattaacactggtttggaaagaataccgcgcttttcaatttgtcatttgattgtcttttctttggaattatgttacatacatagcagttttgcttctaatgtttgatctaacaacttagtcatgtcataacttttggtctgaaatattattcctcattgtgggtttgcatacactactaaatactggacattctat

SEQ ID NO: 172299 - DNA, 440 bp, Glycine max
  unsure (1)..(440): unsure at all n locations
ctgtatcgatgaccgagagctganatctgcacaatacgctccctgtctataaaagctgcatatctcttccttgcgcgaaaccctttcttcctctttctccttgatgacgcccaaccctctccaaacttcaaatcttcataactttctcacttattatccaaatcacttcacacaaagctcaaatttcttctttttcaattctctacagggcccgccgatcaaaatttgctgaaaccagctacactggcagaatcctcaaagaagagaaagggatcctcctccaccaccaccactgcatgccaacgccgccacggcacatccgatgacccaccaacatcaaatcctgctatcttttcatctcccaagacattaactgtgcagcctttcaacgaccagcgctagaggcattattcccaattctccaatcgcgctattcttga

SEQ ID NO: 172300 - DNA, 482 bp, Glycine max
cccccccatctacccctaccccgacctcatattccctaactcccagccggctcatgatcttgaaccttgatcctgccgccccggatcttaagaagactgcagcatgcaacctgttataacacttctagttgcacccgaagatgttagtcaatgctgacaacaattctgacgtacatgccgttataacacactgatagccctaatgacagagggaaggtagaagaaacccaacccataatcttaaactatatcaccccaaccgtgggcgacatccaggccccactttaatcggtgagaattacacctacccaacccaaaacattctggatttttacaactggaaccatttttgaacttcaaacatttccaactcagttttggttaaagaaaaccatctcccccgcacaccctgggaaaaaacatccaggtatcttccccctttgggacgcgtaaccccaacagaatttccctcctcatggacg

SEQ ID NO: 172301 - DNA, 448 bp, Glycine max
  unsure (1)..(448): unsure at all n locations
nttcatatccaccaagaatagctcaattcacttatagatctcctgatacaattttcagaatgaactcatccttttgatgaaattccattttgagtgtattgtggtaatgttgttcttcatgtcatgttcattgtgcagatcttcattctacaacattcttcttatcctttagttattgattacttctcatggcttaaagtttttctcttcatcagtgagcattttgacttcttcattgcagtacataaccaatgacacttttgagtcttcttttaagctttcaagctaatcatcctttctgaatgactcatgacaacactaagtttacttcaaattntgttctttatagaacttatcttttcttaatacacttaagacaattcattagtaggcataaactcaaaaggcatatgatttgtatacagacggttngtcataattaaaacac

SEQ ID NO: 172302 - DNA, 355 bp, Glycine max
  unsure (1)..(355): unsure at all n locations
agcttgcaaccccatcaccccacaaacttcacatatacaacacgacaaaggagggggaaaacccatacacgtgtaaaaaaatattttttgtgtgcatatagcaagcatctttcaaggaaataatttgggttgaataagattgttatgcatataagaatttttattacgagtatttaacacatttatatatttaattaaaacttaaacttaattaataattcagttgacagaatttcgtgttagtctataagaagttattaaataatctaaaatcactacatatccatggtgtcaacttactaatggtggatacanggaacattggataggattcgaggcattttaattccaacaa

SEQ ID NO: 172303 - DNA, 391 bp, Glycine max
  unsure (1)..(391): unsure at all n locations
ngagctcactgttgctgccccacaacactccacggaatttgtcacggctgctcttccttgcgagccctcttggtttcttgatcaagggctttagcggtagttgcattttcttctcgtaacccagcacactcttttcggacgtctgtagcgaccaacttgaatttttctttggcaagtctcgcttttcctagttcggttttcagagctcggacttcttcatcctcttccggcgcttcgaagttctcttcgatgataatctttaacttggagagccaatctaaacctcgtgtacgaactttcaaccattcatgataaccaccaatgatgccattacgaatgcccctaagttctttatctttccttaacgaggcttcgcacgccttatggactc

SEQ ID NO: 172304 - DNA, 224 bp, Glycine max
agcttattagtcggtcttttccatttatttgtaattttgcattgccattgttttttcattaactcttcttgtatctcctttataatgtaaagattttgctaatcagtatctctaagacactgattaagaattcaaaatgaagggtttaataaaaaacgacattaatgcatatatactatgatttccaacacactttcaacgtgaattttttttaaaaatatttt

SEQ ID NO: 172305 - DNA, 434 bp, Glycine max
tatatattgatatatacttaatattatttgtaaaatattaataatttagaaaataaaagtctatttcaattgaatgattaataataaaaaatcaatattgattcgaattataataatactaacattttttttattagtaggaagtgaatttatgtactagaaagttcaataactcacgcgcattattcaataaagttagaccgacttggtattataatactaacatgaacacttatttcatctgcataacttatcttaataatttggtcatttaatttttatttttttaagtacaaaggtctaaaatagtcaatagtttgatgtatatatattattattggacatagaatatcaaaattgtaaataatgttaaaactaatttatatttgatatattaactaatttcacaatagtttgaattattttttaatatg

SEQ ID NO: 172306 - DNA, 451 bp, Glycine max
cctagatcatttgcaaatatgcatgtgaattatgaagcatcaacaagaattaagccaaggctattgtgcaatcaatcaatggggaaaaacacaccaaaagattatgatgatggatggctcaaattctgacaaaggtaaacttatcactttcaaaactatcatgacttgtcgaggaaacataaagatttcaaatcacacaatgtcaagagacttttattctcagaacaaatacccatttcttgaacatatcctataattcaaagaaaaacatgcaaagttgtacatgcaaacaaaattgaccaaaattaaactagaacccaacaaaactagaaagaattgacctacaatattaaactagaaacccaacataactaactaaattaaactaatttaacacaactaacaaaaccaaaaccaaagaatacactcctctccatacttaaacaacaca

SEQ ID NO: 172307 - DNA, 317 bp, Glycine max
ctaagctacgatgcaatatagtggagaggacttatgaatcatctatatgtacgcgctccatgagagagatggcctcatatgtgataatacgcgatcttctttgaattaacaattgacgataatagggcatcatggtgctcctacactaaaccgattagatggcgtcaaacttaactattctcttatttaagcgataaattgatctgatgcttactctgcatgggacatgaaaatacagcatgttctctcatagcccacttattacgagcgaccataatgtgaatcttgcctactcggagattatccactatgcttat

SEQ ID NO: 172308 - DNA, 446 bp, Glycine max
cattcgtgtgagaagatatgactgttagaattttccgttagtttccgatgttgaatttcgagcgcatcgatatattataagcctgaatcggacatccgtgtgaaaagttatgaccatttggatttctagagagtttccgatgttgaatttcgagtgtatcgatatattattaacctgaatcggaccttagtggtaaaagatatgaccatttgaatttcacgagagcttctgttgttgaatttccagtgtcactatatgtgatgcgccaaaattggacattcgagttaaatgttatgagcatttgaatttctcaagagcttccaatgttcaattctgagcgtctcgatatgtgattcgcctgaatcggacatccgtgttaaaagttatgaccatatgaatttctcaagagcttccgttgctcaatttcgagcctctcgatataatat

SEQ ID NO: 172309 - DNA, 445 bp, Glycine max
  unsure (1)..(445): unsure at all n locations
tcatgactaaacacaatagagaggagttattctttcatgcattnacacatcaagagacacacacttatccaaggcatatatacacttcaaaaggtgttcacaacactaatccacacatcaagagagagataagcttattaacaacatacacgtaggaagataaaggttcattaagacattatcaatcaatatcaagactacctgcatcacctaacgacttgccatatgtcctaccatatttcacgaattatagagatagtcagtctcatagctcatgactcaatagtggaattatggtatagcgaaaaggaaaaacaagcatcaattagtctcatgcaatcatgcgaaaaggaaaaacaagcaattattcacacatcttctatagaataatcaccagaaatcacacccagcacccaccccaaatatggtgagcacataacacact

SEQ ID NO: 172310 - DNA, 423 bp, Glycine max
  unsure (1)..(423): unsure at all n locations
gctccctcttccatggcttattccctagnggatggcgcctcctctcccctcttctcctttgtcttccgctgcatctccatggtggaaaaccaccattaaaggacctcattgaagctcaaagatccagcctccatagaagctccacaagccagcttccatcaagaaccctcaccattaacactagatgaagaatgaagactcatgttggttcccaaaaaaacactaataatcctaagggaaaattgcctaaaattattacacacaaatggaagtagggtgacctgttggaggcttctaacttacttccaatgaaaggcctttttgttacaaaatttgaaagcaatgaaagtaagtgaattgtcaataacaaaattacaacaaggtcctcaattttggtggttgttctctctttcgtgattcact

SEQ ID NO: 172311 - DNA, 324 bp, Glycine max
tgggcaacaagggatggtggggttatgcacgctctgtggatgtggaaaacttgttgtgcaccaatccccgaccgccacctaggtccacatgtgagtgggaccccataatcctacaagcttgagatgagaaagtgttgaacggtgaaacttcctgcttttattgttgaccacagagtggtacctggagatatgtcgcgggggtcaggagaccttgtggacgtcaggtggggtgctattgtccaaaaccaagcttgaccaatcccgacccaacccgggcataattcgtcagtgagaacctgtgatgtacctagcaggcgagctcct

SEQ ID NO: 172312 - DNA, 347 bp, Glycine max
ctcaggtattgaaggcactcattttgctctcctaatgtcaatcgataacggtggacttctctcagcatcatggggtggtggctctgttctccacatgctcaggatcacaagaacgaagtttgattacatttggttggcgatcatgattcgcaacattttaaggattggtacactttggctcctgtttttggtgcctagagctgaccgcatctcttcaattcttccatgtaaaagcatgaattcataggtggctatcgacccttcagacaccaaaaatgtcgaattggtgtccctcgtacacagtgatgatggtaaatattggaatgaaaagacattctgttggattc

SEQ ID NO: 172313 - DNA, 204 bp, Glycine max
acaattaatctgggggcgtgtgttcatgattattaactccaccgcgctaacttcgtccaagactggtctttggctagtgtgtacaaagatattattgacccgtcgattaatatgaaagatataacacctatcggactttaacagacttttgtgggtttgcataactgcgtgttccctactttgatgccaggtgtgattcacgat

SEQ ID NO: 172314 - DNA, 446 bp, Glycine max
  unsure (1)..(446): unsure at all n locations
ttcaccaatttatggttattgtggagtaaattttgtaaataaatcttgttttatggttaacgctgtctctagaacatttccattgaatttaatgatgaaatctgtgcattttcaggtgaaaaagaggctaagttttgaaatgccaaaagtagcagttgggctaagcgcatatccaccactaagcgcagcttcaacgcgtttagcgcaaaggagaatttggcagagcatcagcattaaagtcgtgtgctaagcacagcaggtgccttcagccagactcagcgcaagactggcgctaagcccaattccacttacttacgctaagcgtgagggtggcgctaagcgtaaggtcgcaaattctaagcctatttaaagcctgttttgtgtagaattagggtacacaccttntgagacttgggacagaatttttagaggcacttgtgcacaac

SEQ ID NO: 172315 - DNA, 445 bp, Glycine max
  unsure (1)..(445): unsure at all n locations
ctagctgtgntgatgctaagaatcaacattagttatattctgctcttaagggtcacataaaaattgacccagtgtagcacatattaattactcacgtgatgagagagtaatttcttaaaatgatgatatgttggagagtgtgttttaaaagggaggacaatttttactaaagagagctcaattacatttataaaaataaaatattagtgcattaaatatatgctaatctaccattttttttattttaaaaaattatttaattagaaaatattcattggaaataaaaaaaaattcctctctctttccttccatcatttgatgccttttccatttatgccttcaaaatttcttgttcacatctaaaaaattatttatgtacttcctactaaacttatattctataaacaccgaataagtgtcctctcttattttcataaatagatat

SEQ ID NO: 172316 - DNA, 318 bp, Glycine max
cctggcactgtgtgctgaggaggttctctctgactaagagaaaatccacctcgatctgtatggtgtgagagagaagaatatggatgagccaggtacacagtcctcatattattacagaatataactggtgtagcatgaagaactttgagttcaaacacgattggactgaagtcaatttactcttactgttgccacagataaactgctagactctgtcctaaggtctgatcctggacactacagattgctttacataatcgtacggagataaagctttggtgaggatataaactctctagtctgttactcaacattgac

SEQ ID NO: 172317 - DNA, 468 bp, Glycine max
  unsure (1)..(468): unsure at all n locations
agtcacctgccgctgcaagctnataaaggtgcttggtgcattattgatttcatatgcatcactagccattcatacaaaccaaacttagtcttgaaagcggttttccactcatcacctcttttcatcctgatttggtgatacccacttttaagatcaatttttgaaaagatattggcaccatgcaactcatcaagcaaatcatcaagtctaggaatggggtgtctatactttatagcgatgtcgttgatggtcctgcaatttgcacacattctccacgtatcatcctttttgggcaccaacaacactggtacaacacatgggcttaggctctcttggacctactctttctttaacaattcttttagttgagactctattttcttacgctcctgacgattacttctatatgtcgccctataacgaaggcttgctcctcggactatactntattcggtgttctattcacct

SEQ ID NO: 172318 - DNA, 365 bp, Glycine max
ctctaagcacctgcgctgcaagctgaagaaacttgagcctggcatttttttactcagctcgctctgaatcataaatctacactcgtcgccagagtctatggcccatgttcttctgcagatcatcatatagatccctgttcttctttgcaccaatctggagtcaatgagcaacctatagcttatgccgtaaacatttattatataccttcctcacagcaaaatccataccaattgagatattgcgacattctcaacactagatccaactcacgcgggaggaattattcctatctgagacggacaagtcttccataacaacaataatcagctctttctttacagatagttgctggtccaagtaagcc

SEQ ID NO: 172319 - DNA, 431 bp, Glycine max
  unsure (1)..(431): unsure at all n locations
gtaatagccatgagccactacccctctaatatatatgcattattatctatatcggaatatacacaaaagcattagcgtntcctcaccccaaaactttaaggactgaaaatcatgacaaatacattaccttaagcaagttgctcagaaactacataactttgagtagcttgcagcaagtccattggtgttacttcatgatatacctacttaccaattaaatatttaaattataggcactatttacctagttctttgcatcgcgatcaccacattcgttcctggacactatattgatcatcatcacacgtacgacagtttgcaatcacatttgatgcttaattntgctatggttggttttgtatgttggtgtatgtcattaatgtactttgctctacatatatacaactttcttttcataatgagcgaacctt

SEQ ID NO: 172320 - DNA, 442 bp, Glycine max
tgatgatgccaaggaatttcaaagatcattcaagataaatttcagggatgaagaaagcaagatgtcaagcaaaagtaaagatctcaagataagaattaagatagactcttagaaaagtttttgaaaagcacaactgattggccaagtgagtttctatcttaacaaaaaatttacaaagcattttagtctctggtaatcgattacaagaaggtagtaatcaattaccagtagcccaaatatttctgaaaatggtttttcaaaggtgtaatcgattaccatggatttgtaatcgattaccaatgcttataacgttcaaaaataatttgaaaaaccttgtaatcgattacacaaaacatgtaatcgattatcagtggctctgaacattagaattcaaatattttcaaatgaagagtcacatcttttgaagaaccagtataaaact

SEQ ID NO: 172321 - DNA, 461 bp, Glycine max
actaagctcaccggtgtctctatatataacactagtgagacacaagtttttacaaaccaagcgatgtgggactaagcccacacaagttttacagaccaagcgatgttggacaaaggaactaagaccacaaactctaacaattctcccacttggggtctaagttccaaactctagcagctccttgtaagcaacgagttcatcgactctttacctagtgtagcgccttcatcttcaattattcttgaaggccaactgaggcaatgcaaagcctcagtttgtcagttgtaacagctttagtcaacatatctgctggattctctgatcctaagatcttcaataaagataagttttcatcatttatcaactccctgataaaatggtatcttaattgaatatgcttgcatctagaatggaagactggattcttagcaagacttatagcactttgactgtcactaaac

SEQ ID NO: 172322 - DNA, 465 bp, Glycine max
  unsure (1)..(465): unsure at all n locations
cttaagcttccttggcgccatntnctgcgagaataagcatttgagaagttagttctacaagataatgcttatcccaatataaaaatgacatgctaatccctctgatcttatgacgaactcatgttatatattgctgcacacgcgtatgcgtagaatatcctactatttatgccaacatacaaggacattcgacacattctgattgtcacacatacatctgccttttgaaaagaacatacacttttacgctcaacgcattgcgtcaaaatttacacttaattacatcctaaacatttgctattacaaactacctacacatgtgtgaaatatatatcatacaaacatttactcgttcactcacacttatgcatattggcgagctatttgcattaagcacacacttgcatgttatagggaatttcttgctattataccttcatgtaggaagcgacctcgatattcatt

SEQ ID NO: 172323 - DNA, 240 bp, Glycine max
ctctctcaaaagtgtgggggctgagtgacaaaagaaaaaacctttcttgtttttcaaataaaagggtctctctttttctattatttaaattaagctctgccacatgctcctaatttaatggaactaaagggcccgcttttctttcttactgggacccacactcagtcccaacagtgcgaaaaaatttaccttttatatgctctaattctgcctcggtttgcgtggcgattactctcgttc

SEQ ID NO: 172324 - DNA, 272 bp, Glycine max
accttacatgttttatcaaactcgtgtccaaacacacactatgctctaacaatagacattcttttggggaggtctacatactcccatacatagttattctacaacaggcgtagctcttcttccattgtctcgacccagcctcattacacaagacatcatctctgcgattctgctcaatctcacaccataccgttgcgtacctaagacacttccttctctgcatcttcgccatatgattatatatgatctaggcttcatatgccgtacctcaa

SEQ ID NO: 172325 - DNA, 428 bp, Glycine max
agacctgacaggctgagcgccactttgcatgcgacatcttcctttgaataaagctcagcgcgccctgtgggctgatgctcattgtggttctggtgacgctgtgctataacgtgccctgctgctctcagcctaatatatagaaaaacattgtctgtgtctttaggctaagcacatgtacatcatgctaatgccatgagtaaaactgcataaggtgcgttaagcccagcatgctacgctaaacgcccactacaataaccagaaacatgtatctatttgtgatgaacaacatccgtggtaacattgtggctagatgttataattttcagatggcatgtaacaacaagaatgcacctgcaaaaccttgccaggtctgatatgacagcacaaggatgactcctctagatgcttggggaagtacacatacatag

SEQ ID NO: 172326 - DNA, 287 bp, Glycine max
gcatgcaagctaaaacatacaaacaccttttgtcttttctgaaggccttcttaactatcatgctatcatcgaacacactgctcttttcctgcagaacttgccattctcatactctcctaagtggacctcatctaacacacttcactgctgtaacctcctaaaaaatctctacgccgcaattattcggaaactcatgtattcttgaacgactcacctttatattcgcatcatctcactgtatatgcatatatgtccctggtcagagtaggaatatcgggggccagata

SEQ ID NO: 172327 - DNA, 442 bp, Glycine max
  unsure (1)..(442): unsure at all n locations
tgtgctgngatcattacacacattatatttatttgagagaatataagcttttacttttatacttaaaatcatgcttattctcaaatggtctaaagcggtaacatttaaatataaagtctgataattattttatatttttaaaaacatttaattataaaggttttaaaaattttactagatggcaacatgagagtttaatcaaatttcggtcttttaaaggaatagttaaacaaagcaaaccactaacgacaaaaaatgacaaaggtgactaggaaggaaaataacgtaagtgtgtatatctagattaattgattaaatacttttatataaaataacatataattaaaattatcaacaaaataacaataacaataaacatttcttacaaaaataacagtttcatatcatgtctaatcttatatataagaaacaaatgatgata

SEQ ID NO: 172328 - DNA, 306 bp, Glycine max
gcatgcaagctacagctccttctacagacatcgtatttaatatccgcagagttttctctgggaccatttacctcatgaagacactgacaataatctatcttttctttcttggacacactccgtcacgccgcgggcaataaaatattctttctcatagactctggaagcaactgcgaccgtaaactcatccttaatagaccttgatggagaaataagccattcatccgctcgtcttgaatgacaatgagtgccccaattcacactgtcacaaacatttttcccactatgcctagcactaatacaacg

SEQ ID NO: 172329 - DNA, 466 bp, Glycine max
  unsure (1)..(466): unsure at all n locations
gcgacacttagatactaacctaaagtatgcccgagtcattcatccctaagagatgttgttgaagtattggcgatcagaattgccattccttggattatagggttgaaccaagctcatgcttttacaaaaaggttcatcaagtcaagttgaaatatggaagtaaccgtcttgcaaaattggggcaaaagatgaatcgagtcacatcactgcttcgtctactgccaaacacatttaggattattgatgtccttgttacttccagtttcaccttgacaaagatgtcatggaccatgttgaaaatctaaattgattcaaccccatatcttgcgtaaaaattcgcaatacttcaactgtacatcattcgcatgcatccatgcttttcattagttgcattgctcgttgcattctntccttgaaaaataaaataaaatgaacttaatcattgttattaaaaagaaaaggacac

SEQ ID NO: 172330 - DNA, 246 bp, Glycine max
ccggacctctaagtcactgcagctgcagctttgaagaaagcctttcttatcttcggctctatccatccagaatcagaggccgcaagctagctcaagcgcattcaattctattgaacagtgatttgctccaacacactttctattgatagccccaaacccatcttcagcacacgtcatttatttgctctcgaatgactacaagaggccactatgatctttccgcgagaaaatctactctcagaggga

SEQ ID NO: 172331 - DNA, 382 bp, Glycine max
ttaaggagatgggatcatcttctggtgcagaggctgttacttcgacgaagatcgatgtgaaaagaggaacatcgatggtgaagaagatgaatgtcacgtacgatatgagtctgccaatgaatgaagagtgatcaagggcacaccacttgaggctgatgcgaaagtttcgcagctcatcgaagattatggactttgatctcgcatatgatggctgtaggagcaagggaatactgttgttatatggttggcgatgatgaggtggctcttgttcatttgggtggttttcagcaaaagacactcttctgttggagggttcaatgtcaatgcttgtgtcattggatttggagtgattcattgtttgaggaaatgtgggagctgtgag

SEQ ID NO: 172332 - DNA, 408 bp, Glycine max
atccttaagtcacctgaggcgcaagtcttgcacgtatcagacaagagtatggactatatcttatccaacgcgctcatcgataatggttccagcttaaatgtgacgcctaacagcactctggagaaattaccattcaatacttcccacctaaagccgagttcaatggtggttcgtgctttcgacggcaccctgccgagaggttacgggagagattcatctcctatcacagataggccctctcatctgtcaagtcatctactaaataatggatattaacctctccctatagttgattgtcgcggcgtctgcggatccacttatcgcgagttattccctctacactccaccaaaagttgaatattctagtgaaacggcatctggtcattgcatcaggcgagcgagacatct

SEQ ID NO: 172333 - DNA, 288 bp, Glycine max
  unsure (1)..(288): unsure at all n locations
gggaaaagagtaaggataaaaaaaaaaaaaaaattcaattcaaaaatttaggtcaatttaaaagcgagaactnttttataaagaaaagaaaagaaagaaataattggaaccaaaaattttaagctcntcttcccccctccctccccttctccttctcaacactcctcaaacccgctttatgggtaaataccctcaaatccgcgttataggctcataaaggcataacctgggcaataaggtgttaagggggaaataacgataaaggagctaaaaaaaaaaaaaaaaaaa

SEQ ID NO: 172334 - DNA, 362 bp, Glycine max
  unsure (1)..(362): unsure at all n locations
cccccgacattancaactggggcatgnncaaatggcagaatcattagagacgcaaatgggatccgcctctaccactacctgcgcaggccaccacttcaaacaaagaagcatttgcttttgaatgtcacaacatgcactacataatctatcacatatgtcttcctagggccaccaaccttgcccaagcctntgaggaggatttaatcttgttatgggctcttcaaactggtggtcacatccactgggcctatcttgttcggcactggatgcataaggcattacaggccactgcacctttgctatattcccatcatgttaccctctatcttcaccatttcaatgtccccttggatgatgaacct

SEQ ID NO: 172335 - DNA, 458 bp, Glycine max
  unsure (1)..(458): unsure at all n locations
ctaagctctttacaaacgttggcttatcatatatttttacggtagccgatgctctttntttcggtgttgccataaaaatatacaatgtaggtcggctaggatttttcgttcgagctcaaccgaagttgtgtttcggccgacaccgccatgttttcatttactcggcaaggaaaacattttccccccgtggaaaaaaattttattgaccgatactgatcgaaaaacaaacatgattgacgtatactgatcgaaaaaaaatttatccgacgtcggcttggaaagatgaccgatcgatgtttaaaaaagaagaattaccggatgacgccgatcggacatgtaataatagacatcatcaaaatattattcagggattgattagaaaatacaatagccgacatcggtcgtcgagaaggcgcgactgatattnttcagccgacattgcgcaattattttacaaa

SEQ ID NO: 172336 - DNA, 446 bp, Glycine max
gcaagctagtgacatgaggctattaagtgcctctgctactatgttatacagaagaggtgatagagggtctccttgccttaatcctttctgaggtaggaactcatctgagggactaccattcaccaaaaatgaatcagatgctgattttagacactcctcaatccatcgaattcatttgctgcataagcccatctctacccatcatataagtgagaaacttccgagactctaaatcatatgcctttcattatcaaccttgaagacaatgcaaggtttttggcatctttcggccctcctcaactacctcatttgtagtcaccacgctgcgtagcatatgcttatcttttatcaacgctgaacgcctctcatgaacaaataagagcatgactctttttaatctattggcaatattttacccactatcttgtatgtgcattctatcaatg

SEQ ID NO: 172337 - DNA, 458 bp, Glycine max
ctaagcttccaagtctctctatggctagaaacagtcacctagagcatggtttgagagatttgcccaatttattaagaagctgggatattctcagtgtcagagtgatcacaccatgtttgtgaaacactcttctgaaggaaagatagctgtattaattgtctatgtggatgatattgtaattacaggggatgattatagagaaataaataatttgaaggcatctcttgcgggtgaatttgagattaaagaccttggatccctaaaatattttttgggaatggaggttgcaagatcaaaaaaggggattgtggagtctcaacaaaagtatattctggacctactcaaagaaactgggatgatgggttgtaggccagcaaatactccaatagatcccaaccagaaacttcggagtgaagacaaaggagatcctgttgacacaaccagatatcagagattag

SEQ ID NO: 172338 - DNA, 422 bp, Glycine max
ggcatgccaagctaataagtgtgatcatggaaaatttttgcctgcccccagtgcgattcagaattttatgaggtcatttcttcattgagcttcgaatagaacgccatggatcactgtatataccataaggctagtgggagtaacatatcgctccttgtattatacgtatatgatattctgtctgtgacaaatgatatgggtatgttatatgaggcgaaacaattctttctcaacaatttcgatatgaagggtatgggagaggcatcttatgtcatacgcactacagtattatatagataaattctcaggcattttatgattgtctcaagagaccttatctctacagctctcgagagatttatatgaaagactgctatcaactgtactcttatgtgaacgcgggtaacttgttttgattaatg

SEQ ID NO: 172339 - DNA, 78 bp, Glycine max
agctactatggacgctagatctaagcgcttttatgttgtccttcaccggtgattttccaccacgtatatgcaccaaaa

SEQ ID NO: 172340 - DNA, 379 bp, Glycine max
  unsure (1)..(379): unsure at all n locations
gtcttccttatggacccttggtggaaccctgctgtggagcgccacgctcaaaacagaattcaccgtatagggcaatataagcctataaggtgttagttcttgttctctagcactttcaaattagaacaattaggaaatggaaaagtagagttaaaaatacaggttggtcctttcttcatgatctgacacttcttatatgcacacaattgcgaggttcgtcatcnagaacacaatcgaggagagaattgtgaaactgcaagagaagaaggaactagtgtttgaagggtgagtgagatcactgatgtatgaacacggttgaaagatgctgagcattttgcgtaccgtgacactgttatatcttttccctcaacaggactat

SEQ ID NO: 172341 - DNA, 350 bp, Glycine max
  unsure (1)..(350): unsure at all n locations
gcgcatgctaagctaggttatagggcatatagcacccncatttgatcattctcacggcctctctgaccgctcgcgacatatcttccaggtactcactctgtggtctatgatataaaagcaggaagtttcacccttctacacttccttatctcgagcttgtaggattatggggtacccatcacatgtggtactacgtggcggtctgtcgatggtgcacatcaagatcttcacattcacatagtgcgcataaacccactcatttcctgttgttacctccattggagcttacgtacttctaccgtagcccatattctctgttttcttaataccgggcctccatttatctcttc

SEQ ID NO: 172342 - DNA, 434 bp, Glycine max
  unsure (1)..(434): unsure at all n locations
ntntgctataagggctaagaaggccaccacaggggagggatctaatgcagccccgcaagcagaaattgagtttgatggacaccatttccgaagcaacgagcatcagtgccgtttcaaagcgattaaggattagtctttcctcaaagaatgacgggtccagctagcacaatgagagtacacagaattccaagcggaggtttctataaggcattagacccaactgatagagcccatggctaagtatcaccctgaaatagccatggagttctacgtaaatgcctgaccaattgaagaagagttatggataagcattcctatgtgcggngccaatggatcccatatgataaagatgctatcaaccaattcctggggcattcgttgatcttagaagagggacaacattgtgaatacgctgaaagaagaagccaagtctc

SEQ ID NO: 172343 - DNA, 370 bp, Glycine max
aaaactaatggatataccagagtgtgtaatgaattttgatattttgtcttgtatgaacatcctctgcgaaaccgaatattcgcctctatatgattgactttggatgttgaggcatgccttattctaaactacacgtacatgactttttattctcgtgaagggtctaaaaacttgctatatgaatagtatgagttatgccatagttttatcaatactctattgaagaaaaaaatgttcactcgagttttaatatagattttctatcggatcactatatttattgttaaatctggtttgggttggattagattgaagtttaaatgaaatccaaatctgatttattccaaccaaagggttagtaattttattt

SEQ ID NO: 172344 - DNA, 361 bp, Glycine max
cagaattctgtgattcattttattctttgaaatatattccaaggattacctaatgaagacccttatgcacattcggcaatgttcatcgaaatatgcaacactgtttagattgctggtgtgctagatgaagctataatactcggcctattctcatattcattggcaggagaggccaagaagtggcttcactcgttcaagggttagcagactaaatcctgggaagaagatgttgaaaaatttctaaagaaatatttcctagagtccaagactgcagaagggaatgctgcaatctcttcatttcatcagttccctgatgaatctctgagtgaagcattgtgaagggtcagacgactattgataa

SEQ ID NO: 172345 - DNA, 471 bp, Glycine max
  unsure (1)..(471): unsure at all n locations
tcgacccggatccttaagtcactgcagctgcaagctattcattgagcttatggnttatttgtaaggcccttgtcatgtatgcgaccacttctctaacttaagatccttgaattctaacgataacattgttttccaaactagatcgcctcctctaaactatttaatgcctatgtgcttattataatgccatgccaccttacccttgtttcgcttaatgttttcgtatgccatcaaccaatcttcttcaactgattctagtttcaacactaaagatctttgattattatcggctgtaaagatgtttctctacatcccttcaagaattaacatctacttctaatggctaaccaacatcatgtctatattatcaaccagaatgacagtgcactctaagcgctgtcctattatttttataagcttacaacactttgcgcatatgtttatgtcgctacctacgcttgcttctacaaa

SEQ ID NO: 172346 - DNA, 433 bp, Glycine max
  unsure (1)..(433): unsure at all n locations
cccattggtgtcttgaaacctaaggctgatgaagggcatctgttaattaaatatgttgatgagtttgtagcttctccccaaaaggtctttggcagtcctgcacttattagcatccacctcactctttccaaaatgatcttattcatcctttctgctaaaccattctgctgtggtgtgtgagggactgtttgtgccttttcatgcctattttcctgcaaaactcattgaactgctctgaaacaaactccaggccattgtcagtccttaaaacttttaattttgtaccaagttgatttccaataagagtatgtcattctctgaatttntgaaaagattctgacttatttttcaaaacatacaaccatactcttcttgagaaatcatctatgatggtgagaagagtatgagctccaccatgagtcttcactctaga

SEQ ID NO: 172347 - DNA, 428 bp, Glycine max
aggcgcaagctaagcgagcagttgctcactaagcctattattcttaaccataattccctacaatatctgctaacggcccccatgtcgctaagcggatactgttcatttcgcgaacgcgcgctaagcggaccatgtcccgctaagccgccagattattttctctacttcacgcttataaattgcccctaaactgagaaactagtggcccaataaactttatgggttcctttgagtcgctaatggtctccaggaagtggatgagcattgcggcaacgttaactgctcactatgaaactagacggttcattcgcttgatgcttggaactcgcttattaataacattttatgaaggagcacttctccagagaggaatgacgacatacattatcactattcgatgaatatacgacaagttggagacaggttat

SEQ ID NO: 172348 - DNA, 450 bp, Glycine max
  unsure (1)..(450): unsure at all n locations
gattggtctntgccagtgaaaggatcgatgtgtgtctgattagatgcaaatntagtcatcctgctgggacgaatgagaaaactggggcacatgaagagggtgaggatgaaggagaagcccatgctgtgactgccattcctatacaaccaagtttcccaccaacccaacaatgtcgttacttcgccaataacaaaccttgtccttacccaccgcccagttatccacaaaggcaatccctaaatcaaccacaaaatctgtctaccgcacttccaatgacgaacaccaccttttgcacaaaccaaaaaataccaaccaagaaatgaattttgcagcgagatagcctgtagaattcacccctatttcagtgtcctatgctgtcttgctcccatatctacttgataattcaatgttagccataaccacagccaacgttcatcaacctccatttct

SEQ ID NO: 172349 - DNA, 474 bp, Glycine max
gcaagctaactggaacaattccatcctagctttctggtcttccacgtcttcagaaattgtaagttgcctttgcttctcaccattcctcttctatatcaaactgcaatgtataagtgtaaaccaaataacatcatgtatgtatcagcttacctttcttacaaaacatattctgttgtatttcttaatcaatacatattattttcaattttttaagtcctagttttataaaatatgctataaaatcaacaatatttttaagacacatcttttcttatgacaggtcatttgcaaacaattcattgagtggatacgttccttctaccatctggcaggacaggagcttaaatggaacttgaacgacttatcttgtaagacttgaaatgatagtcacacagattttcttactagattaatttgcatttgggggaatgtatatgtctcctttattattcatctgtattatctgacagcgcg

SEQ ID NO: 172350 - DNA, 456 bp, Glycine max
ctctgagaccacaccccacttgcatttgtaccagagaaatttgtttcaccctttctctctctctcttccaggaatccagcattcatatgataccattctatgcattaatcatgtgaagattcaatattacttaactttggaccaccattgatgaagggcttgcgtgagatgcacacttaaaatatatacacatgccgtacaaaaatgaagtcaagtgtcatttttttaattatcatcaaaagaattgaaattttttctctaataaaacctttctagaaaacaattccacaaatggttttttaacacgtgacatgcaaaggattattaaaaataattaaaaaatgacttatacgtccttggataaacctgaagaactagtggtcctgcattacaataacatcaacatcgaagcatgattaataaaaataatgtacgtgagattctaacatatggaca

SEQ ID NO: 172351 - DNA, 445 bp, Glycine max
ccttaccaggttacatgggatgctaccaagttttgggtctttaatccagacttcctgctctacataaagcacaaagacctctccgaaatcgcacacggtgctcaatgtctcagcatatcagtgttacagttgtggattctgtaagtcattttagattacttttaattacctaagttattgctttcaattcataaatatttaactttgacttaacataaataggcatctgactgaaacaagtatgcgatgtagaagcaaagcttcatgatgaatcaagattgattcaaagatgttttgatgataacaaagatgatgacaaaggtgatgacaaaaagctcaaaggtcaatcaaagaatgagttcaagatgttcaagatagaatcaagaacacttcaagattcaagaggaaagttgatttcaagaatcaagaatcaagattcaaggat

SEQ ID NO: 172352 - DNA, 455 bp, Glycine max
  unsure (1)..(455): unsure at all n locations
ntgaagtgttgatattcgccctctcgctaagccaatctactggcttatcgagccatccgctgagcgcatcattcatccgctaagcgcgaggaagaatttggaagaatgatgagttgtgcatgttcgctgagcaaagggtcatcccgctaagtgcaccgcttcagtccatccattgagtgagaaaaggtgcgctcagccgaaattcactaatgcgtgctaagcggttcagaattgcgctaagtgcacgaacacaaacaaagccacctatttatgtctgaaatcagattttggagagagagtttggccttttcttgaagcttctgcatgtctagagagttttagagagagaaaggtccaagttccagagagtttgagagattttgttgtgtgaagatctgccgagccagaacttgaagaggaagtcgtcctgatagcttgagatgagtttgtgagtg

SEQ ID NO: 172353 - DNA, 420 bp, Glycine max
cccgactggcgagggagcgaggagaattttgtttgggcttcaacatataacacatgagcgtgagtgattttagaaatatatctatatgcagtcagcttgattggaaaaagacccatcatttgtacctactactatcactatgactgacctgggattgaatcgcacttagcttacaggctcaggctaaactctattggtgattatcgatcatacatgtactctcatcagagcatcatttctgaacataacttaagctaacattagatccctgtgtttgatactgagattcatccattgtaatgcttaagtacttgacgatttggtgcgctttgcggtaaacccccattgaaattctcttgaaacataagtgacagaaaagtaactgctatggtgagtcaacagagtatttatggcgccgct

SEQ ID NO: 172354 - DNA, 249 bp, Glycine max
ttaagtcacctgcgctgcagctgtcggaataagaaataattttttctctgacagaacaacgaatagaaaaagcttccaaacgaaaaacgcttttttcttttatgagggccaactgacctctccttgaactgctgcgtgcaccaaccatatcgctgggtgacttttcatatgtcgtgttataaagacctactactataccgtgttaaacggcgctatcaatatctctcttcacctcccactcattcgatc

SEQ ID NO: 172355 - DNA, 459 bp, Glycine max
caggacggacacatacacactcaacgaggcgtgattggcgagggaatagccaccatatattctgctgtttgattaagagcgcggacgaataactgtattaccaatatatatgatatctgaaggaacaatgctactataagcatatggagcaaccttatgactgagagtgacgtcactcgatatatatatggacatatatatatatacacatctctctaagccgaagacctgaatctaataacgtgaatattgcaagactggacattaattataatcactatgatagactctgataccatcttaagattaggattcaagtctaacttaatcccaaaagctagctttatgaggcaagggtgtcacctacttatgtacaatattttggccggatcactagtcaatgtggaatcaacaacaaacgaattaagtgagaattcgagttctacgtgtgtcccctga

SEQ ID NO: 172356 - DNA, 447 bp, Glycine max
tgagatgaggaagtgttgaaaggtgaaacttcctgcttttattgttgaccacacagtggtacctggagatatgtcgtgggggtcacgagaccttggggacgtcaggtggggtgctattgcccaaaaccaagcttgaccaatcccgacccaacccgggcatagtcggtcagtgagaacctgtgatgtacctaaacaggcgagctcctggcagtcaacagataaaaggaacaaagaccacaaagccaggaggcttgtggtggctggccagctgtgaattttgtgtaatatgtggattatggcctctggtaatcgattaccaagggtgggtaatctattacaaggcttaaaattgaagacaggaggctaagatggtctctggtgatcgattaccaacgggtggtatcgattaccagcgcttaaaacgaagtcatgagacttatggagcct

SEQ ID NO: 172357 - DNA, 421 bp, Glycine max
agaagaaatcacatgtttgtcatcatcaatatgggggagaatgtgaatgtatgtatacatgaatttgatgatgtcaaagaagaatctaacaaggctacttcaaatgataagcatttgcttcaagaataattcaagattgcttcaacaaacaaagccttgtttcaagattcactaaagaccaagccttgccttaaaacaaagtgctttcaagacatgcaaggctctggtaatcgattaccaggaagtgtaatcgattacccgaagcagggttgagaaatagctgttgaaaaaggttttgaatttgaattttcaacatgtaatcgattaccatatgtctgtaatcgattaccagcaacgaaactttggaaattcaaattcaaaagtcataacccttcaaattataactgtgtaatcgattaca

SEQ ID NO: 172358 - DNA, 369 bp, Glycine max
  unsure (1)..(369): unsure at all n locations
tcctaattcactctaagcttatgtcctcctgattccataaatccttcttggntaatgtaagtttggatgtctgtgaacaatttatggatatcagtgatgtaataagagatgaagatcttatggcatccaaatcatactcacatctgaatgggatagatcgtagactttttacatcttgttcttcacataacatccagaaaatgggttcaaacatggttcctagtgtcaaatctaagtggccaagtgcaagagaattgaatcttttaaagcgtaaagcaaaaataaactcttaggaccaaacaaaaagctggtgtgaagatggaagtacagacgtatcacgtggtcaaaatttgacttctaaaggcacat

SEQ ID NO: 172359 - DNA, 444 bp, Glycine max
cgatatcttgacttgagctacacatattctgaatgtattacaattccttctttcctttgtgcaatgacctccttgactcacctcgacctctcttatactccattcatggggaagattccatctcagattggaaatctctccaatttggtctatcttggcctcggaagttatgatttcgagcctctgttacctgaaaatgtagaatgggtatcaagtatgtggaagcttgaatatcttgatttgagtaatgcaaacctatccaaagcatttcattggctacacactctccaatctcttccttctttgacccacctatatttgttagaatgcacactccctcactataatgaaccatccttgctcaacttctcatctctgcaaactatcgatctttccggtactagttattcccctgcctttgacttctccttgtgaacctgatta

SEQ ID NO: 172360 - DNA, 145 bp, Glycine max
  unsure (1)..(145): unsure at all n locations
ttaagcgactgcagcgcaagctcntagcaaatggatgtatcttgaataattcctttgttgcacattagagcctcagttccgttcgctttgtatacaagctccttacaagccttttgcgacaaaccatgacattaccatattctta

SEQ ID NO: 172361 - DNA, 459 bp, Glycine max
tctccttccttctcctataaataggggtaggagggaagaacttttttttcaaccctcttggtatctgagaatcacttaaaattagtgagaaaaattgtttccatgaagaaaatccaggccgatgcgcttccgtaacgcttccgagacgtttccgtgggtgatttcgcgaatatatcaaccgttcttcgccgttctttgtttgttcttcgtcgatcttcggtcttcaaccggtaagttcccaaaatcgaacttttcaatccattctatgtacccttagtggtccccacttgtttcgcatgctgttattttcatttcatttactttccgtacccccttttgatgtgcttcagtcatttatttaagtcattttctcgcctaatcaaaaataaaataaatttccaccgatcattcgtattataacatcctgtaatttctgttaaaacgaattgcgaccattcg

SEQ ID NO: 172362 - DNA, 442 bp, Glycine max
acgcaattgttcccgatagatacatatcttatcattgtccaattatgatcaatcgtaagagcattggttagggacctcgtccaatcaagtgattctgtgacacatgcttcaattatgtcaacacatgttgttatcgtgtacagctgttggataaatgtattattcatccatgccttaaatttttagaaccctatctaacataatactagagctagtcttttataatattagaacatctagctcaaatagcatggcttccaatctgattaaagtgagcacaagcttggttctagtagttttagtagctctcacagttcaaattttatacttttcacccatagatccagttttgctggatataaaacctgttactttacaggtgaaaagttaatggttcttaattcttatatacatgcgctgtatgggggtgaagaattagtat

SEQ ID NO: 172363 - DNA, 454 bp, Glycine max
tgtacggatgtaagagacatcttcttcgaccttggtaattcttgactccatctcctcgaatcgcatgtccacttgtaactccaaagtatcaaacctttcaccaacaaaggtttaaagaccattgaacctttccaaaatcttttgaagaatagaggaatcttctccaccttgtaaatgtccttcttcatcaatggggtgagcaccctttttcacccaagagccatcatgctcttttcggtaaccaaaggatgcaatcacagcagcgcctattagaaaggatctcttgattggaacataaggttcagaatcaagagggatgttaaagtgttgaaggaagagagtgactaggtgtggatatggcaatggagcatttaatcgcaatgccttatgcatgcgatatcagactaagtgttcccaatcaatttgtcggcctgtgtgaaaagcccacatgaca

SEQ ID NO: 172364 - DNA, 365 bp, Glycine max
ttcctgatgcacatatatataattatacatccactaaataatgtgaaaaaaactggattaactaacaaaaagctcaggagcaccatgtttgtcaatgttttgcaacaaacttactttctgcctacaattacacgaacagcatcatgcataagttctctagctctgatcttcaacaaaattagggaaagtagcactgaacagtgagcgtattattgagggatttgagcatgccttgataacagaatcaatctgcttgaataattcaggctcacatagcttattcgattcatccaagacaagatactctactctgaagcaccccaaataattggaaaaaaaatcatgcatgaactatgtataaatat

SEQ ID NO: 172365 - DNA, 293 bp, Glycine max
cgtacccggaccttagagtcactcgcagcaagctggaacttagagagacttatttaaactggccatatataaacgtttagacgccgtatcactgcagactccttcatgagtccccttagaggtaagggatgattttttcaccatcgcggttaaaatgaacatgtgtacggatccttttcaggattaatactgcaatctatcttgcgataattattgaataatgatactcccttctctattttaattatgatattgttgcgtctgacggaccagttgacgacttgacgccaatt

SEQ ID NO: 172366 - DNA, 372 bp, Glycine max
  unsure (1)..(372): unsure at all n locations
tgatgtgagaaagtgtggacagagtatgcttcctacttttgtttggtgaccatagagcggctcctgnacatatatcacgctggtcacgataccttggggatgtcaggtgaggtgctattgcccaaagacaagcttgagcactcacgacctaacccggacatattcagtcaccgtgaacctgtgacgtacctaaacaggtgagctgttgacaatcaacctataaaagaacaaagaccacaaaacgacgacgtatgtgaggtggctgggcatctatcaatcttgagtgggatctggaatctggcctctggtgatcaataacctaaggggcgtaatcgattaccaggcttgaaaatggagacaggaatgtgacat

SEQ ID NO: 172367 - DNA, 428 bp, Glycine max
  unsure (1)..(428): unsure at all n locations
ccttgcatctattntnctaattctcatgtgtctctgtataactctttntccccctgagttattataggggctagagcacatatccttaatgatcttgattgcatcaataaggggttttaacatgaggttacccccacaatcaacatcttaacttgtcctattatgtgaggacactccaccatagaaaatgtgaaatagcctttgttgggagaagccatgatatggacaacttctgatcctttcttataatctctcttaggcttcaagtagactctcttgctctttctgcacaaaattcccaatgtcccttatgtactggcttatcttaaaagagaaatatttccttaagaaggtacttgtgcactagttcaatgtggtgatactgttctctaacactaaacatataccaatccatgcattcgtattga

SEQ ID NO: 172368 - DNA, 404 bp, Glycine max
ggagagaatatgttatcttttgcgaaggattgggcttaagatggagtctgaatgattagttttgtctattatgattattaatgaaacacatgttattattcttaattcgtcttttgtgttgtaaagctgtgacattatataccaccatcactactagaaaaaaattatattttaagacgtcaaatcgactacgattcttaagatccgtcttaaatttatacacatgacaatttggtaaataataaaaaatatacaaagacagttctaaaaattaaatatttaaaggcgggttactaaagaccgtatttaaatatacgggttcaaatacggttcattaaagacgcgcttaaaattagcgacctttctcattcctatttctcgcatatatataggaaatgcattct

SEQ ID NO: 172369 - DNA, 233 bp, Glycine max
  unsure (1)..(233): unsure at all n locations
agctagnatgagtacagcgacagatctctgataccttcngcatgcccgcttcaccactagcatctctagccactccttcatcaataatcctatgaaggcactagctacctggagaggagtatgattgatgctgctcatggtggagcacttggtgatctcactcctgctgaggctacgaactcgaatgacaaaatggcctccaactcccaccaattcagtgcacgaaaataagc

SEQ ID NO: 172370 - DNA, 452 bp, Glycine max
  unsure (1)..(452): unsure at all n locations
ttcaatagaganttgacttatataatatgatctgagagaataactagtgtgcatatatctggctaaaatagaagctaactacctgattaaaaaataaatagaagctaactaagataatgcatttgtctatcttcaattcatgagcctccatttgacatgaatcttttactgttagcagtcgcagatgcattaggactacctatctgcatctctagtttttttttcttctctttttttaaaacccaaaaaagaaatcccaaaagaaaggtacttagtttatgattgataaaattatcacactgaaatattaaatcccatgttattcagccatttcaacatttttttcttctttttcacaaataaattataacctggtcaccattatataaaagatataggacccttaaaattcaatcaattaagataagttcctttttcttggcttttctttt

SEQ ID NO: 172371 - DNA, 449 bp, Glycine max
  unsure (1)..(449): unsure at all n locations
cgtagaatggctagacatgatacatgtgagggtttggtttggttcaaggataaaagggatgccccacattatttccatgacacaaatgcaaagatgatgatttggaaattttatgcaaaactggtcatgcatgcacctatgtggacgctcaagtgtcaaatttttatggtcatgtgatgctagggctcaggattcatttcctctattttaaatcaacccaatgtttccaaaatatgctcttttatcaatttatgcatttatcctagttcatttcgtgcgtccggggaaattttcacagcattcacccttcaggtgtagacacgttttttcttcaaaaatcggttatgatctatgaattttttttttcaaagaaaagttggaaatcatctcttttcaaaagcatgtcggattttagctagacaacttattntttcttttgtctccttctc

SEQ ID NO: 172372 - DNA, 427 bp, Glycine max
  unsure (1)..(427): unsure at all n locations
tatggcctaatcaactacttgatgtccgatggtattatttataatagacctnccatctttaatggagtgggttaccactactgaaaaacccgcatgcgaatctttatagaggcaatagatttaaatatttgggaagccatagaacaaggaccttatgttccctctatagtggccggaagtgcaacaatagaaaaacctacagcagattggactgaggaagaaagaagattagtacaatataatttaaaggcccaaaatattattacatctgccctaggaatagatgaatactctatggtttcaaattggaaaagtgctaaggatatgtgggatacactacaagttacacatgaaggcccacagatgttaaagatctacgataacacttaactcgtaatatgaactgttacgatgaatgtaatgaaag

SEQ ID NO: 172373 - DNA, 412 bp, Glycine max
ctataacactgagctgtacctgcctgggccacgctaatagtatctctttatctactgatgcacgctatttgagtgagacgtatgtctgtactcctcttattatggagtgtacggcttataaaatggtgtaatagaaaattgtgcttgttccattcccgccccgtcattcagaatctaatcattagtactcagacagtcatatttgtcagagagaaggacaaacatgcgtggtaatgcgtaccacaacaaaacattataagaaaacatgctttctaaacccaacccacgtaaaaatattgtcatatttcatgagatagcatggcttcctctggcggaacaatgatattaagttggcgaattagtcttgagaatgatccgataattttttttctgaatctggaaatattactcg

SEQ ID NO: 172374 - DNA, 176 bp, Glycine max
  unsure (1)..(176): unsure at all n locations
aagctcacctggcatgcaagctagnctagctctgatagcttttcttcatcgccccatgccacccactggttatgatcatgacaaatcgtattactctatggactataatggacgccttatcattttaacactttcgacatctatcataagtcaccttgggcggctctcaagcccat

SEQ ID NO: 172375 - DNA, 412 bp, Glycine max
  unsure (1)..(412): unsure at all n locations
gagagtgtnttagatgagaagcttatatttgaagctntaatggaggaagaaaatgagagagagggagagagagtgtggtgtggaaattgaaggagaatagggaaagaagttgaactttgaagtgtgtctcacaagtttcacattcatcaaagttgtgacaagtgttacacatgtttctatttatattctaggtcactaacttttgtgaatttcatttacatttcatgtgaatctaaaatgaatattccaagaatatgccaaaggcatcttagagtattccctttagatgccacaagcatggaagatgtgactctagcacatggaaagcttccttgagaagcaaggaaggtagctttcttatgaagcaaggaagaaagctttcttgagaagctagagggagggcacatgcact

SEQ ID NO: 172376 - DNA, 457 bp, Glycine max
actcaactgagaaggtgatttatctacaaggtcactcattatctaaagctcattatttattatgcagatatccagtaatagctagcatacactgcagaaggatcatatttcacatgctgccaaatgtattcattcaatcctcaagaagtttcttgcgttccttttagtcaccttgctcaagcttgaatacatctatctacatcttatgtaaagaatagcttaattacaactatttgactacacaactctacaatggcttgtagcttctaaatgacccctgcaactgcaagatggaacaactttctcaaaataccacaaagaaattatgatagacaaaatgtgcaagcttgaaaatgttgaatttggcctcaaattatgatgaaagtttgatacacatgtaataaagcatcaccaagcaaaatatttatagtaagaaccatctatcaaacaaaataaa

SEQ ID NO: 172377 - DNA, 320 bp, Glycine max
acctgaaggagacgcgtgagcgctgctatttctcatggtgcccacgcggcggagttgtttgaaataacagtctaagcattatcctgaattgtgacaaacatatatctctacttttaaaaaagcactatcggcgtgcacaacagaatctttaaccgaatttgccgtgccattaatagtttgatggacaaaatgatctcctcagaggctggcgcgcctccaaaagtaaatcctctataaggtggtgaacttatcaaacatgggggatctctcaactaacttcatctaaacactcacatgtggcggggacgtataattatggg

SEQ ID NO: 172378 - DNA, 72 bp, Glycine max
gcaagcttagacatgacggaagtgtaaaataggtgataattttcttctcgctgtgctgttcgatcgacatat

SEQ ID NO: 172379 - DNA, 448 bp, Glycine max
tagggatggaacacttacttgttggtgatgaacaaaagctcataacggaatcaaaaatgcgaaaaaggatggccctagggctgcaaactcgtcaatcccgtgggtatggcttttgaaaggggggaaaagaagtttttgaatgttaaaacgccccccctttcgtcattcttataatttggtgcaggggtggctcgctcaggcgagcccagctcgcccaggcgagctaacctgcacattcttttttttttttttttttgaggggaatattaaccatgtcccctcccttctcatggattagcatcttgcctaacttgaacttacttaggttagaattaggcattgattacttatttttttactttttaaaacaaacaaaaagtaaaagaaagctgcaaaatacaaaggatacagggctgccttgcagcgacattctctgcttgtttcgcac

SEQ ID NO: 172380 - DNA, 84 bp, Glycine max
gcaagctacgtacatcccgaagaagagaaattatttcgtgcttaccggatcgcctctgtattgcttggattatacaaagcagtt

SEQ ID NO: 172381 - DNA, 456 bp, Glycine max
tgagaactctcccttagggaattcttgcttttctcccattattttctattccctttttccatttcttccatcaatttctaaaccctttttcaagtgtaaggccccttatggctatgagaagctaaacccttagttagggtttggcaagcctaaaaagccaaaagatgtattttatacttcatatctatcaatgcaaataggtgttttctttcctattatcctttcttacttttaatttcatgcatcattcatccttgcatcatctttgggggttaggtgcttgacagagggtaatccttaatagaaataaaaggaaggttttgcatgcatcagttttaggaattagttgctcgacagaggataatttctaatagaactaaaaggaagggatatcttaataaaatcattgttagacatagagtgattgcatcatgcccatgcatcaaagcaagcatc

SEQ ID NO: 172382 - DNA, 242 bp, Glycine max
cttaagcgactggctgcagctatactttgagacatgtatagtactaatccctactgctggctgatgacaaatgggacatgcacgacatatggccgcccttatttcagtatgagctactcgtttcacttgccgcctaataaacatgacactaaagttgttgtatatattccaaactataaacggtgatatacataccactgctcacttaaataatatttaaaagtttaaatttagcacatgct

SEQ ID NO: 172383 - DNA, 459 bp, Glycine max
  unsure (1)..(459): unsure at all n locations
ctctcttcaagaaacagatcgaaactgatatgctggtcttctatggccatttgcagnttcctcatccccatgtctaccacacagcttgaggtagacataaacggtcatccaagaattaggggaatgtcagcatcctcttctatgtccagcactacaaaatcagcaggaaagatcaaatgtttgaccctaaccaaaacgtcttcaatcactctatagggtcttgtgatggagcgatcaaccaactgtaaggtcatgtgagtgggcattatctctaactctccaagtcgtcggcacatagagagtgacattaaattgatactggctcccaagtcaatgagagccttacccacaacaacctcaccaatagaacatgggatggtgacacttccaggatctttgtgcttctgtggaaggatgctntgaatgacaacactataatttccttccacaactatcgcg

SEQ ID NO: 172384 - DNA, 461 bp, Glycine max
ctgtcgtcagatccctcttgttggactaggcttaacttaagcagcccttgtaggtttagactaatttaaactaagcttcatccgcagatccctcatttaagactaggctcagcttaaacaacttacgtaagtttagactaatttaacctaagcttcatccgtagatccctcatttaagactaggcttagattaaacaacattatcatcacaacatattaagaaaactcaaacttaatccacagatccctcatttaagactaagtttcaatcctgcttctatcaagttctaaggaaacaatacatttctcaatgctaacgtcacctaactaaacatacaaatgggtgatcagatcaagagcatgtagaaattaagcattgaaagaagcattgaacacagaaaacacaatcaattagatattaaagtaattacatcagttgttccttagaaattcccaacaag

SEQ ID NO: 172385 - DNA, 367 bp, Glycine max
aagctacatgtgatggccttagaatccctcacaccgttcgctgcccattgcgagtgtcacaagctattaccggatttatggttacatccgccaaaaatgttattggactttgattattgtcagaacttgtggcctcaatttcggagtctcaatatactacgggtgacaatctagccatcgaatcgaaagatattgctagttgaattagtcagagcatgtgcttgtaacttgcggcgtcttgatatatttgccctgaacgatgggcagacctccttttctggagttcgaacgtctccatatgcttctggacacaatcacacatcggagggatagctgatgacatcgagttgacataacgtgtggctca

SEQ ID NO: 172386 - DNA, 408 bp, Glycine max
  unsure (1)..(408): unsure at all n locations
ttatgggaggggtgtgtgttgctaagctctancttctcaatgaagttctctcgaacaatcttctcaaggaagttttctcaagacagcttgtcaaggaagctacctactctataaatagaagcatgtgtaacacttgttgtgactctgatgaatgagagtcttgtgagacacaactcgaaagtcaacttctctccctttttcttccttcaatttcgtgctcccccctctctctttctctccctctttcttttcctccattgaagcatcctctccaagcttcttatccaaggtacatcttggtggtgaagctctttcttccatgagctattccctagaggatggcgcctcctctcacctattcttatttgtcttacgctgcatctacactgtggaaaatcaccattaaac

SEQ ID NO: 172387 - DNA, 437 bp, Glycine max
ttaagcgacgcgctgcagcttatcatttataatatcaagagtctaaatcaagaaagcctgcttattagaaatgggacaagcatgagatatggccgtccttattagagtatgagccactgtattaacctgtcgcctaataaacttgacactaaagttggtggaaatatttaaaactataaaagttgagtttctttacaccaactattttaataatatttaaaagtctaaattttaaatatggttaacaactgcggataaaatttacattattgatgtaaagaaacggtaatataatttgaaaaattaaatcaactctaactattaagtattaatatcattctattagtggttaaaagaatagatcactctcttaggaacaaatgtattaatatgtttaattacatttcgcgagaacagtttctaatctaacatacgtc

SEQ ID NO: 172388 - DNA, 359 bp, Glycine max
gttgtgatgcttcgtgctaatgttgtaggagatatcgcatgacctactccatgcgggctgaccattggttcaccaaatcaaatctatattgttgtctatggtggtcaagaaatctcttgtgctgacgagattgcttgacctaacaaccatggccgaccaagaggtttcacaatgataatgacgagagctttgtaggtttataatgacttatctggagctggtgaggtcccaagatttacgcaccccgttctaccttaaggctcctctaacaaactagctactgtcgagtacgcttacacatatgaatatgcctgagatgttgcaacacaacatctggccaaccaaatgctgttcggtct

SEQ ID NO: 172389 - DNA, 452 bp, Glycine max
  unsure (1)..(452): unsure at all n locations
ntacanatntcaacaaataaagggtgataaaccgtcttacaccctccttcgctgtctgtacctgattttcctcaatccttcattctgttttgtataaatactcgtcctttttaaaaactgaaaaaacaaaacaggtaattttgttttggatcttcctaaccagtgtccttacgacattaattaaggaattaaaaaaaagtatttattatataaattataggagagtataaaaaagtcatagacatagtagatttgcacattccaaaattttatttctccttttagttctttaactaatgactcaaggactctggtcagcgtttgccatttttttaaccatatggaacatgaggaataattagtgaaatctaggaaagttttagagtattctgttaatatcccagacatttaaattccaagagtgtgtactgagtttaaatttaattatcttt

SEQ ID NO: 172390 - DNA, 375 bp, Glycine max
  unsure (1)..(375): unsure at all n locations
agctcgtagaatggctagacatgatacatttcagggtttggttaggttcaaggataaaagggatgccccacattatttccatgacacaaatgcaaaaatgatgatttggaaactttatgcaaaactggtcatgcatgcacctatgtggacactcaagtgttaaatttttatggtcatgtgatgctaacgcttangatttatttcctctattttaaatcaacccaatgtttccaaaatatgctcttctatcaattagcgcattcatcctagtcctatttgggcgtccgggaaaattttcacagcgctcacccttcaggtgcacacatctttttcacaaactagctaatgatcaatgaattctttttcaaagaaaag

SEQ ID NO: 172391 - DNA, 291 bp, Glycine max
ctttttccagatctaaagcgaaatacattttccaaagcttaagacacctaactatgcacacaaatgggtgatccgactaagagcatacacaatgttagccctgtgagaagccttggacacccgaaacacaatcaattagatatttaaataattacatcagctgttctttatgaaaatcccacacacagggtttttagccaaccattacagaagaaaccctatccatgatgagattacacaacctatgtgtctctgccaagatgctcctcttgctgcctctagagctctttt

SEQ ID NO: 172392 - DNA, 391 bp, Glycine max
ctattccctgtatgcagtgctgccatcaaatcttaaaccctttatgaagtgtaaggccccatatggctatgagaagctaaacccttaaatatggtttggaagcctaataagccaaaagatgtattttatacttcatatgtatcaacgcagatgagtgagagctttgctataatcctctcttacttttaatttcatgcatcattcatccttgcatcatctgctgggggctaggtgcttgacagacggtatttcttaatacatataaaaagacggttcagcatgcatcatctatgtgaattaggtgctcgacacaggataatttctgatatatctactaggaagggagatctacattaactattgtagacatagagcgatgcatcatgcccat

SEQ ID NO: 172393 - DNA, 167 bp, Glycine max
taacttgcttaaccaaaccattttactagtaacagaagagcacaccacgattttagcttccgcggatgaatttgaaataatgggttgtttcttagaatgctcaaaaagaaggctgttttccaaaaagacaccaaagccagaagtggatcttctggtataacacaact

SEQ ID NO: 172394 - DNA, 383 bp, Glycine max
  unsure (1)..(383): unsure at all n locations
tctccctgtgaacacagcaacaaacacagtcaaaagatattccaaaataccaattgaaagcaacaacaatgtttttcacaacatgaagaagctgtccacacaggaaacactgagggataacaagatccatacccgactcaaatcgtgatcaatatcagcagcaacatggtgactccttgtaatctgctcaccctgatggtgcagcatcaccaaagtcttggtagcatcctctctcatttcctctgctatcttcaaacagctgttcactgagtttgttgtctcttcagccttgtaaacagcatagttctccaattcctgcacagattgactctccaatcccncagagtcgcggaaatcgctcttatacctatttcgatgggaag

SEQ ID NO: 172395 - DNA, 288 bp, Glycine max
gctagtcacccagctcgcccagacgagcagggttgctttctccagaagcaacacccttctggaggaatctattggagggcccaagcgtgcctggttgctattagtacccctatatttactaagaactacttttgcctcttttcggtgatttctttctttcttacgttataaaaacttacgaacttttcaccgatacttgtttccgtttctaaatgtcactgaaccttgcggatcacataatcatcccctttttgattcacgcaatgcaacacaatcttactaattgtg

SEQ ID NO: 172396 - DNA, 443 bp, Glycine max
  unsure (1)..(443): unsure at all n locations
cattggtgtatattgatctccgtttggtgctctaaattgtgggagtgtgctcaaatatatagggcaattttggtttgttttcttgcttgattaggttgaattacgggtgtgtatgggatggccctacgcctataatgcattttggaacaatgggacatgccacattgtccctgttctcttgctattgacgcctaaacgcgcgcccaccaagtgttcggtgaaatgcctcaatggcattagcgcgtgacttttgtaaggaaacaacccatggggcattttggtttgtacacattttcttttttttggaatatgtattcattcctgaaaaaggctagagtaattgccccgcatatatcctaggtctatgaactaaaattntatgcaaaaagaacacaagaggaggtgcatattgtgtaaagttactctttttggccagcaatcag

SEQ ID NO: 172397 - DNA, 463 bp, Glycine max
  unsure (1)..(463): unsure at all n locations
tactaagctctatctctntcctaatgatccattctaagactgtagcctattggaagcattccatatttgtggaaactgtcaacattgctaaggaaacacttgtgtgacaaagtgtatcaaaaaaaagtttaagagaatactagtcaaaatagcttaagagagaagtagaaacacttaatgtttacattgattcactcaaacagagctacatccagttctccttcagagactagtgaacagtcccactaatcaaaacttgattacaaacgagtattttgttttgtcactcctaaccacaacaatattctctaagccatttctagcacactcttagaatctccttgactctaagacatccaagtattgtttgacacaaccatttctatctttaacaaacaaagatgtttgacaatgaatagcttttctaggcaaaggatgaactaattaagcattgttatgtatc

SEQ ID NO: 172398 - DNA, 460 bp, Glycine max
  unsure (1)..(460): unsure at all n locations
tacctgagttaattgcctgctttcatgatatccacgtaaaagggttatattagctgggtatctgtgaaattacagaaaaataaaaggatatgtaagttttcaaaagaaaaaaaagaaaagcaccactgcaaatgggtgtaaactttccaaagtcaaatatgctagcaatgaaagactgtttggaagtatcataagcatttattgtaagattggtgacttttataatacttacttttaaagttatatcaagcacaatttctaatgggctgacagtgtaaaaatcttcacactgaccgtttagcaaacttatacactttgataccatgggatacaaaccaaattaatcttaaaactcttcttaaatgcctncaaagctaggacaaattccaagtgataatcttattaacaatacatgtaaagccaacaagtcaagaatcaagacagatgcaacgcaagcatg

SEQ ID NO: 172399 - DNA, 407 bp, Glycine max
ctcggtgcatggacaattaataatatttgttgttggaggtttgcttacagagcataatgggagagtcattttctcttttgtcctaaaagtagggttctattttgttctcatatagagctttgggctatctatcttggtatgctcacagcttgcgagaaaggatttaaaaaagatcttattatagagtcagactcaagggatgctattcaactactggaaagtggatgttcgaatcaccatccttgtttcaatattatgcagaatattatcacatgattttgaatggtgggaatatcctatggtctcattctttgagacaagctaaatcaagctgcaaataagttagcttcttttggttgccttcacaaaatagtcgttggttctgatgttgtcctgcattcctttct

SEQ ID NO: 172400 - DNA, 354 bp, Glycine max
tcgacccggatccttaagtcactgcaggctgcagctattaaacacttctttcaagatagcttggccggagccgcggtagtttggtacactaatttggaagcttcccgtatccgtacttggaaggatctgattactgcctttctaaggcaatatcagtataacttcgacatggctctcgatcgcacttatctgcagaaaatgttcaagaaagaaagcgaaacctttaaagaatacgcacagtagtcgagagacttgtcggtacaagtgggtccttccatggttgagagagagatgatcaccatgatggtagacactctgccagtgttctactatgagaagctagtacgttacatg

SEQ ID NO: 172401 - DNA, 457 bp, Glycine max
cggaacttaaaactcagcgttatagcgcgggtctgggagacaaaggtcatgtggtctctatatgcgaagataatgctccgagtacattggatttggtacaaccatgccctcctgatttccagctgggaaattggcgagtggaggaacgccccggcatttacgcaatgagcataatgtacacctttgcggctgtaaaagctctatagatgggcctaggctttatagttgttccttttgttaacgctttgtgtcttttgtttttgaatttataatacaaggatctttcttcatctgttcctacgtctctacccattctcattcatttgcatgtttacctctttatttttgaaacggcagatccgatgacgagtcccccgaaggtactaatacctgggacccgcttatcaacttcgagcaagaaacgaatcaaaccgaagatgataggaacgaggatgtg

SEQ ID NO: 172402 - DNA, 405 bp, Glycine max
  unsure (1)..(405): unsure at all n locations
atcaacttgatccgtaagagagttacggattaacttgatccataagtcttaaaaattaacttgcggatcaacttgatccgtaaaggaagaaagatgataggagtacgtaatttggtcattttcaaagaatactgaatgctacagcaataatgctgggtgcacctaataacactcattgcattttctgaactacctttgggccatgatgtcccacatgtatgataaatcccaagaagcatttgaatcacccaaaacggttcattaaggggcatctttaaagggatgccaacttcatcgtaagacacggataagttctatgtatgttgntcgaattgaaaagctatcatgtggcacccgtgtggtgcaagccaagttacatcccctcaatcaaatattcaatacttc

SEQ ID NO: 172403 - DNA, 338 bp, Glycine max
gaggggagtgtgtcactgatcttgagcctactaataaagcgatcatttacttagtgacctatgctagtgccacaagaccatgcaacacttgcctatctgggatgaatgataaactagtgagacacacttctgcgcacgagttgtatccgtctcttattcctagccataatgcaacgcccctatctctctccctcatatgctaccatcatggaagctcactctgtgaccttcgaatgttaagcattctgtaggcggtgaaccttctccctccatgacttattccctagaggatgatgcctactctcacctcttctgcgttagctctcgctgcataacca

SEQ ID NO: 172404 - DNA, 449 bp, Glycine max
  unsure (1)..(449): unsure at all n locations
ntacctaaacaaactgtcacatatttgaatatgttccactgcattgagtggtgaaaggcattcaaatagtagatgtgcatgatacctgtgaggagaaaaagcaaaaagatcccataaatatatatattcatgagagaaattctatgaacacaagtatattgtataaaaagaatgatctagttcagccataaatcaacttatttggattgaaaggaatcaaatcttcagcaaaaatccataaagtttgagaaccatcagtccaccgtctaagtcaccatgtaagaagacatactgataagtgtgtgaatttatggaagaatgacaaatatctccacacacaatggaaccagtttttattgttaagaaagtaaaacccgttatatatctaaatagattaatatattctttatttttggcatagtatccaaagcagttntatcattaagatg

SEQ ID NO: 172405 - DNA, 358 bp, Glycine max
  unsure (1)..(358): unsure at all n locations
atgcaagctagctgaatggctagacatgatacatgtcatggtctgctccggctcaaagataaaanggatgccctacattatttctatgacaccaatgcaaaaatgatgatctggaaactttatgcaacactgggcatgcatgcacccatgtggacactcaagtgtcaaacttttatggccatgtgatgttcaagcttacgattcatcttctctatccttaatcaacccaccgcttctcaaacatgttctttaatcaaattgtgcatacacccaagtcaatttcggcgtcccggaaaatatttatagcgtctacccttcttgtgcacactatttttcaaagactagttatgagcaatga

SEQ ID NO: 172406 - DNA, 453 bp, Glycine max
gtcctcagatccctcttgttgaactagacttagaccaaacagcattattgtaacaacatatttaaaaccaaaacttaatctgcagatccctcttgtaagactaagtttcaattatgctttattcaagttctaaggcaataatacatttcccaatgctaaagtcacctaactatgcacacaaatgggtgatcagactaagagcatacaaaatttaagcactgaaagaagcattgaacacaagaaacacaatcaattagatattaaaataattacatcagctgttctttagaaattcccaacaagggtttttagccaaccattacagaagaaaccctaacaataatgagattacaaaacctaggtatctctgcaaaagatgctcctcttgctgcctctagagctcttttcccaaaataggcactatggtgtactctggaatgttgctaaaaatat

SEQ ID NO: 172407 - DNA, 194 bp, Glycine max
ggatgatctcagtggccgagtgatcacaccatggttgtgaaacactcttctgaaggaaaagatagctcgcataattgtctatgtggatgatattgtaattacaggggatgattattgagaaataaattacttggagggatctcttgcgggtgaatctgagattaaagaccttggatccctaaaatattttttgg

SEQ ID NO: 172408 - DNA, 445 bp, Glycine max
  unsure (1)..(445): unsure at all n locations
actcccttagagaagaattgcctgaaacatatatttgctttatcgattgncccnacataaagaagaaataatggacactaatttgcttacatatttacccaagatcattcagaaagtgaaaaataagtcatctatgtaaaattcaaaactgatctttacttttgttttggcccctgcaacctcccctaaaaaaaatacacaggcacttatatctgcatggaaaaccggtgagacgatgccattcatatatgacacggtgacgcattaatgtttaccatccagctttaaaaatggaaccacttaatgccccaattgattggtttgaactgtaattatggccatttaaacttatgacttgtttggtaaaaaaaggatattatattccttgatgtggcaggcgtgggacttgataaattggcagattatctaacacagagaagagata

SEQ ID NO: 172409 - DNA, 355 bp, Glycine max
tgagagggggatgtgtagctaatctctaacctcccacagaagttttctcaaagaagcttctccaggaagtcttctcaagatagcttctaaatgaaagctacccttgtctatcatatagaagcatgtgctaactttgatgaatgagagtcttgtgagacacaactcatagttcaacttctctccctatgtcttccttcaatatcgtgctccaccccttctctttctctcactctttcttttcctccattgaagcatcctctccaagcctcttatccaatggtcatcttggtggtgatgctactttttccatggttattccttatggatggcgcctgctctcccttcttatcttgtc

SEQ ID NO: 172410 - DNA, 273 bp, Glycine max
  unsure (1)..(273): unsure at all n locations
caccatncgagagtggagacactacttactaagccaccctctacccttctcacgaacaataagagcttgaaggaccttatgggacaagtcatatatacacctgaacaagcaaatgtcctctccaaacttcttgggtcgactacaccattgaatacagattaagtgccagtaatgtgcctgtctacaatcacccaatccgcggaaggctagctattctctttgacgcttccaaatttatccttctgggaccaattacaacactgcctgcattca

SEQ ID NO: 172411 - DNA, 315 bp, Glycine max
tgatatccaccccacaaagtttgaaactcaagataccttcaatcctataacacaacgtcgcggacataaatgggcagattacttgaatggacattattgtacacgcggaatgtattatgcgctccactatccatgtgcacacactattgcatctcgctgttacgtgagcatgaactactaccaatatatagacgctgtttacaccaatgaacacatcttatcagcatactacgacacaagcgtggctctcggaaatgaaactgactaccctacttctgatgacgctggacactaatacctgaccatctacaattg

SEQ ID NO: 172412 - DNA, 378 bp, Glycine max
gcacctgcggcatgcaagctttccaaactgattgttgagttagtggctcaactgataggagatatgaagtcttgacaacataggaagcaagaccttggtgatgtagggagcaagaccttgatgatatagggagcaagactttggcggtcttgggtgaagtaaaaaagtagatgacattctcaagtttgagttcaaccttattaaaggtcttgccactcatgtggtggtgttttctttcgccttgcagagcttctcctcttatgcttgtgaggagttagtgtgatttgcacctagttaaaggtcttgtcgatcattatggtggtagttcctcttgtagaacctacacctttgactgtggtcgtcgtggttcttaaggag

SEQ ID NO: 172413 - DNA, 290 bp, Glycine max
gtaatcgattaccagatcattttttcataaaatattctcaacaatcacatctttttatgtggttcttgaatggctatcaaaggcctatatatatgtgacttgagacacgaatttgctaagaagttttcagaacaaataaagtcttatcctcttataaagcaaaattgttttatcctcttacaaattccttggccaaattacttgtgattcaataaggaattttttagtgctcaaattgttcaatctatctctttcaagagagatttcttcttttcttcttcttcattctg

SEQ ID NO: 172414 - DNA, 415 bp, Glycine max
atatctacctatttctgatttacttgggaagcccaatccaggtggtaccaaagaaagggggcacgaaaatcattcaggatgaaaagaatgacctaatcccaacaaggactttcactggctggagaatatgcatcgattaccacaagctcaaagaagccatgaggaaagaccactttcttttgcctttcatggaccaaatgtaggagaggcttgtgggacaagcttattacaacttcttgtatggatactctggatataatcaaattacggtggaccccaaggatcaggagaaaacgaccttcacatgaccttttggtgtctttgctttagaggtgcatgttggcaatttttgagatatggtggagaaaagtatcgaggtattcatggatgatttctcggtatatgggccttcttt

SEQ ID NO: 172415 - DNA, 397 bp, Glycine max
  unsure (1)..(397): unsure at all n locations
taagctnttgcaaggaagaagaagaagaagttcaagaagatgttctttgagattcaaaggttgtaaaagaatatgtggaatagttatttgtaaaggttgtaagtgttattcaaatgcaaatcaagctcttgcttttatagactcttcaagtctggtcaagaaaaccattggaagagttataacctttataaaaacctaaacaccattggaagagttacatcttttgatttttgttcaaaacttatcattggtaatcgattaccaaatccttgtaatcgattacacaaaggttgttatgaaaggatgtgactcttcacaattgaatgtgaattccaacgttctgatgcactggtaatcaatgaccaatatcttgtaatttgatgcaccattttgaaat

SEQ ID NO: 172416 - DNA, 374 bp, Glycine max
tatacaaagatgatgttccgagtacattggatgtggtacgaccatgccctcctgatttccagctgggaaattggcgagtggaggaacgccccggcatttacgcaacgagcataatgtaaacctttacggttttaaaagctctatagttgggcctaggctttagagtttttccttttgttaaggctttgtgtcttttgttttcgaatttataatacaaggatctttcttcatctgttcctacgtctctacccattctcattcatttgcatgtttacttctttatttctgaaaacggcagattcgatgaagagtcccccgaaggtactaatacctgggaccccgctatcaacttcgagcaagaaacgaatcaaacg

SEQ ID NO: 172417 - DNA, 353 bp, Glycine max
  unsure (1)..(353): unsure at all n locations
cctatagtgcttcttatgcatcctcagatcatagaacaccgagaattacttttggttgcacctcatacccataagcctcttattcatgtccacaaaagctacaaacactcttgatcgatccattgataccaatttgactgaaaattgngcccatgattggatctatttatctattgtattcgggacaaccacatcaagtttatctatcaaatgaatcatcaaatatcaaagcttacaattgtaacgtagataaaaatgattatacattgacatgttctattttgttatagttatgcaatatgtaatgtaatatggactgactctctgttgcaatacagtttttcctatacaat

SEQ ID NO: 172418 - DNA, 413 bp, Glycine max
  unsure (1)..(413): unsure at all n locations
gcatcatccatcctcaattccaatcattcatgttcaatatgatgcatgttcctgacctcaactctcatatgcaatatggtaccatcctcaaggaaatagcccaagtgtgtccatacgacactctcacttanaaaaactaggcaataagtgtcgaggttactctctcgtgcacaggcaactcccccccccacggtgatcagcctgagtctcaagggagttccaaaccgagtgacatgcccctaagtacaagtatttctcctcatgagaaactacanaatacttactgacaaagtttatacctattccatgtcatatgaagtatgaaacatggacaccatcaaatgcactgaccgnggataattaaagattctatgtcatccccctccagagaatgctaaaactctttaacactc

SEQ ID NO: 172419 - DNA, 346 bp, Glycine max
tctagcttctcactgaagtcttctcaaagaagcttcttaacgatagtttctcatgaaagcttctaaaggaagctaccttatctattaatagaagcatgtgtgactttgatgaatgagagtcttgtgagacacaactcaaagttcaactttccttcactgttgcttcttaaatttctgctcccacctctctctttctctacctctttcttttctccattgtagcgatctctccaagcttttatccaagcgtatcttggtggtgaagcccttcctcatggcttattcttattggatgcgcctccttcacccttttcttggcttcgctgctctgcatgtggaaatcact

SEQ ID NO: 172420 - DNA, 340 bp, Glycine max
attcccctcaagctgaattaagaaggtggcaaagtgtttcttttgcaagaagaagggacacatgataaagaattgccccggattccataaatggcttgagaagaaaggtaaatcaatctcattagtatgttatgaatctaatatggttagtgttaatattaacacctggtggattgattctggatctactattcatattgcaaattctttacagggtatgcaaaacctaaggaaaccagtgggaagtgagcaaagcattttatcaggcaataagctaggctcacatgtggaggccattggaacttgcattttgactttaagtagtggctttattttaaaa

SEQ ID NO: 172421 - DNA, 272 bp, Glycine max
tttaaataggcaaactgaatattaataacagcacaagatgtgctaaattacaagtaacgatgaccactgtgctaaaatgagcttatttatttgcatggcaccttaattaagagtgttcctgcacggaagggttagtgactttcacaacataaaccatcatcacattaataagagttttcatagaccctcaaatattagatctaactatttcaccattaaattccattgtgaatgtcccttgtaaaaacatcaattgtagtcctttgcaaaac

SEQ ID NO: 172422 - DNA, 321 bp, Glycine max
  unsure (1)..(321): unsure at all n locations
atctatcaatatntcttcttaggtataagncacaagatgaaaagtgggatactagctaatttaattaaaaatgattaattagattagttgataatttaataaataaatgtcaagtgacgcaaaatgatatatttaatattcctaatatattgaaattttatttctaagtattaatcatcttaaaagtaggataacaatcttttaaattatgtattataaaattgtgcatagggtaagttaacaaacaggggaacttttacttcccctgattcaatccagaagaaaattttgcgcggaactaaatatgataatatgatttta

SEQ ID NO: 172423 - DNA, 288 bp, Glycine max
tgatctatacatgatttgatgagccaaagaaaatcaacaggctgttaaatgataagcatttgcttaagaataatcaagagtgcttaacaaacaaagccttgttcaagattcactaaagaccaagccttgccttaaacaaagtgctttaagacatgcaaggctctggtaatcgattaccaggaagtgtaatcgattaccagaagacagggttgagaaatagttgttgaaaaaggttttgaatttgaattttcaacatgtaatcgattaccatatgtatgtaatcgatta

SEQ ID NO: 172424 - DNA, 415 bp, Glycine max
  unsure (1)..(415): unsure at all n locations
cttgcggatttggtcttcgccagtgaaaggatcgatgtttgtccgaaaagaggcaaatttgatcatcctactatgacgaatgagaaaactggggcaaatgaagagggtgagaaagagggagaaacccatgctgtgactgctattcctatacggccaagtttcccaccaacccaaaaatgtcattactcagccaataacaaacctccttacccaccacccatttatccacataggccatccctaaatcaaccacaaagcctgtctaccgcacttccaatgacgaagaccacctttagcacaaaccataataaaaacaccaacaaaaaggaatgttgcatcataaagcctgtatgtgtcaccccaaattccattgtcatatgctaaacttgatcccatatctactngattattcaat

SEQ ID NO: 172425 - DNA, 203 bp, Glycine max
gaatgaccatgatgctctgaaaacactgacaatcataaatcgtgagctgtttggctctactctaccaaaggcggccgccactcaaagtttggagatatgtacaagcaaaaaagtactactgcatgcgttaccgatcacaatgcagactatacaaattgaatgaaggactatggtggaatggatgatatatgacatcgcaaaca

SEQ ID NO: 172426 - DNA, 334 bp, Glycine max
  unsure (1)..(334): unsure at all n locations
agtgatagtatgagtgccctgtactcattaacatcagccagtcacacaatctactgtctaatctatggacactggtgacgaatcatggttctatcagtgggattctggcagttatattttaatgtcatcctgtctcttaggtggatcataatgctcaatgcccaaaaactgcataatgttttcaaaaggttacaagtcattgacatccccaaaactgcccaacatagtgttgcataattcttgtagcagattttcaagttaattttttaaagttacacgtcattatttaatctttcaaanatcttaactaaactaggtgttgttaaaatctcat

SEQ ID NO: 172427 - DNA, 342 bp, Glycine max
tacaccttttcttttatctacttgaaccatgttccttctgaggttacatccaagccattttctggcatcattcgtatagcggctttgcctgattctgattccaagtatgtggaaactcttgacaagttcagttcttgttaccctgtgtctggtgatgcatcactcaagataccattcagtgttgagtataaatggcaaaagaaacgttctggggacttgctcatgctggctcaccctcttcatgctaagcttctgtcatatgatcgtgatgttactgtgctgaatgattctaagtatataagcatcgatggtgacctcgttggtgttgttggagattcatgg

SEQ ID NO: 172428 - DNA, 416 bp, Glycine max
gcacctgaggcatgcagcttttatgcaagagaacacaagagtgggtcatattgtgtaagtaccctttttggccagcaatcagctatgagccacgctacaataatttccctacgcctagatgtttaggaattttgttcatcataaatgtgtaggtttagaataggtagcaaaatacctttggcaatttacactttggggcgtggtagcaaaatacttggatgtgtgtacatgtaatttttggtagtcaaaatggctcacaaaaaatatatatatgttgcatttttatgtaaagaaaataccttacagagatactttttaatttgaatgccattttagtcgacaaaagaaaatatacttgatattgcatgcggctttaggtagcaaaaacacttgaataaagcctgaaatgcacacct

SEQ ID NO: 172429 - DNA, 363 bp, Glycine max
ttctgcacctgtgtcaattatgtctttacatttctctgatgcaagcatactgttttcgagatcacgaagtgtgccactttcatatatgttcagcaaggcttggtttacaccatgaagcaatggagatccccttggaaatacctgcaaagacattagttgaagggctagaaattaatagtaattcttacatgatacattgcctttatctacaaccaattaaaaacttaagcaacatgaaaataatagacaacatagatgcaaattcataagtgattgtagtgttctccaatcagaactggagtttcaccttctaacctatgctgatctttagtgtaagcctctatcatgcatattacccggatg

SEQ ID NO: 172430 - DNA, 305 bp, Glycine max
  unsure (1)..(305): unsure at all n locations
cttagcactgttctaattacagttatttggtgatctagttggaaagaaatgctacaatttttactggttgattgttgcctcttgagttcatttgggatcaattagttcacttaacttntttgtgggttcctgctaatagtcctttttgtgagtgtctttggtagatatagaagagagattgacatgttgtattacatatttcatgttcatagtttttttttttgtttcctttcgttcttggtgtattttttgaggattgcttgttctcttgcatttgcatctctccttttctttgaaaattcttt

SEQ ID NO: 172431 - DNA, 385 bp, Glycine max
taacaatcacattcatgactacacacaaaagaatggagtttattagtcgtgtgcctacacatcaagaaagacacactcatccatagcatatatacggttcagaatgttctcacatcatttatccacacatcaagagagaaataagcttactaacagcatacacgcaagaagataatggctcattaaggcattataaatcaatatcaagactacttgcatcacctaacggcttgccataatgtccaactccactccataaattattgagatgaccagtctcataactcatgactcaacgatggatttatggtatagtagacattaatgatgcatcgcacatcacaagcatcatccagtctcattggttcatgcaaacgaaaataaa

SEQ ID NO: 172432 - DNA, 313 bp, Glycine max
tacccatacctactcaaagttgggctgacatttccatggatttcataaaaggtttccctaaggctcagggtaaaaatgtgatattggtggtggtggattgtttgactaaatatgctcacttcattcctttgagtcactcattcactgcaaaagatgtagctgaaagtttcattaaagaagtggttaaactacatgggtttccttcaaccattgtgtctgatggggataagatctttttgagtaatttctaatctgagtttgttaaaatggaaggacaaaattgaagtcagttcacctatcatcctatactgat

SEQ ID NO: 172433 - DNA, 334 bp, Glycine max
  unsure (1)..(334): unsure at all n locations
cgatgaagaatgtntgacaaccttgtagaccctttttttcagtctggtatctactctgataatgagggcatctgattggagtaaagaatttgagctcatgtgcgacaccaatgctatgtagttggtgcagttcttgggcaataccgagacaaggtattccacactatgtattatgctagcaatgtcctgaatgatgcacaactaaattatgaaaccatcgagaaggagatgctggtcatagtctacggattagagaagttcatatcatatttggtggggtccagagtggttatctntatgatcatgcaacaatcaaataccttctcaaaaagta

SEQ ID NO: 172434 - DNA, 423 bp, Glycine max
gcttcaccaccaagtaataactatatctcaaagtttaactacctgggagaaacaacaaggcttaaccatcaagagcagaaaccaaacaacaattcaatgcttaactatctatgacaaaagcttaaacaatgcttaatcaccatgaacaaaagcttacatcaacaaaatagaaaaatcacaaaatctgtcttctatgaggacttttcacaaatactttgtgaaccaacaataatcaaggcttaaccacccatgacagaagctaaaatcatcaaaacatgcctaaaaggatccgaaaagcctttgtgggagcattgcatgtatcaccgtctagactattagccataggtgcaatggcagcaacaggagacctattaattactgtttcgtgttgaatatatacttcgaggaccgaatacaaaatcc

SEQ ID NO: 172435 - DNA, 424 bp, Glycine max
  unsure (1)..(424): unsure at all n locations
taagctcgcttctcaatctcccttttgttatgatgacaacctcttttatcattaaacacatacacattctttttgcgagtcgatcagtcacttatttctccatattcttcccctttgtttttgagtataagcttcacttgaaattaagaaatttggacatgtgagttcttgatttaatgcctatgttgtctccccctttggcatcaacaaaatgccgtagtgcatataacatacatgattttagaaagatcgtacacatatgatccatcgtaaatcaatcataaaagattctaatctaatcatgatgcacgacatgaatggaccaaattataatataaaccacatttgcatatgacataattcataaatagtcantcatgctaagcacatatcacaagaaatactaaatggtcaaatgtcataa

SEQ ID NO: 172436 - DNA, 405 bp, Glycine max
taatgtcaaaccctatcagagcgttgtgttcccgtgtcctctagcatgaggttcttcatattcatccacctattcatctgctcccacgaacacaagttcaagatcatcacaagatccaaacacaacaacacacagggagtgagttatcacattcctagctaatagagaaacaagacaattaaatatacatattatataaatgagataccacttgcttaaacatagctcacgtaacttcaccacttcgtcattcaaaattcacttttcaattatcaatcacattacacaagaatctcacacttcgatcaagatataataacacatcaattagcaagcatatgcaatagttatgctaagactcaatcctatatgcaatgggataccatgtcagtgaaaaaccaccct

SEQ ID NO: 172437 - DNA, 391 bp, Glycine max
tgtggcacgctgagcaagcatatctctgattgatcctcttctatggtttcccagcacgctaagcgagctgcatgcctcgcttatcggatgtcactcgctaaacgcacatgccttgcttatcgagacaccagctgtttcaaccttctcttcttttagcctgaaattgaagtgatttcaacattaattcacaaaatgggagtattcactatataaaatcaaactaaacatgagaatatgtacaattcctacaaaaagaaaccataaataggggaaagaggttaattttatgtaactattcaatacaaaagttagtcgtaaataacgattaacaagtacaaggtatgttcatggttcggtgtatggattccttgagcctcaatccatacacaat

SEQ ID NO: 172438 - DNA, 385 bp, Glycine max
  unsure (1)..(385): unsure at all n locations
atagaaggaaacttctgcctcaagtccgaataatttccaagttgcatcttcaggtagttgatgtttccattgaaccaaaactttggttacaacacgatttcccctaaaacgccgacgaggaggagcgtgacggcaaagagagggtatcattttttttaaaaaaaaaatctagtgtggctagtcttattgtaaccccacatttacctctagatcctacggctaaaagaaaattcgcaccatgctaactgttcaatcattactaaaaaaatgatgttgaacatcgccctattaacatcggttacttgaaaatcgatgtcgtcaagcacttacaacatcggttttcaaataaccgatgtaaaactgaattagtggattnaacatcggt

SEQ ID NO: 172439 - DNA, 370 bp, Glycine max
  unsure (1)..(370): unsure at all n locations
acctaacatagttactaactgactaaccaatctctttttctcgaaacttcgagccgagaagttggagcgatgaattccaagaagtgacgtcaatgtcaaagaaaggagcttcaatggaagaaagggtatggcttcaatgtcaaaaaactgaggtcaatgtcaaagaaaggagcaaggtgaacaaacatgcgagggttcaaacaaaggagcaagcagaaaggtctacggttcatagcaaggagcaagctatcataaatgtcatccgcgatgtttntatcaagcatcaagcagttttgccttttttctatttttgaattacgacaaatttttttttctaaaaccggcgtaaatgtataaaacataacattct

SEQ ID NO: 172440 - DNA, 368 bp, Glycine max
  unsure (1)..(368): unsure at all n locations
agctgagagattatgtggacccggtgttgagaggaacnaggataagggctacgtgggagtacgtgagctcagtgaaggtgggcaactggggatggtgggtttatgtgtgatctgtggatgtggagagttgacttgcaccatcgcccaaccgccacctattaccacatgtgatgggtaccccataatcctacaagcttgaaatgaggaagtgtggaagggtgagacttcctacttttattcgttgaccacagagtggtacctggagatatgtcgcggggtcaggagaccttggggatgtcaagtggggtgctattgcccaaaaccaagcttgaccaatcccgacccaacccgggcatagtcagtcagtg

SEQ ID NO: 172441 - DNA, 318 bp, Glycine max
ttgatttcctttgttccggaaacctttcttttctttgttcacccaaacccaatctgcgggttcgaatacaaccttctctctccctttgttggcttgtttaacatatctcttatttttcctctcaatttgatctttgactctctcatgaagcttcttcacataatccgactttgcttgaccttctttatgcttaaaaacagaaacattatgcataggcaaaagatcaagaggagttattgggttaaaaccataaacaacttcaaaaggagaacaattagtggtgctatgaacaactctattgttagcaaattcaacatg

SEQ ID NO: 172442 - DNA, 441 bp, Glycine max
acaaaattactcacactcacagaggattaggattgcgagaacacacacaaagattacatcgtaagataaataatgacaaacacaagatattaacgtggtccgacacctcttgcctatgtctacggaactgtctcaacagatttcactatcataaaaatgattacaagaatgtaaccaacttcaaatagtatatcactcaacaaatccgagtattttacttaatggttacaagaaatgataacactctcatacaaagacaattttctctcaacaaagagattgtgtttcacaatttctcttcttacacacaccctcgtgtctccattaatatttttctctatttataatgaagatggcaccaactatataaataagtttcttagaagtgaaataaaacactttaatgcattattcactaggtcattagaaaatgaatgtact

SEQ ID NO: 172443 - DNA, 334 bp, Glycine max
actcagctttgaaattatggctcctctgatgagtttgccttgttatgagaagaaacctttatttctggctaccatttgaactttgtgctagcttcatccattaagaattatgtatttatatttatgtcatgctaatgttgctgttatgttgtttggctactggctacccgtagtggtgagaaaacagaattatcacatcatttcatgtttcaaatggctgacggatgagtctcacttcttatgttggatttgcctctgcaatcgatgtatacgtatgcatattctgaggaagtgggagaacattctgatgacgataaagctcaatctctcacta

SEQ ID NO: 172444 - DNA, 331 bp, Glycine max
tgacaagtataatgtaacgagttttttgagacccccaagtgtggatgagtgttttctagtgtcaagcatggtggtctcgacgagtttgagcgttgtaggtcgatatggcttgtcaagccgctgagcctggacatatgttatccgagctgcttctgttaattcgtccgcgatggacttgtctttggtgtgttaggtgaggtatgtcatcgcacttgacaactctgcccttttactgacaattggagaatgcttttaagatagttcgtaactgctatctattgtaacgagctcgtgcatcatatgcacagtactcatgcatacgtgttacatg

SEQ ID NO: 172445 - DNA, 405 bp, Glycine max
  unsure (1)..(405): unsure at all n locations
aaaactaactgaaaaaaaatacattaacttcctctcttttatggaactcatgcaaaataaagggatgaaggctccaatagattttgtttctcataaagaccaataagctatgatatagacttaaattgaaaaggcttcctaacacttgaatgacccccttggctgcaattntgaatgtgtcactccatgtcaccaatgggtagttttgctttttgcaaaattaccaaaaatggaaggggtaatatttggcaaaaatgggtattttcactttttaccaaaactagtaaatcttatcttaatcacctaagcttttgtgctaatctccctatgaatacatgtacctagagtgatcctcaaacagagttaaattacactatcactcaatgcataatgcaattttgctac

SEQ ID NO: 172446 - DNA, 376 bp, Glycine max
  unsure (1)..(376): unsure at all n locations
agtgttngaaaatgatttgattgagaacatctatgaattgaatggatggggataattagatgattgttntgatcaaattggcaatcaatagaagagaatgagcgtgtgtatggaagtatgtataaaaatgttagttgattgtcatattgattatgaaggaatgcattaaccatatctcggtgagagtgtgatctttaaattttgagagaaacgactatcatttagtactgatctttgcgtgaatctctgatgtatgggttggatgcatgaattcgaggatgatgaaggccctgtctgattgtgattgccacttagccaatataatgtcatgtgctagaatgaattatcccttgtacccagcttgagctgaatgaat

SEQ ID NO: 172447 - DNA, 326 bp, Glycine max
gtgcgtgagctcaagttaaaggtgggcaactgggatggtatgcttgtgcttgacttgtgaaaatgagagagttgatttgcgccatcgcccgatcgccacctattaccacatatgacgggtgccccatgatccactaagcttgatgtgagaaagcgtgtaagagtcagtcttcctacttttgtttgttgaccacagaatggtacttggagatatgtcgcaggggtcaggagaccttatggacgtcaggtggggtcctattgcccaaaaccaagcttggctaatcccgacccaaccccggcataatcagtcagtgagaacctgtgacg

SEQ ID NO: 172448 - DNA, 434 bp, Glycine max
cggatgttatgctacttcttaagaagaaaaagtgaagcatcttagatgaatttattattttgctttaaaagggcgaaagtggaataaacaccgaataaatcctaacactcaagtttatagatgtttttatttatgtatatgatgattcaatttttcacttttactgtgggacttcaccacacatttactccaactccaataaagtgtacttgctacttaagccaccatatgtccctatcctcatgtgaaataatgtcttatctttcaccttcttttacactagaaaacaagttgagttgagtaatgtctggttacacaataacttgtaaatcctgcaagagatatcccacctctctccttttgaaacattattcacactggctaataaaacctgagtattattaatttgactagatagaatctcttctttaatg

SEQ ID NO: 172449 - DNA, 358 bp, Glycine max
  unsure (1)..(358): unsure at all n locations
acctgaggcagcaagcttatcataataaatacctaaaatcatttattgccatccctgaatggcctcttgctttatttggtaaacgtggacttttaaagcctaaaccaaccataactntgcactactttaagaaaccaagagatcattatatggccaatgccttaatgttttctcttctttcaaaaaggatcaaaagattgtttaatggtccaacaccttaaatgaccttttgttcagtcaaaatatgtcttgcaaaaaaagataaaaacaacttaaccaacgtttagttctcatagaactacgtaggtctgatttcctcatcacaattgaggaatacgtaggagcaagggaaacaccc

SEQ ID NO: 172450 - DNA, 339 bp, Glycine max
gtgtttcgataatgcaatttttttttaacatcatgcatagccagactgcacccactgcatctcatacaataactggagttcttgtttttagaggaggggtgttacaaatgcaatgtctactacaaagatggaaaacaaatccgccaagatgacaaatgaaaaacagcctatgaactatttctgctgttaaatgaaaggcatttcatttcatgcattaattaacatcattagttatcttgtaaggcattttcataaacttggaaaagccaacttatctcagctgataaccagctgcaatatattcttatacgaatgcatagcaatgataagcagaatgac

SEQ ID NO: 172451 - DNA, 317 bp, Glycine max
  unsure (1)..(317): unsure at all n locations
taattcatgagaagtattagtaactaaaggacaagaaaaatgttgcagacatgaatatctgcacaatgaacaagacatgaagaacaacattgttgcaacatactcataatggaatttcatcatcaggatgagtntcatttggacattatatctggagttccaaaaatgcaattgagctattcttggtggctatggaaaacttgaagaaagatctttaactttcatgaataagttgtagtctgatacaacctggatcatggacaaaattgagcctgaagttgtagatgttggtctgcttggacaacttgatttgtgtg

SEQ ID NO: 172452 - DNA, 427 bp, Glycine max
atcctctcttggatcttgccttcaagaccacctattcataagcaactagacatgttagtgcatgccaaccttcacaccaaattgtatcatagtagttctggaatggcagcctcgtaacaaactctggaaagaaaaaaggtgaacattggactcatattcttcatccaaagatgcaaaaattggagctggaaaaactaaattttaccaagctttggaaggcaggttttctagctattgaccttttctcctattcatcttgggataccttgcccgaagaagaagaaaagtgtgacatatatggattatggaactattgatcaaggagtttgttccaagacagactgttgccccaatatattaactacacattgttagtttagatttattttcacatcatggttttttctcataaaaaaataatgatcgt

SEQ ID NO: 172453 - DNA, 361 bp, Glycine max
  unsure (1)..(361): unsure at all n locations
tagttatgggagccaatcaagtgcttaatcagcattgatacagaaacatacggcgcatgagacaaaactaacatgaatggattacttgaaaatcgaaaagccctttggaagtgattaacactaaactaagttagaaatagcgcttgatctcgaattccaaaagctatccttgtttgcgtttgtgaaataggatagggttagggtagtgaaatagtatgtggtaattatgtgtaattgactaaatgggggccatctaaagtagctcatcaagtgtgaactaaacatctcaaattaaactgcacaaacacttatataattaatatagactagtangcaacaattgacacacaatacgtaaaag

SEQ ID NO: 172454 - DNA, 485 bp, Glycine max
  unsure (1)..(485): unsure at all n locations
agctagctaaatctggtttgtggaagatttantctggcttgttnttggtgctgttactctacacaacctttnttcatcagctatttggtattgtcagattttccttttggtttgggagatatttatgttttcccttctattttgaggatacattttgtcttttctgtgcttttatactttattgccaatagtgtcttatttctattttagaaaattgacctgatttgaaaatgttgactcccaaatatcctggtatttaacatggatttgagtctttgttgttgacactaggcattgctagcagaattataattntatggaggtcattntagggtaaaataggattaactatggttgcaccacgttagctctttggagtcaaggtacgcattacatatattctgccacacacatataaattctgctcaatttcttaacaacatgatcttgtcagaagtgatgatgattatatttctctctcgtat

SEQ ID NO: 172455 - DNA, 343 bp, Glycine max
  unsure (1)..(343): unsure at all n locations
tattactaaatttgccacttcttatctaaccttataaaggctccacanagagaaaactaatattggaaagatgtttattttttatgaatggatcttanacaagttatctaatgagcttaatgggaaagaagctgtaaaggtagtgctcatgccttctttttggaatagtgtggtttacactcttaaagtcatgggtccacttgtcaaagtgcttcgtcttgtggatgatgaaaggaaaccatccatgggttatatctatgaagcaatggacaaagcataagaaataattaacaagtctttcaacaaccacgaatgcaagtcaaagatgtgtttgcatcattga

SEQ ID NO: 172456 - DNA, 287 bp, Glycine max
gctattggagttggcattggggctgttttgatacaaaacaataggcctatatcttaatttttggaaaaattgggaggagccagattgaactatggcacctatgacaaagatttctatgccattgtgagagctcttgatcattggaatcattatttgcgtgctaatcactgtatattgcattcaaatcatgagtcattgaagtatttcaatgggcagcataagatgagtccaaggcatgcttaatgggttgaatctcttcaatcttttatattctctccaaaaaacaa

SEQ ID NO: 172457 - DNA, 301 bp, Glycine max
tcccatacccaatcacctggttcatgcatgactttctttctgcttttgttggcttgccctgcatagctcgcatttttcttttcaatatgggccttcacttgctcatgcaacttcttcacatactcagctttatcctgtgcatccttatgcttaaacatatcaatgttatgcatatgcaacaaatcaagatgagtcaaatgattaaatccatacactatctcatatggtgaacaattaagtgtgctatggacagcccgattataagcaaactcaacatgatgcaaacatgcttgccaagatt

SEQ ID NO: 172458 - DNA, 333 bp, Glycine max
accttgacccagggtgagaatgtcaattcttaccctcggaagcaaataaaggggagagggatatatttcaatcaaagaggaagcataaaaggagagaaggaaaatttccaatcaaaggaaaaaaagagaggaaagggaatcgtcaatcaaagagtgggagaaagcaaaaagaaaagaaagaaaattcccaatcaaagaatgggagaaagaaaaagagaagaagaaagggaagaaagttcccgatcaaaaaaataatatgcagaaaggtctttggaccggacaatatctgaacattacagaattgtcaccaaatgaataaaaagaaatgaaagg

SEQ ID NO: 172459 - DNA, 384 bp, Glycine max
  unsure (1)..(384): unsure at all n locations
ntccattctcttggaagttcatcattggatttgacttcttctggaggatcttcattgtttcctttatcatttcctttgaaatattgttcatgaatattcatatgttctaaagaatctgcaatatcatctagcatattctttcttgacaagatagcattagattcatcaaaggtaacatgaatggattcctcgatattcatagttcttttattatatatcctatatgctttgctgtgtaatgaatatccaagaaaaataccttcatcagattgtgcatcaaattttcctagattagcgtttccattattaagcacatagcatttgcaaccaanaacatgtagatgagaaatattanggtttctaccattaaataactcatatggg

SEQ ID NO: 172460 - DNA, 231 bp, Glycine max
  unsure (1)..(231): unsure at all n locations
caatctctcttcactctggattattggattttagaaagtatcctgcagagtgttaggatgctaaacagaatnatggagtgtgttattcgtggcagcaaatgctatttctagcgtggggaaaatgctcatttctatagggtgacttnttgtgtatccctattaattgcgacattggctggcatttgcaatgactctagggcatctataacatggtattcatgtgagtcttgt

SEQ ID NO: 172461 - DNA, 323 bp, Glycine max
  unsure (1)..(323): unsure at all n locations
ngtcccacatcaaagataagacaaagtgttaatcaagttctctccccattctgctagctatcatgtccacagaaatccatatatgtcaatagagattgtaaagtaataatcatatcacaatatcacatgttatttgctacggcctacgggaaagctcgagcgagcaaacttgcttggtgagtaatgctaactgtttgttgaaaacgcccaagtaattcattacatttttacatcacttgacaaggagtttcggatcaatgtcttttgttgtgcgtgatagcacggatgcagatcaacttggacactacttcaaaaatcaaaac

SEQ ID NO: 172462 - DNA, 447 bp, Glycine max
  unsure (1)..(447): unsure at all n locations
tcatacacantccagaaatgataaaaataatatatgtagcaaaaaatatatacaagtgctttacataatcgctattgctagctagattttagtccccttttaacgaacagtagtgttgggtcataaaattaattataaatccaccggaatgaattaataataattaatattcatgcctattcgtggtgaaattgacatccttcattcaattcccttaatattttctctatcaaaaaccaactttatcaaattaaagacaagttattgctattattatagcatcaaaaagttttaaaactgtacggagacatgtacctccctaatattagagatgtaggtccatcccgggagggcaaaatatatagagaccgattgtgaatgctagttgctagagaaacatatatatagaaatgattttgccatataactagttatataagttagtta

SEQ ID NO: 172463 - DNA, 419 bp, Glycine max
  unsure (1)..(419): unsure at all n locations
tatctgtcgtctgagtntagcaatatgagcttgaccttttcccatcggaagcataaaataactgtcaattggaacacagttttcttacaagattgagagatgatagaacattcaaagccttcaagaataacacacattcgcaatttaactaacaagaaaataagatcaaccacctctctcagctcctcgtaatttacaagcataatggggatacacaagttaacacgaacccacacaatcaataacttatcaaggaaatataatgaaaaggaataatacagacttcagtatactgacaagggtcagtgatttggatgaaaagaacttcatctactgcgtgctctcaaattaaaaagtaaagcattaatgtcagaattgtatactttagtcatgtcatttctgtgtattattaatatata

SEQ ID NO: 172464 - DNA, 335 bp, Glycine max
  unsure (1)..(335): unsure at all n locations
cttcaaatcaacaaccaacacaagtctcaaattttgcatttcatctcatgtcatacaatcacaaacacacaaatngaatctaaaggactttcttggtttgtaatgaggctaggctacaaataattcatggtttttctaggatgcaaaacttaggttctaggagagcattcatccttggatcacccttttcccttttattcctagcttctattgatatgccatactcttataagacacttagcttaagcaacaacacacaaaaactttgcttattcttgaaactttatatttnntttgcagttttttttacttactgcttctttatataatttcct

SEQ ID NO: 172465 - DNA, 264 bp, Glycine max
gtcaggtgtcgtagcagccagatgatgaccagcatcagccagctgcatatgcaccgtcgctacccctatatgagacaccatccctgtggtctatgtctttccacttgcgaaggatagaactccagatgcacacatacatgcagcatgtgactagccagtatgtggctagtcacatgggccatgtgcaactaaataagccattctaccagtacaatatgcatcggcagagtcatgaccccagtcctttcccttggcctacccccg

SEQ ID NO: 172466 - DNA, 389 bp, Glycine max
  unsure (1)..(389): unsure at all n locations
agcttccggagaatgtcgagaaggcatctctacgactgcgagagaacgagaacagcggcatgcataaggcgagggtggagactccccccaacaagtgggaggacatgtctctgagtgagaaagcagtaaagctgtatgtgggagagaagggtgctctcttctggctcaacaagtttgcatatgcttcaatcttcatcatgattgggggatggatagccttcaggtttgtgggtcctgcattcaacctttaccagcttgatggtcctctactctccccttctgatgtcttcaagtgatcgatcttcttcatctcaaagtnttgagtttgatcaatattcactctnttagcttctgagctcagatgatgctctccaattatgttgctacta

SEQ ID NO: 172467 - DNA, 462 bp, Glycine max
  unsure (1)..(462): unsure at all n locations
aaaaattttgatcgtgcattcgtgacacttatatactaagctctcttttctggtaatgattatattttgattctaattcttgtatttgggtatggttttatgacatttaaatacttaatatttcttttattatttgattagtatgactgaacatgatgattatatttacttgctcttggttgtttacggttatgagttttaaactcaattattttgatgacatatgactagtggtatgtacttttatttggttattatgaatgactntcttgattatatgacattctatggagtattatatttttagtgtgatgaatggctatgatatcttgtttgaattttttctattctcatgtattttggctatattattatggtatgtgaacaatttactatctccttatttgcatggtatggttgaacaagtatgttatttgactatgtggatttcataagtaatct

SEQ ID NO: 172468 - DNA, 373 bp, Glycine max
ccacaactctcataaatgggagagaaatgttcatctaatgcatacaagtccctaatattatcaaattctaaaatttgagctcctagggagcaaaacaatgtgtgtctcctagagagggcatcagctaccacatttgtttttccctttttgtatttgataacatatggaaattgctctaggtactctacccattttgcatgcctcttgtttaacttgctttgccctctaatgtacttaagtgattgatgatcactatgaatgacaaattccttggaaacaaggtaatgttcccaagtttggacggctcttattaatgcataaagctctctatcatatgtggggtagttgagggtggcactatgatgttttcact

SEQ ID NO: 172469 - DNA, 452 bp, Glycine max
  unsure (1)..(452): unsure at all n locations
ttgcttctttcatgctgtaagttttctccccactagttagtgcaatttcccttggttatnttggactctccatctgatgttgttttgctgctttaattgctcattttctgtcaaattcgtgaatcaatccgcatttgaatccatgcttggattcatgatgtaatgattccgaatgagaatgccttacgcctatgttgtattctggagcaatggggcatgccacatatgccccattctcctgcaatttgtgttcaaacgtgcgcccaccaagtgctcggtgaaatgccccaatgatatatgaatattgatttctgcaaaacagggatggcggcgctgttttatgtatgtacaggcggcatatgaaagttcaataagatgcccaaatgcaatccaatcttttgacccttacttttaatcttatttgcatgatacttctcatgatttgaaccata

SEQ ID NO: 172470 - DNA, 426 bp, Glycine max
ccatcaccacgtcttcttcaataccattcgggcatcattcgtattgtccgttggtttctcaaatgtcaaactcttacggatttaatgcaattttctcaaagacacttcaacctggttatcattacttacacttgcctagtaactcgtaagcaaagaaaattcactttctccttattgttcgtaaaaaaattgctaattaaattaacttaattaattttttttaatctaaaaccaccataaatccttcagcgaagtgtgaactaaatagtaaagtttataaccgctaaaaacatgaagaataaaaatgatatcctaatctatatccaatttctactatgacgacctcttcctgattgaattataaagaataaatccttagtgccccacacttgatcaatttcccaaatacagcaagtcactgtttct

SEQ ID NO: 172471 - DNA, 425 bp, Glycine max
  unsure (1)..(425): unsure at all n locations
agtcacctgcggcattgcaagctattgggtgttgatgaatataactcatatatatgtatatgaatngntaaaataaattaggaattaatagttcaaataataaaattaaattgaaggaaattaatatattaagattcaacgataaatactttcaatgcatttttagtttaattatttattaactttttttaattgataataatatagtttggtttaatatatacatgtttagtatgtaaatactaatatggtgtgacgtgcatatgattcatgaggcgggataacatgctgctttgggattataacattgtgattgagattgagtgtatgtgataaattgagtatgtgttgaattataagatacaagtgtattgagattttgtatgcattgagttgtgagctatgaactatactatcacacaact

SEQ ID NO: 172472 - DNA, 326 bp, Glycine max
  unsure (1)..(326): unsure at all n locations
gacttgctttccaatctgacattctccacatattctgccntcttctattntcagattgggaatgcctctaacagcacctttgtcaatgattttcttcatgcctcttatgtgcagatgtccaaatctttgatgccatattttgacttcatcttctttggaggatagacatgtggaggagtaactggtttcttgatgtgtccataagtaacagttgtcctttgatctgctgcccttcattataacttcactcttttcatttgtcaccaagcattctgactttgtgaaatttacattgaatccttcatcacacaactgactgatgctga

SEQ ID NO: 172473 - DNA, 336 bp, Glycine max
  unsure (1)..(336): unsure at all n locations
tgatccctcaactccttcagaaattcttcactcaccacttcatatcacttcatggagtntagttattcatcattctttntcaccatccaaaacaggtcctttatcttgttcaactctgattttggtgagattttgagaatttatgacaatttgataaaagaaacaacaaagtgtggttggagagtgggtgaggttttgagactttatgaagaactaatgaaagtaacagttttgaaacaagaacgagattgagataaaattggaaatttatcatagagaataaataatttcctatagtagaatcacatgaaaagtgatgacagaaaggtatcttct

SEQ ID NO: 172474 - DNA, 343 bp, Glycine max
  unsure (1)..(343): unsure at all n locations
ntatgaagntttctggttttcccgaccttgaattcttgttctattcatctgttcattctcttctccctttgccaaaaagaattcgccaatgactaaccgcctgaattctttttgtgtctatcttctccctttccaaaagaacaaaagactaaccgcctgaattcttttgtgtctcccttctcccttgtcaaggaattcaaaatgacacaatctgagaattcttgtgattcttccctttccctaatacaaaagtgttcataggactaaccgcctcagaattcttttgtatccccattcacaaagtatcaaaggtttaacagcctgagatctttgtcttaacaca

SEQ ID NO: 172475 - DNA, 376 bp, Glycine max
  unsure (1)..(376): unsure at all n locations
aagcacctgggctgcagctatggtaaattgggacctagccatggtggtggagtcctctttccaaatgtggatgggttggtggacctagcagcgatcgacgctnttcttgccattcatgaccgtaaggaacgcccggttgtcgctatcctagccgatctatatgacacctttgaccgaagatgtagaaagagcagtacaaggattgtttgctgtactccggccttctatgtatggttggtttcacaccttttccgccaagaggtgagacatgcttgcccgctagaaagccacccttcatgcacagagaaaagagaggcaagttgggactgactcttatcaagcaaagaagaagcgtctgtcaattggttcccccgat

SEQ ID NO: 172476 - DNA, 386 bp, Glycine max
  unsure (1)..(386): unsure at all n locations
aagcttgaatcgatacacacatactgttattgattaccagagggagttttcagaaaagattctcaacagtcacatctntntgtgtggttcttgaatggctaccaaaggcctatatataaagtcttatcctcttaaaaagcaaaatcgttttatcctcttacagattccttggccaaaactcttgtgattcaataaggaattatttgagtgctcaaattgttcaatctatctctttcaagagagatttcttcttttcttcttcttcattctgaaaagggattaagagaccgagggtctcttgttgtgaaagaattctaaacacaaaggaagggttgtccttgtgtgtttagaacttgtaaaaggaatttacaagatagtggaactct

SEQ ID NO: 172477 - DNA, 379 bp, Glycine max
  unsure (1)..(379): unsure at all n locations
tctcccccaattntctataaatagggggagaagtgatgtataaaaggggttagccccttatgcacttctctctctttcgaatttgcttagaanaattgtttccgtgaagaaaatccaagccgaggcgcttccataacgtttccgtaacgtttctgtgagtgatttcgcgaaggttttcgaccgttctttgacgttcttcattcgttcttcatcgttcttcagtcttcaacgggtaagtacctcaaaccaagcttttcaattcattttatgtacccgtggtggtccacatttggtttcatgtatttttattctcgttttcatttactttgtatacccccttttgacgtgcttaagccattgtatttatgtcatttctcgc

SEQ ID NO: 172478 - DNA, 438 bp, Glycine max
  unsure (1)..(438): unsure at all n locations
agcttaaagtatgcccgagtcattcattcctatgagatgtngnngaagtattggcgatcagaattgccattccttggattatagggttgaaccaagctcatgcttttacaaaaaggttcatcaagtcaagttgaaatatggaagtaattgtcttgcaaaattggggcaaaagatgaatcgagtcacatcactgcttcgtctactgccaaacatatttaggattattgatgtccttgttacttccagtttcaccttgacaaagatgtcatggaccatgttgaaaatctaaattgattcaaccccatatcctgcgtaaaaattcgcaatcttcaactgtacatcattcgcatacatccatgcttntcattggttgcattgctcattgcattctctccttganannataaaataaattaaatanaatgaacttaatcattg

SEQ ID NO: 172479 - DNA, 398 bp, Glycine max
  unsure (1)..(398): unsure at all n locations
cgcttatgtgcagtctccctcttgcttccccgctcatccagtgctgcattgatggttgcccgtgttatgttggggcatgggtacgatcccggaaagggtttatgtcataacggcgatggtgtggcgagcttggtcgagttcaaagagaaccttataatgttcgggctanggtataagcctacacgtgccaacgtattgataattgccctataaagaatgtgccgtatcatgggccatcatccatgaccgctagtgatagggactcccttatggcacatcaacgagagttttgtcagtgcgagcttgacatgtgaagggcgggttgttagtccatgaatacagctaacttttgtgtataaaacttgtgtaaattgtatcacactcctccaatttatttt

SEQ ID NO: 172480 - DNA, 379 bp, Glycine max
  unsure (1)..(379): unsure at all n locations
agctngctcgagaagcttctatggaatctatatctttgagattcaataaggaccttcaatggtgattntcagccatggagttgtagcagaagataaaggagaagaggtgagaggaggctccatccactagagaataagccatggaaagagaagcttcaccaccaagagtgccttggataagaagcttagagaggaagcttcaatggaggaagagaatgacaaagagagagagagagagagagagaaagtgacatggaaattgaaggagaatagggagagaagttgaactttgaagtgcgtctcacaagtttcacagtcatcaaagttatgacaagtgttacacatgtctctatttatagcatagcacatgggaagcttc

SEQ ID NO: 172481 - DNA, 416 bp, Glycine max
  unsure (1)..(416): unsure at all n locations
gatcttgaagatatttgtcatttctccctagcttccatgttgtattaaaaatcaaccatttntacacaacaccatcttgtttctttcataaagtttattagctctgtcctcaagagaaaaaaaaactgactagtttttgagataataaacagtcttgaccccttcaaagacaaaacttgttcaaacaaagatggaaatatcatagaagacaaatcacaggtgcaccttcaacttcttcgttggctttctatgttggtagcaacgaatacaattgtagcaacaaattcaaagggttccttggacttgaaaatgatgatcttgtctccattgtggttcctacaatgacagtagtgctagtgggtcattccatctgctagtgcataagcctccataaccatggtaactaccaaagcctt

SEQ ID NO: 172482 - DNA, 338 bp, Glycine max
tcatcaacgtaatttatctacacttctcctcttcaagttgtagttgttgagctgctcattatctcctttagtgtgtggttcctgtgcttccttgaagtttcatgtgtgccctttgtcctccataattcctggtaagtgattttagtaaataagatttatatattttgttagtattaataggtattctaagcttaggttagttagtattagtaggtattttgctcttaatttttatgtattaatagatattccaatgttaggttagttagtatgaaaactattatttggtgttggatatattcttagatattatatgtgtgatatatatatgtatgata

SEQ ID NO: 172483 - DNA, 489 bp, Glycine max
  unsure (1)..(489): unsure at all n locations
gcttcagaccaaagcaattcataatctatgtatctaaaacccctcaatttagtggagtttcaaggtttaagaagtgaaaatgagaatggggtaattntggagcaaactctcatctcaaacaagtctataacattaatctaaactcactcaaactggttttacgacgaaaactccaccgaatcaaaatttgacctctcaacacccaatttaccctagaaatggctcttgctttcactttggtcactcattttccccatttgctcagcccaagctttcccacaagtcctaaataacattttaaactaggattaaatcactttaacctccaattaccactaaatccagatttagcttttcaaaccctcaaagcatcacacttttccactcatatcactacattcacaccttttaaccctagggtaactctacccttcatctctattcagtttctatcagaaatttcaacacacaaacatcacanaacatcat

SEQ ID NO: 172484 - DNA, 405 bp, Glycine max
  unsure (1)..(405): unsure at all n locations
attaccaatgttgtaaaacattagaattcttacttcaacagtcagaactagtgataaaacattttcaaattatttttaacttgtgtaatcgattaccagttgtcgcaacctacccttctgctggagggcgacgcgtgactcgcgggatgcgtgttccacgaaaggaatacgcgcggagtcgccaccaacgtttatttgatgaaaacgtcggaaaaaccggaaaagacgcgatctacgaacttttaagtgaaaggttcgggagttgtatttacgcacggtgaaggtattatcaccccacacgtccgccccaatggacggcagcctttaatcgaatgtgcaaacatgactgtgatttttatgttcacttttatgtctctaatccttcataccctnttatattttttc

SEQ ID NO: 172485 - DNA, 341 bp, Glycine max
  unsure (1)..(341): unsure at all n locations
ctccnaacgactggcagagtcctgtgatcaaggcgggaaatcccacggccctgttggacttatccgggtccatatggtgcctgttaggcgtcatacctgcaaatagatagatggcatcagcgattaactgagccacgtgaatgctcatccgtgtcaggatggcatacaccagctgacacttcggcagggggaggtcggaattatgatcgctgggctggatgttgctgaacaccanagtcatccaaatctgagtcagggtggtcatgttggtgcgcatgatccgcacccgtctcccggcaatagtccgggcaaaatccggccccagcatacatagcaaatgg

SEQ ID NO: 172486 - DNA, 403 bp, Glycine max
  unsure (1)..(403): unsure at all n locations
tgtgcaaatcatatcactcctacatttcatctctagcatgcattatctttctttacttacccactcctcacgttttgttntttatggaaaaacaccataactaaacgcgccacaaggcatccctatcgcaccatatccaaatctagaacgatgggtgatcaagatgagagacaggaacagatgaaagccgacatgtcggctctgaaagaacaaatggcctccatgatggatgccatgttatgaatgatgcatcccatggagaaaaacgcggccaccgctgccgctgtcagttctgctgacgaagcatacccaactctcttggcaactgcgcaccatcctccctcaaacatagtatgacggtgaatggacacactgttgcatgatggcaaccctcatctgggat

SEQ ID NO: 172487 - DNA, 372 bp, Glycine max
  unsure (1)..(372): unsure at all n locations
aagaaaaataaattaatgaagaattggtcaacttgtgatgctcacaaaggaagatgatgatatggcgaatgatgatccgaagagaaataaaaaaaatggaagagatattgaggaacagaggaggaagacacaccacgttaattgtttggaacaagagagagaaactttgaggatttataaaatgtggagagtcattttgaaattttttgaggacataattgtccaagcatcatttaggaaacatattcttgaatagtacatatntcacaggctgaaaatntgagctttcgaaaagatctaccataaacttttacttttataaaagctaaaaatttattaataatcacatactcttaataaataaaagacttt

SEQ ID NO: 172488 - DNA, 338 bp, Glycine max
atctaactgacccaaactgatcctgatgctgaatcattttcttcatgaacctaaaaagtgtcttgattcaatcttgatcatcttgaacatcttgaacctaatctttgattatcatgatttgacctttgagccttttgtcatcacctttgttatcatcaaaacatctttgaatcaatcttgattcatcatgtagctttgcttctacaatttgtcggtattgatcgccaaggaagattatcatatgcaaaggcaccaatctggataacaacatgatgaaggaaatatgcgaggagctcaagatccagcaccacaattccacaccttacatgcccaagatg

SEQ ID NO: 172489 - DNA, 453 bp, Glycine max
  unsure (1)..(453): unsure at all n locations
atccctgagtcacctgcggcatgcaagcttctcanagaagtcacgaggaagcttctggaggattcctcttaatgaagcttctagagaaagctacatgaagcttcctcggtaaaaacgatgcccagcgttcgttaaccgttggatcttctcaaaatttggtctgcaacttcgcaagacacttttccatgatctgaccgttgggatctttgagaagatgtctggagtgtgctataagcctcttaatgaagcttctggaggaagcctcttaatgaagcttctagagaaagctacatgaagctgcctcggtaaaaacgctgcccagccttcgttaaccattggatcttctccaaatttggtctgcaacttcacaagacaattttccatgatcttaacattgggatctttgagaagatatctggagtgtgctagaagcttccgttcccgagagcatct

SEQ ID NO: 172490 - DNA, 346 bp, Glycine max
tgcatgagtttgtggtctatgttcttctatagatcaccatacggatctcttgtcttctttgcaagcaatctggagtcaatgagcaacctgaagcttatgctgcaaacatttataatatacctcctcagttgcataaccaacaacaacagaataattatgatctttcaagcaataaatacaatccatgttggaagaatcatccaaatctgagatgggcaagccctccataacaacaacagcctgtccctcctttccaaaatgttgttggtccaagcatgccatatgttccacctccaatgcagcatcaacaaatacaacaagcaactgaggccccttctacaccttt

SEQ ID NO: 172491 - DNA, 313 bp, Glycine max
acactagcttattgcctacacccatgactagcaaaatttcttacacccgtagtgacagtggatctcaaagaaagaaccagcttatatcaatgccttgcaataaacgggccttcacctttaatcttgaagctacctgcaccataacacaatctattagccatacataaaagataagctctgtatcacggtatgctagagaaatctgtgattatggttctaagtgctcaccaatgagaacattgcagaaaggccaactccaacaccaatccacaagagaggtgaccttcttaaatatagtaattacgaccaataa

SEQ ID NO: 172492 - DNA, 343 bp, Glycine max
atataacacaccactatacagatgcatgtaatatatatatatacacacacactagcaaacgtagtatatgtaaatatatatagtataaaataataaacatattccatgataaatcatgtatgcagaaggaaatcaaaagctcatgaaataaaagtatcgatatatgtgcatgtacacaatgcagcatcggaaattttagaaagaaggataaaaaatcaacaagattgaaaggccaatatatcaagtgcaaaagaaagtgctgccacataatatttatgcgttcactctattaagtgtacgaatttgagatatcatgacacaaaagatatattgtaatttaaaa

SEQ ID NO: 172493 - DNA, 347 bp, Glycine max
tatagctgacttattatccgcagatagcgtgactccatctctctcctagatgttcaatcctgtaataatgtgtccaaccagattgcatgactagcactcattacagctacaacatactcatcttcacatgttgataatgccactatggattgcttcttagaacaccacgatattggtgctaccccatacatgaatatgtaacctgtaaagctctctctgtcatctctgtctccccaatccgcattagtatatcccactaattcctctgagctgctattgtccttatttggaaatagaattctaatattgatgggccctttatgaaccttgaatcctctatcaactag

SEQ ID NO: 172494 - DNA, 328 bp, Glycine max
gatccctttggctggccatgtgtgtatctgtctttggccactaccttcgcatacgaggttgaaaacctggttgcttgatgctgacctaaatgaggtccttctttttgctgcttcccctcttgcctgtttggtactggtagcgtcgctgtcttcattgccttgcccctctcatatttatgtttgttaacgtacaactccaagccttcgaatgacattctgtgccaatggcctatcttactcatgcgcatccttcacttccttgaaacttacgaaaccatatctcctgtcattcctggtttgttgctttgaaatgaaatcacctaaatca

SEQ ID NO: 172495 - DNA, 370 bp, Glycine max
atatgatgagagctgttcctgacaaatcatcttgtgaactcacaagtggacccttctgatgctgagttttaaatcatatttatattgataactcatcaatttcttcatttaagacagaaggttctcttataacacaaaccaattacttgagctgatttaaacttgttattaatcaagagattctttggtttgccactgtgtgcatctatcttaagtattgcgtgtccctttcttcatatcacaggaaaaatataagttagctccattcattcaatatcatatacttatccgtatagtgattgccaatcatagtgacattgatacatttaaccatcattggaaattattatagatcctcaaaaattattat

SEQ ID NO: 172496 - DNA, 322 bp, Glycine max
agcttagcggaaaatctgtgacctagctatggtatatgtctccacagaggccattgcctccctcgcccagtattatgatcagccgttgaggtgctatacctttggggacttccagctgtcacccatggtggacgaatttgaagagatcctaggatgtcctctagggggaaggaaaccatacctcttctcagggttctacccctcattagccagaatttctcaaatagtccaaatctcagcacaataattataccgccaaaagcaagtcgaaaatggggtggttgaaataccgagaaaatgtttggaggcataagcaataatc

SEQ ID NO: 172497 - DNA, 287 bp, Glycine max
tgccacccagctcgcacaggcgagcatggttgcttccttcatatacaacagccttctggaggaatattctggatggcccaagtgggcctggattctatttgcacccacatttttactatatacacccactgcctttttttggtgattcttttttcgtatagatacggatacttacgaatttcgtaacgatacttgttgtctttccgtattgttacggaaccttgtggattacataatcatcccctttgtgacttactgaatgttacggaacctcactaattgtgcaa

SEQ ID NO: 172498 - DNA, 445 bp, Glycine max
  unsure (1)..(445): unsure at all n locations
agctngactatcaattatgtgtcgngttatggcaatcagttgagccggatatcttggagattctccgatcttttaaatcatgccgttctttttggaagaaagcccaggaaatctttgccaatgatatccaaagcttgtttgatgcaactatgaaagttacagccctcaagcaaaccggtcatgacatgatcgctcatgtgggtaaggctcgggctgccgtggaagaactaaaaaagttccttgtagctgattcattggaggaagtgaataggaaacttgacaagttctacatggttcttattttgaggagcttacattcagacttcgatcatgtgcgtgatcaagtgcttgctggggaccaaattccatcaatggattctctcatcaccagacttctccgtgtgcctcatttactgaaggatgagaatcctactgatggagtggg

SEQ ID NO: 172499 - DNA, 308 bp, Glycine max
tatgagaccaaaacatgacaagaaaatgttttcaaaaatataattctcacgttaatctagtaaattgtatccaaaatacaaacaaattatgcagaaatgtttcttacaagatgagaagtaaaacccctcatacaatttcacataatcatatcaaaatcaatggaatcaaaattaaaggttcaaaaacatgaaaaaccaagatcactcaattttatcaactaaatcacattatggaatcaattggtccatcaaacataacaatctcatgattatagtcataaagacaaaattagaatatagtaaacatc

SEQ ID NO: 172500 - DNA, 466 bp, Glycine max
agcttatatatctatttaaatccaagtctctaaattaaataaaatcaaatctagataggataagataagatctagatgaaataatatctagatgagatcaaatctaaataatatctagataagataaagtctagataagataaaattttgtagaataaaatagtttgtcctcttcaagtccaagcccaattctggattcaagcccaatgcttcattaattcctgaaattagattaaaaacatcaaattagttgaatggacccaaataataaaactgtctaattaatttgacaattaagactaatcagtaattaaaatggtgcaaaaagggttaagaaataggagaaaataatggcacatcaatctccctatatatttacctagtgagagtgacctgatttaccagtgtgtggtcagttttgtcatgtactccttggctctcgacgaggtttttcacaaacatgata

SEQ ID NO: 172501 - DNA, 417 bp, Glycine max
  unsure (1)..(417): unsure at all n locations
acttgcctgccccttgaatatgtgagggactcatagtctctatgaatgacaaattccttaggataaaggtagtgttgccatgttttcaaagcccgtactaatgcatacaactccttatcataagttgaatagttaagggtaggaccacttaacttttcactaaaataagcaattggatggccttcttgcatcaacacatccccaatcccaacatttgaagcatcacactcaatttcaaaagatttttgaaagtttggcaacacaagtatggnggcattagttagcttttgcttaagaacattgaaagcttcttcttgtttctctccccatttgaaaccatacattttcttgagcactcattgaaagtgctgccatgtgcaaaatcttcacaatcgctataaaacttgtatccatgaa

SEQ ID NO: 172502 - DNA, 228 bp, Glycine max
agagaaacgataatcatctactgctacttttcgcatgaatctctgacagatggactgaccgcatgatatcgatgacgatgaacgccatgtttgattgtgataaccacttatccaaagagctgaccacgtgcctgaatgatttatcccttgcacttagttggagctgaatgaattattgattgatagaaccctgagcctatatagcgtgatctccagctaccttgactt

SEQ ID NO: 172503 - DNA, 236 bp, Glycine max
  unsure (1)..(236): unsure at all n locations
ttcaagataataaggatggcccacattatttccgtgacacaatcgcaaagatgatgatctgtgcattatttgcgatactggacatgcatgcacctatgtggacgctanactgtcaaatttatggtcatgtgaagacttggctcaagattcatttactctattgttattcaacccaatgtttccaaaatatgctatgttatcacatggttcactcttccgtaatcatttcgcgcgtg

SEQ ID NO: 172504 - DNA, 434 bp, Glycine max
ataaaataaattgtattctcaacattttttcatgatcttccgtgatgattccattaggcgataatctaatatggctaacaaacttacatgtgtaatttgattacaaatgaattaaacaatctgtggcggttaaaatccctcacaatgaattaaataatattttgcatctaaaaccctccaaaaattgtaattgttcatcacttcctgtgcaattttctcacacttgctgatgggattaggagggaagataaaacaacagtggattctggtgtcttctaagtgtgcttgaaaagataaagtgataaaattattaagttcgttagccacgttaggaaaccatctaacaaatataccattgaggactatataaaatatgtttattattatcgaaccaattaattataaaattgagaatcattataaaatgatatttc

SEQ ID NO: 172505 - DNA, 396 bp, Glycine max
caacttgaagagctatattagaagaaatttcaatcgttgaaatgtatagtaagtcggtcatctagtgacagcataacaaagtcacaaatactagtactaagttgaagaacatattgcagtatcgagtgtttgctggttacatattttcaggttatatacctggaggagttccacaacacatattgcggtcatcaatatgctcaacttcaagaccaatgaaccatgcaccaagtgagacatcttcattagcatatttatgcaaaatcggcctgcaatcataattagactccacatgaaatttctatatgtaagagaatattctatgagaaacatggactgatccccgaactgagattcctattggaaaatttaagttataaaaaaaagttctattta

SEQ ID NO: 172506 - DNA, 353 bp, Glycine max
tcgtcctttatctaactgtcctggatgagctcagaatggtgatagttggtctaatcatggcctgtaaatctgcaccttgctataaagaaaactgtgttttgaggcatgctgattttgtttctgctgaatgctaaagtttgagaattctttctatgtgtgtcacaggttgggggcagccacttcctggttagtttggtcgacaatgattacatcaatggtgatctttttgccgctttgcagatttctgacatgagcttattatgtattagtactctagctatgtcacttctgttggttgtcatgttctttcccttcttttgttgtcttctcaatatgatgattcatattacaca

SEQ ID NO: 172507 - DNA, 430 bp, Glycine max
  unsure (1)..(430): unsure at all n locations
agctgctaaaggtatatcaaaactacattctgatgttgttgagaaaggacctattntgatgtaggtttcttctaatgaagataacatgatatgacattgtagatagctcaacttcatcaatccaaacctttcatcacaacacaaatcattatgaagtagcatacttcaacatatgtaacatgtgaaggttgttgttgttgttgtgttagtgttctatccttggtttaaacttcacaaagtttcttcagtcttcattctaatgttgcacattagatcttctcaaggacaatctcagctttctacttgtgcatcttctaatgtagttaacattcactttctgatgtgccctcagtgtatgtcgcaacatatggaaagttcaatgctatcaacctcagtcttttgatgtgtcctctatatgtgtggcaacata

SEQ ID NO: 172508 - DNA, 360 bp, Glycine max
ttaaataaatcaaacaagcctgattcatctggttcaactcatttatattcttactaatatctttattttttgttatgcaaattttcactttaatttaattcttgtaaattaatttttaatttttttcactctttgtaatacttctatagctcttttaatacattatttcaatttaagaaaataattaataaatataatagtgacatgacacttttgatgtctgaatttttttaagacttagatacttgatgatattaattgtgtcttggaacatattaaaatcacgttgaacgcgaaaatatatgcattccaatgtaaaaataacaaaatatcagttacttttgcgttgcgttctctata

SEQ ID NO: 172509 - DNA, 455 bp, Glycine max
  unsure (1)..(455): unsure at all n locations
ngcttaaaggaagtgaattatttagcatgggcagaaatgtctctgcattgatgggtaaatctgttccccaaatccctgaaaaatgtaaagatccaggtacattcagcataccttgtattatagggaacaataagtttgacaatgccatgctagatttagcagcttctgttagtgttatgcctttgtctatttttaattctctatctcttggtcctttgcagtcaactaatgtggtaattcatttagctaatagaagtgttgcctatcctgctggtttcatagaggatgtcttagttagagttggtgaactaattctccctgttgatntttatantttgaatatcgaggagggattttctcaaggatcagttcccatcattctaggtagaccttttatgcaaactgctagaactaagataaatgtatatgcagacacccatctgaagatctttctg

SEQ ID NO: 172510 - DNA, 339 bp, Glycine max
ctaagctatctcatgtagacaccctaatataagcatttgctatcaatcacagtttacttggtgccaacttaaagtggaattaaacaacgaatatacttaaagtgcataataaagttaaataatgctcaaaatatgcaatcctagcttaaatcttaccctttccttgatgtcacccaaagtcggcaagtacaacttatagaattcctctctgaatgcaaccacaaacctaaataaagtttagaaaccaacaagaataagacaattagaatctgtgtgatttgtataaatttaagggacaacaagatacatgtactatattatagtattttcacttttaaa

SEQ ID NO: 172511 - DNA, 257 bp, Glycine max
cacatgattttctaattaccaaaaggttaatttaatttcaatcatataatgatggtagctaaataaagactcgatctataatgggaaactattataggacaatggtgagggtgaaactccacgtaatgaattaatgatcgacgatgtccaaatgtagcatgctagtggggactaaatgagtaacaattgcacatataaggatttatctataaatatgttaattataagtatcaaattaaaaatgcataaaatgttaa

SEQ ID NO: 172512 - DNA, 484 bp, Glycine max
  unsure (1)..(484): unsure at all n locations
gggatccttgagtcacctgcgggctgcagctataataagtgtattaanatataattatgtcttaattagaagatctactggaaaatatattntaaataaattattataaatatcatattaaaccttaaaaatatatttatatcatacaaacaagttaaatttgatttttataaagtccaacataaatatttttacacctatcttgatattaaatgatcacaaaataggccattaaacaagggtgtagtcaaaattatatgtcagttaggttggacctataaaaaaaatctttgtcaagtaaatatgtcaaactcatcgagccatgtaattttaatcaagatcatattcaagtctaacaaagtctaacttaatctgtgctatcttcactcaaccctccaaataggattggcgatggcagtgataaagatttacctctattttcatagtttggttgaaaagttataaaaaacatgatagatacaca

SEQ ID NO: 172513 - DNA, 411 bp, Glycine max
  unsure (1)..(411): unsure at all n locations
ctaagcttcactttcaaatccgnaggaatgatgagttgatcattgagctcgcacaaaaatggtgttctaagaccaacacgtttgtgtttccttggggagaagcaacgataacattgaatcaacgactcttcccaatcgccatattcaattgcaatcgccttttgtttggccatccatgcttctctgtatgaaaccttatatgaaaattcactatgtatcctttcttgaatcaaagaaatttttattgatggatcttctctgatcatgcctgtaattcaaataagtaaataaaattacaaattaaaataacaaataacacacaagtaggatactatgaacataaataacgtacctactacgcaagtcgcaattaaatgtgaatcaagcctctcatggtcttgtgtcataatc

SEQ ID NO: 172514 - DNA, 387 bp, Glycine max
  unsure (1)..(387): unsure at all n locations
acgagtcaaactcaagtaattcacgagtagttggactcaattacactcctaatnttccttatatgattgttcgagtcacattttcttaagagtgtatttggatgaactaatttaaaattctaaattctgagaatttcaaatacttncaattaaattttttatttttaaaattatgtggggattccaatttaaaacaccatcaattatgaatattgacaagcaatgataccttcacttttctccttgcctgatgagaccacacacaaaactcttctcctccttccttcacttttcttttttctcttttccncctctccccttcacatttctcctttctcgtcttctccttcccatccccttatggtacttctgttctcctccacaaca

SEQ ID NO: 172515 - DNA, 412 bp, Glycine max
  unsure (1)..(412): unsure at all n locations
agtccttagtgatccacattgtgcatgtatgatatcattgactgagatgatgtgcacaagtgggaattttactattcagttgttataactcaaacactcttaccttgacacttgtgggattaagagaaacactaaccttgtgaggactgaagtctggtgattattccttgtgatatgtcattcttgctaaccatttcatttgaagtgcatcttattttgctcctttcatgaacttatgacaactgtgaacttgagaattgccaataaagctttttagaatgtatgcagttatctcatgaatcttgattggtaaactctaaacctttttcttttgcgtgangacaagcaaaaaataaatttganggagtttgatggctgcttaatatgaatatatctttggggtaaactatat

SEQ ID NO: 172516 - DNA, 417 bp, Glycine max
  unsure (1)..(417): unsure at all n locations
agctggccgctggagctgacccatcatcttgccctagctctttagactggggattcctaggctcttgaccttgacttgatagaacctcttnttaagcgaagtcatttgacttgatcccatgttttactaaagtgaacaaaattggtgcgaatcaaaactctgacatctatcatgggtggaatggatgaatgcatgaagtgttagtgcttagctctacggagttttaaaagattggctaagattttgttaaaacataagcacttagacaatgaaggaaagctggagttgctgcacatgatgtccaacgttatgtcaaggaataagatcgggctgcacaatgcacaaggcaagataaaatgtcaaatgataaatngaagttgcaggatccacgatgtcggacacgatgtcctgacatct

SEQ ID NO: 172517 - DNA, 304 bp, Glycine max
  unsure (1)..(304): unsure at all n locations
tactcagcttcttatgcttgaggcacatgtcgttttatatcttttttgatatnngncaatgtttatgctccttgtgatctatttgggaagaaagacttatgggatgagttgaggcagctgaatgcttctaatcctattggaatgtggtgtttccttatggacttcaatagcattataagttctcacgaaagaatcagcttatctcaaagaatggcaaatccttatgacattgcagcctttaatcagtggattgatgatatggagcttcacgaaattaaatgttatgggaattgctttacttgga

SEQ ID NO: 172518 - DNA, 386 bp, Glycine max
agactctctgatatatagtcttacgattggctagagattacgtccccatttagcactccaatcttatcaaagatcgaaccttttttgtgaatctaatgtgtcaatatagaatgaccacaatacctctctgcttaagatatcatcacccctgtaaccaatatttcttcatcccacgtgttatctgataaagagatgaataggtcgaatgaattacgaagtaacaagaatgtaggaggagaatgtcttttatgtgatactataatcaatctatatacaagtagatatgtgtggtggcaagggtctaaattattgtttaaaattataaacatatgtgagtttatttgcccatacatctccactatacaacaaaattattaaacaagtta

SEQ ID NO: 172519 - DNA, 265 bp, Glycine max
aaaacgcatgaacatacttgactgaatggagaagtgaatattgataacctataatatcactgcatgacaacaagtataatttgtcaaatttggtaagtcatggattcgtactttatcttttcacaaacattttgataccgatgataatagatatagctccatatatctgcctctggcaaattactttgataatataggaacctatttgaggttgctatcttgcgtggcctgaacgggaatatcataaaagtaaactacaaaatat

SEQ ID NO: 172520 - DNA, 385 bp, Glycine max
  unsure (1)..(385): unsure at all n locations
gtgcaagtaaaaagataaaagagtggtcctttntagtttggaagaaaagaagaagaatctctatggctgtgggtgcagccttggcatctatcggcggccgaaagtatctttgtttcacccacctttcacttttttatttattataattattctcattctaattatcattctctcttttttatttttttaacgtataaatatgtctaaatactactgctaccaccttagctcagttcttatttataaatcctaattatntactntattaatattaacaaaagtaattaatttaatctaatagtaataaagttatatattgtaaaaatacaatcatcacgttattattatattttttatcttttaaatacatggtaatataatctct

SEQ ID NO: 172521 - DNA, 376 bp, Glycine max
gagctttaatcattgactaaaatggcaggccatttatatattatagacaacaagctggcgatgtttaattaagtaatcataattaaaaaattgacgtgcgtctagttgattctgcatatacaaaaaaatgaaatgaaataaagtaccgaatctgaatatatagtctgttaggtttaaaaatattaatattcgcaaactatcatgtcatatttattgactacgttactaccaaaattatttatgcaaaaattgcatatagtttatctcaaattagaagagatacatttataaattattgttggagtaaccagtattttattattctcgtaaaaaaatatttatattatttgttatagagtaatacatatttattaat

SEQ ID NO: 172522 - DNA, 354 bp, Glycine max
tccaacgcgaactttgaccatagttcttccttcccgcaatgcttcttttcatgtctgcctgagcgggcttatagcctaaaccatacttcccacgatttccttgagtatttatcaagctagttatgccaccgttgttttttcctaaacccatcccgggttcaaaaccgttccccaacataactcgggccatcattaccgctgcatcggacagacaaggttgcccaaagagggagtccacggaggaaatgctgaccacctcaaaagactggaaagcagtttctaacgattcttctgcggcttccacataaggcatggaggatgggcagcttaccaagatatcttcctcgcctgaca

SEQ ID NO: 172523 - DNA, 347 bp, Glycine max
cagactggcgactcctatgctcttgatcttgacttgatagaacctctttttaagcgaaggcgcttgactcaatcccatgttcttactaaagtggaataaaaaccagtgcgaattaagactccgacatctatcataggtgaaatggatgaatgcatgaagaaatgcgtatggcatagatgcatttaacggatacgagatcctgggagattatctctttcttaaatacaacatttgagcagcatatcactcgatgcatgcatttaaaaaggcgacacagacctttcatcttctcgtgacatagtgaggggatcaagacgcaacccgtgcatgatgacatgatgcagatg

SEQ ID NO: 172524 - DNA, 316 bp, Glycine max
tgcctataggttggacctccaatatatatggattcagcaccacttgtaatatttttgatttaattccttttgcatgtggatctgatatttaggatgaggaaccaacatatttgatgtcaaatcctcttaagggggatgggatgatgcaatcctccctatgaaatgaccttttaccatatccctgatcaaatgctccaaaagattggctaatctgataaaaagccttaggttctcatgaacttaggtaattttgacccattgccaagttgggccactctttttgaaatttataataagttttttttctcttttggcc

SEQ ID NO: 172525 - DNA, 186 bp, Glycine max
agtcttgtgatatacacacacaatcacatgctgagtgacactttctctcacacgcactcacacacacacacgctagtgtccacagcctactatacatacttgtcgtaatattatatgctacaaatgaattaccctgtggttggcgcagacccttattatacacacacacgcacacacggttgccca

SEQ ID NO: 172526 - DNA, 381 bp, Glycine max
  unsure (1)..(381): unsure at all n locations
taagacnncagaacgggatgttggaccatattggataaaggactaatcccatatggtaancttatatttattacatcaatggaatatagtggataatattactatgcacaaaatctaaaatttactatgaatagagaaacttatccattttccctaaagaaaattattcagctaaatatttttctcaattaacttcatctccatttttattgcacaaatcaaaatcaacaatgtaaaagatcaaactatgccacactataacaccacacctgaggtagagggagtgtcgcattaaattcaatgaagatatcagatcttatatatctgcttgcaatcttttttgggtccatcacaagtgcacccctgccacacacccgtgag

SEQ ID NO: 172527 - DNA, 477 bp, Glycine max
  unsure (1)..(477): unsure at all n locations
agctnttgttcgcaactgttctacttgttancaaaaccaatacctgccacaccagaagccaggttacttcaccaaagcttttgttttctgacccaaagtacacaaagccctgtgtgttctcctaactcatcgaaatccccaaaaccatccattgtgcctaacacctctgaaaccattctgcccacatctccaccattacaccccctttcccactatcaaataaatcttatggttaggaaaacaactcacatatataaccactagcccctgccccactatcaaaacattgaatgaaaaaggaattgaatctacaacaccacaggatagtagaccaactacaaataattttctaatagattcataagaacagaaaatgagaaacgaacaaagcaaaagaacaaattggtcaaactacttccgatcaacaaggtaacagagacccgtacctcaaccaaataacaaagtcaacgacacaat

SEQ ID NO: 172528 - DNA, 267 bp, Glycine max
attgggacaatttcccaatatacgcggaaaaagatgctagaggaatggtgatcgactctttacaccaagatgcaaccatgtggatggatcggtatgctcttaccttgaacggtagtcaataactatcccgaatgttattccatgccaaggcgatggcagacacctactccgcccccgatgagattcatgggcttctcggctattgtcagcatatgataaacataatggcccacataatataaatcgtaggaaacttggttgtctctc

SEQ ID NO: 172529 - DNA, 449 bp, Glycine max
  unsure (1)..(449): unsure at all n locations
ggatccttaagtcacctgcggcatgcaactgctttacattttcttatgatcgnngggatccacttncctctaaaaaatatttctctaaaagaaatttgcttagacgttcataccatgccctaggggcttgtttcaaaccatataaagcctttttcaatctataaacatgatttggcttatctgaaatttcaaaacctgngggttcttcaacatatacttcttcttgaattaagccatttagaaaagcacttttaacatccatttgataaagcttaaaattcattatggatgcataagctaaaagcattctaatggcttctaatcttgcaactggagcatatgtttcttcgtaatctattccctcttcttgattatattctgttgcaaataacctagccttattcctaatgattatgccatgttcatctaacttattcctaaatgcccat

SEQ ID NO: 172530 - DNA, 387 bp, Glycine max
  unsure (1)..(387): unsure at all n locations
ctctgtacacctacattcctatacacgaattgcttttttctgtatacacgcatttaaaaaaaaaactctttctctgtatatcaacatggtctatacaaaacctctattccttttcaaagatttcttttccctttttcaacatacactcgttttttatacaaaaattttctttatatacactcattgctcacacacaataatttcttttcacacattatttatacacacaaaatcttttcatacaacttttatatacaaaaactctcttactttctttatatacagatatgacttttgttcacaacgcctctttcngtttctattcttggtgttcatgatgtttgttcgtttattttatgacgacgtttctaaatgaaaactctacac

SEQ ID NO: 172531 - DNA, 300 bp, Glycine max
tagccttgcaacaagtcctatggaagtagacacggagatggacaagaatatccgcggtattgtgagtagcattctgaaagatgctcctgtgcctaatgctgagaaagatgttccaacttcttccaccccagaagtttctgtgcctgatgtcaataaagatgttccaacatcctccgctccaaatgctgaagccctcccttcacccagtgaagaggaatcaacagaagatgaggatcaagcctcagaagagactcctgcaccacgggcaccagaacctgctccaggtgacctcattgactt

SEQ ID NO: 172532 - DNA, 342 bp, Glycine max
  unsure (1)..(342): unsure at all n locations
agcttgacactcaaaggacatctcatttatatctntatgaaaaactatcatgtacatctgtccattacacaaaaataacaccatctaaacaaacttaactgagtagagactagttctctccttcttccataccaatatgtcctcctcactcagaatcaaattaatacttctaaagtcatgaccttttatctaagtaaattattatatttatttctcctaatgatatagagatttctccatttccatctccacaatcaatttccctccctccggtcacctaaacctgacaccctggctnttatggctactacaagggctgataatctagtatacttcctaaat

SEQ ID NO: 172533 - DNA, 388 bp, Glycine max
  unsure (1)..(388): unsure at all n locations
tattgcttgtaaaccaacactatataagataccctgatttttgaatntatctcacaagaataccatcaatgacaatgaagtattgtgtgtgggatgtgttttgactgtaaatatacttggcacttgttctttgaatgcaatttttttctctaaagtttggtgcgggtactttagctggtggggtattcattttgcacaatataatgactctccttcgaacttctcacaattcgtgggtttgccaagttgcaatgattataatgagttaccgtgataacaatttggtttgtagtgttttgggcaaaatggaggactcgtagttttcttgtttttaaaactataagaatgagttttgatcaaatttgttaacaagtcagatacacccttg

SEQ ID NO: 172534 - DNA, 313 bp, Glycine max
  unsure (1)..(313): unsure at all n locations
tttgatctccttngggggctctaaattgtgggaatgtgttcaaatatgtggggcaattttggtttgttttcttgctcgattgggttgaattgggggtttgtatgagatggccctaggcctataatgcattttgaagccatgggacatgccacattgtccccgttctcttgcttttgatgcctaaacgcgcgcccaccaagtgttcggtgaaatgcctcaatggcattagcgcgtgagtttcgtagggaaacaacccatggggcatttttgtttgcacatattttctattttttgggacatgcattcagttccg

SEQ ID NO: 172535 - DNA, 299 bp, Glycine max
  unsure (1)..(299): unsure at all n locations
ctaagctttctatatttggtgaaggatgtatatgtttttgcattcataanacatgaaacaaaagaaaaagaaagaaagacctcgaaggtcggcatgctatggtcatatgaagcataaatcattcatagagagcaaacatatcttttggaaacaagggactaacgctaagagtttattttccagaataaccgaaaaaagaatggatggattcattgaaccgatgaaagaacataatctggaaatattgggtctacttgtgtaaatcccaagccttattatcacaatgccttaatttggat

SEQ ID NO: 172536 - DNA, 417 bp, Glycine max
  unsure (1)..(417): unsure at all n locations
tgttcagtcctcctggtaattcgagaatcactcgaaattagtgaaanaaattgtttccgtgaagaaaatccaagctgaggcacttcggtaacgtttccgtaacgttttcgtgggtgatttcgcgaagatattcaaccgttcttcaacattcttcattcattcttcatcgttcttcggtcttcaaccggtaagtacccgaaatcgaacttttcaattcattctatgtacccttagtggtcctcatttgttttcacgtgcctttttcttcatttcatttactttctggacccccttttgacgtgctttagtcattttcttaagtccttctctcgcctaatcaaaanataatatatatttccaccaatcatttgaattataatatccgttgagttctgtgaaatgaaatccgatcgttcg

SEQ ID NO: 172537 - DNA, 341 bp, Glycine max
  unsure (1)..(341): unsure at all n locations
tatgatgacaanagcccaagaatgattccagattaattcaagatcaagattcaagactcaaagattcaagaatcaagagaagacttaatccagataagtttaataagtttctcatacattaagtagcacatagaagttgtcacaaaatcattaccaaagagtgttactctctggtaatcgattaccagaatgcagtaatcgattaccagtatgtttaaaatgttaagattgtcataattcaaattgaagagtcacatatgttgatgtgttatcgattacaccttaatggtgattgattccagtgactgtttcgaaaattcatttcaaaagtacaattcttc

SEQ ID NO: 172538 - DNA, 487 bp, Glycine max
  unsure (1)..(487): unsure at all n locations
atcctctaagcacctgcggcatgcaagctgctgggagctttatggggctggatcttagctcaatgagggccctaatggtggaatccaccatggagatgcagcggatgacaaaggagaagaggtgagaggaggcgccatccattagggaataagccatggaagaaggagcttcaccaccaagatgagccttggataagaagcttggagaggatgcttcaatggaggaaaagaaagagggagataaagagagaggggggagcacgaaattgaaggaagaaaaagggagtgaagttgaactttgagttgtgtctcacaagactcccattcatcaaagttacaacaagtgttacacatgtntctatttatagactaggtagcttccttgagaagctctcttgagaatcttcctngagaagcttctttgagaaaacttccttgagaagctagagctnagctacacacacccctctaataactatactcacct

SEQ ID NO: 172539 - DNA, 276 bp, Glycine max
  unsure (1)..(276): unsure at all n locations
gtcttgcatgaacatccttcaggaataagaaacattttntgtatatgatgaactgtgaatgttgagtcgtacctcatccaaatgtagacatacatgactttttatctggaaagtttataaattttttatacaaagtataagtatcatagtgtataatccctataaaaaaacagaaacttgatttaatataatcttaatcgaaaaatatttgataaatgcgggtggttcatgattcaaagaaacaatctgtttatccacaagggtatttattattgc

SEQ ID NO: 172540 - DNA, 471 bp, Glycine max
  unsure (1)..(471): unsure at all n locations
aagcttaaactacataatcttaacatgttgttcggcaatcttaatgctacttacgtatctttcgcattgtctagtctatttcaacacattccctcactagagatctcattctattattctgcaacaaccagatgaaatgatgagggaaagcaaaggcccgaatgggtcaaaatatagactaggatacctgtcttaagggtccacactagagacatctgatatgaatgtacctagggtctttgaaaagtgaattcaaaatagtaaagggaagcttgcacactaggcactcaaaaatgtgtatggttattaaaaaaactagtgtttcacatcctgnggacataagannatacagtggagttgggaaggtcatgaaagcacaagctggcttcattnttcctttctttatgcaagaaaagntatgtgtgtgacaaataataatttaaatgatctactaatatattgatataaaaa

SEQ ID NO: 172541 - DNA, 390 bp, Glycine max
ttgattgatattgcagtggtttggttgtttaaaatcttgggttgttgaataaattgaattcatcaatggcatgaattgtgtgaattgcaatgcgtacatcatatcctttgaatgaatattcagtattagaaaaaaagaacatggattaggtacatggttgaaatgttagtggtttgcagattgatgtgaagataatcactagcccaacccgagagtgtgtatctttattggagagaacactacattgagtccaatgttgcataatctctgattattgaatgaatgcatgagttgagatgatgaagccatgatgactgaatactcttaccaaaagctacctgggctgaagatgatcctttaacatgtgactgaaattattaattgactaac

SEQ ID NO: 172542 - DNA, 387 bp, Glycine max
  unsure (1)..(387): unsure at all n locations
gagctttagatatgttgaatttganatttataagnnngaancgaccaccacctctgtgtaattgattaccagtaatggacatttttgaaattcaaactgaaaagacatgactcctaaataattaactgtgtaatcgattaccaaagatctataatcgattactagtgagcaaatttcataaataactctgaaaagtcacatcctttcatgagagtttgaaaagccaccaaaggcctataaatatgtgacttgtgtttgcaaatcttcagagtttttcagaacttcattgtcttattctctcanaagcaaacctttggccaaacacttgcaaaacaattaaggattcttcaagttgattattcttctcttaaagagagaaaaaaatct

SEQ ID NO: 172543 - DNA, 307 bp, Glycine max
aaactcatctgctttcactgcagaaagacactttttgttatttcattggagcatgctatctaaagattcatctattggctatattgctgggtaataagctgaaactagcaacccgtgtgaccagaggaatgttgtgagtgagacatatcaacagttacttgttgagcaaccttgtgtggtggttcagaataacaataatgtttctttgcttttgatgaataaccagtcctcttataatttggaggatgaccatgttacttgaagcatcgatcctgagtatgacccatcataccacaatgagcacaca

SEQ ID NO: 172544 - DNA, 408 bp, Glycine max
aattaatctctataacgtgactagtttatcttcaacgggtatcatataagcttttaagatatctggactatctctatatctttaaagggtatcatataagcttttaaaatatcttggttatctctaaacatcttaataaaaggctaaagtattatatcttattataaaggctattttattgagacccgcatatatcttggtagactaagatcaatacatgtgagaatagttttccaagccttggagaatattatactaatattttattgagctgctataaggatactctattggtatgaaaatccatgtctcttataccttaacaaaatatatattatggcttataataacatcttttatggcttaactaaatattgactttgactaaacattccctataatatttct

SEQ ID NO: 172545 - DNA, 321 bp, Glycine max
  unsure (1)..(321): unsure at all n locations
tctatgctctaaccttgaggggaatgttaaattgttatgntaaaatgtttataataaaagggttttaatacgtataccggcttggcccaagtgcttgtatatgcttaacctaatattataaatatgaaggtagctacacattgtagagtattaataaccatttacctatatgcctctccttctcccttatctctttcagtctttctacatggtattagcgtctatcctatatgggtccctatgtttgtcatactctatgcatgtatgctataccgtgaggtgggatgttggaaagtcacctaaatgtggcacccctaatag

SEQ ID NO: 172546 - DNA, 462 bp, Glycine max
  unsure (1)..(462): unsure at all n locations
gcttaacatcagaccacttcagggttctggttcttcttcacatggactcgatggggcctatgcaagttgaaagccttggaggaaaaaggtatgcctatgttgntgnggatgatttctccagatttacctgggtcaactttatcagagagaaatcagacacctttgaagtattcaaggagttgagtctaagacttcaaagagaaaaagactgtgtcatcaagagaatcaggagtgaccatggcagagagtttgaaaacagcaagtttactgaattctgcacatctgaaggcatcactcatgagttctctgcagccattacaccacaacaaaatggcatatttgaaaggaaaaacaggactttgcaagaagctgctatggtcatgcttcatgccaaagaacttacctataatctctgggctgaagccatgaacacagcatgctacatccacatcagagtcacac

SEQ ID NO: 172547 - DNA, 380 bp, Glycine max
gcactattggcgaggccaaaacatagtttacatttctttgacaatgatgacaacaaccgaaaacatggatgatgacatcaaattgcgatgcaagcctacacactgtttggttgcaactgtcttggatggtgatgaatactcctactgcaactaataaacaaatacatttgtccacaaacaaacacaaacgttaaccgtaatgttatttaacgtcttatagcttacccattgaatctacaaaattcataacagaagttatgaagatgagttcactggacttttgttctactcaaacatagtaagtaactaatgatgaaaacaaaggtgatacgaaatggtaacatacttcatcaaatgaaaaatgcttacatataacaact

SEQ ID NO: 172548 - DNA, 412 bp, Glycine max
  unsure (1)..(412): unsure at all n locations
tcatgggtnttcttggaattcaaagcacttaagggtattatgagagcactcactatatcccgttttacttatgaggcaaccaatctttcatagatttcccaaatttttatttacgataaaagaacaacaacacaaaggatctttttgtgggttctcattctatttccactttcattttcaattgtgttttccaacaattttcaactgtgtgctgcttgtttatacaagaaatccctgcataagatatttacaaacatttctctcccccatatttggaaaatatattccttaaaccgcaagtaacgctcttctattccctaagggaaagcgaacataaattcattttagttcaagtgttcaacaacataattcatacactgtttgtaagctcaaaggggattcatcattcatc

SEQ ID NO: 172549 - DNA, 339 bp, Glycine max
acataatggtacctggagatatgtctcggtggtcaagagaccttgtggacgtcatgtggggtgctattgtccaaaccaatcttgaccaatcccgacccaacccgggcatagtcggtcagtgagaacctgtgatgtacctaatcatgcgagctcctgtcagtcaacagataatatgaaaacaagaccacaaagcaaggatgctcgtggtggctggccaactgtgaattttgtgtaatatgtggattgtggcctctggtaatcgattaccaatggtgagtaatcgattacattgcttaaaattgaggacaggatgctaatatggtctctggtaatcgatta

SEQ ID NO: 172550 - DNA, 235 bp, Glycine max
gaggaggatgaaaggaagaaggcgaagggcaccaggcaaaaaagagacaccccgagagggggcaaaaaaagcccaacgaagcccaggggaacgaagggaacgaccgacaagagccgccaaagacgcaaaggggagaacccaaaaagaggtaacaccgcgctaaccaaaagggagggaaggaaaaaacgccgaacaaagggggctccgaaagagggcgcacacaaccaacaacacg

SEQ ID NO: 172551 - DNA, 355 bp, Glycine max
  unsure (1)..(355): unsure at all n locations
ngctngctctatattacattgatgtnttatttatgggagggagtngtatgccatttttgttttaagggtagcatttctttgtaaaaactaactntccaaatgttngccttcgcaggaatggccccgaggaagcttgcctcatagaggtccaggaaggacaaggcggccgaaggaactagttccgctccggagtacgacagtcaccgctttaggagtgctgtacaccagcagcgcttcgaggccatcaagggatggtcgtttctccgggagcgacgcgtccagctcagggacgacgagtatactgatttccaggaggaaatagggcgccggcggtggacatcactggttactccca

SEQ ID NO: 172552 - DNA, 342 bp, Glycine max
gggtcagccccttatgcacttctctctctctcgaaatagctggggaatattaattccgtgataaatatactatccgacgcgcttccgtatcgttttcgtgagtaatttcacgaagattctcgaccgatcttcaagaatcatcgttcgttcttcgttttcttcaatcttccacgggtaagtacctcataccaagacttttaattcattctatgtacccgtggtggccccatcttgttcatggattttatttcgtttcatttgcgtttatccccctgtgacgtgctaaccattttttaagctttttgcttatctaaaaaaaataatttcaccgacgttgaatgt

SEQ ID NO: 172553 - DNA, 390 bp, Glycine max
  unsure (1)..(390): unsure at all n locations
gctaactgtatagacctttaattttttactccctgaaccatttcgggagacatagccactcgtataccattngcaacatctgttattctagcttcaaatgaatnttctggggagattcctgtgagtcttgcaaactgtaaatttcttaatacccttaaactcgatcagaatcgactcactggtcaaattcctccacaatttggtgttctctcacgaatcaagacattttatgtatccgacaatcttttgatgaggccagttccaatctttagcgctggagtttcaaaaaattatgcaaataaccaaggcctatgtggaggaaaatcattcgcgccttgcaaggcgaagtcttccaagagtaacttggttgttattgctggagcctgctgt

SEQ ID NO: 172554 - DNA, 110 bp, Glycine max
aagaaagatgtttttaaaggctaaattactcatttgatctctatagtttcaagattcttacctttttaagctctataatgtgaaagtggtgtttttagtccctatagttt

SEQ ID NO: 172555 - DNA, 281 bp, Glycine max
acacgactatgcatgtgcactaacaggggaattaattaaaagggtgtatactataaatgaatttatttattaactgttaaaataattatcttaaactaatttaaataataagtcataattaaataataagataaaactattgtatactataaatatatattcattaaacttattaattattacaaaattcaataatattatcacacataataatctataatttgataataacgcgaaagagtattctaattaattcaactaacatttatttgtgacaatct

SEQ ID NO: 172556 - DNA, 365 bp, Glycine max
  unsure (1)..(365): unsure at all n locations
gtacttgggtaagcccaatccatttttgtccaaagaaagggggcacgaaaatcattcaggatgaaaagaatgacctaatcccaacaaggactttcactggctggagaatatgcatcgattaccacaagctcaaagaagccatgaggaaagaccactttcttttgcctttcatggaccaaatgtaggagaggcttgtgggacaagcttattacaacttcttgtatggatactctggatataatcaaattacggtggaccccaaggatcaggagaagacgaccttcacatgaccttntggtgctttgcttagaagtgcatgtgcaatttttgaaatatggtggagaaaagatcgangattcatggat

SEQ ID NO: 172557 - DNA, 328 bp, Glycine max
  unsure (1)..(328): unsure at all n locations
gaatatgtggaacagttatttgtaaatgttgttatgtgtattcaaatgcaaatcaagctcttgcttttatagactcttcaagtctggtcaagaaaaccattggaagagtataacctttagaaaaacctaatcaccattggaagagtacatcttttgattgttgttcanaacttatcattggtaatcgattaccaaatcctcgttatcgattacacaaagggtgttatgataggatgtgactcttcacaattgaattngaattccaacgttctgatgcactggtaatcaattaccaatatcttgttattgattgcaccattttgaaatc

SEQ ID NO: 172558 - DNA, 275 bp, Glycine max
  unsure (1)..(275): unsure at all n locations
cacaatacatttacatccaaaaatatgaagattggaaatatctggttttctctccttatacaattcatatggtggtctctttaaaatagcactaattatgcttctattcattatataacatgcagtattaacaacatcattccaaaagtatttaagaatatccgtatcactaagcatggttcctgctaattcttctaatgatctattattgccttcaactactcacatttgttgaggggttctatgtgcaaaanaaatactgtttatcctatttt

SEQ ID NO: 172559 - DNA, 282 bp, Glycine max
  unsure (1)..(282): unsure at all n locations
atctatctnnaaccgggatgacattcagagcacggtaatccatacaactatgccaacttgcatgtgtttttataactagaagcactggcgaggagaatgggctatgattgggttgtatgaggccaacatctatcatggaggcgacctgtctttcgagctctgtcttttggcagtataggtaacgataaggccttacattaacgagattggaattaggtagaaagtggatatggtgggtgatagaacggtatggtggtacatgggatggttactgaaagataa

SEQ ID NO: 172560 - DNA, 228 bp, Glycine max
tttatttaagtcatttctcgcttaacctaaaaataaaataaatttccaccgatcatttgaattgtattatccgttaacttcggttaaaatgaattccgaccgttcggtcgtgccgtaaccacgttggaaatcaaaaacgaggtgaaataataatataataatcacaaaacgtcttttagtcaaataaagcggaaaatcaatcagaccgttttctctttgggattctca

SEQ ID NO: 172561 - DNA, 325 bp, Glycine max
ctcttattatctctgagcgatagaatgagagccctgtactcattaacatcagccagtcacacaatatactgtctgatctatggacactcggtgactacatcatgagttctatcagctgggcattcctggcagttactatcttcaatgtcatcctgtctcttatgttgatcataatgctcactgcccaaaaactgcataattttttcaaaaggttacaagtcattgacatccgcaatactgcccaagataattttgcataatttttgtagcacattttcaagttagtccttaaagtacaaggattattaatctttcaaaatctaac

SEQ ID NO: 172562 - DNA, 222 bp, Glycine max
taattctccatattctacccctgttgttttgaatctaagcctcacttgaaattaaactatttgattatgtgagtccttgatttaatccctattatctctccccctctggcatctaaaaaaagcctattgcgtaatacatacatgactattggaaaatctgcacatatcatccatggtggatcaatcataaaataatctaaactaatcatgaagcatgacctg

SEQ ID NO: 172563 - DNA, 365 bp, Glycine max
  unsure (1)..(365): unsure at all n locations
atgtcattaaaacacactatgtagtctctaatgaagactaaacatgcnatngntatgtaatngtatncattatgcgaaaataattgttgtaacccgttactatccaattaatattatcaagtactcgtttggttaagcaaggaaattgttggtccaacaaaaatcatttacgcgtgcagcatacatcattgtcataattgacaacacataatgacatgcatgcgtattacagtttgagcgcgacaacacattggctgacttcagtacacattctgaaactagcagtcgctcgacaacacattggctgacttgactacacattagcgacaacacattggctgacttgactacacatttacgcgtgt

SEQ ID NO: 172564 - DNA, 183 bp, Glycine max
  unsure (1)..(183): unsure at all n locations
aaccaaaaagctgtatatattaatatcggcttttgtgcatggtatgacaaactgaacctttttctattataanacaatcttgtgaaacgccaagtatacaccactctcttttataaaaaaattggcaaaaattgtattataggtcaaatatattatgatgataatatcttgtgactactaatg

SEQ ID NO: 172565 - DNA, 332 bp, Glycine max
  unsure (1)..(332): unsure at all n locations
ctttccacttcttgaaccctaatcttgttatctttgaattctagacttcattgcatatcaatttgatgttacacactcatagctacttcctgggctggatctgggtgatatgtaattnttcttgaaatcttaaggtaaaaatgagatccttaggtgtcaaaacttaacgttagcctaaatttcaccccaatcagaattttctagaanaagttatgaacaaaactagtttaaaggaagtttttggataaatatgtacaaaaataaaaagggttttatggctgatatactattttcttcagtttgactcaaaatgagtgtaggttaaaatatag

SEQ ID NO: 172566 - DNA, 471 bp, Glycine max
  unsure (1)..(471): unsure at all n locations
acgtcgctggcaatggcgggagcttggatgccgccattgacagcagcggaacatgtatgccaacgngcgcagncccgccattgggtcctgcggcacaccttanaagagttgttggaggacgatgcgagaaggagaatgtggtggatcttgttattgtgctgtgaatggaagatgcacaagagagagttgtagaaggcggagtttgcaaggtgagtgacattttcggatgagagagattatgacgccaaactcggtcactcggttacatcttttgaattaaataacagtattaaaccagatctaaacacctgtctaagttttacaccacaacttaatttttgtttccaatcatattttacacactgttttgagaanaactcantacataataatgggattaattactaactatttagacatatcgatgaatgttaactcaaaaaaaattataattttttaacaagnataatt

SEQ ID NO: 172567 - DNA, 268 bp, Glycine max
ggtcgggcgatggtgcacaacaagttttccacatcctcgatgcgcgcattataccaccatccccttgtgcccacctccaactgagctcacgtactcccacgtatcccatatcctcgtttctctcaacaccgggtccccatcaatccttccaagctttcacaacatccaagcaaaacaacattcaaacagcacaagctatcacagccaagcaaaacagagcaaaggcagagaactctgctcaacacatcaaccataatcacagcttttc

SEQ ID NO: 172568 - DNA, 256 bp, Glycine max
ctataggtctatacatcatgttatttatctattacagatacatgctcttaatttcagtagtgcttaacagaagaaaaaaattgccatccttataatgaaaacacttccaaccaatactaactgcaaactgtgtgggagacctatgtttacctcctacttttccaaaaactacctataataagcatcaccttctatttatggacatcgttcctccatataattataaaaaaatacctttttaaaaaaaaatatagac

SEQ ID NO: 172569 - DNA, 241 bp, Glycine max
  unsure (1)..(241): unsure at all n locations
tttttattctcatttcatttaccttttataccccctgttgacgtgcttaagccattntacttaaatcatttctcgcttaacttaaaaataaaataaatttccactgaacgtttgaattgtatgatcccgaaaccttggttaaaataaattccgaccgttcggtcgtgctgtaaccacattggatatcanaaagagataaaataataatataataacaaanatataccttttagtaaaataa

SEQ ID NO: 172570 - DNA, 325 bp, Glycine max
cctaccaacttctctattataacactagtaatgtgcctactatcaatggtaccatctccctctccatcattgggggccctacttgagctgccaaatccctccaccgttgggcatattctttgaaagattcatgcttgtttttacacatgctctataactgcatcctatatggagccatatctgaattgactgatactgtctaacgaaggcaaccattatgtccttccaagaatggactcgggaaggttccaagttagtataccaggtgatggctgcctcagtaaggctttcttggaagaatgcattaacagtttcatctttcgcg

SEQ ID NO: 172571 - DNA, 74 bp, Glycine max
accttccgggatattccaccgaagccctctaatctcttctatattggacctttcttgaattcaaatggtaatta

SEQ ID NO: 172572 - DNA, 273 bp, Glycine max
atttatcgacacgcttcaaattgaatgttgaagctctgagcaaattcaaacgacaataaatttttactcggatgtctgatattgtcccgaatataacgagacgctcgaaattgaatgctgaagctctgagcaaattcaaacgacaataacattttactcggatgtctgattgagtcccgtaatatatcgacatgctcgaaattgaatgttcaagctctgagcaaattcaaacgacaataactgttactcggatgttgattgatcccgaacata

SEQ ID NO: 172573 - DNA, 355 bp, Glycine max
ttcttctggcttcaatacatcagtgggctttccttctgtgtacaccatcttgggatgtttccaacctttgatgacagacttccaggctctgctatacagtgatttgaggaaggccaccatccttgctttccagtaatcataattggttccatccagaattggtggtctgttcactggtactccttctttctccatgttcatcagaatttatctccctaagtctcactcagtgatttcgagtgcctgctctgataccaattgaaattctgataccaatgccagatgtcgtacaggatgtcacgacatcacgcttcagaacatgcatattatctctgagtgtgtgaacagatttaac

SEQ ID NO: 172574 - DNA, 254 bp, Glycine max
  unsure (1)..(254): unsure at all n locations
acacaaaagcaatgctacaatntagcaaacacaaagcaattcatgccaaacttcgattaacaacagttaacaatttacaagtacatctttttcttaccaaatttgttaggcaccaccaaacaaagtataatgaccaaaaaagaatcaagaagagagaataagggttacaatgatctggggtttgacagcaatagcgcaagagattagtcccatctttgaaaatgtaataacactatgtgtattcaaattgtata

SEQ ID NO: 172575 - DNA, 252 bp, Glycine max
ggactaatacatttgctgcccaagtttcatggtcttgcaggtgaagatcctcataagcatcttaaggagttccatattgtttgttccatcatgaagccccctgatgtccaagaagatgatatctttctaaaggcttttcctcattctctggagggagtggcaaaagattggctatactaccttgctcccaggtccattttcagctgggatgaccttaagagggtgttcttggagaaattcttccctgcatct

SEQ ID NO: 172576 - DNA, 311 bp, Glycine max
atggcaagggaatgtggacgactggtgaaagagaactaggaggatcaaaacctacacctgtatcacaatcagaatgaattacagaagaaatctctacacaaatactacagacaatagcagactcatcagaatcatcataagtacaatcaatagaaccaagatcaaagtaaaaaaaataagaaaaatcaaaaagtaaatgtgtaccaatatctacactatctactacatcatcaataatatctacaattaaaatagaatgctcatctgtcggatgtctcatggccctcaaaatgcttgaatgcacaacatca

SEQ ID NO: 172577 - DNA, 298 bp, Glycine max
  unsure (1)..(298): unsure at all n locations
tcgtgatcgattttgtctgaaaagagcaaattaatcattctcttggatgaatgagaaaactggagcaaatgaagagggtgagaatgagggagaaacccgtgctgtgactgccattcctatacggccaagtttcccaccaacccaacaatgtcattactcagccaataacaacccttctccttaccaccacccaggtatccacaaaggccatccctaaatcaaccacaaagcctatctaccacacnttcaatcacgaacaccacctttagcatgaaccataacaccaaccaagaaatga

SEQ ID NO: 172578 - DNA, 238 bp, Glycine max
tgctcagaggttcaacattcaatttcgagcgtctcgttatattacggggactcaatcagacatccgagtaaaaatgttattgtcgtttgaattggcttagagcttcaacattcatattcgagggtctcgatttattacgggactcaatcagacatccgagtaaaaagttattgtcgtttgaattggctcagaggttcaacattcaatttcgagcgtctcgatatattacgggactcaa

SEQ ID NO: 172579 - DNA, 193 bp, Glycine max
cttcatatatcgagacgctcgaaatttgttgttgaatctctgaaccaattcaaacgacaataactttttactcggatgtctgattgagtcccgtaatatatcgagaccctcaaaattgaatgttgaaactctgaaccaattcaaacgacaataacgttttactcggatgtctgattgagttccgcaatatatc

SEQ ID NO: 172580 - DNA, 210 bp, Glycine max
caccagcagcgcttcgaggccatcaagggatggtcgtttctccgggagcgacgcgtccagctcagggacgacgagtatactgatttccaggaggaaatagggcgccggcggtgggcatcactggttactcccatggccaagtttgatccagaaatagtccttgagttttatgccaatgcttggccaacagaggagggtgtgcgtgacatg

SEQ ID NO: 172581 - DNA, 378 bp, Glycine max
  unsure (1)..(378): unsure at all n locations
cttacagaaacttgctgtatcacaggatccttgttgcagcactattacatattcattacgacggtctttaaaaaggattatatgttcaatgatttgaatctttctctgatctaatataattaatagctagcaaaaattgttacatatacatacatgtattgtaattaatggtccaatattttcacacttgtcatatgtacataaatgattntataaatattcaaaatcatgatgatgcttntggttggcataatgtgcgtcttatttaatatatangtgccagagaccaacgtanaataaatgcttcaaaaaaaaattagactactaagacggtccaataaccatcgatatgatacacatacaaagacgttccgaaaa

SEQ ID NO: 172582 - DNA, 288 bp, Glycine max
  unsure (1)..(288): unsure at all n locations
ctaatactcatgcatcttttacattcaaaaccggaaacttagattcctagggatgagtcatccttttggaactttagtctagcttctacaaactacccacacattcacaatgcacacaatttatttcgcaagctaagttccacaaaatcatgcacaaatgccattgangcatttcaccgaacacttggtgggcgcatgtttaagcatgaaaatcaagggaatggggcaatgtggcaagccccattatctcaaaatgcaccctatgcctaatgtcataccctacacccc

SEQ ID NO: 172583 - DNA, 251 bp, Glycine max
tcctctaatgactatggcatcatttctggtgctaaactgctgggagttggaggccatcttctcaattaaatttctggcttcaacaagagtcatgtctccaagggctccaccactggcagcatctatcatacttctctccatattactgagtccttcataaaaatattggagaagaagctgttctgaaatctgatggtgggggcaactggcacatattttcttatatctcttccagtactcatacaagctct

SEQ ID NO: 172584 - DNA, 343 bp, Glycine max
  unsure (1)..(343): unsure at all n locations
ctacatgccgtaaacaatcccatcatcctaattttgcaaaaatcatatccatgtatcattggggcatttcaccgagcacttggtgggcgcacgtttggacacnaaattgcaaagagaatgggggcaatgtggcatgccccattgcttcaaaatacaacataggcctaaggccttctcattcaaatccttaactcaagaaatccagcataataacaaaccaaaactgccccacaaatataagcacgttctcacaatntagagcaccaaaagatgaagaatatacaccaatgggaagcaaaaagactcaaggattgaatacttactttgtggagtgaattaaagc

SEQ ID NO: 172585 - DNA, 279 bp, Glycine max
  unsure (1)..(279): unsure at all n locations
actcaaaagtacctaaactttttattaaaaaaatagattgtgctacttgcggatgctatgagcctatgaaattccctttcttgcgtttgaaaagaatttcttcctttttgtttcttcgttccattattaaaaaatgtcgtgagtgaattcattagaacggcccattaccaaaaaaaaaacatttatagcgagtgattgattatccaagtctctccaccctctttctttctcttttttttttttaatnnctttgtatctggttacttctccttttctctt

SEQ ID NO: 172586 - DNA, 356 bp, Glycine max
  unsure (1)..(356): unsure at all n locations
cataaaatatctagctgtcaaacataagttttactaactagaaatgaatgctgggtagagcattactatcaatatgatatcaacatgataaattacctggaatagtgggtggggaaccctgatctccatagccaagtttcgcttgtattttcagcttccgcttctcaccaagacacattcccaataatccctggtcccaacctgcaaagagaggtagtgatcatggaatactctatcttgaaagatttcccatcaatcataaaccagtaattngtaacaaaattacatcatacatactagtatgattatgtaaatacacgcatgcatgtatgtgagcataaaatatagctcatatg

SEQ ID NO: 172587 - DNA, 221 bp, Glycine max
gaatcctttatgtccaagttaatttctggaaaggaatccatcattggcaactgccaccatgcatcaatactccagaaataaattgcaatgttatgaggaaatcttcaaaggaacaataggacactatacattatatggtatgaccgatgcttgaaaatgcatactgcattcttttgagaatcggatcggttaaaaggcagattggcaccgcaatagctgca

SEQ ID NO: 172588 - DNA, 125 bp, Glycine max
tttaaattttttctttttaatgacccactcttaaaaatgatgttttaaacctactgacgatcccggacctgggaaagaccaaatacatgttcttgaaatgatggactaacaagacaattttattt

SEQ ID NO: 172589 - DNA, 307 bp, Glycine max
  unsure (1)..(307): unsure at all n locations
acttttcaaaaaaaatagttactagttgggttctttgtaataggtatttattaaaggcaccagtgatctcaacactatcaaaaattaccttanaagtccagggtgtagaaaatatcatggggtatagttaaccattcaaatgtcataattgtgtgtgtgtaactgcatgtccatgtgcacacatgtgcttgtgtgaaatttattcctttgactgtatatgtgttataaagtaaaagagagggtgttataagtctgaccttgagaagcagacgcaggagcttgtaaaagaattttgttatcaccattc

SEQ ID NO: 172590 - DNA, 167 bp, Glycine max
attgtgccaaacccttcactttctattgtatcagatttttcaattgaatctgaacctatgtattctctctcttcacccaaaagatggaaagattgaaaaaaccaaaatggaataatataataaaattgaattcccttgattataggtctgtgggcctttaataaata

SEQ ID NO: 172591 - DNA, 283 bp, Glycine max
  unsure (1)..(283): unsure at all n locations
gaaaaaagaagaagaacacgaaaaaagatctcgaaaaagaagtcatcaatcaaagattaaagaaaatttaaggaaaacagaaaagaaaagaaaaagaggggttctttggactagacaatgtatggacaatgtgcatgtcgcaacctacccttcggcaggagggcgacgcgtgactcgcgggatgcgtgttccacgaaaggaatacgcgtggagtggccaccaacgtttatttgaggaaaacgtnccgaaaaccggaaaagacgtgatctacgatattttaagt

SEQ ID NO: 172592 - DNA, 352 bp, Glycine max
  unsure (1)..(352): unsure at all n locations
aatgtgaataggtagtatgaaaatcgcctttcaaatgaatgtatatgtgtgtgaatatatatcatgaagttgcctctcaagcgtatgtacatatatgtgaataaaatgtggatatatagcaaaaacaatgccattcaaaatggagtagatagtgccataccctaatttcatctggggagcatcatttgcgaggatgcggacctcgtttgaccacttccaaacacttgagacccatccccatggaattcgtaaatgtctgagacgttccggaaaagaaatagtaaaaaatgcaaaagatgggggtgtgtntagtaaaactggggtgtaatagactgcaagccccttttggaaa

SEQ ID NO: 172593 - DNA, 412 bp, Glycine max
  unsure (1)..(412): unsure at all n locations
tcttctacaaattcattcttcctacacctatactcgccactcctttcacaatcaattaacacaaatgaagtttttcctctactatcaatgtttgggtcagaccttataatcactgccacaaatccattttcatgagcaatggatcgagtccaccgcaaaacatcctctcagctgtcaaacacctacaaaccaatccagataatttcagtttcgtacaacatattcattgtattaaatcactcataatcatgaacattattacctgataagtattgaacgcatccgaacaatcaacatgtggttcattcacaccacatttctcttcattttgataatccatatccatgtcttcagacattatactntcatacatctactgatcttcgnccatcttacaataatagaaaattca

SEQ ID NO: 172594 - DNA, 234 bp, Glycine max
  unsure (1)..(234): unsure at all n locations
tttcggagtcttggagcacacctcctcattgtggggcttcaaatttcacgtatgggtggacttctttctacatgaaattcgggggtgttgggttttgggagatatgatgggtagttctactacattattgccttaggatagtcatttgtgaaagaatttgttgaaatcatgttaaacttgacatgtttgatgtgaataaatatacccattgctgattanggctatatgatgatg

SEQ ID NO: 172595 - DNA, 319 bp, Glycine max
  unsure (1)..(319): unsure at all n locations
ctaaacattaaactgtgagcgncncgatttttttctggactcaancagacattcgagtgaaaagttattgtcgttagaattggctcagaggttgaacattcaatttcgagcgtctcgatatattatgggactcaatcagacatccgagtaaaaagtgattgtcgtatgaattggcttatagcttaaacattcaactttgagcgtctcgatatattacgggactcaatcagacatccgagtaaaaagttattgcccgttgaattggctcagaggttcaacaatcaanttcgagcgtctcgttattttacgggactcaatc

SEQ ID NO: 172596 - DNA, 414 bp, Glycine max
  unsure (1)..(414): unsure at all n locations
gaacgacaataactntntactcgcatgtctggttgagtccctgtttatatcaggacgcactctattgaatgtngtatctgtgagcaaattctaacgacaataactttttactcggatttctgattgagtcccgtaatatatcgagacgctcgaaattgaatgttgaacctattagccaattcaaacgacaataactttttactcggatgtctggttgagtcccgtattatatcgagacgctcgaaattgaatgttgaacctatgagccaattcatacgacaataactttttactcggatgtctgattgagtcccgtaatatatcaagacgctcgaaantgaatgttgaanctntgagcaaattcaaacgacnnataaactttactcggatgtctgattgagtgccgaatatatc

SEQ ID NO: 172597 - DNA, 333 bp, Glycine max
  unsure (1)..(333): unsure at all n locations
tttgaagntgatggggcaacatatttctttggcctaacaggaactccaatatttttacagcttctaatgttatgattggtttggccacaccttccacatgtaaactcagccaatttcctttttagcttatgtcctgtgacattgtcctcatctacagatctccttctattnttctttggccttcctctttggacccttttatgtggtggaacagggtgtgtatactgtgtctgggcccaatattgtggtccttggactggttcaataaaatgctggtatgtcttattataagcttctattgacagccactcatgacacatgtcctcaggcttc

SEQ ID NO: 172598 - DNA, 264 bp, Glycine max
  unsure (1)..(264): unsure at all n locations
tacatatttttaggtttaagttaatttttatgcagcaaatattcccttcaatgtgaattaatgagttttcaacttcagtntcaggtgaaaatatgaagaaatagaaagttgttgcagctggtgtgtcgctaggcgaggcatacgtgcttagcaagcaacatccgctaagcgaggcatcagctcgcttagcgagttaggagaatatggaagagaatctaccatgtatgcacatgctcagtgcgccatcagcttgcccagggagtg

SEQ ID NO: 172599 - DNA, 449 bp, Glycine max
  unsure (1)..(449): unsure at all n locations
agcctgtacttgtactagctattggcagattacatgcattacttcttcctttccaactcatcttcgtgagtgggcattntattctttttctataattacggggttaataagatgaaacaatagggtgatgaaacgaatagggtgtcctctcactgcttgaagcatccaatatttattnttatttttatggtagaacatattatcatatcttggaagcatcagctgtgactcggctaaaggctaccgcggtctttgagccagatgggcgccccaaatgcttgccgatgaactcaccggctaacatgagctntccgagatcatacgtggttttcaccccaagtccattcagcatgtacacaacatcttcggtagctacattattctgaagctccttgcataaggacagcacctagacagcaactgaaaataactgcctgatccatctgtta

SEQ ID NO: 172600 - DNA, 269 bp, Glycine max
  unsure (1)..(269): unsure at all n locations
aataatnaacancctaagcgtaaataaaatttttggtctcgtcatatattattntcttcggcttcataaaattatattttaaaatgatccctctcaattctcccttttttaatttttttggtggtgctatcttaattttatcattgtaatataatcattattttgtccatgtaatatgtgcataatttgcttttaagtcctagcattttttagagggactcacctcaaatgcacaaaatattatagacacctaaattaaatgaagaaaa

SEQ ID NO: 172601 - DNA, 287 bp, Glycine max
  unsure (1)..(287): unsure at all n locations
gtggctattgaagcattaaatgcttgcgttaaatgcacgtatatttcatgatggaaaatcattctctttatttcccttgaagaatactccagtaggaaaccacctgtcctctgacaaaacaagtctggaaagtagggtgcatctttgtattgctcggattcaaaatgtgaacgtcgtttctacacccattcaaaaanaaaactgtgtgttggatccttctctgataaggaaacactaacacgaactaaagataaggggaacatatgattgtaacactggcgaccaaa

SEQ ID NO: 172602 - DNA, 329 bp, Glycine max
  unsure (1)..(329): unsure at all n locations
tttagtgttaaggaaaaacggtaaaacaaatatgaaaacatattagatgtttaaaaaacaatgctgaaaaatatgaagtatgaccatattttttacttcaaattttaaattataatgaaaatattttccaacagctatatgttggtatttattttgtcacatcaaaatagtccccgtcatgcatgatgcttctgctcgtgccgctaacaatcacagttgattaatattgctttttaaaaaaataaatctaaagcactgaatcccctgttctctcttccttttatctgtggttctctcccactcannaatgatggtagtcctattatact

SEQ ID NO: 172603 - DNA, 233 bp, Glycine max
acttttgtataccaacatgttgcagatggatattttccaagtatttactagcttttcaataagcttgacttctcttttattaattggtgtttaattgttatttttcattacgattaatgacttttcaaagcaagagaaatcctgttgggtacgccctaattaatattattatccgttgtacctttttattaccaaatgttgcatatggatattttccaatatttactatcttt

SEQ ID NO: 172604 - DNA, 205 bp, Glycine max
caccattttttttttttcacaactatctttaaccacaacttatttctcaattcctcttttaaaacataatttcaatccttcctctatcaaattcttatgcaacaattcctttcccaattcttatatcaccttactattacacaaattgtttatcataccaatatcattccgaatttaatcatttaaattaacctttaaacacatt

SEQ ID NO: 172605 - DNA, 204 bp, Glycine max
ttaacaaaaaggaaaaccgaaagaatctggaaactaaaataaaggactccttcttatgctcacaattcaaattccagtttaagattgtgcccccaaagaactaagccacatagttgtagtatcgtctaatcgaaagaagaccgacttgtacgcttggacaaatgaatgcgcaattgactatagtagccgtctttatttattgac

SEQ ID NO: 172606 - DNA, 275 bp, Glycine max
  unsure (1)..(275): unsure at all n locations
tgggattctttgactggagatgaattgcactcttttgagcatattcacattgctcgagcatgtgctttttctgaagtagatntggcaatgttaacttcatactgattgaatactatgatttctgttgatatccatttctggagaaggaaaatcaatatatcaatatatgagttataaaagcataaaataaatgggccatggaagaccggtagttggaatctcatgaatcatgattcaattcatgtgatgtggtgcaaatactcgctccatccata

SEQ ID NO: 172607 - DNA, 316 bp, Glycine max
  unsure (1)..(316): unsure at all n locations
tgctctattcaatggagtngacttattatcttcagactgatcaacacatgctctgtggccaaggatgcatgggagatcctgaaaaccactcatgaaggaacctccaaagtgaagatgtccagattgcaactattggccacaaaattcgaaaatctgaagatgaaggaggaagaatgtattcatgacttccacatgaacattcttgaaattgccaatgcttgcactgccttgggagagaggatgacagatganaagctggtgagaaagatcctcagatccttgcctaagagatttgacatgaaagtcactgcaatag

SEQ ID NO: 172608 - DNA, 266 bp, Glycine max
ttgtcaaatttggattgagctggtaactgataccatttcccattgatttgttactctgaaggagtgtgtctttgctgaattgatatctggatgcatttgctactactctcttagaagtgagatggcctattgctggtgcttgtgtgtgctgcgtgtcatggagagacatatgtgctgacacatatctgaggagggcactgtgtgtgtgtactgcctctaattgagatcctcaccgattgttgtctgaagcaaaatccccgtgtgtt

SEQ ID NO: 172609 - DNA, 350 bp, Glycine max
taacattggtggtgttggcctgttctgcaagattttccttcttctttatgcgttgtttcttctacaagtggcttcaatttccaaagccaattcaaccaaatcacctgcaaaagatctatgtcgcatacaaaacactagcaagagcagcggttaaccaattcaagagaaaaacaaattctgaactaactaactattcaccaaaacaataaatcagagaataaagaattaatacctataaactgaactaaacttcccaaatggaaagaagttccccgggcatggcatcaaaaacttgtttgcggtctcgaaaacattcgcaagtgtaccgagtcgtgcaagtaatattaaaa

SEQ ID NO: 172610 - DNA, 170 bp, Glycine max
cttaaatatcttaagaaaggggagttgaatcaagatttcaaagactattcccctaattaaaatcctaactctctttctgaatagttaatgcacccataatatgaattacttaaaataccattcaaaataaaacttctttaatgcaaaagaataaaaacaataaataaaag

SEQ ID NO: 172611 - DNA, 404 bp, Glycine max
aatgcacccatatacaatcaagggcgcttcgttacctagattatttacacgtacttccaaggggtatttgttacttacatcacacacatctcctttggttaattcacatacatgcatacccaaagcattttgtggtccaaaaattgcacatgtgcacatcttggtatctctaatacctatacatacacaaacttcatgatgaatcttgactattctacacaataggggctacatttcatgctcttttaaagttttgtacctaaagccgcatgcaaatcaagttattttctttgctgactaaatgaattcaataaaaggatacatttttggaatgatcttcttactaacatgaacatattatgttattttttggaacatttactacaataatattgtcatacatc

SEQ ID NO: 172612 - DNA, 298 bp, Glycine max
cctactttacaacgttattcacaaacttttttactaaaaatcccctttacatcaagcccttgttcctaatattcattactcagagtttgtactactacaaattcttgtaatccatcatgctacttagcactcggttcaaaatccatacatgctctctaagcctgcaatcagatttttttgctactaaatgattcaataaaaggattttgtatgatttcttactaacagcaacaattatgatttgtgaacattgacaccaaattttgactactgcaattttgctccttccaattaattc

SEQ ID NO: 172613 - DNA, 302 bp, Glycine max
tccttcccgcaatgcttcttttcatgcctgcctgagtgggcttatagcctacaccatacttcccacgaattccttgagtattgatcaggctagtaatgccgccgatgttctttcctaaacccatcccgggttcaaaactgtgccccaacataactcaggccatcattaccgctgcatcggacagacaaggttgcccaaagagggagtccacggaggaaatgctgaccacctcaaaagactggaaagcaatttctaacgattcttctgcagcgtccacataatgcatggaggatgggcagctt

SEQ ID NO: 172614 - DNA, 85 bp, Glycine max
cttgaacttcccttctcgaaaaaaaaaacgtttttaatcacttaatcgcaatgctatatgtgacatacccattcaactacttatg

SEQ ID NO: 172615 - DNA, 319 bp, Glycine max
  unsure (1)..(319): unsure at all n locations
tatcgattcatcagaaactcttgagttttttgccacctatntcacttcacaactattgacatatgcactaaacttagaacgtcaaaaataataatgaaatctaccggcacttacaacaccgggaacaaccattacttaaatgctacacctactacaagagcaccctgcaacacgcgaaaacctatcttctcctgaaaattctatttcactttctttacataaaaattcaagttcatgccatcaccaaaatgaccaccgcatcttcaacaaacataagtcaagtaagtcattccttatcttctctttttcacaaaactac

SEQ ID NO: 172616 - DNA, 202 bp, Glycine max
gcctgttgaacatcatggagctaagtcacatgagctatcatttgttcttcactcatcttaaagaaataataagtccctttgaattgaatagtgggaagtcgtaatatacactaaatgaatgaatagttgtcgacatcatttggtaagtagacacaatcatcatcaaagtgatacttgctaactaaacattaaacttggataa

SEQ ID NO: 172617 - DNA, 233 bp, Glycine max
ttccgtattaacattgtgccggggaatgcgaacctaccatatataccgggttcttttatgcgtaccataaaattattcaccccagcaacaacaagtaaaaataataagtggttctggtgttctgctttatgttgtgatttgaattatgaaggacattgtcatctgattttggtgaacctctgcagttggtctgcaatggctagtttggatgaaataatttgaacggcgtattt

SEQ ID NO: 172618 - DNA, 237 bp, Glycine max
tagcttctcaaggaaagtttctcaaagaacttttaaggaagttttcttaagaaagcttctaaaggaagctacctagtctataaatagaagcatgtgtaacacttatcataacattgatgaatgagagtcttgtgagatacaactcaaagttcaacttctctctctttttcttcttcaatgtcgtgctcccccctctctctttctctctctcattcttttccttcattgaagcatcct

SEQ ID NO: 172619 - DNA, 245 bp, Glycine max
tggtgtatgtgttgcttaatcacattacgaatggcttatggtaaaattctcttaataatttaatttatgggtggattaaagggttcaacctgttaaaggataattctcgcaaccctagatagagacttgcttttgaatcaggggaagccatgcatttaattctaatttttctattcaatttactcgtgtgtatttacaaaacaaaccccccccccccattttgtgccatttctactatcgttatg

SEQ ID NO: 172620 - DNA, 147 bp, Glycine max
  unsure (1)..(147): unsure at all n locations
ttctctctctctctctctggagtgaaagtacctattaattgatcatggatatatcaaaaaagcttctacaatatagatatcacataaccatagcaatagtagtttcactatcattnntcttgttggtatatgctgctccacactttc

SEQ ID NO: 172621 - DNA, 319 bp, Glycine max
  unsure (1)..(319): unsure at all n locations
cccttttgacgtgcttaagccattttacttaagtcatttctcgcttaacttaaaaataaaataaatttccaccgaacggttgaattgtattatccattaacttcggttaaaatgaattccgaccgttcggtcgtgccgtaaccacgttggaaataaaaaaaaagaggtnaaataataatataataataaaaaaacatcttttagtaaaacaaagcggaaaatcaatcggacgttttctctttgggatttctcattcttaatcgaattgactaataactaaagtgaaactaaggctaaaatcaactcgcctagtctagct

SEQ ID NO: 172622 - DNA, 118 bp, Glycine max
  unsure (1)..(118): unsure at all n locations
tgaccaaaaaatttaagttaaaaagtccttntcaacaaaactactctctggtaatcgattaccaaatgatggggaccggacgtatgcaccatggtgtggccgaatgaatataaatctg

SEQ ID NO: 172623 - DNA, 252 bp, Glycine max
acaaaattaatttcttttcatgcaaagagcaattactatttcaatactctacccttgtagtggtaattaacatttattttttataagatagtgcatattcctgtcaacaattccacaaaattaatcatgatgagtactttcaaatggaggttgatgcactgtgtcgaaaaggcttatcttcattgcagaagtgtgcaactactcttcatatattggcttatggctcacttgctgacagtgtggatgaatatg

SEQ ID NO: 172624 - DNA, 296 bp, Glycine max
acgtcaaggaatcttgcccccaatacaatgttctttgattatttgaatgatcatacatagggatgtgctgctgaaagactttgtcaagtcacaatatatcctcaaagatctccattctacttaacggtcatatgggaccactctgctgtctgaattcatattctatcactctataatctttatttataccacatacttataaagctatctaacaacaaggtttgtattttcatatattcagatgactcactacaccagcttgtttacaggaaaaatgaaaacaaaatgcacaacga

SEQ ID NO: 172625 - DNA, 273 bp, Glycine max
  unsure (1)..(273): unsure at all n locations
ttctttgggttgaccattgactttggcatatcaccaataataatcttctcatcctcatttactggagtaacatatagatgtccaacgaatgacttagccaatgcatgattatgactcccacatattaacttcaccatccacctttcacctcctaacactggtttcactcgtagcttaaaggacacctacatntctactgtcagtcactgttcgtactatattttcttggatgccctatatttctcactcatctcacaaccaattaaaacatat

SEQ ID NO: 172626 - DNA, 137 bp, Glycine max
gtttatggcaggcaattttagcttgaggttgaaacacgaagtggatctggcattctataacatccttaaagtgtgactcttaaaccatccttaaagtggacttgcaattttaaaaccatccttaaaatggacgtgga

SEQ ID NO: 172627 - DNA, 267 bp, Glycine max
catcctggatacttgtatctctcacattcaagccataatcatgtttatcttgtcacccatgctacattatgttactcaaggaagatatggatgttctcatcgtcctttcaactattttttgacttgttcaattaatcatacctttacatagtgcatgtgtggaacatattcatcaaacttctaaactattatatagcctttgaacactggattcctgaatcgttctatgttcttgcatgaatattgcctaccctttttatgaaatct

SEQ ID NO: 172628 - DNA, 437 bp, Glycine max
  unsure (1)..(437): unsure at all n locations
aatagaatgataaaaatatacaatgaaatcaaatacaatttgaaaggaacaatgtgtaatctatttttggatatcacatgcaactttttataaaaagacaatcaatggtgccaatggaaaagatttgcaccataggatcttataacaactcaagcatgaggttcgaaatgatttaagttagattaaagtatcaacaactaggcttcaacaaaatgattaaccttaaagagaaatntcacaccatccaaaggaaaaatagatgtgaatagaacttgngattacaaaagtttgattagtcacaatgacaaatagtccattcaaaagaattgtaagaactcctttgagtgaacactgattcatatcaaaacttaatgactaaatagttaaaaagaaattggtgaatggtcaaatattgacaacatttaaaaatattattg

SEQ ID NO: 172629 - DNA, 376 bp, Glycine max
  unsure (1)..(376): unsure at all n locations
agcttctcccctattatgctataaatagggttgtattgaagaananaagggttcagccccttaggcacttctctctctctcgaaatagctgaggaaaattagttccgtgaagaaaatccaagacgaggcgcttccgtaacgtttccgtgagtaattacgcgaagattctcgaccgttcttcaagattcatcgntcgttcttcgtttttttcagtcttcaacgggtaagtacctcaaaccgagcttttcaattcattctatgtaccnncgtggggccacattntgtttcatgtatttttaattctcgttccatttactttttatacccccttttgacgtgcttaagccatttatttaagccatttctcgcttaatct

SEQ ID NO: 172630 - DNA, 259 bp, Glycine max
  unsure (1)..(259): unsure at all n locations
ctccgcttccctaactgtactggaggccgntgtccgggctttatcctctataattttctggaagtttaacatgacctccgagatggaagccatttgatcttttaaagccgatagatccgccttcatctgttcttgcacgccctcttcatatccatntttctggatcgagtgtataggggtgccttggtgtttcttaatatgatgaaattcctaaaaaataaacaaggtgagtatgccaccaaacataatatcaataatg

SEQ ID NO: 172631 - DNA, 118 bp, Glycine max
tccctaaaatatcctgaacttttggacctaaagggacactttcttcctaaaattatgcccatacgtttgggccggacgacccaaactaaagaacctaataagacatggtaatgcttgc

SEQ ID NO: 172632 - DNA, 333 bp, Glycine max
  unsure (1)..(333): unsure at all n locations
gaaaaaggctattacacacactcttaacatcttatcccagtgtgacaaattttgttaacgtgttctatttaagntattgtaaagaaatattcgtatcaatctcatttcttaagaaaaattggaatatttcaattatttttgtaaaaaaatataaagccttatccctactttcaagaattatgtgttcataactttaatctttaaatattaaatacattaatttcttaaaaaggtcataaatcaatatgtctgaatatataaattaatgtgtggtaactcttcatatngtttaaacatatatggttcaactgcaatatataataacattaacat

SEQ ID NO: 172633 - DNA, 343 bp, Glycine max
  unsure (1)..(343): unsure at all n locations
cctcanaaatctgatttcatgcttaaataggtggcttttttcttgctcgtgcgcttancacaattctgaaccgctttgtgcgcattattgaatnttagcttagcgcgggcttttctcgctcaacggatggactgaagtggtgcgcttagcgggatgacccttcgctcagctaacacgcacaactcatccttcttccagattcttccttgcgcttagccgaggaatgttgcactcagcggatggctcgctaagccagcagattggcttagcgagagggtgaaaatcagcacttcaaaatntgcctaattaacctgaaattcagagaaaaatgattattaaacac

SEQ ID NO: 172634 - DNA, 313 bp, Glycine max
tcttctctattttactatcaatgatcttctttataaaaatgactccattgatgaagaaatttcaaggcgtacaaactccacatggggcttcatcaaacagcgtcgactgcgtcacgtcaccataaaccaccaagtcctcggcagcatccatgtggaacctcccattcgtctgcgagaacgaatgtgctagcatccccaatctcccgtcgaactgcttcccctggctgtggtcaccactgaataacccgattctaatgtcggtgctgtgttatatataagtgcaacaaagattttctttcattgtgtctctctt

SEQ ID NO: 172635 - DNA, 299 bp, Glycine max
  unsure (1)..(299): unsure at all n locations
ttacatgaatgaggggctctctatttttttgttgaacataactcggcttgngtntctctcacttggaaggcttcancataacttcatgatgccccttgatgaactcttaatgctccacaaaagactgttgaagtggagcccactcaagtgacatacttttggaagaaacacaaaaaaagtgacaatttgcaactcatgataggttgtagagtcattctaaggaacctttctgatgagcattatgaaggtacatcagaatggtgattctgatgttagctaagaatggatcaatatgaaag

SEQ ID NO: 172636 - DNA, 379 bp, Glycine max
  unsure (1)..(379): unsure at all n locations
gagctttcagaagacttagcttctttttttaatgctaanttctctaccttcacaatttagttagtttaagatctcttataattcgaaggacaaatgatctcttaatgagctcatttcatactgtgtgcaagaaggggaaaggctaaagcaagaaaagactgaaagagctcatgctcatgttgtgagtacctctaaagaaaatggcaaaagaaaaaggactgaggagcccaataatgaagctgctaagggtccagcacaaaaagaaacaaaataaggtgacaattgttctttngcataagaataaccttacatgtaagaagaaatgtccaacttcatctggcatgcaaaaaagatgttctacttggccgtctgagcaatt

SEQ ID NO: 172637 - DNA, 320 bp, Glycine max
ctccctatgataaatgtgatccacgtcaactaggaaatatatcatgtatatgatgctgtgattcaacaatcggtgtttctttcatattgtcatcctcatgtatggccatgaagttttgtctcattaaataaaagatgaataatataatgtaagttttaatcactacaaaaatcttaacggcacattattattgttcacgacaatatgttacattgtgatgtttgtgatgatttaaaatcatcagatttctgatctacattttgtatgggttgcctcacaattaatattttattcttattgccatctttgtcattgtacac

SEQ ID NO: 172638 - DNA, 349 bp, Glycine max
  unsure (1)..(349): unsure at all n locations
taatgntctttatgctagatatgcatctctttgccatgcacataagctggttgaagaaacaccttgtaaaactgtctatctatggaatgctttacttaggagctattttttggaaggaaaatgggtagagacgttatctctattccatcaaatgaacgctgatgcagtaactgaggaaagacctgacaattacacagtgtctattgctttgaaatcatgttctggtttgcagaagcttgagctgggaaaaatgattcatggatttctcaagaagaagatagatagtgacatgnttgtagggtctgcattgattgagttgtattcaaagtgtggacaaatgaatgatgct

SEQ ID NO: 172639 - DNA, 172 bp, Glycine max
actctctaatgaccattttttttttatttgccataaactatgtaatcctatctttccaactcaaattgtccaaattctgccaacttatttcttctttccataattcatttttaataatcataatttctttcatttcacctctttaataatatcaatccctcttttacttttt

SEQ ID NO: 172640 - DNA, 215 bp, Glycine max
  unsure (1)..(215): unsure at all n locations
ccctgcccccctcattaagaactagctcatttcttcctctattgcctttagttgaatacacctttgttcgcgtctctattcggttcttaaccctctcatgcaacttctttacaaactctggcctagattccccttctttatgtataaatagaagtgtcaagagggaggggaatgaggtctaaggagggtaggggattgaatccatanacaacctc

SEQ ID NO: 172641 - DNA, 337 bp, Glycine max
aaggaccaaaaccccctaacataaagcaagcaatcggtcaagagaatatgtaccaaacacgactaagcacccagttaggattagcagcaataagagattagcagaagctgacaaaggaagaagcagaataataaaagagaagaagagaaaggtctgaagtgtgaacacaaacattaaaaagcaggcaacacaaggaatgaacatgaacattaacaaggagcatacaagacccacgggaacctagcgtatgctcaaatgaatcaatgaatgaatacaaaccattacaagtgaacatgaacatgaaccaaatgcagactattataaacattacctaaat

SEQ ID NO: 172642 - DNA, 299 bp, Glycine max
atgaagctaagcgccagtcatggcagctaagcgagattcattgtggcaatatgagcgctaagcgagtccctctcagctaagcgcatgctcctctgtacttaagatgcatcattttagctaagctggccagagcctggcttaacaagagttgcagcttttctaatttggagacctcgctaagcggacttacccttgtgctaagccaagtctctgctaaaaaaaaacaaactaatttttgaatttgaaacgttggctaagcgcacgggtccactaagcgagccttggtgacaaaccaaaca

SEQ ID NO: 172643 - DNA, 284 bp, Glycine max
atcatactcaaacacttatttcataccaaacaatctaccgcatatcattttcaatcaattcactgttcaaacacgcttttggtacaagcaaacaactcaaagtgctgaaatttaaataactgaaatgtaaaaactaaaattaaaatgactaaacataaatcataaaataactgaaaataaactaaaatgttcaagatgcacaaatttaaatgtcttgctcctgtgggtgctcctctgcatgctcaataagggccaacacctgagcagctggtgaatcctgagag

SEQ ID NO: 172644 - DNA, 334 bp, Glycine max
  unsure (1)..(334): unsure at all n locations
tgaaatgcgcgacaatgtacattatacctcaattaatagaatattatttttgcagaacaaaaatacctcatgctatttatatatgaaaaaggaatcagtattgattacaagatcaatcaattactgattaataggaaatagaatattctataataaatacaatatgaagaataatatcaagacataatctcacaatttctattttttttattatatgatattctccatatacagggatgtaggttctctcaagcagctgctgctntgcatgagtttaaactcctttctgtngaaaccaaagggcagagctcatccgtatataggcttggaaggg

SEQ ID NO: 172645 - DNA, 343 bp, Glycine max
atcttgaactcattctttgattgacctttgagctttttcttataccattgtcatcatctttgatatcatcaaaacatctttgaatcaatcttgattcatcatgaagacttgcttctacaaaaacaagggtgtccaagacctcatacaattaatatagcaacttataccctaatgtcacatcatatcagagcattctgtcccaacgtctttcagcacaaggttccttaaagtaattcacctagtcatctgctctcccgaacacatagttcaagatcataacaggatcaaaacacaaacaatagagggagtgagttatcacattcctaactattagagaaaaata

SEQ ID NO: 172646 - DNA, 355 bp, Glycine max
tattacaaataaaaacaatttaaccatttccctggtatactaaagtaaggactacaagatgcaaatcagcattctggaacccaaataataccaaaagtgcaataagagaaaattaaaacagaatatatgtaaataagtacgctaaagctatcggctcccagctattggttccctttgggactgaccttagtctgatgttggaaccatgtggctggtagtctaactacttgtactgatagtaccgctggtactgattatatatataatataatttatctctgccgatcaaaaaaaaaaaaagtacgctaaagctcagacagccattagctaatttatataaaatcaatattttaca

SEQ ID NO: 172647 - DNA, 274 bp, Glycine max
  unsure (1)..(274): unsure at all n locations
gcaatgcaacgatgttccaatgttagacttagttagagccatgtgcagtgtccacgatgagaaatcaggacaacctttagcttttgagtacacattgaacacaattatgcattttgttctggtttgcgtgtagcgaggtatttaattgagcaataatatatggtgtgatgtatatcatgtgtattccatgtgaaagaggatagctcaacatcaaagaacattagttctgaaggtgaaagaanaacaccagaaatcatgggaagatgtgcatcct

SEQ ID NO: 172648 - DNA, 358 bp, Glycine max
gacttaaccctgggtgctttccctataaaggcccccacaacagcatcatactcaaactatatatgcatgaatatctatatcctaatatgcacaaaggcattactgcatcataacccccaaagcttcaggactgaaaatgatgagaaatacattaccttaagcatgttgctcagaaaattaaagccatagaccagtcaaatacaataaaaaaatatataccttaaacttgagtagctcgcagcacagccatttgcgggacatgaggatttacctacttaccaacgaaatatttaaattggaggcactatttatcaagatcacgacactggttcctggacactatactgatcatcatcac

SEQ ID NO: 172649 - DNA, 330 bp, Glycine max
  unsure (1)..(330): unsure at all n locations
tataatgaactccaattcatggtgaactatgttgctacaaatctatttattttagacaattcaatattataaatcatatggacatgttgcaagttttaccatatgcatatgctgccaaatataggtctcaacatgaagtcataaaccagagtcctttataacaaattaacaaaattccaattataacttttctgtgcataagccgatagcataggctattaagtttgagaagctctgagaaacagttattagctatagccaacaatgagatggataagcttaatacagaaacttgtgtttgaaacanaacaaaacaaaatgagaataaag

SEQ ID NO: 172650 - DNA, 431 bp, Glycine max
  unsure (1)..(431): unsure at all n locations
tctgtggctgncttaccggattagctccatcctctataatatctactgcatacgcgtggatgggctaataccacgaatgtacgccagggtccaacctatagccttcttatgcttctagagaactgacaacaacttctcctcttgctcatcagcaagtgatgcagatataatcactggacaactcttgctctcatcccagtaagctgatctcaaatttgatggcacaggctctaactctggcgtggtcggctggacagtgctagaagcagatggtttctcagcctttacctcataaagaaagacagatgtatgtgtacttcctcgaacatggatacgcctatctgactctatanaatcggtctcgagacggtaaacaccaccaccagacatgcgatgcatattcctcttagattcactctcagcatcacatt

SEQ ID NO: 172651 - DNA, 374 bp, Glycine max
cgcgagtaactgaaattgggcttaacgccagtttcgagcttaacctggctgaaggcacttattgcgcttaacgcactgatctcgcgcatagcgcgcgactttgatgctgatgctctgccagattcttctttgcgctaagcgcgctgaaattgcgcttagtatgcgctaaacccaacttgtgagcttagcccatctgctacattttgtaattcaaaacttatgctctttttcaactgaaaatgcacagatttcatcattaaatccaatggaaatgttctagagacaacattgaccataaaacaagaattatttacaaaaatcactagcaaataaccataaattgcgaactatacaactttggaaatgattctata

SEQ ID NO: 172652 - DNA, 249 bp, Glycine max
  unsure (1)..(249): unsure at all n locations
gcgagggtttttttttatgnttaagatcgtctgtggtgacaccatcacctcatatcctcagatcctttccttggctttgagaaaaactagtgcaaatgggtgaaaaacgggcttgtttaccatctggtgggcgtttataaaggagtgtctcaaaatatctgatatttttatgggaatgatccatactgtataatcggcaaaaaaacaaattgattatcggggagtgtcttcctacctgaatatgacctt

SEQ ID NO: 172653 - DNA, 225 bp, Glycine max
cttggaccccatttctaccaactacacacccttagaaaactatattatctacaccaaaaggacacttctctatatttgcatagagggtggttttcctaaggactgaaataacttgcctgagatgtcctaagggatcatctaggctgctactgtacacttaaatattatcaaaataaacaactaccaatctacctatgaaatcccttaagacatgatgcataagcc

SEQ ID NO: 172654 - DNA, 300 bp, Glycine max
ttgtccccgtcttggtcagccatacccaataagtcatgatgtcccctggccattccttggtcgtacctgtcccatccccttccctgtgcttcataggttttaagggtaactctgtagcacggtgattagtaagttgacctattttactaaataggtataaagaaccctgtaagattgattatgtgtgcacattcattggtcaagtatgggctcttggatgccacacacattctcctgtatctgagccaagttgggtacaaacttcaaatctttcttttttttttttttggtttatcccta

SEQ ID NO: 172655 - DNA, 362 bp, Glycine max
ataactaagatcacctccttgagaagcttccttgagaagattcctaaagaagctagagcttagctacacatacctctctaatagctaagcttacctccttgagatgagaagctagagcttagctacacaccccctataatagctaagctcaccccatgacaaaaaacatgaaaatacaaaaaaaaaagtccttactacaaagactactcaatagagtggccaaaatacaaggcccagacaaaggaaaaacctattataatatttacaaaaataatcgggctcatacttagcccatgtgatgcaatcttaccccgcaagggcattggatagaaaattccaagtagaatgggccatatatgcaa

SEQ ID NO: 172656 - DNA, 339 bp, Glycine max
  unsure (1)..(339): unsure at all n locations
ttcttatccattgactctcttatgttcatatgcctcaacatctccatttttcttcgagtgattgcattatttggattcttacaaaatttgtccattggtccttttttagttncacactttgtctttgcacttgcagcaacattacaaaagtctgcaaactcatcttcttcacttncatcacatacaattggttcaccaaattcaaaatctcttatatttgccatattaccactgccaaaagtactgtaagtgctcccactttntttggtagccatatattccttcaactcttccactacatttggtggaagtttcttgcaagctgcaacgttacccgac

SEQ ID NO: 172657 - DNA, 299 bp, Glycine max
  unsure (1)..(299): unsure at all n locations
cacacaanagaactagcgaaagaaacaggcaacgcgcctcgggaagcatagggaagccaggaaccggctctaaaatatccatatcccttttgatgaagaaagctgggtttttttctatgacagaatctgaaggggagccactttgagtcacccaccagcacaacaatctaggaaaatagtttgcaaaccacatggaccacttgataagcttcctcctataagcctctcttatcagactctcagggaaggaaggccatagataatttatcactggagctatcatagccacacctgctagc

SEQ ID NO: 172658 - DNA, 422 bp, Glycine max
  unsure (1)..(422): unsure at all n locations
atactaagctgggtatatctctaatagagaattcagagacgtngtgttattatttnatttttganaccttagatttatcagaccttgatgtgtctgttgaatgcataaaggaaaaaccaataaacatgagaaaattaggtgttaaaagagcttaagacgtcttggaactagtacatacaaacatttgtggtattttttcaacaccttcttggaatgggcaacaatatttcatctcgttcatagatgaatactttagatacgaatacctatatctgatacataagaagtttcaatcccaagacatttttaagaatttgaaagctgaaggtgaacttaacttggaaagaaaattaaggctatcaaatctgaacatcgagattgagtatatggccggaacgatggattaggagaacgaacgccat

SEQ ID NO: 172659 - DNA, 376 bp, Glycine max
aagaaaccctctttggtaaaatgtttctaaaacaagccctctgaggtaaatttgccgtgactcggctcaagatttaataggaagaaagagtacgcgcttcaagaagattgtctgacggctgttgttgttgtgcgttgcgtggtccaaggcgtatagcagagcactggattgaggttccatcatatatgtcgctacttttaggaaaagtaataaaaatttaacaacacagaactcaaaccacaccgattatggtactgattttcagttcaatcggtcagactgatggattcgatccgcgttttaaaatactgctctaacccatagaacatgctcgatgcttcataatgtgtcttttatgtatcagggatggaatctg

SEQ ID NO: 172660 - DNA, 371 bp, Glycine max
  unsure (1)..(371): unsure at all n locations
ctgaattaaaaaaaaatgaatgataaaatggtatcccaaaaatataaacaatataattatctaaatatttaaatacctcatttaacctatgttaatattaaaggggggagtaactttttttttatagtttgaaatatttttctaatttattgagtgaacaaaaatgaccatagaaacaactaaaaatctcctttntttaataatccatataaagggttaaagtgcaagtaaagagctttttacacaaaaataaaaaataaatattatccatataatacattaaaaaataccaaaatagtttaaatgaaatagaaaacataaaaaaataataaatatatttctttacaaaatatgagatggaaatataccca

SEQ ID NO: 172661 - DNA, 407 bp, Glycine max
aacagagcaaaggcagaaaactctgccaaaacaccacccaaatcacagcttttctcacttaaagaccccagtaacaattccttcgatccaagtcactaaccgttggatcgactccaaaattttactggaagtctctagtacttaagcctacattttgaccgttgggatctactagcaaacatccagaactcattctacattactctttccacaaccagcaaatacatggatttttctgcacttgtgcaaaattctgctgcacaattttacagcaaaatctgcacaaagagcatatttcgaaaaccacacttcccttcatccaatcttgcccaaatcaaatcctacaagtcccaaatcatgtatcaatcatgtctaaaccaaagtcaagcttcaaaccacagcaacac

SEQ ID NO: 172662 - DNA, 326 bp, Glycine max
  unsure (1)..(326): unsure at all n locations
acttggaggccattcaaaatgacttgatgaaggacaacccagaccacctgcaattgaatgacattggtgtcaaacggtactttcaagaacagatcttgaacctcgacttccatgacgaagaacaatctcccaatattgctggcacccattaagatcagttcttgacagaattcgcaattcaatatgaatacttgaaggctatcgaagatgacccagatgaccagcaagaggtgcagttggatgacgaataatttttcgagtactgctgctntcaagatcagttggtgaacctggatctcaaggcgaagaccaatttctaatatatg

SEQ ID NO: 172663 - DNA, 402 bp, Glycine max
aaccttgcccattgtttaatgccaatccttaccctcgaaaggcaaaaaaaagaagagaaggaaaatttccaatcaaaggaaaaaggagaaggagaatttccaatcaaagaggaagcaaaaaaaggagagaaggaaaatttccaatcaaaggaaaaaagagaggaaaggaaattcccaatcaaagagtgggagaaagcaaaaagaaaagaaagaaaattcccaatcaaagaatgggagaaagaaaaaaagagaagccaaaaagaagaaagctcctggtcaaagaaaccagaagaaatgtgccgagaggtccttggaccggacaatatctgaacaatacaaaattgtcaccaaatgaacaaaaagaaggaaaggaaaccacgacctaaaatggtctttcccctt

SEQ ID NO: 172664 - DNA, 372 bp, Glycine max
cagagtgggacctggagatatgttgcgggggtcaggagaccttgtggacgtcaggtggggtgctattgcccaaaaccaagcttgaccaatcccgacccaacccgggcatagtcggtcagtgagaacctgtgatgtacctaagcaggcgagctcctggcagtcaacagataaaaggaaaacaagaccacaaagcaaggaggcttgtggtggctggccagctgtgaattttgtataatatgtggattgtggcctctggtaatcgattactaagggtgggtaatcgattacaaggcttaaaattgaagacaggaggctaagatggtctctggtaatcgattaccacggggtgtaatcgattaccaggcgtgaaaa

SEQ ID NO: 172665 - DNA, 398 bp, Glycine max
aagaacacacatcatgaagttataagtcctagaatcatgagcaaatccaggcctcttcccagcctaacaaaaaaccgaaaggccgggcttctaacatgcttgacccttgcagcacatccacaactaaatcatgggacaaccgaaccccacatttatcaagaacaacctccatgttcctatctaacgcaaacaattcatcaatcaccttgcataccctctcaacctcaacaggatctgcacatgattcaccactaacacctctaccatcataacccttatcaccatcaccatcatcaccatcataaggtattaaaaggtaggcttctattaaaaaaaaagggaggcttctattcaaatttagatcattggttgcccttcggaaatagtgatccattttt

SEQ ID NO: 172666 - DNA, 244 bp, Glycine max
gatgaaaagctagagcttagctacacaccctcttataatagcttagctcacccccatgccaaaattcatgaagatagcaaaaagtcccaactacaaaggcttctctgaatgcccacaaataccaagctaaaactctatactactagaatggccaaaatacaaggctcaaaagaaggacaaacctattctaatatgtacaaagaagagtggacccaaccttggcccatgggctcacaaatctacc

SEQ ID NO: 172667 - DNA, 439 bp, Glycine max
  unsure (1)..(439): unsure at all n locations
agcttgttaacagacttaggttcacaatgagctatctaaagggtggggtttattctatgtaaatgaatgtgagacatatatctggtttgcaaaggatgagtgtttatatagtctatgaaaagaagtaagatccctatgtgaggatgtagattttgaacaaattacaagaacagaagcatcaataataagaggatactaatctgtagaggtatgatcaaaggactgtgttggattaaaggtaggtatttctatgtcaggctgagttggctgatgaatangagatgactgtacagaaacgggaggagagtaatcaacatcaggagaatgatgatgaacaaaagtggatgagatattggtttgagtacgttgggataaatttggagataaatgattcgaatgaacggaaattaaatggaatggatgangaagatgctgactg

SEQ ID NO: 172668 - DNA, 290 bp, Glycine max
gctgcacccatctcgcccaggcgagcttggttgctttctccagaagcaacagccttctggagggcccaagagggcctggttgctattttcacccccatttttactaaatacaccccctggctgtttttggtgattcttttttttgtaagttacagaaacttacgaatttcataacgatacttgttttctttccgtaatgttacggaaccttgcggattacataatcatcccctcttttgacttacggaatgttatggaacctcactaattgtgcaacgatgcttccattt

SEQ ID NO: 172669 - DNA, 405 bp, Glycine max
  unsure (1)..(405): unsure at all n locations
agcttgatccttgtatcttgaatcttgtattcgtccttcttcctgaatcttgaagggttcttcaacttttcctcttgagtcttgaattgttcttgattccttcttgaacatcttgaattcatcctttgattgacctttgagctttttgtcatcacttttgtcatcatcttttgttatcatctttgttatcatcaaaacatctttgaatcattcttgattcaccatgaagctttgcttctacagtgctcgcccaggtgagctaaccctgtgcattnttattttttttaaaaaaaacttttttcgaagaaaatacgtgttctctgcgggtcggtgctcatttactcgaagccccctaggataagttatgcatatccgatcatcaccctagagaaataacaatgatta

SEQ ID NO: 172670 - DNA, 447 bp, Glycine max
  unsure (1)..(447): unsure at all n locations
agctttcgaggttaccttaaagtaagcattctctgcagctttttcctcctcgctaagtattttcccagaaccactgctaaatagccttctggatccgtaccttgcagccacacgtgcagccattggagttagttaaatcttctcctctttctgtaaacaacacaacgattcgcaaggttaattttacattaattaagaacaaaggcacgctaaaatcagagctcaattccacatattccgaaacatttcaccgaaacatcaataatttgatacaaatctcatcgagttttccaacaaatggcgctattttaattaaagacgagaaatgaaaatctcgtgattctagctttgagcattgcattgtntttgacaaagttcatagacacagattcgcgagagctagaaaatccggtccaaatattatttgaaaaagtttctatcgaaaat

SEQ ID NO: 172671 - DNA, 256 bp, Glycine max
agaaaggggagaaaacacggagggaagaagagggggaaaaagaaaaagaagggggggaaaaagaagagaggagagaagaaagaagaacaaaaaagagacggggaggaacgagagggacaaggaagaagaagaaacgcgacagagacaaaaacagcgagaagagggaagcaaacggaacgggggaggagagaaagaaaaggaagaagaggaggagaaggaaaaaggagaaaaaaagaaagggggggagaagagaaga

SEQ ID NO: 172672 - DNA, 345 bp, Glycine max
  unsure (1)..(345): unsure at all n locations
gtcacctgcggcatgcaagcttcaatggaggaagagaatgatagatataattagcgaaaaagtagtgtgggaatgaaggaaagagaaatagagaagntgaactntgaagtgtgtctcacaaagctctcattcatcaaagttaccataagtgttacacatgcttctatttatagcctaggtagcttccttgagaagctagcgttacacccctccaatagctaagctcactctcatgccaaaatacatgaaggaagaaagtttccttgagaagcttccttgggaagcaagtgttacacccctccaatagttaagttcaccccatggaaaacacacagcctgttatag

SEQ ID NO: 172673 - DNA, 381 bp, Glycine max
aacgttcacttgcacaagacattcttataactaagaaaaatgcacccatatacaatcaaggcacctagattatttacatgtacttccaaggtgtatttgttacctacatcacacacatttcctttgctaaattcacatacatgcatactctaagcactttggctatcaaaaattgcatacgtgcacatctcggtatttctaatacccatacatacacaaacttcatgatgaatcttgactatctacccaataaggtgctacatttcatgctttttttcaagtgtttttttactacctaaagccgatgaaattcaagtatttttcttttgtcactaaatgattcaataaaaagattttgaatgattttttactaacagcaca

SEQ ID NO: 172674 - DNA, 351 bp, Glycine max
aactatttaattattgctatttggatttggttctgagtgaaaatggagttcacttccaaatacaaatttttgtttacttggaaattgatttttgtggtgctgcaaaatccgaatgttttaatttgcacacccaactttactattggctcaagtaggagttgcaattttgtgttgaaggatcagactataagtgcaaatttgtgcaagatcaagcacacgcaggtacatacatctcagggagtttgtgattgtgcttggaatggaagggttatgtttttttttctttgttccgagcacacaccttggcactatgattttttactgcgttgctgttgagatgcaatgaatgct

SEQ ID NO: 172675 - DNA, 313 bp, Glycine max
cactcttgctcatatttatttttgttcatgccacttgtttgcgaaatgaatcataacttttatttccttctacttccttaatcttttctttttggtttgttttttttttggggttggaaagactggaaattgcctaatttattagttgggatctaaaataaattttcatgaaagggacctataattgtttcccaaattgattttctccagtacttctacaaacttattttcaacctaacatatgattgctctcctactctattgaaggaaagtaaatcgcttttctttcaagtcttgggtttaaaaaagaatg

SEQ ID NO: 172676 - DNA, 438 bp, Glycine max
  unsure (1)..(438): unsure at all n locations
gcttgtgctcaggcatgagtggtccagtaccattacatttgttccctttgctnttgtaacaataacatcatatacagaaggattcttcatcatagacttgtacttcttaaccttgttaaaagaaaatccaactttcttgagacccaactgatttgccataatgccttctgaggattgcccaatggtgtttgaccacacctgaggtgtcaccacaatttgttgccctttcacttcatgacacataaatcgagtattaccattaatatgagttatggtataaaaaaattctaccaggtcagtgtagtaggtgctctttatctccactagcttcttcaacacacgatactcaattaactcagggaaagcaaagccttcacttctaagccacgcgcaaatgacatactttgggttgaatatctccttccttgcataactaaa

SEQ ID NO: 172677 - DNA, 395 bp, Glycine max
  unsure (1)..(395): unsure at all n locations
atgctgcaaacatctacaatagaactcctcaacctcagtagcaaaatcagccacaacagaacaactatgacctctccagcatcaggtacaatcccgggtggaggaatcatcccaaccttagatggtcgagtccttcacaacagcagcaacaacaacaaccttattttcaaaatgctgctggcccaagtagaccatacgttcctccaccaatccagcaccagcaacaacagcaacaaccccaaatgactatgaggaaaaaactatgcaaaacatgcagtttcaacaagagaccagaacctccattcagagcttaactaatcagatgggacaactggctacacagttaaatcaacaacagtcccaaaattntgacagattaccttctcaatctgtct

SEQ ID NO: 172678 - DNA, 436 bp, Glycine max
  unsure (1)..(436): unsure at all n locations
tccatcacatgtggtactatgtggaggtcgggcaatggtgcaaaacaattctccacatccacaaatcacatataaacccaccatcccctgttgcccaccttcaactgagcacacgtactcccacgtagcccttatcctcngttctctcaacaccgggtccccatcaatcctcccaagcttccacaacatccaagtaattcaacatccactcatcacaaactaacaaaaccaagcaaaacagggaaaaggcagaaaactctgcccaaaactcaaaccaaaaatcacagctttttctcacttaaagaccccagtaacatttccttcgttcaccgntggatcgacttgaanaatttactgtaagtccctagtacataagtctacattatgaccgttgggatctgctagaaaatgtccataaccacatatgtactaccct

SEQ ID NO: 172679 - DNA, 379 bp, Glycine max
actagaataatattgtatttttaaatactttattgcttatatcacttttcttttgtgtaaagatatatggcacaaatattttgttcgtcaatgtcaaaattttcttactagcacctatatcatcaattggagatagtagagactttataccaaattgaccctcgtaggttggagtcttacttgagataaaagttatatgatttactaagcattaggacacaacacaatatatcaacatttatttatttccattaaatacagagaatccaaacaatcatgataatccaatgtaatcttctttcttatcgctgtagacatcagtgttcgactctccaattatccccacaggtaaatcacatctacaactatacttgcaatg

SEQ ID NO: 172680 - DNA, 398 bp, Glycine max
  unsure (1)..(398): unsure at all n locations
agcttgacttggcggggtgattttagccttagtttcactttagntattagtaaattcaatttagaatgagaaatcccaaagagaaaacgtccgattgatttttttcgcttcatttttactaaaagggattttttgactattatattattattttacctcttttttgatttccaacgtggttacggcacgaccgaacggttgtaattcattttaacagaaattaatagatattacaaatcaaatgatcggtggaaatttattttattttttgattaggcgagaaatgacttatataaatgactgaagcacgtcaaaagggggtacggaaagtaaatgaaaacgagaataaaagtacatgaaacaaatgaggaccaccacgggtacatagaatgaattga

SEQ ID NO: 172681 - DNA, 441 bp, Glycine max
  unsure (1)..(441): unsure at all n locations
agcttcttatttttagtagatgaagatgtatccgtggccatatcatggactcctctaaggacaatagcatcatttcttgcattgaattgttgggagttggaagccatcttctcaaccaaattcctagcctcaacaggggtcatatcaccaagagctccaccactggcagcatcaatcatactcctctccatgttgctaagtccctcatagaaatattgcagaaagagttgctcaaaaatctggtggtgaggacagctcgcacacaatttcttgaatctttcctagtactcatacaagctttctccactaagttgcctgatgcttgaaatgtattttctgatggcagnggtcctagatgcagggaaaaatttctccaagaacaccctcttaaggtcatcctatctggtaatggacctgggagcaaggtagtacaaccaatct

SEQ ID NO: 172682 - DNA, 356 bp, Glycine max
  unsure (1)..(356): unsure at all n locations
agcttatgctataaacattnataatttgttttcttttctacaaaaccaacaacagtagagtaattatgacccttcaagcaacagattcaatccanggttggaggaattatccaaatttgagatgggcaagtccttcacaacaacaacagcctatccctcccttccataatgatgctggtccaagcaagccatatgttcctcctccaatgcagcatcagcggcttcaacatcaacataaacaacaagcaactgaggctcctccttaaccttccttagaagagttagtgaggcaaatgaccttccagaatattcaaattctagtaagatacataagcctcctatttgagtctgacaaa

SEQ ID NO: 172683 - DNA, 386 bp, Glycine max
tctctcgccggatcttagcacgagctgcactgcacgggggggatctgttcattatggtgactccctgcactgacaaaaaaggctttccgtaaagaggtgagttaaaccaatcgttcaatatcggtgacctcataatagcatgaaagttaaatcaaaggtcatgtttcatggttgttcataatgatggctaagatctacaattattccttattacatattgctccaatttttctgttgctgtttctatcaatttaagacaaacaatgaaggaccaagatcagtcacaatcttggaagtcatctgaatgaaacatctatcactaaaatttaaaagtcattacattcattgttaattgtcgtgcatttgtgcatctagctcattttttc

SEQ ID NO: 172684 - DNA, 412 bp, Glycine max
  unsure (1)..(412): unsure at all n locations
agctntaagagaaagagggtaccatattcttcttcttcttccaacttttaccaaatgttcttgagcctttcttccatcaagcttaggtaagtgaccttcattttcacctctaagcttgattttcacttcattttcttgctttattctcacttgtagtttcaaaaccttattttgcactcttgaaggttggaaacttgaatctaaactccctcattctttcttataaattttatggagaccactagaggtaagaggtctctccaactcttgaaccatatgcttattggtgaacttcctggaatgtgtattgcttaaaaaaatttgagcttcctggcatgtcctgaatctatgtcaattagtttttataccaaaagtgagttctttgcatgttaaacatagagtagcctataat

SEQ ID NO: 172685 - DNA, 295 bp, Glycine max
  unsure (1)..(295): unsure at all n locations
gcgaaaacacgaggggaaggaggcagacaaaaaaaaaggaacagagacaaaaaaaaaagaaaaaagggggaggaaagaagaacggcaagagaaaaaaagaggaggaacaaaaaaaggagaggagaacaaaaaaaaagagagacncaaagaaaaggagggaaggggggcagaaaaaaaagaaaaagacaaaaaaaaaaaaagagagaacggaaagaaaaagaaaaaagagaaaaaaaaaaaaaaaaaagagagaaaaaaaaaaagaagagagagaagaaagaagggaggaaggaga

SEQ ID NO: 172686 - DNA, 424 bp, Glycine max
  unsure (1)..(424): unsure at all n locations
agcttcatcaagtggtaatcatagcactatagcttcaagtaggtgctccttaaacctccattaattntttgctttaccttctcttccattnttttttcttcatttttctccatgtatctcctcacatgtcttgttctaaatgttgttaacatgattctttagaatttgcaccgattaaacttgctatagaagttagatttgattttctatggttcaaatttcttgttcttgttcttgaaccatgaattgtgttgagtttaggttcctttgagttttgtcttgttattttttatggttgaaacctaaaccataaaattcttacaaaaatattaaagtagaagaaaacctcaaaaatctagagtgacttgttcacctattgtagttntgtcatagaagtcatgtctagtcatgaaacttgtcacat

SEQ ID NO: 172687 - DNA, 363 bp, Glycine max
  unsure (1)..(363): unsure at all n locations
gcttggatgtggacttggacctcgcctatgttatgaatatgcacatgcaagagatttgcaaatatgaaggcacacaacaagatgcaagaagatgaaagttgggaagaaaaagaactccttgcggtggaaatggtgatttttaaatagtgtcacaccccaaaatgtcataacaatgataaactggagggaatactaaactcgaaaagtccacctaatcttaccagtagtcaaactaaaccaattatatccaaagggctaaatggtcgataatgggtcacactttaatttcattggtcgaattntggtagattgagctttttcgacccanatccgcctattgcacacccctagtttaaacacact

SEQ ID NO: 172688 - DNA, 271 bp, Glycine max
cgaatgatcttgagacttgcttctttcacgctttgtccaagctgataccaaatcaaatggcatggtgactctatcttgtattgttttggtcaaggttttaaattgtagtttgggtcgcgatctttcccggatgggtgatatagaagtccatgtgggtcgggagaggtctaaaaccttaaacgtgggctgaaaatgcaggcgttttaaaaattttgtgtgtaaaagttgaagtggtaatgcttacaaaccaatgctcattgaatgcttaaaa

SEQ ID NO: 172689 - DNA, 334 bp, Glycine max
gcatgcagcaaaactatggcgagccgagggacttacttctcgtgccactccggaagatataagccaagcccctacttttgaagggcaacccccgccttatgacgactatccccggcaagaccatgaggaaaggagaacccatcttggcccccagcttcacctcaaagaaccgtccccacatgaactaccccaaccgaacatagtccgtcatatcccggcctcacccacacctgtaaaagaatctgtactttcgaatatgccgcccatatggcccccaacaacaacagaagaaccccagtagcgggcgcgaggaaaaaggaaggagacgcccacg

SEQ ID NO: 172690 - DNA, 445 bp, Glycine max
  unsure (1)..(445): unsure at all n locations
ctgcagctgaagcttgnagcataacactgctaaaccattcttttttttcttttnaatggaaaagaagaanactggagagatgctaaatacatgacaatagtttaagaaaatgctaaaggttcctacttcatacaacaacatctaagaagcaatgacgattaaataaataaatacataactaatgaacctatccttccaagttaaaaactacgatacactattgaggagtggagtcacaactcacaatcagaaagtctcaatcagcaaacaattataggctaaccaataataaattgaaacataatattttagggtgtaaagaacaattaccctgcaagtgagctgagcagaaatgaagcaataactcaccaaccagttatggtagaggcagttatcgcaacatatttcaataaatacacgagactcaaccgagacacacgtgtgc

SEQ ID NO: 172691 - DNA, 410 bp, Glycine max
  unsure (1)..(410): unsure at all n locations
agcttgaagaggatgctntaatggatgttattaaagagagaaggggagagcacgaaattgaaggaattaaagagggaaagaagtggaactttgaagtgtatctcataagactctcattcatcaaagttacaacaagtggtacacatgcttctatttatagactaggtagcttccttgagaagctttcttaagaaaactttcttgagaagctttcttaagaaaactttcttgagaagcttctttgagaaaacttccttgagaagctagagtttaactacacacacccatctaaaaactaagctcaccttcctgagaagcttccttgaaaagctagagcgttgctacacacccctataattgctaggcttacccccctgacaaaaaaaacatgaatagtccaaaaaaaaatc

SEQ ID NO: 172692 - DNA, 430 bp, Glycine max
  unsure (1)..(430): unsure at all n locations
gatccttaagtcaccgcggctgcagcttgtggcagcaggagatatcttttctgtcgatgcgaataggaagaagcaaagatactgtttcagaatttgctctgctctccttaaactttattatctgacatgatatagtcttgcttctattggtacctactttatggtttctctcaagcagtattattgatgagtgtgcagtcttttgagtaagctgcatatatttacctctctataagcatcttcttccctttttacttcgctacttaattgagggtttagtatacttgatgntgtctatgtgtcttcagtttttgtcattaattggtttctgttacagatatcttcttagaagaagtgcattggagctctttctggtgaaccgttacaacttcttctttgactttggggtattaattccctaatatgccac

SEQ ID NO: 172693 - DNA, 421 bp, Glycine max
  unsure (1)..(421): unsure at all n locations
agcttatgatatttgttaatggtttcttatctattgtggntatttgattattnttgtattaatttcttttataataaactcacccatcgcaattttgtaccatgtgggtggtacctgtgatgatcacaaacctttgttcgtgggagcataatgacaacagtagagtacgagaagtgagattcttttgtgaagtcgccgagccgacgtgatgacgttgggattattttgggagagagttgaattttgttaatcaactcctccatagctggttccataattctttttgttgaattgaggatgtaaatcacanacttaattatatatatgaacaaatttactttccattatgtgaatgatgtgtactaagttactatgcctatatatatatgtgcgtgtgtgtgtgcgtgtattcattaagtaa

SEQ ID NO: 172694 - DNA, 262 bp, Glycine max
tgactcccctcttgcttttgttcactcaattcgcacaaataaatgtgatttgaaccgcttgaaattaattgtgcattttaccataagaagaacatacgtcatctcgaaaaaacatatattagtgataatcaaagaatatggtgattatcatcagtcagttaatagcggattttataattttaaaaaacggaactttttatttttctatattctttaccccttattttatgcatgcgctggaactttctaaatttaatctcca

SEQ ID NO: 172695 - DNA, 433 bp, Glycine max
  unsure (1)..(433): unsure at all n locations
agctcgttaccatcaaacttattattcctataatataccccctgaacaactgtttcaataacaagaaaattatcagtattacaagcttataacaaatcgaaaaggggcaaggacactgaacaattttcccacttctgagaatgtttgatcaaagaaagcaccaataactagttccacgcataanacatcaattttgtcctgaaaattagtcctgaatttggcaccacccatcagtttggaccttgatgttttcgaaaagcaaaatccatttgatccccaaaaattactgtcaatttggtcttaccattatcaaatcagtcaattagtccttgaatttgacaatcattagtcaatatgctcnctaaggtaggaaccanattgttaattattgcaatactaaaaactaaatttttgtatgtcaaagtaaaatgat

SEQ ID NO: 172696 - DNA, 418 bp, Glycine max
  unsure (1)..(418): unsure at all n locations
ccggaccttaagtcaccgcagctgcagctcaaagaggtttataagtttactgcttnctagccgagattntcacttttttacaaattttcactcacacatccaaatgcatcaacattgcctttatggagctaatttatgttctgggagaaaaatttttttgtacaagctaaaagcttggaagcttaaactttaacttgatgggagtggtggaaatatatagttcaatacctcatgatttctaagtatttaggttagacgcttatagggaatatcatattatctttcgattttaaaacgagaaaatagcaatcctctattttatgtataattaatggaattattctatatcaacacacattctgtgtgtactctgatacacagtatcaggcaactatacccttttattctctctcattta

SEQ ID NO: 172697 - DNA, 342 bp, Glycine max
tcattcaagaggaatttcaggatgaagaaagcaagatgtctagccaaagcaaagatctcgagataagaattaagatagactcttagaaaagtttttgaaaagcacaaataattggccatgtaagtttctatcttaacaataatttttccaagcattttactctctgggtatcgattaccagaaggttgttatcgattaccaaaagcccaaacatttctgaacaaggtttctcaaaggtgtaatcaattaccatggcgttgtaatcgattaccaatgcttataacggtcataaatattttgagaaccttgtaatcgattacacaaaacatgtaatcgatacca

SEQ ID NO: 172698 - DNA, 310 bp, Glycine max
  unsure (1)..(310): unsure at all n locations
agctttgagccaattcaaacgacagtaactttttactcggatgtctgatngagtcccgtaatatatcgagaccgtcgaaattgaatgttgaagctctaagccaattcaaacgacaataacgttttactcggatgtctgattgagtcccgtcatattccgagacgctcgaaattgaatgttgaatctccgagccaattcaaacaacaataactttttacttggatgtctgattggagtccgcaatatatcgagaccctcgaaattgaatgttgaaactctggtcaatatcaacgacaaaaacttttactcg

SEQ ID NO: 172699 - DNA, 444 bp, Glycine max
  unsure (1)..(444): unsure at all n locations
agcttcttttcaacctatggcagagctttaactcttctttcaaaatcatgccttcaactcgcgactgatccctttcggctcttcggagcttaagctcgttgttgctgccccataaagctcctcggaacttgntctgactgtgttcttccttttgggccctcttggtttctcgttctaaggcttcggtggtggccatattgacgtctcttagttcatcgtactcttttcgaactttgatggccattaactcgaacttctctttgactactcgggctctttcaagctccacctttaaggcttgtacttcctcactatcttccggagctttagcctcttactctcttgcnagcctttgatttgggagccaattcaacccttatgtttagactctcagccacttatgatagccaccgatgaccccattactgcttccnctaagctctt

SEQ ID NO: 172700 - DNA, 271 bp, Glycine max
  unsure (1)..(271): unsure at all n locations
ttatgactgaanatgttagtcagttcgttagattgatggtgaaggaatgcatcgaccggatcctggtgagagtgtaatccttaaattttgagagaaacgactatcatttagtactgatttttgcgtgaatctctgaagtatggactgaatgcatgaaattgaggatgataaaggccatgtttgattgtgatagccatttatccaaaagctgaccatgtgcttgaatgatttatcccttgcaaccagtttgagtgaatgaatattgatgatg

SEQ ID NO: 172701 - DNA, 360 bp, Glycine max
tttcacttcctgatagctatgcctccatactgcttacaaaaagtcgatagtaaccattatcgtattatacaattgatgaccaacccttacttgaaaacttcaataaatggtccttctaaaggtgctacacaggggaattgaacatggaaatcgtattgaaagaaaggatttaatcaatgcactgatggcattcacgagcaagataccttataaagaaattttgcacccatgtttaataattaccaccctactatggctggtggcctttaaaaaagaaaacaaattgaattgttgcaatccaaagtccaaaccatatccacggaatccaaaaaaaataaattagaaatttttacctaataa

SEQ ID NO: 172702 - DNA, 423 bp, Glycine max
  unsure (1)..(423): unsure at all n locations
tcaagcttgcgccaaaatcctaactcaccataatccttgactcgggatgagaatttccatcctcaccctcggaagaaaacaaaaaagaaaaaagttcccaatcaaagatcggaagaaaacaaaagaaaaaagttcccggtcaaagatcggaagaaaacaaagggaaaaagaaaatccccaatcaaagatcggaagaaaatgaaaaaaattatatagaagggtcttcgaactagacaaatatccaaacaatacagaatagccacaaccaaataaggaaagaaaggaaaccacaacttgaagtggtcctctccctctggttgccgaccaaaaccctgtgcactgccaactttctcgccccgcacttaaacaaaacagaanaggaaaaagggccaaacacttagagtcaaattcccttcaaaacat

SEQ ID NO: 172703 - DNA, 409 bp, Glycine max
agcttagagaggaagcatcaatggttgattatgaatgatagagagggggggggggcatgaaattgaaggagaaaaaagagggagagaagtcaaactttgctgtgtgtctcacaagtttcacattcatcaaagttgtgacaagtgttacatatgtttctatttatagcctaggtcactaactaaatgaaattcacaaaagctaatttcattttcatttcatgtgaatctaacaggaatattataaggataggccaaaggcatcttaccatattccaagaatatacgaaaggcatcttattatattccctttaaatgccacaagaatggaaggtgtgactctccccatgggaaatgaataagccaaaagaatattctaaaggaatattccaagaatatgccaaaagaatct

SEQ ID NO: 172704 - DNA, 311 bp, Glycine max
agcttttgtgtaccactctctgagtgtttataatacattttatatcatgcatctattgtttgtgaaagttaaaagtggctttgtgacaaaaaatatatgggtcttaatctcaaagaatgattaagggtagtgtcaagaatggtctaaagtgtactcgttgtaactagaagtggcatagaaaatacttggttgtaatcaaagatttgattagtggaacccttcaagttttgaaggagaacataatgcagcccaagagttggggtgaaccaatataaaacctctatattttctttattggttctatataacta

SEQ ID NO: 172705 - DNA, 323 bp, Glycine max
  unsure (1)..(323): unsure at all n locations
agcttgccttgccacttgatatatangttttgactcacggncactatgaatgacatattccttgggataaaggtagtgttgccatgttttcaaagcccgtactaaagcatacaactccttatcataagctgaatagttaagggtaagaccacttagacttttactaaaataagcaattggatggccttcttgcatcaacacagccccaatcccaacatttgaagcatcacactcaatttcaaaagatttttgaaagtttggcaacgcaagtatgggtgcattagttagcattgtcttaacaacattgaaagcttcttcttgtt

SEQ ID NO: 172706 - DNA, 346 bp, Glycine max
agcttggagaggatgcttcaatgtgggttatgaaagagagagagaaagagagaggggggagcactaaattgaaggaagaaaaagggagagaagttgaactttgagttgtgtctcacaagactctcattcatcaaagttaccacaagtgttacacatgcttctatttatagactaggtagcttccttgagaaactttcttgagaaaacttccttgagaaacttctttgagaaaacttccttgagaagctagagcttatctacacacaaccctctaataactaagctcacctccttgaaaagcttccttgagaagattcctaaagaagctagagcttagctacacaca

SEQ ID NO: 172707 - DNA, 337 bp, Glycine max
ggttttgaaagtggaaaggcttgaacattgggaacatgctgtgagagttctacttgaatttggctgccccatgaagggtactttgcacctacgtagcattgaaaataatatacaatggactgtacatatgtgtataaatataagtagcatggaaaacacctttcaatggtgtgtatatatgtgaatatatggcataaaattccttgcgaggtgtgaatgaatttcaaataaatgtctttcaacatatgcatatttgaagaaaggttgcataagagccttttaaatagtactcatgtaaaaaagggctaggaccttactaaatgaaatttgatggcat

SEQ ID NO: 172708 - DNA, 360 bp, Glycine max
agatcctcgagacgttatattatgggccaatctttcagaaaagactttcaagaagtttttgaagatttctctagatgagaactataacctgcatcctttcgagttcaaccattcccacttctgcaccgtggggtttgttacctggtgggagaaatattatttgagccgttcagttggagacactactatcatgatctccagacttgagagtggctttacacaaccaacggtcgagaatatccgctcaaaccttcaagctcgaggtattaaattacttttgacttttcaaaatgatatgtatttttgccctttctaatattcttatttaggcaaaacattcataacaaagaaaagcacccg

SEQ ID NO: 172709 - DNA, 437 bp, Glycine max
  unsure (1)..(437): unsure at all n locations
catgagttttatagatatggtttatttatttggttntaattaaagactacatgtgtgtgttagttactgtgtgcaatattgtattgacagtgtaaaagtctggtgttactcatttaataaaaatgtcattgttgtattcctaagtaaattcaactgatatttggatgcagtaatgcttatcagccatcaggtttcagttttatgttgaatgtatgtatacttcatgcaatgtttatatttagagtcttaagaagatgtggcgtaagtcaagtttagtgtgactttgtattaaatcctttcttgtggttaaatggtatgacagtgtaatggtgcaacctttaattttgagtcatgataaacaactactgacgctattatctttaacacatcttcatttgcatatgtgatattttgaacatgacaagcttcatgtaacc

SEQ ID NO: 172710 - DNA, 425 bp, Glycine max
  unsure (1)..(425): unsure at all n locations
agctatgtccttgtcaaactctgcttttattattagaagaaccattctcttttaaccatgaagagcttttttagcaacatcatttgctaatctcatgagatcttcattctccattatatctctcaccatcttttctacaaagaatctatcacacgacccattcatattgagaccaatcttccactgttcactcacacacctactgttaaccgtttgatcagcaatcgacggccaacaaagcataggcactccttccgcaatagattccaatgtagagttccatccacaatgggttaaaaaccctcccacagcaggatgggccaaaacctcttcttgaggtgccaatttaccaaagaaccccttttttagtccctatctcaagctctatatgtacattnnttttggattattaagtccttttggag

SEQ ID NO: 172711 - DNA, 341 bp, Glycine max
  unsure (1)..(341): unsure at all n locations
gaacataaacgcccgagcagcagcttacatgggagaaacttttttggctacantccaaaggaagtcatatactggtctactctgctacacacacctctgctcaactatgaaaagaacccaactccacatagcatgcagcgaaacaaactaagatacccaatttcacaaaagagttgcctgataatcatcaagtcaagcaaactggtcaaagcttcaaaatagcaaccaccaacctcaacaaaccagcacgggggtgacatcaccaatcctaaaacctggctagaacatatctaaaattatatccaaagaaaacatctgagaaatagaatctggacgggccg

SEQ ID NO: 172712 - DNA, 217 bp, Glycine max
atcaaaagaatcctcttctggatatttgaatacttgacagggagaatggagacacaacacaatgcttgcggcaacttcttcgatcttttggaaaaaggagaacagatacacaaaaagaattcacgccgttccttcctgtagaattctttttggcaaaaggagaagaagataaaacaatgaataccacaagttttgaagggttaaaaaacctaaaaac

SEQ ID NO: 172713 - DNA, 429 bp, Glycine max
  unsure (1)..(429): unsure at all n locations
agcttgcttgagaagcttctatgtatgtttgtatctttgagcttcaataaggtccttcaatggtgcttttcagccatggagtagcagcggaagataaaggagaaaaggtgcgatgagaccccatccattagagaataagccatgatatgagaagtttcaccaccatgagagtgtcttggataagaagctnggagaggaagcttcaatggaggaagagaatgaaagagagaggagggggggggggcatgggaatctaaggaaattaaggagagaagttgaactttgaagtgtgtctcacaagttctctcattcataaaagttataacaagtgttacacatgtttctattatagcctagcaatgggaagcttcttgagaactagaggggctaactcaccctctccatagcaagctccaccctgccaaatac

SEQ ID NO: 172714 - DNA, 376 bp, Glycine max
agcttctagaggaagcctcttaatgtattctttagagaaaactacatgaagttgcctcggtaaaaacgctgtccagccttcgttaaccgttggatcttctctaaatttggtttgaaacttcacaagacaattgttcatgatctgaccgctgggatctttcagaagacgtctggagtatgctagaagcttccgttcccaagagcatcttttatttaagcattctagcctttgctttcgtgtagcttaggaaaaacgtcatttgatattctttctttcttccaaagccatttctaaagttccaagaactttctccatcacccacagcctccattagccaccacaaaccatcattggtctccattgaaaactcacaccg

SEQ ID NO: 172715 - DNA, 414 bp, Glycine max
  unsure (1)..(414): unsure at all n locations
gcttaaatattttaatcgtaagttgttcttttcttctctaagggccaataatgctaaaggtggactcggggatctcccgcctcaccgagagagagaagcaagagactggcggagcaaaatttccaaaataagaaagacctgtatgtataaaatactttaattgggcgaatggattgaatatctagtccaaaaactatatatggatgaatttgaatagatttattaaatgaatcatggatgaattgaattctttaaataaaccttggtaatctaaatacaattatagattatttaatacatttattccatttgttattataatgaatgaatttaagacaatgttcaacccactcaatataccgccagttaggtaagttaccctatntatttgaattcaaccattcacttattggg

SEQ ID NO: 172716 - DNA, 336 bp, Glycine max
  unsure (1)..(336): unsure at all n locations
atcatcaaaaggggagaatgtgaatgttgtatacatgattttgatgatgtcaaagaagaaccaaacaaggctacttcaaatgataagcatttgcttcaagaataattcaagattgcttcaacaaacaaagccttgtttcaagattcactaaagaccaagccttgccttaaaacanagtgctttcaagacatgcaagactctggtaatcgattaccaggaagtgttatcgattaccagaagacagggttgagaaatagctgttgaaaaaggttttgaatttgaattttcaacattgtatcgattaccagcaacggaactttggaaattcaaaatcaa

SEQ ID NO: 172717 - DNA, 360 bp, Glycine max
agcttgtgaagagagaaaagaatagactcttttgtaataacaactaggttctatgggtctacaaaaatgttagaggacaactcataatagtgtgagagaaggttagagaccacctacacagtgaagaaacataaatcacatcctctccaccctccataatccttctatgtgctaaaaggaagaaaatggagtgaagtacaaccaaagcatcattgaatatccaaccaattagtgttggtttgttggataaatctctcagacacattatcattgtatgtaatctgattgtattccacaatagccatgtgggttatgtttagatgtgaaagaagtgatagggagaacccatgctatgtgggt

SEQ ID NO: 172718 - DNA, 385 bp, Glycine max
  unsure (1)..(385): unsure at all n locations
ttgaaggtnttggctntcacagccaatggtacatacatatcccaccctggccgcaacataatttaaatggagtaaatgactccaagttgttatgtaaagagtgaagggattaactattaaatatacattgtgaaagacaaaaatgtcatgtgttcaatgacaatgttattggcatttatataatatgcatatgtatgtatataaaatgattctaaaaactacctattagtctattacttaagcttggtacttaagattagattctagtgattctgggtatttaagctatctggaatctatataatacatgggatgtaagcctgaatcctaatgaatcatgatattttaagcatgaacattatggctcatgatatgtgaggagatg

SEQ ID NO: 172719 - DNA, 374 bp, Glycine max
aagcacctgagctgcagcttgagcaattaaagagacaataatttttctcggatgtccgaatgagtccgaagatatcgaacgctcgtaattgaacaccgaagccttgagaaaattcttacgacaattactcttcactcggatgtccgattgtgtcccgtatgatatcgaaacgctcgtaatctaaaacagaagctctaagcaaattcaaacgacaataactcttaattcggatgtccgagtgaaaccccgtatatatcaagacgctcgtatttgaaattgaagctcttagcaattccaacgacaataacttttgaatcagatgttccgatgtagacaatcagatattgagacgctcgtaattggaaactgaagct

SEQ ID NO: 172720 - DNA, 294 bp, Glycine max
  unsure (1)..(294): unsure at all n locations
agctggccacccagctcgcccaggcgagctatgttgcttcctccagaaggcggngccttctggaggaacttcctggaaagcccatgtgggcctggttgctatttgcacccctgtttactaaatacaccccctacctttttttgctgattctttttttgtaacgctacgtaactttatgaattccgaaacgatacttgttttccttccgtaatgttacggaaccttacggattacataatcatcccctctttggctttcagaatgttacgaaacctcacggattatgtaacaatg

SEQ ID NO: 172721 - DNA, 410 bp, Glycine max
agctctagccaaatggacttaccttgaattaattcctttgatagcccttttgagccttgtttccctttccttgttttgaagctcactacaagccttaagtgaaaaaccatgatattaccatatccttaaggaattttggagctttggaattgttttgggaataagtgtggggggtttttgtttcattggacaacttgttttgttggctatgcttcatgatgtattttgggccatacttgatgtacattgtatatttgttaaatgttggacatgctgaatgaaatgttgtttctcaaacgccaaagagtaaataaaaaaattctaaaaagaaaaagaaaagcaataaagttgagtgaataagatcttaaatggcacaagaatgatgaaactcttgggtctactcttcatgg

SEQ ID NO: 172722 - DNA, 328 bp, Glycine max
  unsure (1)..(328): unsure at all n locations
agcttaagtnaatatctgtggtggatttcactcttatcaanattggcgtgctcaatgagactagagtaagtgaattgataggtcaattccaagatagagtcgagttgcaccgacttatataattatgctctaatatgattatgagagatatgaagccacaatataagaaaacatgttgcaaaaagataaatgaaggaatgactttaggcttgctaatgttgtttatgccgacaacatagtccattcgacaaagcttacgtccatttctgtggctgtgtctactattgataccacaatggtggcaacagatacacctgttgtaatgact

SEQ ID NO: 172723 - DNA, 400 bp, Glycine max
gttctctttgactattcaacccaatcaagaaattcgttgaagagcagaacgccctctttaatctgacgactttataagaaagttgttttgctataggagatcacccaaggcaacactattttgatgtgatcaacaagcaactttgatataatattcacaatattgcctatcatagcaatcaatcaaaaatttgataaagattgaggggaatcaaccttccgaatcaatgcgatttatgacgaggtgaaagcccttcggaattttgcattgtgatgatattcttgaatagtccaacacacattagagccattccctcccactagacttaagaaggcatattatcccatatgcccaacatttatcaccacactcgacattattatattactctacattagct

SEQ ID NO: 172724 - DNA, 418 bp, Glycine max
gcttctccttcttatacaagccgaggctcttccgtaacgctctcgagacgtttccgtgggtgatttggcaaagattttccgccgttcttcatcgatcttcggtcttcaaccgggaagttctcgaaatcgaaattttcaattcattctatgtacccttaggggtcctcatttgtttcgcgtgtttttatttttatttacttttcgtacccccttttgacgtgctttagtcatttatttaaatcattgtttcgcctaatcaaaaataaaaaaaatttccaccgatcattcgtattggaacaccttttaaattctgaaaaaagaaatcctaacgttcggtcatgccgtaaccacggttaaaaccaaaaaaaggcaaaatataatattataataaaaaaatatcttctagtaaataataaaa

SEQ ID NO: 172725 - DNA, 316 bp, Glycine max
  unsure (1)..(316): unsure at all n locations
agcttcanaatacggttacggcttgtgttttgtgggtgtgggtgtttgacctaatgcttgtggttggtggtgtttggtgtgggcttggccgttggtggtggttttgatgtaagttttaggccgcgtgagtgagtgggttactgtgtttgcggtgttggtggttcacggaggctgtgttggctcggccgatggctgggctcggccgatggtggttttcggtggctgtgttggctcggccgatggctgggctcggccgatggtggtggttctcggaggaggaaaggggctgagtggtggcttatggtggctcttggct

SEQ ID NO: 172726 - DNA, 425 bp, Glycine max
  unsure (1)..(425): unsure at all n locations
ttaagtcacctgggctgcagcttgcagggttgattctatatgtgttattangactgcacctcaatgggtcaaactcctacaaattgatgaagatgctttgaggtcaacttgaaaaatcattttgggaagcccaatttatggtgatgaattttggcggactattaatattgggctgattaaataataattaagcccaacatactcataaattttagccaacttttacgatgagatttatttgcattttaattgtattttgggcctattattggactttgattagctgtcacgaccttttattgttattataaagtcttttaagtgttagattaattatgtggagcttttctttgttcttggaataataactggtaatgttgaatctaccgtatgtcacaccagtagggtaagttaatttgataact

SEQ ID NO: 172727 - DNA, 132 bp, Glycine max
  unsure (1)..(132): unsure at all n locations
gggggggaaanaaaaaaaaanagggagggggggagaagaaaggggaagaaaaaaaaaaaaggaggggaagagaaaaaaaggaggggggggaaaaagagagggagagggggagaaagaaaggaggggggaaga

SEQ ID NO: 172728 - DNA, 329 bp, Glycine max
  unsure (1)..(329): unsure at all n locations
agctngaggttattcctcaagtatttgatgttgtggatgagggtttanttcgtaagagcttaaatccttgtgctttgttggtgcccaaaataagtattatgagacaccaaatccctaaaatagatggtatgatgaatgtgttgagtgatgcaaccctcttttgtaaaatcatccatgcattcaacatcttcataattcgtatacatagggactcattaggtaggtttgttcttatttttgggctaggtgcccatatgggacgccttaggtttgtcgtactttttggtaggagtaatcaacatgaaaatacagaaaaaaggtatgtttta

SEQ ID NO: 172729 - DNA, 429 bp, Glycine max
agctttgcataccccaaggatccattatgaaattacttgtgaaagagagccatgagggtgggctcatgggccactttgggatagacaagacccttgtcttactcacagaaaagttttattggccccatatgaagaaagatgtccatatgcattgcattaggtgtgtggcttgtttacaagccaagtctagggtgatgcctcatgggctatacacaccgttacccatcccctttgcaccttgggtagacattagtgtggacttttaacatttctgatttaattccttttgcaagtggagttgatattgaggaagaggaactaatagatatgtggtcaaatccttttcaggggaaggggatgatgcaatctccctttgaagggacatcactatatccttatcaaaagcttcaaaagatgggcttatcttct

SEQ ID NO: 172730 - DNA, 316 bp, Glycine max
agcttgaagtgagaaagtgtggaagagtcattcttcctacttttatttgttgaccacagagtggtacctggagatatgtcgcgggggtcaggagaccttggggacgtcaggtggggtgctattgcccaaaaccaagcttgatcaatcctgacccaacccgggcatagtcagtcagtgagaacctgtgacatacctaaacaggcgagctcctggcagtcaaccaataaaagaacaaagaccataaagcaaagaggcttgtgtggtggctggccagctatggatcttgagtgatatctggaatatggcctctggtaat

SEQ ID NO: 172731 - DNA, 379 bp, Glycine max
aaaccaaccacaatagaataattatgaccttttaagccataaatacaatccaggttggaggaatcatccaaatcttaaatggacaagtcctccacaacaacaacaacctgtccctccttttcaaaatgctactggtccaagcaagtcatatgttcctcctctaatacagcaacatcagtcacaacaaagataccaagcaactaaggctccttctcaaccttccttataagagttagtgaggcaaatgaccatccagaatatgcatatttagcaagagacaagagcctccattcagagtctgacaaatcagatggggcatatggctactcagttggaccaagctcagtcccaaaaatctgacaaatttccttcacaaact

SEQ ID NO: 172732 - DNA, 261 bp, Glycine max
caccgcctgcatgcgatacttcctgtatattatggaggaacccatacattaaccattcttgaacagactcttctaaaattcagcactgctgaactaatagaaaatatatatttatccttctgatattctgactgtgtacattaaaaattttaatatctaacgcgctaaatacgatcttcaagtttgacccattcataatcgggtccttttaaagaatgcttgatggaaggttgaggcactccaacatgtatcctcacaact

SEQ ID NO: 172733 - DNA, 414 bp, Glycine max
  unsure (1)..(414): unsure at all n locations
gttcgaggtacttacccgttgttgatctatgaacgatgaagaacgtcgaagaacggtcgataccttctcgaaaatccttcacggaaaacgttttggaaacgtttcggaagcgcctccgcttatatttttttcacggaaacaatttttctaagataattctaaagagagagaagtgcctaaggggctgaacccnttttcttctcacttcctcccctatttatagcaaaataggggagatggttgccgcccagctcgcccaggcgagccatgttgcttcctccagaagcaacagacttttggaggaatctactggcccaagtgggcctggttgctttttgcacctcattttactaagtacacacctgctcttttggtgatattttttcgaaagtacgtaactataatttctaacat

SEQ ID NO: 172734 - DNA, 327 bp, Glycine max
  unsure (1)..(327): unsure at all n locations
cctcattgtctctcacagtctttattatttggagccaatccaatccttgtgttcggactctcagccacttatgatagccgccgatgatcccattactgcttcccctaagctctctgtcctttcttcacgccgcatcccatgccttgcgaactccttggagtaccctcgcgttgtggtcactgaaaccccgtgcaatgaaaggcgtgatgctttcgtctgatggcactcctctcatggggtagccaagctgtcttatggcgaggacgggattataattaatacaaccccttgttccatcaagggaacattnggacatccttcgtatga

SEQ ID NO: 172735 - DNA, 336 bp, Glycine max
  unsure (1)..(336): unsure at all n locations
catcaaaaatggttacaagaagtacctcccaattaattaatgtactccatgaagatagtgaccaaaagtcagaaaatgcagctgagataggttcggtatcagaaaaagacataaatccaataaattccaaacactggaaaacaccctccaagttatattatcaaagaccaactgcccctgaccttctactagaagaaagaggtgaggataattttaaaagctttagtgcaaataacatttataagtggaacatagatgcccaaatggagtacaatataatgaatacactccaacacatgaccatggtagctacaacctaccanatgtcccatgagt

SEQ ID NO: 172736 - DNA, 390 bp, Glycine max
  unsure (1)..(390): unsure at all n locations
cttgatccattgttgatgagtaaccttgcgacaacatggtctatacatctcaccaacacaagtagatccttgttgtgtcctctcccctccacgggaatctcttctttcgcaaacgcgatataactattggtggttatatgattaaagaggccttcgaaaccctccaccgaaatatcatgcgctacatgggcattgttaatgacctttataacagcccacgatgaagctcaaaatttatgagcagttcagcaaagagatccttgctggagttttattcggttgctcgactactntaaactcgctttgttggatagcccaatgaactcatgagcctctccaaagtcaccgtcttccttgaagacccctttcttttagccactttaccaccga

SEQ ID NO: 172737 - DNA, 311 bp, Glycine max
  unsure (1)..(311): unsure at all n locations
agctntacaacagagtttagtaatgaaccactaacctagaattaaaataacttaatgccattaacctagggaattaaaaaaaacttaatggctgagtgtaactgaaattgtggcaaccaaaagtcacccccaacagccaacaagtcagccaccatttggtctcccaaaaggctgatgcctaggttgccaattgggcccttattacaacttgaactaaacctaactaaagcccttttagttgattaacccaaaacatatntttggtcagccaactttacaaggattgggtcattatttagacaaactaaaca

SEQ ID NO: 172738 - DNA, 321 bp, Glycine max
  unsure (1)..(321): unsure at all n locations
cggaccttaagtcacctcggctgcagcttcaccttnggccatcattttgtctcatatctcgaaaggagggcattcttcgggtcgtgaagtgcaaggctaccagtgggacttctaaaattcaggtttgggtggacatctttctctcttaaatttcacgggtatggggctttgggagatatgatgggtagtcttgctagttctctgcttcatgataattatctgtgaaggaacttgttgaaagctcgttgaaattgttatgtttggatgagttacacatacccattcctgtttagggtttttgtgatgatgtttgtgatgttt

SEQ ID NO: 172739 - DNA, 412 bp, Glycine max
  unsure (1)..(412): unsure at all n locations
tcgctgggcttagcgcactgatctcgcgcttagcgcgcggccttgatattgatgcactggcaaaatcttttggcgcgctaagcgcacaacgcacttgaagtgcgcttggatgccgtgctcaacccaaatggtgagctgagcgcaactacccattttagcacttcaagatttagcctcatntaacctggaaattaacacattacatcatttaaatccaatggaaagtattctagagacaaacttaacaataaaacaagatttatttacaaattaccacaaaataaccataaattgtggaactatacaagatttgggaaaaattttctacacaaaagtaggcgtataagatgactaatagtcatgcgcaccctctttcctatctagagacaatcaagtccgatggcacgccgaa

SEQ ID NO: 172740 - DNA, 367 bp, Glycine max
  unsure (1)..(367): unsure at all n locations
agctttgcagatctggtatttgcgggtttttgattgaaangggcctaagaaggggcaagttcgattacgccacttcaacaagtgctggcaataggaggatcggtacaggcggagctaagaataaaaagggagatgcccatgccgtaaccacagctcccacatgaccaaagtcccaacaaacccctcacaaccccacttaccaatatcccccgccccagtacagttactcaaccaatatcggatctcctcccagtctgacacccatccaacagagaatgcctactcaaccacaaaggcttcccccacataatccattttctgcacagcctcgacccaactgaaatcccaccctgacacaaacacaaac

SEQ ID NO: 172741 - DNA, 364 bp, Glycine max
acgcaaatgatccaaattttcatttccatttattcttttgatgcaaataaagtattataggaaaagaaaaatctattatgaaagtagttctgttgctctacattcattattgctaatattttgcagcaatgccatcaagtttacccatgaaggcagagttggaatatacctttacgttgtgccgaagcctaattttgcaaaagcagaagacattcgaatgatgactcccaaccaatcaactatgtcagtgaatggtgtaaaagaagaaaaacatctctctaaaccttcaagtggcaatgatggatatcttcttgatggttgccaaaacctgacgaccatcccagccaaaccatgcatttattga

SEQ ID NO: 172742 - DNA, 394 bp, Glycine max
  unsure (1)..(394): unsure at all n locations
gaccaagcgacgcagctgcagctcaactcagagtacacaggtatattcgnattttcttcatgagaaagcaaggcaaaacgaccggattgacgatgaaacgctgcaacttatgcgctttgatcactaattctacttgttgtcgccagtaaaactgagtgataaagtgtttgagaaggtgagacagtgtttgagaagatgaaaaaattgaaagaatagactgatattattactagactaaaaaattaatctgagtcggctacaaagagaggtatatatagacctctgaacctctacactaccaggaatagaatctaaccaactaacaataaaggctaactgaatgtactaacaaactaactgtactaactaacaggctaactgaataaataatttg

SEQ ID NO: 172743 - DNA, 350 bp, Glycine max
tgttggagaagatcaacgacaatgcctacaagattgacttgcctagtgagtataatgtaagtgccactttcaatgtgtctgaactatctctttttgatctctttttgatgcaaatggaggagccttggatttgaggacaaatccttttcaagaaggagggagtgatgaggacataaccaagggcaaggaccatgaagcacttgaaggtcccatgaccagaggcagacttaaacaagcccaacacgtcatagagacaaggctggtcatttgtatagttgccattgatgatgattgaaggcccaagtggagaaagatgaaggcccaaaggcaaaggcactaccaagactact

SEQ ID NO: 172744 - DNA, 300 bp, Glycine max
ttaaagttgcggtttctaattctagatttaaaatgctcaaattgtgatggttagaatgttgaaccactcacaagaaaatatgaatatattcattgatttataaaagatcactctttttcttttccttgttgaataactatatgatgatatatctgcataaattcattagctaaagaccattctgcttcattttttatttatttcagatgatacccgtggcagcaaatgatgttgctttctcagcccatgctgttcttgtgacagcaatttccttgttccagaatgcaatctatgatgtta

SEQ ID NO: 172745 - DNA, 379 bp, Glycine max
  unsure (1)..(379): unsure at all n locations
gcttgcataccccaggatccattatgataatacttgtgaaagagagccatgagggtgggctcatgggccactttgggatagacaagacccttgtcttactcaaagaaaagttttattggccccatatgaagaaagatgtccataagcattgcactaggtgtgtggcttgtttacaagccaagtctagggtgatgcctcatgggctatacacacccttacccatcccatctgcaccttgggtagacattagtatggactttgtccttgggcttcctagaacccaaagaggtgtagactctatctttgtggtggtggataggtttagcaagatggcacactntataccatgccacaaggtggatgatgcttcccacatctc

SEQ ID NO: 172746 - DNA, 319 bp, Glycine max
  unsure (1)..(319): unsure at all n locations
agctngaagaggaagccatcttgctgagctttggatgagattttgagagattgtgaggtttctagaggtggaggagacatccccactacttgtatttcttctatctttcatcttctcttctcanttgtgtaaaggaagcttccctactatggagagctaaatcctcagttggttcttcctatggggtacttgatgtaaatactttcatatctatttaatgatgttttatgtgttcactatgctatcagtacttaattctagtgtgcctttgccttgatcatgcacttgcatgcttagttagggtcactcaacattggga

SEQ ID NO: 172747 - DNA, 397 bp, Glycine max
ttttttattatctaggaaacgtatcaaattgtgaaacaaaacctgttgtccatcacaagcccagatctatagaactatggcctgctgataaaaaaacaaacaaaggtggaggggagtaataacatataagtcaatgttatataactcatggggaggatatcatcccctgccaccagatggcaaatgttggtgttggaatatataggtagaaagggtgccaagcacagaaggcattaaatttgctgtcagctcgaatagtttcttttaaaaccctggccgacttcccttatttattcataatgggaagtggtaatatcttgacttccttgtattctttgagaagcccaatagtaacaaccaatttttgtaaaataattaaaagaatttgattaaaata

SEQ ID NO: 172748 - DNA, 277 bp, Glycine max
tccattcacagatatgtcaaattgattttgcaagttatttcccatcaaatcaaggataatgtgcataatcatcatggatcaataggactttttaaggttggacttgtacgaaatattggctttgggtgctctggtcttttttttttttggtgtgagttggagagcacgcataaagatttggttaataacttaaacgggcaatcacttcctatcccctcatgtcttgaccatgttactatcattccccttcctttttactctttagaataactctata

SEQ ID NO: 172749 - DNA, 338 bp, Glycine max
  unsure (1)..(338): unsure at all n locations
atcatcttncttgacaactccgngaaaaagattgccgtccatatgaagagataacaatttagagagtgatcgaagactttcaaatggatttccaatgaatttattcatagagagatcgagatatcttaatgatgaaagttttccaaatgatctaggaagagcaccaccaattgagttgttggaaaaaagtaacgtgccaatatttttaaatgccccaatatgatctgtcagattgcctgaaagtcgtgaactctgaactgcaaagtgtgtgagttcatgggaaatacagcgagcaagaatttctaaaagtcattaacctgttggttgagcttgagata

SEQ ID NO: 172750 - DNA, 467 bp, Glycine max
  unsure (1)..(467): unsure at all n locations
cccatcacatgtgggactaagtggctgtcgggcgatggtgcanaacaagttttccacatccacaaatcacgtataaacccaccatcccctgttgcccacctccaactgagctcacgtactcccacgtagcccatatcctcgtttctctcaacaccgggtccccatcaattctcccaagcttccccaacatcctagtaattcaacatccaaattatcacaaactaacaaaccaagcaaaacagggcaaaggcagaaaactctgcccaaaactcaaaccaaaatcacagctttttctcacttaaagaccccagtaacatttcctttgttccaattggttaaccgttggatcgactcgaaactttttctggaagtctctagtacataagtctacattttgaccgtngggatctactagcanacatncagaactcattctgtactactctttccacaaccagcaaatacat

SEQ ID NO: 172751 - DNA, 448 bp, Glycine max
  unsure (1)..(448): unsure at all n locations
ctaagcttaagaaacagatggccttagcaaactccttatttctagaagggaattctatctatagacctccaatctttaatggagagggttaccattactggaaaacccgaatgcaaatntttattgaggcaatagacctaaatatttgggaagccatagaaatagggccttgtatacccaccacagtagaaagaattacaatagatggcagttcatcaagtgaaagtataactatagaaaaacctagagatagatggtctgatgaggatagaaaatgagtacaatacaatttaaaagccaaaaacataataacatctgccctgagaatggatgaatatttcanggtttcaaattgtacgagtgctaacgaaatgtgggacactcttcgataacacatgaaggaactacagatgtttaaagatctangatanatgcactaactcatgag

SEQ ID NO: 172752 - DNA, 296 bp, Glycine max
tttgatgatgaccaaaaaccccagagaatggtttccagaatgggtccaccagttgaaaatcaagaataatttcaagtttcctgggaagaaatccagaagattagagaatccagagaaggttgatttccagattccagagaagatgaattccagaatccagaaaagaaatccagaagaccttcccagggaagtattggaaagatttttcaaaaaacaaacctagcacaattttttttttcaaaagaattttcttcaaattttctaagttaccagagtttttactatctggtaatcga

SEQ ID NO: 172753 - DNA, 422 bp, Glycine max
gtgacacttcaatctcagctttgaagcggagctaaaaaagacaagagtggtgaaggagaagctgaaggtgccagtcactatggtcaggaaagaatgtgatgagctaaaagatatcaacgtgaccacggttgaagcgttaaaacaggaaacgaaaaaagctcgaaaggaagaatggagcaagaacaagttccaaagggctttgtggggcagcagtaacgagctcaaacttagaaaggctgagattgacaaatcaaggatggaaagcatggtgttagaggataagttaaagatttgtcaaaggtcaaagagaagtttgacagagcagttgagcaaaataaaagagaatatgttgataatcattgatcaatataaggagaaggtgaacctagttgctagtcacaggcagatgctggaagatgaac

SEQ ID NO: 172754 - DNA, 385 bp, Glycine max
  unsure (1)..(385): unsure at all n locations
tgttcacgtatgatgcacaacttatccacttatattctatctttgagataccactcacttgagtgagctacagagtcagactcgattttatatttatttaatttcatctattacatgtcaagatcaattntttaattatcttgtataagaataattattaaatattatatcgataaaggtataaaaaatcttaaaaaaataaatataattgagttataattaaattaccattttatgttaggggatcgaaatagcctaaggttccgtttggtccaactttatttgggcttaaaagctacttatccgtcaaaataagatgaattagaactttgacaaataagtcgaagctgtgtattagctgtctttttatactttagaaaatcct

SEQ ID NO: 172755 - DNA, 217 bp, Glycine max
  unsure (1)..(217): unsure at all n locations
atgctataattgatatatattaagatcgattagtatagtgtgcactataagatgacgggaatgtactcaggaatagcttaatntcttcactntcttgcacaaaataatcctccaattattaacttgattctcaacaaatatacttatatttctattggttctatgggtctaaccctttcactatcccaaaaacatgattgttccatttattgaacta

SEQ ID NO: 172756 - DNA, 284 bp, Glycine max
  unsure (1)..(284): unsure at all n locations
ttctggcaaagaatggaccctattttctacttcaaggaagcaacgaaccacgagtatacaaatatcactcttgtgtaatatgactatctgtaatacactattgctcatgtgtaatcagaagaatcgtataatgctgttaaaaataaaatctgacattctgtccgttaactacaaactaaatttgnattctatagctgagacatagagatctttagctacttatcattctaaagaaacccaccccgctaacggccacccaatgcagaatgttggacggtggaagc

SEQ ID NO: 172757 - DNA, 219 bp, Glycine max
  unsure (1)..(219): unsure at all n locations
tttttgtttggcaatcttaatcgtgcatttgccagtattggaaaagcctttttatgcgggtgaaccttctcagggcttagctattaagcctttaatattcagaaaatccctgagaaataaggaaagcattatgatagagggtcgtaatccataaaactctgaaatattctttagacctatctaaatttggttttctttggtcaggtctagntcatatgg

SEQ ID NO: 172758 - DNA, 436 bp, Glycine max
  unsure (1)..(436): unsure at all n locations
ctcagcttcgcatatgaggagggttctgctgttgaggagatgctcattatcaagttcctgtgtgtaggggacaaatgtgagtatgagagtacagaacttagtgggtaacgaacaaccgccaaagtgtttggtgtagatgaagcatggtctctgtgataatcttggagatatgttggggcttgtttggttcttgtggaacgcctaagatgtggaggagattgctcatttaaaggttcgttggatgaaggtattgatatcgtgggttgtgatgagcaatcttctatttgtgggtcaaggttcttgccggaaaaggaaactggagaaggagctgacatttctgagnttaaatgttgggtttcagagtagtatggaaaatgattctcataaaatgtgacattgcgagacactgtaacattattagaatgcaagtcatata

SEQ ID NO: 172759 - DNA, 493 bp, Glycine max
  unsure (1)..(493): unsure at all n locations
gttgctagcaaccttttctccgcctatggcatcttctaanagtctaagaactcggaaattaacacagttgtaacattggagtagcaagatataagtatcagagtattaaatacaatgagtcagactcataatcaagaaatgatcaaaccagaattcaaataacataatatgtcgacgatcacaaaatatccaagactgaaattttaaagacacaagataaataagcaaagtacttagcataataatgtaaattctaagaaactaagagccaaaatacacggcttagaaaagataaataatcagaatctaaaagctaagaagacggaggaggtggtggaagatcgaaactctgacgaatgtatccgacatcctcttcaagctgtgtaagacgaatgttcataccggcgaagcgtgaatctaacgagtcaaagcggtcaccaacatacgaacgaagaccncgtaattcggagaggacttcattcatgagtgcgga

SEQ ID NO: 172760 - DNA, 377 bp, Glycine max
cgaatgcgcgcgagcatattctcagaatgtttattttgggccactggaacaagatcacgaattcgtgtaccaagatgttcggcgagactgattattgtctgatgaggagctttgagcatactgcatacaatcatgtactcaatcacaatccaatgaacgaccatagtattttatgattgttatgcagcaactcaatgcataagctaattctaagtcgaaagaaacttattacagtctatatcctgattctgtattctcttacacgtgctcatcgaaaaggttatccaaataagacctagataattaccttctacatggacaacggctgggaatgacacgcacgccgagattcagctcacgaactccgctggaggaga

SEQ ID NO: 172761 - DNA, 421 bp, Glycine max
  unsure (1)..(421): unsure at all n locations
agctttaacacgtgtggtatgagggaaatgtgtatggtgtattaacacggaatgatacttgtgtctataaaaaaacaatgcggtgttaatggtgtaacgagtaacctactaggcaaggctgcctaagctttctgcattctaccaaggaacccactaggtattgatggtttccctattcgagcataaggtgccaacatacctaccaaagcaacattaacaactagcccaataagaagatctataagatacaactcaaatttggcccaaaagtctttgcctctcatttgaatttcagcaaaagtagcacaacatgtatcgatgacaatctgcatatcatgtgagagaaaaactatataaacattnttcaaatatccaaaatctttcaattatgccaacaacagtacatgaatgatttcacata

SEQ ID NO: 172762 - DNA, 460 bp, Glycine max
  unsure (1)..(460): unsure at all n locations
ctcagctggtaggaactcaaatagtgcagttttttaagttacattgatctactgggatggggtcgccacatgtgggagnctacttcaacttcactgtgatggtgctttttttaacagttagcatcagtggcttattgtggagtagcaatggtgagttcatccagactttttcaagaagaatgagccactgctcaatccttgaggctaagttgtaagctatcttgtttggaatacgtatggttgttgttgtaggaattaaaaacttggtcatttataatgacagtcttgacgttgttaaattgttgatgataaatcatctcattcttctcttttcaatgagcttgcaaatgaaataactggaggatggatcaagagctgtgagttctatcatgtcaccgttgatgaatacctacctgatttntgctaactggatattttactattgttgattatttatgct

SEQ ID NO: 172763 - DNA, 195 bp, Glycine max
cgacagcttccgctgttcattttcgagcgtctctatatgtgatgcgccttaatctaacttccgtgtgaaaagttatgaccatttgaatttctcaagagcttcctttgttcaattttgagcggctcgatatgtgatttgcctgaatcggacatccgggtcagatgctatgaccatttgaatttctaaagagcttcc

SEQ ID NO: 172764 - DNA, 405 bp, Glycine max
  unsure (1)..(405): unsure at all n locations
tatagaatatataataaaagaacaatgacaatngaagagtctatacatgtttcctttgatgagtctaatgccattcttccaaggaaggattntttagatgatatttcagattccttagaagatacacatattcatggaaataactctaaagaaaaagatgaaggaagcaatgaagattctcaagataatggggctagaggaaataatgaacttccaagagaatggaaagcctcaagagatcatcccctcgacaacattattggtgatatatcaaaaggggtaacaactagacattctcttaaagatttatgcaataatatggcttttgtatctatgattgaacctaanaatataaaagaagccatagtagatgataactggataattaccatgcaagaagaactg

SEQ ID NO: 172765 - DNA, 363 bp, Glycine max
  unsure (1)..(363): unsure at all n locations
agcttgcttctcgttgaaatggttttaaatgcataaggggattattcagtattacggaaacaacccagcaatgtccatgtgtactttggaagaaaggtagcatcttggtgttcaaaaagtcgtgatctttgtttggaaagatttgttccctctctgacttgggaaatgaaagcatgggaaacaactcaagatgaaatgttgattactggtggtttgcatgttgtggtttttaacataatgggtgtgttcaggttgttcaatcattttaaaattgacactttttgaagcttcatgtcttatactatggcaggctatggtgaaatggttatactataagttntaatttgaaatccacaagatgtc

SEQ ID NO: 172766 - DNA, 453 bp, Glycine max
  unsure (1)..(453): unsure at all n locations
ntgcattcattcatggcaggcatgagaattatgatggtattatagctcttccattgaagagctctgctgcataactctctactcttgcttcttttctaagtttccttttgatttcttcatcattaataactatttacctctacaagatcaatcactaaatatacacagtccatactaccttcatccatgagaaaatcctacaactgcattggtttctccagtgctcaattcgacaaattacaacttgtggagtcgattaatgctcactgcattaagtgcgaaaaataagggtgaatttgttgatggatcaattcaaggttatctatagaatcatacacttcatacagatgggaaaaagtgtaacaacatggtgggttcttagcatgtccactcaatctcaccttcgattagacagagcctcatttggatggatgatgcatgagacatatggaa

SEQ ID NO: 172767 - DNA, 482 bp, Glycine max
tagcaaatggacctgggtgttgcccaggttcatcatatcttccgtaatactcatcacctctatcatatctaataatgttgacatttatgtctaattgtccttatacttcattgtagtaaatttctaacgaatccattgcctaagaaatctcgggcagtaagtagacataaccgtaacgtaaataatcatcaataatggtgataaagtatcattcctttccgaaagaactaacatcaaaaggtcaacaaatatcagtatgcacaatttcaagaagctgagtgcttcttgaagctcctttctttgtatgtcttgcttgttttcccttaatacaacccacacaaatatttagatccgtagaatctagataaggaataacttcattctttattaatctctccatactctctctagaaatgtgacctaaacgtctatgtcacaagagagcagatcgttcattcactgatactatgttagtgtcacat

SEQ ID NO: 172768 - DNA, 310 bp, Glycine max
cttatttaaatgattcatggggatatgaactattctcctatgcgcaagcttagaaggatcaacattacttattaaacaagccctgtttgagtgagatgcactttttacattaagcataggtattgccaatatggctaccaaaaaaattaatggttgttgaaatcaatttggttattgtgcaacactctaggttaaaaacgaatttaaaacccttatcacatagttggcttatgcttaacaagttatgtttcagcccttccacgtataagacattctctttggaaaatagtaggggaataccaatattacc

SEQ ID NO: 172769 - DNA, 438 bp, Glycine max
tggttggacgtacttacccgttgaagactgaagaaaacgaagaacgaacgatgaatctttgaagaacggtcgagaatcttcgcataattactcacggaaacgttacggaagcgcctcggcttggattttcttcacggaaataattttcctcagcaaattcgaaagagagagaagtgcctaaggggttgaacccttttcttcttcacttctccccctatttatagcaaaataggggagaagcttgccgcccagctcgcccaggcgagcaaggttgcttcctccagaagcaacagccttctggaggaatcttctggagggcccaagtgggcctggttgctatttacagccccttgtttactaaatgcacccccctttctatttttttgtattctttttctgaacattacgaaactttccgaatttcgtaacgatacctat

SEQ ID NO: 172770 - DNA, 314 bp, Glycine max
  unsure (1)..(314): unsure at all n locations
nttcgattcattctatgcactcatggtggtccacattgggtttgtgtatttctattcttgttttgtttactttntatacccccctcttgacgtgcttaagccattttacgtaagtcatttctcgcttaacttanaaataaaataaatntccaccgaacgtttgaattgtattatccgttaacttcggttaaaatgaattccgaccgttcggtcgtgccgtaaccacgttggaaatcaaaaagaggtaaaaaaataatataataatcaaaanaacatcttttagcaaaataaagcggaaaatcaatcgggcgttt

SEQ ID NO: 172771 - DNA, 386 bp, Glycine max
  unsure (1)..(386): unsure at all n locations
atacatatataataatagtcggtttgatacccggagcaaaagttattgctggtttaagttttgcaaaaaataagttctcaaatttttttgaatctttcaaatccagccacaccaagtgttcctggtatttttcacacaaaatatgagtcaaaggaacctaccacacaaaaattcagccaaaaataacaaccctaactatcaaaacaaaaatcaccaattaaattgtaaacagtcgtcgctaattcagtcgctaatgtaatgctgtgtgaacaagaacgcagaatcagtctctaattccgtcgctaagcactattcacagcanaacaataaactgaaatagggaaagcgctaaacaaggggtactactaatattgcaaacaaaacat

SEQ ID NO: 172772 - DNA, 503 bp, Glycine max
  unsure (1)..(503): unsure at all n locations
ggcaagtgacatcgaattactcgacttagtacgcaacacanagaatagtttacactagaatcagaaggtatggtcaaaagagtattctatatgaaatatatctcgatacgagtcctcgaactatagagtatcaacattgctaagaataagaaatcacgaacaaccatactatctatgcaattaggcaaaacaccatactactaacatacccagaattataaggttcttataataagtatacaacgtacatataagaagtaagaatttaatagttaataaggatgtattaaagaatcacaaatttcaactactacattcacgactacacacaaaataaagtgagttaagtagtcatgcgtttacacatcaagaaagacatactcatccaaggcatatatatgggtcanaaggttttcacaacactaatccacacatcaagatagaaataagtttattaacaacatacatgcaagaagataagggctcattaaagcattatccat

SEQ ID NO: 172773 - DNA, 452 bp, Glycine max
  unsure (1)..(452): unsure at all n locations
atcacatgtggtactatgtggaggtcgggcaatggtgcaaaacaattcttcacatccacaaatcacatataaacccaccatccccttgttgccaccttcaactgagcacacgtactcccacgtagcccttatcctcgtttctctcaacaccgggtccccatcaatcctcccaagctttcacaacatccaagtaattcaacatccactcatcacaaactaacaaaaccaagcaaaacagggaaaaggcagaaaactctgcccaaaactcaaaccaaaaatcacagctttgtctcacttaaagaccccagtaacatttccttcgttcaaccgtggatcgacttgaaaatttactggaagtcctagtacataagtctacantttgaccgtggggatctgctagaaaatgtccataaccacatatgtactacccttttcatagccagccatacaca

SEQ ID NO: 172774 - DNA, 497 bp, Glycine max
  unsure (1)..(497): unsure at all n locations
ntntggagtagaaacatgggaccaactcattgtatttcaaaaaggaagtcgtatctagtcaaggtctgagagaccatacaagtttcctaacgatttctaattatgtgggccattaagtctatcatatgctgacaatagccgagaagcccatgaatctcttcgggggcggagtaggtgtctgccatcgccttggccttggctaacaatcggggaagttcttgactcccgttcaaggtaagagcaaaccgatccatccacatggttgcctcttggtgtaaagagtcgatcacccttcctctagcctctttttccgcgtatacttgggcatactcatccgcgattctatgctcgtgggccgtggctagacctaactcttcttggtacttggcgatgatagctaacatgttggtctccgtctcgcataaacgctgagacanagcttctttggaccttgaacaggcaactaactcctctttcanaaccatgctatgtgctcg

SEQ ID NO: 172775 - DNA, 269 bp, Glycine max
agctgcccggtgagattcaatgtctctgatttatctctttttgatgcagatggagaatccgatttgaggacaaatccttctcaagagggagagaatgatgaggacatgaccaagagcaagggcaatgatccacttgaaggacttggagggcctatgacaagggctagagcaaggaaagccaaggaagctcttcaacaagtgatgtccatactatttgagtacaagcccaagtttcaagaagaaaagtccaagttagagagttgtatcat

SEQ ID NO: 172776 - DNA, 433 bp, Glycine max
  unsure (1)..(433): unsure at all n locations
gctgaaccatgttatcaataaacacaagttgagttttattcagaaaattagagtttatctcttttatcttagtgagagtgattctcctaaattcttgagtgattcaagaacaccttggctgtatcaaaggactttcacaacctttgtgtgttgccctcgctggaaagagtgattctttccttcctttcatcatcacccttgttctttcaaaccacaattccagaanatccacctctgcccagaattatctcgtggccataacttccattttacgcactcaaattaagtgattcttgagcctaaattgaatttcaaaacgagacctttcacctcgtgttggaatcacctcatttggagccctgtagcttcagttattgccatttctatatttctgtccagccaccacttaacctacgtgttaccatcccattca

SEQ ID NO: 172777 - DNA, 435 bp, Glycine max
  unsure (1)..(435): unsure at all n locations
ctaagctgcttctacataatttgttcggatgattatntgaaagagctcaacatgagaatgaagaatctntgggaaaaaaagaatttggtgtaccaacaaagtaaagaactttgagttcaacggcaggaaaaatgagtctcatgaaacataaagcataggacttttgagtttatgaaacacaaagacagaggacattgagtcttatgaaaacataaattagaggacattgaatcctatgaaaacataaagacagagaacgttgagccctaagaaacataaagcaaaggacgttgagttatatgaaacataaaggcaaagaccttgagtcctataaaaacataaagacaaaggacgttgagtcctatgaaacataaaggtgaggacgttgagtcctatgaaacatataggtgagaatgtngagtcttattgaaacat

SEQ ID NO: 172778 - DNA, 444 bp, Glycine max
  unsure (1)..(444): unsure at all n locations
ctatatgacatgccaacaaccgacttggtgttnttcatgtatttgtttaagggttagaatcaattnttctgctgtaatgactattatttgcgaataaaaataaatatttgttcatttcatattggtatgcatgcactcaaacattgacataatgcattgtatttgcattcagaattaccgtgggtaggatatgtgtttgttgtgcaaccaagctnagccattttgcaggtctttggaaaggtgtgcatttgaaaaatactaatgataccgaaattntagaatgttcattatgatgtgtggagtcatcatgggcaagtgtagtgttgtcaagtgtaaggccccttaaaaaggtaagtcataatcatttatgcttttgtttccaatntgtcattattggtggctaaatgtgtttcttcattggtactcgagtctgcaatgtgtaca

SEQ ID NO: 172779 - DNA, 371 bp, Glycine max
ttaatcatccttctctatctcaaaattagcagcagcatggcaaatgtttcatcagactacagccattaccaaaaacacctatctgttttgaacaatcaatcaaatatccctttagccagttccagctaaaattggtctcataagacataaagattcaatcccctcagcttctcaaatttgcacacaaactccatatttcatcttgaagttgtagaggaaaatcaattattcgaaccaatttatactttcatctctattatttgcttaagggaatcaataaacccagaaaatgatctccactcatataactatatagaagtaaatactggggagaaaaggcatacctttgcttaacatatttcatttacaaa

SEQ ID NO: 172780 - DNA, 411 bp, Glycine max
  unsure (1)..(411): unsure at all n locations
cgaatctctccntaaagctcccttattgttccctccttaattcataggttntttcttcaacccccaaatcacaattgaaagttgtgtgcagtgagattgtgattggtaatgcccaatcagtatcaagctctcaaccttttcttcttgatcatgtctatttaaaataagctgacatatttgatatcgcagagttgaattgtgatctagacaaaaaggtgtataacccacatcatcttagtttttctgttaattttgaacttttaggaacttgtattgtctgaacttangcagatgaaggatggggtatcagagagcaaaaatatggagacgactcagtaaaggatttagaaccttttaagaggaattatgcttcaatactaaaccaattaactgaagcanatgaacagacat

SEQ ID NO: 172781 - DNA, 374 bp, Glycine max
gcttctagtatttttgccagctgcatcaaaatgtgaaacaacttgaggcttttgagtctttgcctcttggcattgattgcatcaactcatgctcaacttcagcttggtttttatgctaataattgcccaaaagcagagcaaattgttttgaaatttgttcatgaccatatccataatgcttcatcactaccaactgcattaataagaatgcactttcatgactgttttgtaagggtacgtgcttcaatctttaagcttctgtcatttttacttaacaaatacaatgttattgttagattaaggttaaggagctaactaagatgaagcatttcagggatgagatgcatcagtccttctgaacttaacaaccaatc

SEQ ID NO: 172782 - DNA, 484 bp, Glycine max
  unsure (1)..(484): unsure at all n locations
ntgatggcactgctgcaacagcaaaacacatttcacaacatctcacatgtgaatcaaattggtgcagtcaacaataaaggtagtctattgtccattacttatagtgtaagcaagaccaatcaagatgagtggatccttgattcaggtgccacagaccacgtcattgtctttcctcatttcttttctatatgcaagaagataaaccttgtaattgtcaggcctcctaatggtcatagagtcactgcaactcatgcaggcataatccaattctctcaatttctatacctagaggatgttttgtacatacctagttttcaattcaatctgatttcaatatccaaattggtctcttctctgtcttgccaactaactttcatgaatgacaaatgttatatacaggatatgcagaacctgcaaaggattggtacagttgatatggtggaaggcctttacaaactcaagatggttcctcttaagcctcatg

SEQ ID NO: 172783 - DNA, 397 bp, Glycine max
  unsure (1)..(397): unsure at all n locations
agcttttgacacatttcttgagaaaatgaaacctggtgcacactcaattgactctccattgacaaccagagaagaattaggagtgccagctcctgcctcaacaaataacgtagaagactctcagaataaaagtacagataatcagaactcccctgctaatggagtttcttccagttcaaaacaggatgtgtggtctgcagtgcaggaacgagcgctggttcaagctttaaaagtctttccaaaggaaacaagccaaagatgggagcgtgttgcaactgctgtacctgngaagactgtgaatcagtgtaagaaaaaaattgcattgatgaaggagagtntcaggaacaagaaaagtgcagtctaatgttctgttgtgatatttaaattcactactaat

SEQ ID NO: 172784 - DNA, 409 bp, Glycine max
  unsure (1)..(409): unsure at all n locations
ctcatacttgaatagatttgtggtatggaagggctatgatgctccattactggaggaagatgtggttagagcagctngccagctcgaagcttctatgattcaaacctgcaagttaactccataaagagctggtgagaagcttagtcatgatatgaaagctattcaacgtcaggtgatctttcacatcaatagctgagtattcttcatgaacgataaccgttggtgatgagcattttttattatatcatggaacattaatgacttaacatacaactctggcctatagaagattatcatatatgtacgaattcttcttcttttatttatagagtaaattattcacttgtttactcttcttaaacaatgtntcatgctgcatgacttaagactatcactacattcaaactta

SEQ ID NO: 172785 - DNA, 350 bp, Glycine max
  unsure (1)..(350): unsure at all n locations
gaatgtcatgctactgcaatcagncaaggaatcccaaaagtctcttgagagtacagggactaaattaaaaaaggtagagacacgagaagaggctttaaagtctaagctcgctacagtcgagtctttggctaaagcactccaaggagagattgagcatcttaacaaggagttttctctctttaaggtgaatgtggagaaggctgaagaatgttgaagaatgatcttggtgaagttaaggtcgagatcctcaaaactcatgaagctggcttcttcaaggatatttgataagcaaaatacttcttccatgaagttgacctctctctttgacaccgacaaggatgtaaatcatg

SEQ ID NO: 172786 - DNA, 318 bp, Glycine max
  unsure (1)..(318): unsure at all n locations
ttgactactaanagttaatgttcttcatgatttcaaatcatggttagaacacgaggtctangtcgtgtgttaggaactggtagaggaagagagttgagtcaggatgcgcctaaggctgatgttcctcgacgtcgcaggcctacttcttcagcacgtaggcaatggattcgtgtgcgtgagaacgttacagagagacctgaggatgtgcctcagttgcatgaggatgttcctcatgtgtctgatactaccccggagatgacaggcactgccgatgctattcacacagagggagtggctactgatgagagcttggggtca

SEQ ID NO: 172787 - DNA, 284 bp, Glycine max
tcataagtaaaaccaacaattctgctcgatttggtcgttctaataaaaggatcattcatacgaagactacttcaatactctgcagaaatggaagcagagttcctaccttattctgaaggaagttaagacttgcagagaaatgatggtgcattagcttatagagtgtcaactattactcattttatatcaataaaatgagatggtgtaagcaaaggtgaatccataatttgatgatatgcagattattccgagggacacatgaagcatggacctgctacatgtat

SEQ ID NO: 172788 - DNA, 470 bp, Glycine max
  unsure (1)..(470): unsure at all n locations
tctacttatgtggcagggcgggctcccttcactttcttgtctcaaccgcgagtcttgaccaccgctcttccttcccgcgatgcttctctntatatctgcctgagtgggtttatagcctaagccatacttcccacgatttcctttggcatttatcaggctagttatgccgccgttgtctttgcctaaacccattccgggttcgtaaccgttccccaacataactcgggccatcattactgctgcatcggacaggcaagcttgcccagagaaggagtccacggaggaaatgcttaccacctcaaaagactggaaagcggtttgtaatgactcctctgcggcttccacatacggcatagaggatgggcagctcaccaagatgtcttcctcgcctgatacgatgaccaaatgcccttccgctacgaatttcaactntnggtggagtggtgagggaacaactcctactgagtgga

SEQ ID NO: 172789 - DNA, 280 bp, Glycine max
  unsure (1)..(280): unsure at all n locations
ctttcttttggccataaaaagattctctgtcgaatggctaaccccctaaactggtgcacccatattttctttatatatttattaaaaagtaccctctggcagcatctacccctatggaaaagggggtatgcctgaatattaatagaaaagactatggatgaaaaccctgttgattgataaatatggaagccatcatacatctctttggcttnttaggtctgctagggcctaactaggggttagcctctcatgaccattgagtgggtacactgaaatgggg

SEQ ID NO: 172790 - DNA, 270 bp, Glycine max
tgcaagtgtcatcgaactacttgacttaagcacgcaacacagagaatatgttgtactataatcagaaggtatggtcaggagtattctttatgaaatatatctcgatatgagtcatcgaactatagagtatcatcatcgctaagaacaagaaatcacaaacaaccatactatctatgcaattgaggcagaacaccattctacaagcatacctagaattataaggttcctataacaagtatataacgtacatataagaagttagaattaaac

SEQ ID NO: 172791 - DNA, 287 bp, Glycine max
  unsure (1)..(287): unsure at all n locations
aaacattggaaaaaccaaaaaaacgaaagtctgcatattttgaaaatgaagttccaggagttgtttacgcacgggaaaggtattaacaccccacgcgcccgtcacaaggaacaacaacctctaatcgagtgtgcaaatcatgaacttcaaaatgtgtattttcccttttcatatnttttatgtctttccctctttaatagtttttttactctttggggcagcaagggtgtngcccctgctcctacgtatcctccggtgcgatgaggaaatcagacctatgtagttct

SEQ ID NO: 172792 - DNA, 502 bp, Glycine max
  unsure (1)..(502): unsure at all n locations
ggtacgaatctnagaaacatcttcttcaaccttggtgatccttgactccatctcattgaaatgcatgcccacttgtaactccaaggtatcaaacctttcaccaacaaaggtttgaagaccatcaaacctgtctaaaatcttttgaagaagagaggaatcttctccaccatgtaagtgtccttcttcatcgatgggttgagcaccctttttcacccaagagccatcatgctcttttcggtaaccaaaggatgcaatcactgcagcgcgtattagaaaagatctcttgattggaacataaggttcagaatcaagagaaaagttgaagtgttgaatatggcaatggagcatttaatcgcaatgccttatgcatgtgatatcggactaagtgtgcccaatcaatttgtcggcctttatgaanagcccacataacaataagatcttcttcagaaacctgtgcaagggttgaagatcttggaagcaagatacgcacaatgagatgatg

SEQ ID NO: 172793 - DNA, 229 bp, Glycine max
  unsure (1)..(229): unsure at all n locations
gatgatacaacacaccatcaacgtagtcattcgtggtgaaactttcaaggtacatgtagctgaaaaagtcgggggcgtatgccgtgaccataacgagcacaaacgaatcataggaggatcgtcggaggagatcaactccgacgacatccacctggactgcaacacacttccctcgccggaaaaggggtgtttcgaggagcttcancaccgtcaaaagggggactggtcg

SEQ ID NO: 172794 - DNA, 485 bp, Glycine max
  unsure (1)..(485): unsure at all n locations
gctgaggggttgatgggaacctgatgctgagaggaacgaggataagggctacgtangtgtacgtgagctcagttgaaggtgggcaactggggatggtacgttaatgtttgacttgtggaagtgggagagttgatttgcgccatcgcccgatcgccacatatgaagggtaccccataatccaacaagcttgatgtgagaaagcgtggaagagtcactcttcctacttttgtttgttgaccacaaagtggtacctggagatatgtcacgagggtcaggagaccttgnggacattaggtggggtgctattgcccaaaaccaagcttgaccaatcccgacccaacccgggcatagtcagtcagtgagaacctgtgacgtacctaaacaagcgagctcctgacagtcaaccaataaaagaacaaagtccacaaagcaaggaggcttgtgtggcggctggcagctatgaatcttgagtggatctagaaatg

SEQ ID NO: 172795 - DNA, 315 bp, Glycine max
  unsure (1)..(315): unsure at all n locations
atcaaagggaaagggaagtgtgtggtatgcangggactaancaaaggaaattgtacatccttcaagtgtccattatggtaggttttgtctccactgtttcacaagctgggagccatgcgtccagtggtgcatccaatgataattgtctatggcatatgcatntgggtcacgtaagtgaaaaaaggactaaaaattcccaaaggttgtgcacaccataaaggccacatnggactacatccattcttactgttaggggccttcaagagttcatcattggtagggcaaggtacttctctcatcatgatgatactctaa

SEQ ID NO: 172796 - DNA, 468 bp, Glycine max
  unsure (1)..(468): unsure at all n locations
tgcttgtggagcttctatggaagctggatctttgaggttntcttctactntaatattntgtaagaaatttatggtttaggtttcagccacaaaaaataacaagataaaactcaaaggaacctaaactcaacacaattcatggttcaagaacaagaacaagaaatttgaaccatagaaaatcaaatctagtttctatagcaagtttaatcggtggaaactttaaagaatcatgttaaaaacatttatcacaagacatgtgaggagatacatggagaaaaaatgaagaaacaacaatggaagagaaggtaaagcagaaaaattgatggaggtttaaggagcacctacttgaagctcttgtgctctgattaccacttgatgaaagcttgcttgtggagcttctatggaggctggatctttgagcttcaatgaggtcctttaatggtgattntccaccgtggagatgcaacg

SEQ ID NO: 172797 - DNA, 205 bp, Glycine max
tctaaactttgaagggcttctatattcttgccttaatatatcaattaaattaggcttatttcttttcaattggaactaatatagagatatttaaattatttattttggattattaatgataaatatttgcattataaaaaaatagtttgttgtgtaatggtgaatttgttaatgtgaaatggttcttttatatttggaatcttat

SEQ ID NO: 172798 - DNA, 496 bp, Glycine max
  unsure (1)..(496): unsure at all n locations
tagtgaatcagaaataaagcagctaatggacgctgtgagttgtatntgatgcaactnntttgaaaataataaatagtggtacataatttaatttttctttcttcacatgttgacatggntggtcaggctgatgttgacaaaagtggtactattgactatcaagaattcatcactgccaccattaaccggcataaactagagaaggaagagaatctgtttaaggcttttcaatactttgacaaggatagcagtgggttagtataagatttttgtttatattaattgcatattctctttttttttttatggagaaatgttaatttgttagttttgttaaaaatataagttgaaagattcaaacctgcaacctctccttcctcccttcttccatcctttcaccctntctggagaactaatctatatctctattggggattttctctgggtcttgcctaacataaaaatccgctngtgactttggtcagatatataacaa

SEQ ID NO: 172799 - DNA, 428 bp, Glycine max
  unsure (1)..(428): unsure at all n locations
gcttctcaagcaagcttccatcacttttctttattctaaccatgangatgaatgatgtaatacaaatatcatatgtnttagaagacacaacacaagataacaaccaatacaaattccacttaagggagttaggcatgtaaaagtctaaaaatcttcaaaacttctttaacattngccttgagaggttgttcaccatattgctgatctcatgttactccccctatctctaacaatctccctttttttggctttgatgatgccaaacttaaatatgacattgagtgcatttggagggtttgggtcttgagattggagctttgatccttatacttatcctgaaaaattcttaacacttaagaagagattaattcatcatcatctcatatatattaattcatcatcatatatcataggtntatatataaatg

SEQ ID NO: 172800 - DNA, 331 bp, Glycine max
  unsure (1)..(331): unsure at all n locations
tcttgattntntgaggtatgatgtcagcgcataaacctttgaattccacgctcatgatcctaatgaaatggcctaaacaaaaacatcgtcatagtaaagacattgacaccaacatatagaattcctatgaagagccaacttttattatcgttaatattacaatgaagcgccagtaaatagaatggtatggtgtaatatctgaactctattagtggagctggtattagaatagcagttgtagccaaaaaagtatgccaaaacccagattttgttgtgaaatttccatgtttggaaaaagtattagttataactcgcttagtcattaaataaa

SEQ ID NO: 172801 - DNA, 387 bp, Glycine max
  unsure (1)..(387): unsure at all n locations
ctgcagctggaaagatatgtctcggattttttttatctattacagncttatcaaatcgatccatagttcttgttgagacaatgatcgattcattcagaagtctctatttaatcgattaccatgtgatataatcgattacttttctttctataagcggttcaaaagtgattaagaactctttaatcaattagattgaggatctaatcgattatattgttcttgagttgtttccagtttttgggaagaacactttaatctattaaaaagataatctaatcgattactttgttgaattaatcgattacattggagatttaatcgattacaagcgactataaatggtttttctataaatagccaccttgtattctcacttctatgaagaac

SEQ ID NO: 172802 - DNA, 439 bp, Glycine max
acactatccactactcgagcttctatggaggttggatcatagaacttcaatgatgtcctttattggtgatttctcacacacggagatgcagcggacgatatagaggaagaggtgaaacgaggcaccatccactagggaatcagccatggaataaagagtttcaccaccaagaaagtgtcctggataacaagcttacagaggaagcttcaatggaggaaaacagagagagagaaagagagaggggggagcatgaaattgaaggaagaaaagagggagagaagttgaactttgaagtgtgtctcacaagactctcattcatcaaagttacaacaagtgttagatatgcttctatttatagcctaagtagcttccttgagaagcttccttgagaaacttccttgagaagcttcattgagaagattcctagagaagctagagc

SEQ ID NO: 172803 - DNA, 217 bp, Glycine max
  unsure (1)..(217): unsure at all n locations
atgcttcttggggctttttaactcatgctctatgcatggtcccctctatgccttgaatagagactagggcatccttctatgcttggctctggactttgatgtcccaatcattccccccttcttgaagaacagttgcccttaaatcaacaaatcatcgcctatatcgagaagagataaatcaaccacattaaaagtangacttataccatactctccc

SEQ ID NO: 172804 - DNA, 452 bp, Glycine max
  unsure (1)..(452): unsure at all n locations
attccgattgggccgattgtcgtgacatctcttcttctataacatgcttctccatcttccttggtaattctctcatatcatggcactccatgaaacaatccactgtctcacgaagttcatctgaagcagaatatcatcctttagctaccaccacatgtgaacttcaatggtttacataccttcttcaagatgttcgcattccattcactcagccagctaatctattgtgtgataatcaatctgctattcaaattgcttccaatcaggttctccatgagcgcacaaaacatatcgaattagattgtcatattgtttgcgaaaaatcacaaaatggccttctcaagcttcttccacgtagatcctccatgcagcttgctgatattnttaccaagcctttatattctactcaattcaagactctaatatccaaagctgcaatgatgaacattatt

SEQ ID NO: 172805 - DNA, 406 bp, Glycine max
tagcataaggcaggctaaacctatgaggagtgactcaagtgtttctaatccaacacgagggatctgaggatgaagctcgcattgactcagtctaactagtcatcaaggtttagtaatttatgctgcagcatagaacacataagcttgattcattagagaaacatccttatatgcctccgatggtctgatagaaagaaccaacacttgtacctactactgtcaattgtacttacttgcatcttgattggttttatcctagacttagtttaattctattggaaaccatcaattatcaacgtttctttcaacaatgccttatatctgaatgtaacccggtcttagactagatccctaagtttgatactcagatacatcccgtgtaattataaatacttgacgatccgat

SEQ ID NO: 172806 - DNA, 421 bp, Glycine max
  unsure (1)..(421): unsure at all n locations
ataccacgttagatgtgtgaagcttaattgtgagagaacaactgatcttaatttccctattttgcatgattcttggactgtttgaatgcatacatgatgtagagatgatcaaggccctgttgttatttntgtttggctacttagccaaatagccaccctgccattagtgaatgaatgaatcccttgcaccttattgagcctaatgtngaatgaattgatgttgacacttgagttgaatgatactgtgtaagcactctatcttagtttataggagagtactcatggatcaggaacaatttcctcaaatttgggggagtntcaattgtcanaataaaatanaattatgtgtgtttatttatattgatgaataaaagctagaagcaactatgtgccacataaattttgtgtgctattaagtgta

SEQ ID NO: 172807 - DNA, 452 bp, Glycine max
  unsure (1)..(452): unsure at all n locations
tcgtaatgttacgganaaagaaatcagcataaagggggtaaatggtgtgtatttagtaaaatgggggtgcaaatagtaattttcaaatatgggtccttctagaggtttctgggcattttcttgcttaaagtggaagcaacctagctcgcctaggcaagctgtgctcgcctgggcgagctaggtgacaaccacctcccctgtnttgttaaaaaatgggcttccgggacacccgtaatgcttctgtaaaattcccataaccctaaataagcatatttcacttaatatgagtgagaaggaagagaaaaaagaagaaaatcaagtcctataggcttccgtaactttntcataaattacgaaaaaaggggggtgaacttatcaagataggggtgtaaataggatttcgagtctaggcccacatnttggaagttgggttgcttaaagaggaagcaact

SEQ ID NO: 172808 - DNA, 317 bp, Glycine max
ttcaaaaaacagacctgttgagaataagggagctagcatctttagtaaagtgatccagttgattttcaagctcatcatgggaaggtgctcaaaattcttaaaggaaatggtgaggaaggatgcctagagaccctgtttcagttctatgacccctctccattgcttacatttcccgaataccaactggtccccacacttgaagagtactcctacctagtaggtttacctgtgccaaacaagatacctttccatgtgtttgagcctacccctaaacccttcgacatcgcagccgcccttcatcttaaaacctccatcat

SEQ ID NO: 172809 - DNA, 474 bp, Glycine max
  unsure (1)..(474): unsure at all n locations
ctgaaactcttaaattattgcctttatcttataaaaaagaaaagaatgggtatgtaacctatcaagagggaaggaatgaaaagaagaagaattaaagcaaggaaaacaaaagaataagaaactaatgagacatataagaaaagcaattagaagaacaagttttcccttatgaagtcttacaggcatagatcaacaaggagaattcaaccctgtctttatctttgtgtgcattcttttcctccaaccacaacctgctatccatgccactcctagtcctgaacatgaacaccgcatacccagaagaagaagggttgaagaaccaatcatgaacatcccanagcaaatccacaagcaacccatcaacaaaaatggtctggttccccctataattccagtgcaacctcttcacacgaatcacagtcttcttatcaatgcacacgcacaaaaccggtgacttgaacaacaacccttcat

SEQ ID NO: 172810 - DNA, 427 bp, Glycine max
  unsure (1)..(427): unsure at all n locations
tcatcctcagatccctcttggtggactagactntagttaaatatcttacgaatatttagacctaattaacctaagctntatcctcagatccctcttgttggactagacttagaccaaacaacattattgtaatagcatacttaaaaccaaaactttatccgcagatccctcttgtaagactaagtttcaattctgcttcattcaagttataaggaaacaatacatttcccaatgctaaagtcacctaactaggcacacaaatggttgatcagaccaagagcatacaaaatttaagcattgaaagaagcattgaacacaagaaacacaatcaattagatattaaaatatttacatcagttgttctttagaaatccccaacaagggtgtttagccatccattacagaagaaaccctaacaataatgagc

SEQ ID NO: 172811 - DNA, 392 bp, Glycine max
tgcaagcttggaaaatgatttctgtacaaaagtttgtcatataagcgactaacaaactcccctaaatttacaattttgcttgtcctcaagcaaagaaagaacagttcacttgtcctcaggtgacaaagacagtggccaatcaaaagaaaatggagtttgattcatcaaggacatcaaccatatgaactgaatatcatggaatgcttaaatcaaccacttctcacaaacatgcagcttttcaaagataggagcacaagtattagagtcacagctgaaataagctagtaagcatgatagaaatcaaggaaggatcatcaaccaaaatctcacagtcatttgttcactcaaactcaagtgtgtaggcttattccatcataaacaaccaacacaag

SEQ ID NO: 172812 - DNA, 468 bp, Glycine max
  unsure (1)..(468): unsure at all n locations
ntgcttctacaatctccncccctttgatgatgacaaatcctgaaatcaaaagaatatatgcaacatttgatctatcgttcactcatctctttctccccctttctatttgaatttatgcttaatttaaaactgagtaaataattntatgtcatgatttctaaaatacccattttctctccccctttggcaacatcaaaagccaaagtgcataaaaaataaaatcatacataaataattntaaaacatacacaaagcataactttaataacacattcataaatttcagtcatagtcatatatcaacataataaccaagtttaaacatatcaatttaatagccaagtctagtcataatcaactaagtaccaaataagtaaacaaggtaaccaagttcagaanacaaacaacttacataatgtcataaaatatagccaaatacatgacanagaaatattaatctaaatctat

SEQ ID NO: 172813 - DNA, 389 bp, Glycine max
  unsure (1)..(389): unsure at all n locations
acatatgtgcaatatgtcaatatttattagagctcgatgggctctgaatatttcttctgcttggcgttgctggcttacagattctgatcagaaataaattttactgcataatgcagcaagggtaactgatactgcacaagttatgaagatatattcggagtagggaagctggtcatcatatataaccttaatttggactactttaattgcaatggtgcatgcactgtggctaatgattaaaattagacctgaagtggtaccaagcttaccatcatntgcttgacgcttatatcatttagtttattgttacatctgccgtaactctgtattgctttatcctatactttgtatgtacctgaacttgcattcctatgtcaattgcatccata

SEQ ID NO: 172814 - DNA, 452 bp, Glycine max
  unsure (1)..(452): unsure at all n locations
ctcaagctgaaatgtttgtcgtaatatgcccaacttctttgttgtcattctgcnnggcaggatattgaatgttcatcctactccatatcatatatcttatgcatcatgtatcatcatgaatgagtgagaagaaagtctttgaagttagaaaagtncttcacaaagtaaaactttctgtattaatcgattataaccttatcgtaatcaattacacaagttgtcttaagcttgtagagttatgtctcgtattggtttaatcgattatagccttatccgaatcgattatgcaattgtttctgagacaatgactaatatattcatgagtctctgcgtttatcgattaccatgagatataaatgattacttctctttctataagtgtctcagaagtgaacaaggacactctaatcaattactttgagtatctaatcgagtacattattcttgagcta

SEQ ID NO: 172815 - DNA, 372 bp, Glycine max
  unsure (1)..(372): unsure at all n locations
agcttgaaggcatgtaacccaccatcttctcatattagatctactggaacgtgtccactatcatttttatcatctcgctttccatcattgggggcactacttaagctgccagatccctccacctctgggcgtattctttgaatgattcattatctctcttgcacatgttctgtagctgcattctatctggggccatattggaattgtaccgatactacctaatgaaggcaaccattaggtccttccaggaatggatccaagaaggttctagattagtataccaggtgacggctgccccagtaagaatntcttggaataaatgcatcaaccaattttaatctttcgtgtatgcccccattttcctacagtaca

SEQ ID NO: 172816 - DNA, 356 bp, Glycine max
  unsure (1)..(356): unsure at all n locations
nggacttccttttgtttgggaacctctccttcatcatgtgtacccaaacccaatcacctggttcaagcacgactttctttctacttttgttggcttgccttgcatagctcgcatttttcttttcaatttgagccttcacttgctcatgcagcttcttcatatactcagctttagcctgtgcgtccttatgcttaaacatagcaatgttaggcatatgcaacaaatcaagaggagtcaaaggattaaatccatacactatctcaaatggtgaacaattagttgtgctatggacaacccgattataagcaaactcaacatgaggcaaacatgcttcccaagatttaagaattttcttt

SEQ ID NO: 172817 - DNA, 418 bp, Glycine max
tgcaagcttcaagaataatggcctcatcaaacttcttattccccgaaggaaaaccaataaatccgcctcttctttttaatggagagggttaccactactgaaaaacccgaatgcaaattttcattgaggcaatagacttaaacatttgggaagccatagaagttggaccttatgtacccaccatggtggctggaaatacaacaatagagaaacctacagaagagtggtctgaagaagaaagaagattattgcagtacaatttaaaggctaaaaacataattacctatgccctaagaatggatgaatattttatggtgtcaaattgtaagagtgcttatgatatgtgggacactctacaagttacacatgagggaacaactgatgtaaaaagatctaggataaatactctaactcatga

SEQ ID NO: 172818 - DNA, 455 bp, Glycine max
  unsure (1)..(455): unsure at all n locations
ctgagaagttatctacacacacccatctaaaaactaagctcacctccttgacaaaatacatgaaagtgcaaaaaaaaagtccatactacaaagactactcaaaatgccctgaaatacaaggctaaaaccctatactactagaatggccaaaatacaaggcccaaaagaaggaaaaacctattgtaatatttacaaagaagagtggatccaaccttgacccatgagctcaaaaatctaccctaaggttcatgagaaccctagggccttctttagtagctctagctcaagcctcttggagtcttctatccaatacccttggagggtaggattgcatcaatggttcacttaattgttcatttggtgagggaaattaaatattgtggttccatntatttgcagtcgatgtacctggttgagcgatacatgaagatcttaaaagggtatacaaagaatct

SEQ ID NO: 172819 - DNA, 390 bp, Glycine max
gcttgacaaggtcgacctccattgtaaagtgttgtcatgctcgatactttcattgaaaaccgcataggtcttagttatatcgacctatgttgtgaagtgaagccatgcttaagactttgctaaaagaatgccaagagctaattggaccgacatttgatatagaggaaggtcatgccttgtacatattaaaaatattaaatgtaaaaagaatgaaaaaataatgagtgaacctctaagtctttaactctcaagtcacaaaatatcgactctatctttacataaagactagtcattgtgtatccaatatcaatcattgttatggttctttttagtataagagttgttaatgtggagtataacttatgagccaacctgacataccgcaagttt

SEQ ID NO: 172820 - DNA, 485 bp, Glycine max
  unsure (1)..(485): unsure at all n locations
ntaacaattgtgattaaagattattatattttattaaagtttttctactaattaatttaatatttctattaatcacaaatattagttaataatttatcatgaggaccaaaatcaatcatttgtaaaattaaggagatcaaatattataattaaaaatctgagaaaccaaagttgtgaatttaaaaaattatgggaaccaaaattaaaatttagccttttattaatactacttttatccttaaatacaaaattcttttgactaattcatatcttttaagaaagtggattaatatagttagtaatattagaattgttgacaatnttttttattntgccaaaaattatccttaacattattgggactcaatctttctatttcctattaattactttctcacctaattaattaatgtgtgcctagttttntattgtatcattataaaattataatagagataatgtatntatctttttaatatgtaaca

SEQ ID NO: 172821 - DNA, 307 bp, Glycine max
  unsure (1)..(307): unsure at all n locations
ttcttttggnggggntacggggtaaattttggaattagtggtgcaaaggcatgtaatactaagttgccaacatgtatgggtttcgggttgacatttgtaattgggagagggaacttcctaganatctgctaaaccttatatntctcttgtattctttctcaaatgaggcacagctcgtgctttgtttgttttatataaaaaatttcctatggttagaaaaaaaaatatttaaaaatatttatttatttgaaatttataaaattagttgtacacaataaacatttattttataatacacgactaaaat

SEQ ID NO: 172822 - DNA, 347 bp, Glycine max
  unsure (1)..(347): unsure at all n locations
nntttctnttagaaagtagttntatgagaggcaaagtagacacaactctnttcagaagagaagttgtcaaggatgcgttatagttcaaatatatgttgatgatattatctttggagctactaatgaatcttcgtgcaaagatttctctgatcttatgaagagtgagtttgaagtgagcatgatgagagaacttaagttctttttagggcttcaaatcaagcaagacaataagggtatctatatccaccaacaaaaatacactaaggaacttctaaagaagtttaaaatggaaaatgctaagcctatgaaaactccatcgcatgcttccaatcctctaagcaaagatg

SEQ ID NO: 172823 - DNA, 192 bp, Glycine max
ctttttcattctcttctcccattggcaaatagaattcacccaggactaatcgcctgaattctttttggggctctcttctcccttttctaaaagaatgaaggactaaccgcctgaattcttttgtgtctcccttctcccttttcaaagaattcaaaacgacacagtatgagaatttttttgattcctcccttt

SEQ ID NO: 172824 - DNA, 475 bp, Glycine max
  unsure (1)..(475): unsure at all n locations
catgaagatgagagcatgttgatgaatgttgtaccatgatgattctttgcacctagaagatgtggaaaggttgttcaccatgtatgtgtgtatattagcataggtagcgagaggcaaacaccattcaagtgaagtgtacatgtgttggataggtagccaagtgccttgcccatatgcatatatgctgaaaatggcacgaaagtgcttctcaaaatgggagtgcatggcatgaaattgcttttcaaaatatgaatgagtagtaaaaattctttntcctttcccatgaatgtgtaacacaagattgcttttccaataaatgcaaatatgtgtgtgaatacatagcatgaaattgactctcgagtgtgtgtacatatatggaataaaatgtgaacatatagcaaatgccacccanaatgcagtagatgtaggtagcanaaatacctngccaatttgcatatgtgnttagttagttagc

SEQ ID NO: 172825 - DNA, 317 bp, Glycine max
  unsure (1)..(317): unsure at all n locations
ttgaacaatatactnggccttcatttaactgtctttgggcttggcggccacgctcaacaaagtactttcgacacctactgtacgttgatttcaccaatgctgttatgggaatgttgcgacaatcctttaaaaccttattgatacattctgagaggttcgttgtcatgtggccatatcgacgtccttctctatcgtaagccatcgtccatttttcctttgagatgcgatcaatccatgttgctatggctggactcagttcacgaaaattttctanaatttgatcaaaaaatgtgcttgcatggagtgtaggctgcata

SEQ ID NO: 172826 - DNA, 401 bp, Glycine max
  unsure (1)..(401): unsure at all n locations
atttataaatagaccctccatttttaatggagtgggttaccactactgaaaaacccgcatggcaatctttatagaggcaatagatttaaatatttgggaagccataaaacaaggaccttatgttccctctatagtggccggaagtgcaacaatagaaaaacctatagcagattggactgaggaagaaagaagattattacaatataatttaaaggccaaaaatattattacatctgccctaggaatagatgaatactttagggtttcaaatngtaaaagtgctaaggatatgtgggatacactacaagtaacacatgaaggcacaacagatgttaaaagatctaggataaacactctaactcgtgaatatgaactggttaggatgaatgntaatgaaagta

SEQ ID NO: 172827 - DNA, 519 bp, Glycine max
  unsure (1)..(519): unsure at all n locations
tttcgtgacacttcaatctcagcttctcaggaagttntctcaagaaagcctttcaggaagctacctagtctataaatagaagcatgtgtaacacttgttgtaactttgatgaatgagagtcttgtgagacataactcanagttcaacttctgtccctttttattccttaaatttcgtgctcccccctctctctttctctccctctttcttttcctcccttgaagcatcttctccaagcttcttatccaaggcccatctttgtggtgaagctccttcttccatggctattccctagtggatggtgcctcctctcacctcttctcctttgtcttccgctgcatctccatggtggaaaatcaccattaaaggacctcattgaagctcanagatccagcctccattgaagccccacaaacaagtttccatcaagtggtatcagagcataagagcttcaagtaggtgcttcttaaacctnccattaatttttgctntaccttctcttccattggtggttcttca

SEQ ID NO: 172828 - DNA, 346 bp, Glycine max
  unsure (1)..(346): unsure at all n locations
aatctaatcatcctgctttgataaatgtgaaaattggggccaatgaagaggatgagaatgagggagaaacccttgctatgactgtcattcccacacggtcaaatttcccatcagcccaataatgtcattactcggccaatatcagcccttctcattacccaccacctagtcatccacaaaggccatccctaaatcatccacaaagcctgcccgccgcacatccgatgccaaaacaccacctttagcgaaaaccagaaaggaatattgcagcaaaaagcctatatgattcaccccanattccggtgtcatatgctaacttgctcccatatctacttgataatgcaat

SEQ ID NO: 172829 - DNA, 461 bp, Glycine max
  unsure (1)..(461): unsure at all n locations
ggtagcccaaggtaactgccatttctgaaagtaaagatcattcttctatgtctcttgcctctcttgtgggaaaactgtaggaacatgaaatggaacttcaacgtctcaaccaaaatgaagagaaaaacaaaaggaaaagaaacatagcactcaaagcctcttcctcgatgcaagaagaagaagaaaaagaagaatctgatgatgaagaggacttctcactctttgtgaagaagtttcataaattcgttaaaaataaaagaatggatagacgccataacttcgacaatgggaagagatctcaagaaggttccccaacacttaaatgctataagtgtaatcgacccggtcacataaaggcacactgtcccacaaatgaatcatggacagagaagaatgagaagaanagccatgaagaaagaagatccaagaaggcgtatattgcttgggatgacaatgactca

SEQ ID NO: 172830 - DNA, 323 bp, Glycine max
  unsure (1)..(323): unsure at all n locations
gtttctgaaaaaattgaaaggatttgatttgatcgcaagcaataggtgtggtagtaaaggtaggggacgaaagattggccgtgtgataggagggcaacgaacaaatttccaggcaacgaaaaatgatttaaattttttattttgttcgctaaatgtttcataagtcttactaaagtgaatgcaagcaaaagaaacaaatatataaaaaggataattaccattttagtcatccttgaaattgaagggtgtgtcgattagtccatgaaagtaagaaaattaaaantaaattcagtgttgcaaataagtcctaaattaaaatattt

SEQ ID NO: 172831 - DNA, 458 bp, Glycine max
  unsure (1)..(458): unsure at all n locations
gaacttnggaaaatcaagaacaagcttgttcgctcattgttcgcgtgtatgatatccactcgacaaggtttgaagtagaggagaccttcaatcctataacgcaacgtggcggacaaaagtggacagttaacttgaatggccattattgtcaatgcggaaggtattctgcgcttcactatccatgttcacacattattgcagcttgtggttacgtgagcatgaattactaccaatatatagatgttgtttacacgaatgagcacatcttataagcatactccacacagtgctggcctcttgggaatgaagcgacaattcctccttctgattangcatggacactaatccctgacccaactacagtttgtgcgaaaggtcggccaaaatcaacaaggataaagaatgagatgtgatgngtcgaaccatctgaccaatgacanaaatgtagtagatgtgga

SEQ ID NO: 172832 - DNA, 224 bp, Glycine max
tgatcacattcccttaaaatgtgacaacacatgtgcgatcaatctaactaaaaatcttgtcatgcattctagaaccaaacatatagagataagacatcattttcttaaagattatgtttcaaaaggagattgctgcattgagttcattgatagtgagcatcaactagtaaacatattcactaaaccacttgctagagataggttcttctttattagaaacaaac

SEQ ID NO: 172833 - DNA, 468 bp, Glycine max
  unsure (1)..(468): unsure at all n locations
cgcttgtggagcttctatggagggctggatcttgagcttcaatgaggtcctttaatggtggttttccaccatggagatgcagcgaanaacagaggagaagaggtgagaggaggcgccatccactatggaataagccatggaagaaggagcttcaccaccaagatgagccttggataagaagcttggagaggaggcttcaatggaggaaaagaaagagggagagaaagagagaggggggagcacgaaattgaaggaagaaaatgggagagaagttgaactttgagttatgtctcacaagactctcattcatcaaagttacaacaagtgttacacatgcttctatntatagactangtagcttccttgagaagctttcttgagacaacttccttgagaagcttctntgagaaaacttncttgggaagctagagcttagctacacacaccactctcataactaagctcacc

SEQ ID NO: 172834 - DNA, 362 bp, Glycine max
  unsure (1)..(362): unsure at all n locations
ntacagcagaatttagtaatgacccactaacctataattaatataacttaatgccattaacctagggaattaaaaaaaaaacttaatggctgagtgtaactgaaattgtggcaaccaaaagtcacccccaacagccaacaagtcagccaccatttggtctcccaaaaggctgatgcctaggttgccaattgggcccttattacaacttaaactaaacctaactaaagcccttttagttgattcacccaaaacatatttttggtcagccaactttacaaggattgggccattatttagacaaactaaacactctaaaattgagacaaagtggtgtcatttagtcctcctccatttgggccatg

SEQ ID NO: 172835 - DNA, 383 bp, Glycine max
  unsure (1)..(383): unsure at all n locations
agctttgggtcaaaagtgcttttgaagatggttaggatgtaaaaactctatccatagggggttaaggtcaccttatgatttccagtgtgcccatagaactctctaagttctgtccatccaacagatagagttggactcaccatatcttggttatatgtgacagagtgcatgttgccactaaagtgtagcagatgccaagtagactctagttcatcctttcatcttatagaaaatgatctactgacttcaccgtaaggttacatttaacaaacaaaataatataagcaaaagtgttatatcatgtcatgtttatttgataatagtggtgaaatttctaacctaatttataacatgaacaatgtngaacatttcttctaactttt

SEQ ID NO: 172836 - DNA, 413 bp, Glycine max
ctattacggacctataaaactaagcttaatggtataagcgtggtctctgacgatggattctttgatttgttgtttgcccctaatttgttttcgtcttgatttttttatttggtaaccacctatcaaggtatcccacaagtttcagtcctttgaccgacaaaggatcggttatgagtcgggacatagtcacacctttgcccctaccaaagagtgtatctgggggtcgaacccaggtcttcccctggtttttggttttgcttactataaaaaattcaactagataaaagcctatagtaggcaaccatattaagaagcaaatcaaaccggataaagtagtttgctatcaccaaaactaagggtgcagacctcattgttgacagtaagtatcagatggatcactttgcagcccatga

SEQ ID NO: 172837 - DNA, 440 bp, Glycine max
  unsure (1)..(440): unsure at all n locations
agctntaactaattcagaataaacaggcaatttttaagacatganaggaatgagattggagttctcaaatgcctgaatgcattcaaaactctcattggaaaagaaatccatgtcaatgaattttggatcaataatggaacaagaagagaaaagatttgtgtaccatatccgttgttcttctgatgagaacaatgaggaagaggaaatggaggagggaatctgcatttcttgagtctcggaatgccgttggcttcgactcgaagtaccctttcacttctttgatggttccaccatttgagggagttatttgaaatttaaataagtttaagtgaaagataatgaaaaaagatgaagtttgggctctgtggggagtgatttgacaagaaatgagtgagatatggcagaaagaagaattgggaacgagggttcgcgagaaaatg

SEQ ID NO: 172838 - DNA, 462 bp, Glycine max
  unsure (1)..(462): unsure at all n locations
ntgacaactntaaagtagaagcataggagccatgactntgtctctgtatttaatggaatctaaaagcaaacagcaaagtcagaaagagagacattgattaatttattttgcttgtgcaacaatttatttcctggccatgatgatagcccttatgtactcaaaggaattttctggtttcctttctaacttgcttgttcacggtcaatggtacaaagctgattaacacactcagaaaatgatcgcctatcttccttcacaacctcaactntgatggtggtgggtgtccttcatcatgatgaatattgatgaagatttttccttttatgatgacccaaatgtcataattaagtttaatttgtaagtgttatgcaataatctattgtagatatatatattccatcaatttctatataagatcagttacttaattcattaaaataaaaaataattaatttaattaat

SEQ ID NO: 172839 - DNA, 297 bp, Glycine max
  unsure (1)..(297): unsure at all n locations
agcttctatattagacctcgatcggtcatcttttctggncgacgccgactgtcattntttcgatcaatatcggcgaataatatttttttgccgaggtgggctaatgttttcctggccgaataaatgggaacatgccagtttcggccgaaatgaaacatcggttgagctcgcaagaaaaaacctagccgacctacattgtaagttttttatgcaacaccgaatcaaaaaaacttccactgccgtaagaaaaaacattatcggccagcgagccgtttttttttttaaaaattgcgcaat

SEQ ID NO: 172840 - DNA, 423 bp, Glycine max
  unsure (1)..(423): unsure at all n locations
ngagatgaggaagtgttgaagggtgaaacttcctgcttttatttgtgaccacagagtggtacctggagatatgtcgcgggggtcacgagaccttggggacgtcaggtggggtgctattgcccaaaaccaagcttgaccaatcccgacccaacccgggcatagtcggtcagtgagaacctgtgatgtacctaagcaggcgagctcctggcagtcaacagataaaaggaaaacaagaccacaaagcaaggaggcttgtggtggctggccagctgtgaattttgtgtaatatgtggattgtggcctctggtaatcgattaccaagggtgggtaatcgattacaaggcttaanaatgaagacaggaggctaagatggtctctgggtaatcgataccacggcgtgtaatcgattaccacgcttgaaaa

SEQ ID NO: 172841 - DNA, 306 bp, Glycine max
  unsure (1)..(306): unsure at all n locations
caaaggcagctcctatatgtaatggtagtaagggttggagcccaaaacctaaaccaaaaactaatggggtggttttaaaagccaaactgcngaaagaaccacacaaaggtaagagttatgaagttctgataagatctgtatcagttagtctggattatcgcagcagccattcacaagggaatttggtggcagcccaccgggactgcgtggtagagaatctagccaagcagaatactgctcaggaaaagccagtgaaacatgattcctttcagggaaataatggtcggtttacagataaactttgga

SEQ ID NO: 172842 - DNA, 478 bp, Glycine max
  unsure (1)..(478): unsure at all n locations
ctttcctcttaacttatgagaaagattaaattactttttgtgttttaatttatcttaataatcttatttaaccaggttagattatattagacgtatttttaaagaaaaagtatttcagatatatgatacaatattgattctttgttatttgtttttaatttcaaatatctaaaggcggatggattcatcactgattttagtccatattgactcatctttggattaaaaaagtgatctctacccttcttatgaaagtgcgattcaatcctagtttaaagctaaaagttcttgcaactttagatcgtccaattctacgggagcgtatatacaagaaaaattaanaatattatgtgcccgtaaataaaattataagagcaactncctttgtatcatatattatacatcttcataagatacaagattaacccaataattaaaaaagatcttaaattccaattttttaactacatattttaac

SEQ ID NO: 172843 - DNA, 413 bp, Glycine max
  unsure (1)..(413): unsure at all n locations
tctcccncacatttctataaatagggggagaagtgaagtagaataaggtttattcccttangcacttctttctctctcgaaatagctgaggaaaattagttccgtgaagaaaatccaagccgaggcgcttgtgtaacgtttccgtaacgtttctgtgagtgatttcgcgaaggtttttgaccgttcttcgacgttcttcattcattcttcatcgntcttcagtcttcaccgggtaagtacctcaaaccaagctttttaattcattctatgtacccgtggtggtccatatttggtttcatgtatttntattctcgttntcatttactttttatacccccatttgacgtgcttaagccatttatttaagtcattntctcgcttaatctaaaaataaaataaatatccaccgatcg

SEQ ID NO: 172844 - DNA, 456 bp, Glycine max
  unsure (1)..(456): unsure at all n locations
tctgctaccanaaaatctgatccatccactgtaacaaccactaacagccctttttttcttgaagtactaaaattggatcaatttgaaaatcctattcttgttccctaatgatttcatgcgagagttgtgttagtaatcttcaggctgcagtacctcaagcaatattttatttgggatgaccaaatacataatatatcacaaaagaaaattttcttttatatatcttttattattttaaaattntatacgttaagaaaaataatcactttataaattcataattttgataatcatttaatacatagaatcacataagtagagcgattntatctgtaaattaaaattntgtaaacacctacacaaaactttcacactaattggaagagtgattctgattgtactaaaatcaacacaactaanaaaagattgcaagttaattacattataatacattta

SEQ ID NO: 172845 - DNA, 442 bp, Glycine max
  unsure (1)..(442): unsure at all n locations
gagattataaatatgtgaccatgacatgaatntaaaaaagaatcaagaatctatctttcaatcttttctcaatatcattcaatatctttcaactctttctacagaatttttctgattcatttctcttcatctttctaaaagtttttgttcaacactttctcttccaagaaaagttctttattcaaaaacttgtgctattcatctttttcattctcttcttcctttgccaaaagaacgaaggactaaccgcctgaattcttttgtgtctctcttcttccttacaaaagattcaaaggactaaccgcctgagaattctttgtcccaacacattggagggtacatcctttgtggtacaagtagagggtacatctacttgnggattgtacactgagaacaagaaagggacatctcttgtggacagttcaagtggagggacattcac

SEQ ID NO: 172846 - DNA, 318 bp, Glycine max
gcttgttcttgactcattttcttcttcaagtggtgtctttaatcatcttccttccctctccattcaactgccattgatcttcaagaagcaaaggaatccattgatgaagaagatccaaagcctacaagctccacatggagctacatcataggttccctaaccctaactgatccaatcctaccccccaagggcattggatagaagactccaaaaagattgggccagagctgctgaagaaggccctaaggttctcataagccttagggtagattttttgcgaatgtgctaaatatgagcccactgaactttgtacatatt

SEQ ID NO: 172847 - DNA, 492 bp, Glycine max
  unsure (1)..(492): unsure at all n locations
ttttgtgaaacttcatgtgctactcaatgttntgaaaaactttttgtacttatcttgattgagccttttcttgattcttgaatcttgatcttgattgttcttgattcttgagaaacttgaaacttgaaacttctcttgaatctttctcttgattcttgaattgttcttgactcaatcttgaaatcattctcatgggctttttgtcatcatctttgttatcatcaaaacaccttgaatcaatcttgattcatcatcgtgaatcaatcttgattcatcatcatgaagcaatgaagcttgcttctacagggacaaatatgctttgaactgcgcttcctttggatgatgctctcctacaacctaagtcaaggtagcaggagataacactgtatatgctcagggttcaatcaatcaacaattcattcagctcanacagggtacaagggataattcattaaagcacatggtcagctatttggctaagtggctatcaca

SEQ ID NO: 172848 - DNA, 314 bp, Glycine max
tgaagagagtatgatgaactaagggacgtcaatatggccaccgatgaagccttggaatgaaaaaccaaaaaggcccgaaaggaagaacacgacccaaacaagttttgaggggctttatagggcagcaatagtgagctcaagctccgaagaggtgaaaggaatcatcacgagtcaaaggcatgatctggaaggacgagctaaaggcttgccttatgtcgaaaagaaatttgtcccaatatttaaagcgagactgaagggtatatgtgggccatcatcgataagtgcaaagagaagctaaatctatcggcgactca

SEQ ID NO: 172849 - DNA, 371 bp, Glycine max
  unsure (1)..(371): unsure at all n locations
tggagaaggctgagcaaacgggtagcacaatgcatcacgagttctgcatataanaggaagaaagcgctcctcgtgatggcgcgttgaacctgcaaaagcaagccgcagcctccaatggcgtttccctgcttcctgtagctgcaacaacctgctgcagcactgtgccctgtcaccttgtcacctgcgtcacctgcaaagctaaaacaccagtcaaactggcatttctggaaaccatgcacaacgcgccagtggaggttgcgcgtcccactccacgtaagcacaaggcgaacccgctgctgctattagcgcgtccctctccacgtggcagctccttcgcggaagcgccagtggtggtggcgccatgcatgacg

SEQ ID NO: 172850 - DNA, 332 bp, Glycine max
  unsure (1)..(332): unsure at all n locations
gggatcccggggaatggtgaactggatctacctaacaggaaaggagagcatttccttatatatataagaaaatccgatgtagggagtcttattgcgggcctacacattctacacccaaaaaacttttccacagttggggggacttaattggctctcccacaataacctgcttcaccatgggagaagttttccaacctacctataattctcggaaaataaaaaacttactttaagagaaaaaataaattttatttaattaaaaaataaaagtgaaagaataaatgtgaaacaacacnaatgtgtgtattttacatgctgagaatcaatcattc

SEQ ID NO: 172851 - DNA, 475 bp, Glycine max
  unsure (1)..(475): unsure at all n locations
attagtaattaatgtacgtaaagttagaaattttatggagatagntaagggtgattaatggtgatttagattccataaaattagaaaaagggtaattaagtcataagagtttaaagtggtgggtattttcataaattactatataactagttcaaaaatagaattttagttgaactatttggtgactaattaaagtgtctaattatatgatgtggaataattaaaataagttagagttgtaacaccctataaaattacaactcaaactgacagaggaaactctgtgttgtgccatctatgcatgtatgaatttaattntagtagttatgtgtttntatatagaaattttctaagctagaatttcatttgtgcaagaattgtattgtgcattgagtcggaatgtaatttatctttgtatgagtggactctgtgcanggtgtagagatagggggagcaacatanacaacatgaatac

SEQ ID NO: 172852 - DNA, 385 bp, Glycine max
  unsure (1)..(385): unsure at all n locations
tggaggcactccaatttgcttgccagacctcaaggtgatggcactcacattttttggattttgcataatntggtgaaggcaatttgtcacaattttgggactgagcttggttcaattgagtaaccatctgccccctctgatttgtcagactctgaatgaaggctcttatttcttgctgaaattgcatattctggatggtcatttgtctcactaactcctctaaggaaggttgagaaagggcctcatctgcttgttgtctttgttgttgctgctactaatgcatcggaggaggaacatatggtccgcttggaccancaacattttgaaaggagggcaggttgttgttgttgggaggacttgccatctagattcgatgattcttcca

SEQ ID NO: 172853 - DNA, 371 bp, Glycine max
  unsure (1)..(371): unsure at all n locations
cttctacggtaagtgtctcctccaaaaggttatccaagaaagaaagtcatttcacaataaagacaaacattaaagaaacttcccctcttagacaacctccacattttctcccttgtaaaaagacactttttagcattgccacacctcttgggcttgaggttattcctcaagtaaaggagttgttggatgagggtttggttcgtaagagcttaaatccttgtgctttgttggtgcccaaaataggtattattaagcaccaaatccctaaaataggtggtatgatgaatgtgttgagtggtgcaacactctnttgtaaaatcactcatgcacccaacatcctcatgatntgtgtacatggngactcatttggt

SEQ ID NO: 172854 - DNA, 378 bp, Glycine max
acctgcggcattgcagcttgaggattcgggcttaacatgtcatactcacttagcgggctctaggtgcttagcgagaagatccctacttatcgtgaagaagctacttatagtgccgaaagtcatgtgaaggggcgcttatcgcacgttgtgtgcttatcacctaattacttacctgtgtgggaaacaatacagaaccctatagctcgaggaaggagaagaagacaaccattgggagccactccttgtccacacatccatcttacttccatttcccttcatatttccaccctttttgtagtagtaagtctctcatacaatgagaggccaaacaacccattgttggggagctttctgccaaactctcttgatgtaatgact

SEQ ID NO: 172855 - DNA, 359 bp, Glycine max
  unsure (1)..(359): unsure at all n locations
acactatgaaactcagctctctatccaggcacattcttggtggcgaagctccttcttccatggcttattccttagtggatggggcctcccctctcctcttctcctttgccttccgctgcatctccatgctggaaaatctccattgaaggacctcattgaagctcaaagatccagcctccatagaagttccacaagcaagcttccatcatctagtgtcaagggagattgctcggtgtcgagggtggtaacctcgactagtgtaagagtngcaggtttgtgaggcatgtcaagctcccctagcttggaccagtgttgtttaagcttcttctgtcaagttgtctggggtggacaagcttttg

SEQ ID NO: 172856 - DNA, 441 bp, Glycine max
  unsure (1)..(441): unsure at all n locations
acctgcggcatgcaagcttgtaaccattagaagagaatgttttgtgtatagaagtatgactgacaatgttagtcagttgttagatggattatgaaggaatgcattgaccgtatcccggtgagagtgtgatctttaaattttgagagaaacgattatcatttactactaattttcgcatgaatctctgaagtatggactgaatgcatgaanatgaggacgatgaaggccatgtttgattgtgatagccacttanccaaaaagctgaccacgtgcttgaatgatttatcccttgcacttagtttgagctgaatgaattattgattgattgaaccctgagcctatatagtggtatctccagctaccttgacttaggtcgtaggagagcatcatccacacgaagcatggttcaaagaaaatntgtcccaaattgggggagtaata

SEQ ID NO: 172857 - DNA, 410 bp, Glycine max
  unsure (1)..(410): unsure at all n locations
ctaattattctagactactaattctagttctatataagtntatttattagttaaactcgtcatcaatatctatatactaaagttggagtatgatgaatatactaaaatgcccatggctgagagcttgacagttgtccattttcttgactttttggtcattttatgcccctccagcttggcttggttttgtgccaccttgctgccatgtgtcatttcatggttatggtagcttggtgtgttgttgagtgattagattgccatttctagtttgggtgtgtcgcaacctacccttcggcgggagggcgacgcgtgactcgcgggatgcgtgttccacgaaaggaatacgcgcggagtcgccaccaacgtttatttgaggaaaacgtcggaaaaaccggaaaagacgcgatcta

SEQ ID NO: 172858 - DNA, 307 bp, Glycine max
aaatcactcgtgctggcagcttgaacatacgtacttgtaaaacttactgggaattactcactgcgaattttgagctacaatttttactaaactttctagacatctggaaaaaaattataaaaaaaaaaccaagtgatttagataaaaggaaaaaaaatactaaaaatcatacaagttggcaggaaaatcaatgtcctgaaaaaaaaaaagtgaaatggaagtgtgcgtgttgttttggctaaaaatatgttctatagttggtgcatattttataccaatcttaattctgaaatttcaattgaaaaat

SEQ ID NO: 172859 - DNA, 437 bp, Glycine max
  unsure (1)..(437): unsure at all n locations
cttgactaactcagaatagataggtaatttcagagacatgaatggaataagattggagttntcaaatgcttggaagcattcaaaattctcatttgagaagaactccatatctatgaattntgggtctacaatggaacgagaggaaaaaagatttgtgtaccgtatacgctgttcctctgatgagaataataacccagagggaatggagggaggaattggagcttcctgtgacccagaatgccgctgactccgactcgaagttcctttgcgctttttcgatggttttgccatttgaagagtttttcgggatttcaatcggttcaaatgaaagagattgaaaaaagatgaagtttgggctttgcggggagtggattggacaagaattgagtgagatatggctggagganaaaattggggcgagggttttcgagagagtg

SEQ ID NO: 172860 - DNA, 370 bp, Glycine max
  unsure (1)..(370): unsure at all n locations
gctttctctggtctacatagcacaatcattttcttatacttcttatacaaatggggaacacgttatgccaactctcaggtggtcgtcccaaaccaagaaagaatggtaagatattgctttttttttttaatataatagtctgaaaatagcacctcgtgattatctcaatgtacattnttgtgggattatatgatgttcatagaaattgagggcttgaagagaaagttgactancaagctttgtgcctgactgacagggtattattactttctattgttacaatttggcaggtggtgactatttgcgtgtntattgttgtcatttgcatgtatccttggaaaactacagataggtgagtgtgtagcaatct

SEQ ID NO: 172861 - DNA, 452 bp, Glycine max
  unsure (1)..(452): unsure at all n locations
cacatatgcttgtcattgatcaatgcaatgactcatggtcattggattcctttcatgaagcaactntaatcgacaaccatgacctttttgtgcaagggcattttggtcatttaactaatgactatctctgattggcctaagctnttagcaataactagaaaaaaaaatcaatcttcaatagtcccatgtagaggacctactacggngatttggggttcaaaatgctaaaatttatgtctgagtgtggtttctttttttttttttttcagtttgatggtttttaaaaatcagaaaaaaaatcagaaatatgtttatagacatttttgtgatgttcttcccaattttacatattcttttcatttattttagaatttttgatacttatatcaaatatgattaacaattcaacacanatttactatgcattgtgaattaatccatcatgaacatga

SEQ ID NO: 172862 - DNA, 286 bp, Glycine max
ttcaaaaaatattttccacagtcatatctttttatttggttcttggatggccctccaaggcctatatatatatatatatgtgacttgggacaccaatttgataagaatttttcaaaaccaaaagggtttatcctcttaaaaagcaaaataattttattctcttacaaattccttggcccaaactcttgtgattcaataaggaattatttgagggctcaaatggttcaatctatctctttatagagagatttcttcttctcttcttcttcattctgaaaagggatta

SEQ ID NO: 172863 - DNA, 479 bp, Glycine max
  unsure (1)..(479): unsure at all n locations
gatacaaacaatntaaccaaccaacatttatacttaaagaactacgtaggtctgaattcctcatcgaacctgaggatacgtaggagtgaggaaaacacccttgtcaaccccaaaaaaagtaaaaaaaaaaatataaaagggaaaataaatataaacagaaaaataaatgatattaaagtcatgatttgctcactcgattagaggctatcgtctattgtgacgagcgcgtggggtgctaataccttccccgtgcgtaaacaactcccgaaccctcattttcaaaactcacaaaccctttttggtttttctagcattttcctcaaataaacgttgtggcgactccactcgttttctcccttgtagacaaatgtnttggcccatttaatttggcctnttcacacccccaccgaanggtatgttgtgacaagcggcgtgttnttctcttttagnttctntcattaattctcttctttcttcct

SEQ ID NO: 172864 - DNA, 389 bp, Glycine max
  unsure (1)..(389): unsure at all n locations
acttttaggtttagccaatttttagattcttccacactttaataattccatccaagcctttacactaaagccattattgaacaacgtgagcatagtctgtctctacactaaagccaagggggaaaccccattaattaatcaatccacacttactatttttatctttctcgaagtctaaataaatgtgcttaagtaacttactagctagtatgtataaattatgagtaataatcatttgtttggttattataatatcctacaaatttaatgctaccatggtactactatagtatactagtatataaaaaatcatataaacctaaaatttttaaacaagtaattaatttcgaaattgaatctcttaactgaagttgagaattgatntttga

SEQ ID NO: 172865 - DNA, 484 bp, Glycine max
  unsure (1)..(484): unsure at all n locations
tctcccncaattntctataaatagggggagaagtgaagtagatataggttcatccccttatgcacttctctctcttttgaatntgcttaagaaaattgtttccgtgaagaaaatccaagccgaggcacttccgtaacgtttccgtaacgttttcgtgagtgatttcgcgaaggttttcgacgttcttcattcgttctacatcgatcttcagccttcaacgggtaagtacctcaaaccaagcttttcaattcattctatgtacccgtggtggtccacattttgtttcatgtatttttattctcgttttcatttactttttatacccccttttgatgtgcttaagccatttatttaagtcatttctcgcttaatctaaaaataaaataaatttccaccgatcgtttgaattgtatcatccgttaatttcggttaacatgaattccgaccgttcggtcgtgccgtaaccacgttgganatcaaaaaa

SEQ ID NO: 172866 - DNA, 345 bp, Glycine max
catcagctccaatgctaagagcaagaccttcctttgcagccaataagagttcaggattccctttgataattagggattccaatattttattgctaccttgactgagaatcttttctttgctatccatgacgtccaaagtacatgattgagctctgacatctgattgctcacgtttgggagtaaggaagcaagagttgctctgaaccatgttagcatttggaacatcagtacttgcagtcttatcttcaagcgcacggattccattagcatcagattaaccagaagaactgtgagatagagtggaacccggtgacgtgctcgaatgttccttttgcaacggatcac

SEQ ID NO: 172867 - DNA, 350 bp, Glycine max
  unsure (1)..(350): unsure at all n locations
taaaaattggcttttatttcttgctttcaaaaagagttatctctaaaaactgtctttgaaatttgaatgcctttaaatattttggttctcgcttaattacttttcctgctcatttcttttttgctaatctagtttctctcatctcctcacccttactctctgtgttgtcactcttgtctgccgccgatgttgaacccattgtcatcgtcaaaatcaccattgtcgaacgttcttgctctggctctgatcccatccctgaaaggggagttccagtggatgttcgaattccgcctcaaggccttcgacaaattccagtccatgaaggaacccacgtggttngacaacactta

SEQ ID NO: 172868 - DNA, 452 bp, Glycine max
  unsure (1)..(452): unsure at all n locations
tgaggtccattaattgtaacatttcaagatcaagtaccacgtattattattgaatggcagggttcttaattaacatattgttacctaggtggaggaggagcgtcgtttccgcttcgacctggaccaggtccaagaaaaaacttaggtggaggaggtggacttcgcatgggacccaattttctcatttgcaaatctgcaaattcaaatgacaacatattgttacctcttcaagatgtaatatatgtttctacattcatgaaagtttactttntacatattaaactcctacatggaatatataaccaaacattaaatataagctggtgaaagctcgagtagtcgttgtgattctacgatacatgcatactcttttacataatacatatctttgcatatatctttcaatgagataggcaaacctgcactaactggagctagctgtgcaaagaaag

SEQ ID NO: 172869 - DNA, 416 bp, Glycine max
  unsure (1)..(416): unsure at all n locations
ntaacattcaacttcgagcgtctcgatatattacaggactcattcttacatccgagaaaaaagttattgtcgtttgaatttgctcagaggttcaacattcaatttcgagcgtctcgttatattacaggactcaatcagccatccgagtaaaaagttattgtcgtttgaattggctgagagcttcaacattcaatttcgagcgtctcgatatgttacgggactcaaacagacatccgagtaaaaatttattgtcgtttgaattggctcagagcatcaacattcaatttcgagcgtctcgatatatgacgggactcaatcagacatccgagtaaaaagttattgtcgtttgaattggctcagagcatcaacattcaatttcgagcgtctcgatatatgaccggactcaatcagacatc

SEQ ID NO: 172870 - DNA, 316 bp, Glycine max
  unsure (1)..(316): unsure at all n locations
ccttttctccacaaccaaccatttctccccctttggcgacaacaaaaaaccaaagaacttacagatagaacaaaggggtngaaagatattaagatcagagtattaagcataaccatccaaactcacaaacgagaaataatcaaatcagaatccaaagaacttaaaatgtcaacaaacacacaatgtcaaagcagaaaaagtctgaaatcttaataccacaagataaataagcaaagtacttaacgcaataattgaaactctaagaaacttaaacaaccaaaatacacggcttattaaaactaaaaactaagtagac

SEQ ID NO: 172871 - DNA, 435 bp, Glycine max
  unsure (1)..(435): unsure at all n locations
acatcatgtggtatcaagagcatcttcgtctaggtgatgttctnttgcttcctctatctttttgttcggtcaactgactttaattccttattctttatcttattctccatgtatatcctccattttcttgtggtttggtgctgtttagagtagattaaaaaaacaaactgaataaatcttagatctacacttgttctagcattcctatggttcaaatnttatagatctactcttgaatcatngttttgtgttgattttaggttctatcatnttgcagtcataatcttcttgtgctgaacctttagatnntaaatttcttccaaaatattgattagaaaaaaaaacacacacaaaaatctaagtgtgaatcacttaatccatgttgtcttagagtcatgtctagtcataataattgtcacattatgttctaaagtt

SEQ ID NO: 172872 - DNA, 401 bp, Glycine max
  unsure (1)..(401): unsure at all n locations
agcttctcccctatttttctataaatagggggttaagtgaaggaaaaaaatgttgagccctcctggtaattcgagatcacttgaaattagtgaaaaaaattgtttccgtgaagaaaatcgaaaccgaggcgcttccgtaatgtttccgtgggtgatntcgcgaagatattcaactgttcttcgacgttcttcgttcgttcttcgtcgttcttcggtcttcaaccggtaagttcccgaaatcaagcttttcaattcattctatgtacccttagtggtcctcatttgtcttcacgtgcctttattttcattntatttactttccgtacccncttttgacatgcgttagtcatttacttaagtcatttctcgccctaataaaataaaataaatttcactgatca

SEQ ID NO: 172873 - DNA, 468 bp, Glycine max
  unsure (1)..(468): unsure at all n locations
ctataagcgcgggtntgggagacaaaggtcaagtggtcgctattagcgaagatgatgttccgagtacattggatttggtacgaccatgccctcctgatttccagctgggaaattggcgagtggaggaacgccccggcatttacgcaacgagcataatgtaaacccttacggttttaaaagctctatagttgggcctaggctttagagtttttccttatgttaaggctttgtgtcttttgtttttgaatttataatacaaggatctttcttcatctgttcctacgtctctacccattctcattcatttgcatgtttacttctttttctgaaacggcagatccgatgacgagtcccccgaatgtactaatacctgtgacccacctatcgacttcgagcaagaaatgagtccaacggaagatgaaggatacgaggatgtgggacnttccccagaattagaaagaatggtcg

SEQ ID NO: 172874 - DNA, 398 bp, Glycine max
  unsure (1)..(398): unsure at all n locations
ttgatgatgccatatgatcgtgatgttttgataccttatgaaaatgcgcttctcaagtttaattcaagacaaaaatccaagaatacaagatacaacatcaagaagatctctagtgatttaggaagggaattccaaattgaaatagcaaaaggtttggccaagaaatttaagctaaaatgtctttttcaagagatttactctctggtaatcaattaccagaggatgtaatcgattaccaatggccaaaatgatttataacagccataacaagtttgaatttaaattttacactatgtaatcgattacacatgaatgataatcgnataccagcagttactgaacgctttgattcannatttaagcctggaatcgatacataagtctggaatcgatacact

SEQ ID NO: 172875 - DNA, 447 bp, Glycine max
  unsure (1)..(447): unsure at all n locations
tagtgcacgactagtgctaagctcanatccacttactcgtgctaagcgcgagggtggcgctaagcgcaaagtcatgaattcagagcctatttaaagcctgtcttgtgcagaattagggtacaacttatacaatgcccaaggcacagaattccacagcaccccacagtgcctatttcgggaaaagagctctggaggctgcaagagaagcagcctttacagagatacctaggttttgtaagcttattattgttagggtttcttttgtaatggctggctaaacaccctagaaggggatttctaatgaacagctgatgtaaatacttaatatctaattgattatgttttctgtgtttaatgcttccttcaatgcttaatggttgtatgcttttnggttgataatccatttgtgtgcatagntaggtgactttagcattgggaaatgtacta

SEQ ID NO: 172876 - DNA, 303 bp, Glycine max
agctgggttcaagggacttacccattgaagatcgaagaacgacgaataacgcatgaagaacgttgaagaacggttgaaacctttgcgaaattcttcacgaaaaacgttacggaaacgtttcggaagtgcctgggcttagattttcttcacggaaacaatttttccaagcaaattcgaaagagagagaagtgcctaaggggctgaacccttttcttcttcacttcctcccctatttatagcaaaatacgggagatgcttgccgcccagctagcccaggcgagctcagctcgcccaggcgagcca

SEQ ID NO: 172877 - DNA, 446 bp, Glycine max
tgaatgctctattcaatggagttgacaagaatatcttcagactgatcaacacatgcacagtggccaaggatgcatgggagattctgaaaacctctcatgaaggaacctccaaagtgaagatgtccagattgcaactgttggccactaaattcgaaaatctgaagatgaaggaggaagagtgtattcatgacttccacatgaacattcttgaaattgccaatgcctgcactgccttgggagagaggataacagatgaaaagctggtgagaaagatcctcagatccttgcctaagagatttgacatgaaagtcactgcaatagaggaggcccaagacatttgcaacatgagagtggatgaactcattggttcccttcaaacctttgagctaggactctcggatagggctgaaatgaagagcaagaacttggcgttcgtgtcaaatgat

SEQ ID NO: 172878 - DNA, 441 bp, Glycine max
gcttgcttaaaaccatatattgatttctttctttttgcacaccataaggtcctttacctcaactgagaaccccattggttgatccatataaacattctcctctaaatctccattaagaaaggcagatttcacatccatctgatgtagctccaaatcataatggactactaatgtcatgataatcctgaaagaatccttccgtgagaccaaggaaaatgtctctttataatcaatgtcatttttctaagtaaatcctttagcaacaagtctagccttgtaacattcaaggtttccatgagagtcatgtttaatcgtgaagactcacttacagccaactctcttataatccgttggcaattctacaagggcccaaacaccattatattccatggatattatttttctttcatgacattaaccacctctcataatatcataact

SEQ ID NO: 172879 - DNA, 408 bp, Glycine max
  unsure (1)..(408): unsure at all n locations
ntcaggggacttgtcagtctttgtcaccacagccaacgttcttagctcagttntctcaacactttgagacatcccgatggactcacaagtagtaaaatcaacactagcagagagaacagtcaataaaatacttgcttccggctttatatactccatgatcatatccttaatctgatcataaatattcttaggttgtccatgaactggaacctgaattatacaaggaagatcaaccggataaagatcaggaacaccattcttcttctccaacaatgtcaaagggttggtggaaatccctttgccatggcaagcaagctcttctgtggcagcagtggcagcacttatggcctgagaaatgtgtgcttcatctattgaaatgggctggccatagaactccaagacaagctc

SEQ ID NO: 172880 - DNA, 445 bp, Glycine max
agcttgcttctacaatctcttccttttttatgttgacaaacctaatatcaagaaacacatacaaactctatcttctaatcgatcactcacttaattccccccctttgttttttgagtttaaacttcacttgaagttaagttatttaattatatgagttcttgattcagtcccaattttttctccccctttggcatcaacaaaaagccaaagtgcgtatagagacattaaatcatacacaaactcataatcatccaagcattttaatccatacaacaagcaaggaggacaataattcatacataaactaagcaaggaagataataattcatccattaactataataaaatgtcagataattagaaagtcatccaagataaccaaattaaaaacaactaattagaaaagaatatactaataagtgtatcaaataagtcataagacat

SEQ ID NO: 172881 - DNA, 421 bp, Glycine max
  unsure (1)..(421): unsure at all n locations
tccagtctataaaacttcttcatggaaacccaattcagacttctaagctntatcttcttcataagggtttcaagctcatgcttgaaaagccttccaggtcaagttttaggatatatggttagaggaacatcttcatctttgtcaagcagtaactccttgcctttgtgtaacatttagccttttggaacaaaacaagcttatctattgctattcagaactaagtgtttggagtggctaagcaagaaaattgtgatccaagcatgaaaggcagacaagtgttgatcctttctattcttgtcaaaaattctgtcttgatatggtttcttatcttctgtgtaggtagataacttcattcttagcttaggttcatagtttgactgctcatagtctttgaaactttntctctctttaggtgccttca

SEQ ID NO: 172882 - DNA, 487 bp, Glycine max
tgaagtgagaaagtatggaagagtcaatgttcctacttttattctttgacctcagtggtacctggagatatgtcgcgagggtcaagagaccttgtggacgtcaggtggggtgctattgcccaaaaccaagcttgaccaatcccgaccgaacccgggcatagtcagtcagtgagaacctgtgacgtacctaaacaggcgagctcctggcagtcaaccaataaaagaataaagaccacaaagcaagaaggcttgtgtggtggctggccagctatggatcttgagtgatatttggaatatggcctctggtaatcaattaccaagggtgtgtaatcgattacaaggcttaaaaatgaagacaagaagttaagatggcctctagtaatcgattacaagggtgtgtaatcgattacaacgcttagaaatggatacagggagtcgagatgacctctggtcatcgactaccaagcttagaaatggaaatgggata

SEQ ID NO: 172883 - DNA, 285 bp, Glycine max
aaaaacccatcatttattaagtgtttgaatttaaattatattttaaaatttaaagagtattagaatcctaaaaataaaagagtaatttaattattaaacctgggattaactttattatttaatctattattggtactatattaaaatatttaagtattacaataattgattatattctaactataagttataagaatgtgagaataaatcgggaatctatctttgtgtattgatacctttaaagagatctttcctatcaatggattttttttctgtcaagattaa

SEQ ID NO: 172884 - DNA, 411 bp, Glycine max
  unsure (1)..(411): unsure at all n locations
ttgtagaatcaaactatcctgtttttattttcgggccaaccaattccaaacaagtcatattccattgactntttttggtcattcaaggcatgtattgatgtgtttgaattctgtaaacccgtggtgcaaatcgatgaaacatgactttatgggtgatacaaagggacgttattaattgcaactgcacaagatgaggctaacaatatatttccattagcatttttcattgtcaagggagagacagcagatggttgacacttttttttgcaaaacttgagaacccacgttacaccacaacatggtatatgcttaatctttgataggcacaagttaatcaaaagtgcatacaaacgacctgacagtgggtggacaacaggcaactcatcacatgttttctgtattcttcacatt

SEQ ID NO: 172885 - DNA, 318 bp, Glycine max
gctgactttgctctatattaaccaggtgcacaagttggcctaaagtgactccatggtctaattcttttccctttgggtttttgaactaaaggagtagggtttgcatttctctattgttgtcacaaacccttaccttcgtgaccttcttcatgagttctatttcttgtcaaagagcccacacaattgccaccaccacgatccactgaccaccactttccattattgccaaactctaccttggtcaacatgcgttcgtatcagtacccatatgtgcgataaattgaaattgagggtcatgttaccaagatgtttgaactg

SEQ ID NO: 172886 - DNA, 502 bp, Glycine max
  unsure (1)..(502): unsure at all n locations
acttcaaactcagcttaatggcttanacaagggagtatgagtgtngaagtgtctatgcaacagatgtaactactcctnttgagagttgggcttanggaggaggaaagaacaagtatttctaggttccttagtgggcttaatatggaagtgaaggacaaggttgagctctttccatatagggacctagatgacctagtccaactttgcataagggtagagcaacaacttaaaaggaagcctacttcaaaatcatatggctctaactcttatccaaagaaagaccaaggtcaaggcatcttatgggctacaccttctaagcccaaagatgataaggggaagaaaatagaaaagtaaccccctaaggctagtatgcaagagaagactagctctataaagtgctntaaatgtcttggaaaggacatgttaatccccacgaaaanaccatgtaatgagagccaagacattatagtagccagatgagatactacttaccttcctctat

SEQ ID NO: 172887 - DNA, 328 bp, Glycine max
ttgaattcacgagagcttccgttgttcaattttgagtgtcactatatgtgatgcgcctaaattggacattcgagttaaatgttatgaccatttgagattcttaagagcttccgttgttcaatactgagcgtctcgttatgtgatttgcctgaatcggacatccgtgtgaaaagttatgaccatttgaatttctcaagagcttccggtgttcagtttcgagcctctcgacatattatgcgcccgaatcggacatccgtgagaaaagttatgatcatttgaacttctcgagagcttccgattgttaaatttcgagcgtatcaatatatta

SEQ ID NO: 172888 - DNA, 407 bp, Glycine max
  unsure (1)..(407): unsure at all n locations
tataatatattgatatgctcgaaattaaacatcgaanactctcgagaaattcgaatggtcataacttttaacacggatgtccgattcaggcttataatatatcgatacgctcgaaattaaacatcggaaactctcgtgaaatttaaatggtcttaacttttcacacggatgtccgattcgggcgcataatatgtcgagaggctcgaaattgaacaacagaagctcttgagaaattcaaatggtcataacttttcacacggatgttagattaaggcgcatcacatatagagacgctcgataatgaacaacggaagctcttaagaaattaaaatggtcataactnttcacactgatgtccgattcatgcttataatatatngatacgctcgaaattaaacatcggaagc

SEQ ID NO: 172889 - DNA, 438 bp, Glycine max
  unsure (1)..(438): unsure at all n locations
aaccacctcggctgcagctataaaacaaatgccttaattttttaaatctcatgngactatgacgccttcacaacaatcaagcccaggctattgtgcaagcaatcaatggggcaaaacacaccaaatgattataatgatggatggctcaaattctcacaaaggtaaaatcatcactttcaaattgagctttcaaaactatcatgacatgtagagaagaatcaaggatttcaagtcacaaaatgtcaagaacttttattttcaaaacaattacccatttcttgaacatatcctataattcaaagaaaaacatgcaaagtcgtacgtgcacatgaaattgacccaaaatatataactgaaaatctgacgaaactaacaacattaacaaattaacacaacctacagattaacagaaccaaccaaactagcaataccaaagaa

SEQ ID NO: 172890 - DNA, 477 bp, Glycine max
tcaagctggtacctccttcttgactacatcaagaattaccgggttgagtcttctctgtggctgtcttactggtttagccccatcctctaaatttatttgatgcatacatgtggatgggctaataccaggaatgtccgccagggtccagcctataaccttcttatgcttcttgagaactgataacagcttctcctcttgctcattagcaagggaggaagatataattactggaaaactattgctatcatccaagtaagcatattttaaatttgatggtagaggcttcaattctggtgtgggcgattagataatggtagaaagagatggtttctcagcctgtacctcatatagaaagtcagaggtatgtgtacttcctgaaacatggttagttctatctgactctagaaaatcaatatcaagagggtaaacatcaccagacatgtaatcaatataaaatttagattcactctcagcatc

SEQ ID NO: 172891 - DNA, 443 bp, Glycine max
  unsure (1)..(443): unsure at all n locations
acaaaaggcaagatattacattaagagtatcacggatttgtgtttaacaccnncaacaccttgatgctccatcttcaacttaagacaccctagtactaaacttgaccctcaatccctcacctcttttcctccaatgcaggactgaacacaactaagcagcctaattaagttaagcgttgttggatcacaaaacaaatgtatcctttttgttgccaaaaataattaactgggcgctgatatattcaattggctcgaaagaatcatcatatacactacgggtagagcatcatgtttctacgtaggcttttagaacagaacaactctatgtacaagggggcaaagatattctacacgtaacccggcaacatatcattaagtattctgctgctaaaatcctttagaacagatcaactgcactttataaaatacatacagcaacatac

SEQ ID NO: 172892 - DNA, 404 bp, Glycine max
  unsure (1)..(404): unsure at all n locations
ttcataaggatatgacactctggttcttcaagatctcaatgttctcttatggaatatattaatgtaacctttcacagaggtattttagttagtctttatttttcttattatcggataaatatgttttagtgtcgaataaataagaattttttttcgtaattctttaatatgaataattttatttggagttgatctcataaaattacttcttttaatgcaaaataaatgtgcttatttgtcccttattaaaatattatgtttcaattgaaaaatttatcataagaataaaaatatcttaatgcatgattnttttttccattattttcctcattcaagtatatagataatctttcttctttatgttttatgtttgcttttatcgattgtaaaatttccgtcttaat

SEQ ID NO: 172893 - DNA, 345 bp, Glycine max
  unsure (1)..(345): unsure at all n locations
agctngattgaacagtgaataggttgaactttgtatgctgtggcttgntcggtatgaaatgagtgtttgaaaatgatttgattgagcaaatgtatgaattgaatggattgagatgattggatgattgttttgatcaagtttgcagtcattaaaagagaatgagcatgtgattggaagtatgtctgaaaatgttagttggttgtcagattgattgtgaaggaatgcattaatcgtatcccgatgagagtgtgattcttaaattttgagagaaacgactatcatttagtattaattnttgcgtgaatctctaaagtatggactggatgcatgagtttgaggatgatg

SEQ ID NO: 172894 - DNA, 315 bp, Glycine max
  unsure (1)..(315): unsure at all n locations
cgtgtcanggttcatatccaattttaggcactccaagatcataatttcttaacctaatagggaaaactttagacaatgtatacgagatcttaacttcaaaaatcaatgcaaccattatatatataatatataaagtaatggtatttatatgatagacacctttattatttttttctctcacgtgtcgcatagcacatcaatttttatgtatattaactcgaaaagcaaaaagaatttgacccttgccatccacggaaaaggtgctgaaagataaagcagagaatgacgaatttccgttggtgtgggccttactct

SEQ ID NO: 172895 - DNA, 368 bp, Glycine max
acgacgaagaacgaatgaagaacgtcgaagaacggttgaaacctttgcgaaattcttcacggaaaacgttacggaaacgtttcggaagcgcctcggcttatattttcttcacagaaacaatttttccaagcaaattcgaaagagagagaagtgcctaaggggctgaacccttttcttcttcacttcctcccctatttatagcaaaataggggagatccttgccgcccagctcgcccaggggagctcagctcgcccaggcgagccaagtttgcttctccagatgcaacagccttctggaggaatattctggagggcccaagtgggcctgggtgctatttgcaccccccattttactaagtacaccccct

SEQ ID NO: 172896 - DNA, 405 bp, Glycine max
  unsure (1)..(405): unsure at all n locations
ntataagcgcgggtctgggagacaaaagtcaagcgttcgctttatgcgaggatgatattccgagtactttgganttggtacgaccatgccctcctgatttccagctgggaaattggcgagtggaggaacgctccggcatttacgcgacgagcataatgtaaacctttacggttttaaaagctctatagttgggcctaggctttagagtttttccttttgttaaggctntgtgtcttttgttttaaatttataatacaaggatctttcttcatctgttcctggtctctacccgttctcattcatttgcatgtttacnttctttttgaaacggcagatccgatgacgagtcccccgaaggtactaatacctgngacccgcctatcgacttcgagcaagaaatgaatc

SEQ ID NO: 172897 - DNA, 353 bp, Glycine max
aggattgtatgaatatgtgttcaagatgatttgaatgaatttttattaaaatgcaaaacaaagccttgcttttatagactcttcatgtctggtcaagaagaccatttaaaaaagttataacttttagaaaaacttaaaaccaatttgaaaaattcaaaaaccttttgaagagttacatcttttgacttttttcagaaacagtcactagtaatcgattaccaaattagtttaatcgattacacaaagcttttaagtgaaatgatgtgactcttcactttttgaattgaattcaacgttcaaggtacttgtaatcgataccaaaacattgtatcgatacagcttttgaaataatt

SEQ ID NO: 172898 - DNA, 461 bp, Glycine max
  unsure (1)..(461): unsure at all n locations
ntgatatagttgatgacattggggctagatattatagttatttttcttaatttgatttatattttaaaccttgtagttaatatgttatggacttgtattgcctttggagagcaaagataattagtacgttttcatctgagttagatacataaaatttgaaatatgtgataacttttatcaattatgaagttttggaaagctcacttcatatatacaaacgtcacaaactatcacttcatgattaattcatcaccttataattaattaattacaagcatttaaattaaattaaattattattgtaatttaattaaaaccacttaatcaagacattatacaacatagtgttgcatatatgtcacaagacttatggctagtttgtttaaatnntttaaaaaaaaacagaaataagcgaatttttntaaaaaaagaaacttttaaagaaacaaatagatcaaaat

SEQ ID NO: 172899 - DNA, 357 bp, Glycine max
  unsure (1)..(357): unsure at all n locations
tcaaaaacgtctgtatcaagtaacgtgtagaagcacggacatcaagaacctgcagagtacaatgcgactagagttattatatatgtgtgttatgtgagtatgttggatcaaagagagaaaaaaattaaaatacttacttttcagagagtgaatatatagtatatttgaatttaaacaaaagatgtatataaatttgattcagtttatatctgaataaattagatcctttacgtaccactgccacagttgcaattacttaagattncaatagatggagttcatnctttggatcacaaagtcatacattcggtgcagaaatcgaaaataagcatgctctgcatctcgggtgaagaaaat

SEQ ID NO: 172900 - DNA, 471 bp, Glycine max
  unsure (1)..(471): unsure at all n locations
tgtgtcatagtcatatatagacatgtgtgcggtccttcccattgagtcactttccatgcatcagatgttttggataaaattgccctcatataaaaagggcgaggagactcttctgtgttgttggggcaaaaaacgatatatttgtgtgatttcgtttcaacaaccttaaaagtatgatgcaccttcatcacatattgtttccgtgcatttttgaccgcatctttactgtcgaaatccatgccaacatataattcttgtccaacattaaaagtcgttggcatgtccagaccacaaatgtcttcctcgtccggatgactccaattgatattattataatgcatagcatcattccaaaatggattttgaatgtgtggtacacctaataattaaaanaaaaatcatgtcaacaaactactcccctattagtaccattaaatacaattctcataanaagatagatgtataaaccct

SEQ ID NO: 172901 - DNA, 263 bp, Glycine max
atatccttttttttgttctgggcttcctcttcctatttgtacccttccctcccacactatgcaattaaaggtggtttatgttcatgggtatacataatccgcatgaataattaaaattcatccctcgaattattaattgggtactcacgaatgccttgaacatttaaaaataagtgttccataacaagcttgctgcatcattgaacacctgttctaaatgtcaaggatttttgaagacctacttcgaattcaaggtaagacct

SEQ ID NO: 172902 - DNA, 479 bp, Glycine max
  unsure (1)..(479): unsure at all n locations
agcttcatgatgatgaatctagttgattcaagtttttttgatgatgacaaanaacccaagagaatgatttcaagattgagtcaacaagttgaagatcaagattaatttcaagtttcatgagaagaaatcacgaagattagagaatcaagagaagtttgatttcaagattcaagagaagatgaattccagattcaagagaagaaatcaagaagacttctcaagggaagtattgaaaagatttttcaaaaaacaaacatagcacaattttttttttcaaaagatttttctcataattttctaagttaccagagtttttactatctggtaatcgattaccagtttcctgtaatcgattaccagtggcgaagtctgatttcaaaatcttttaactgaattcgcaatgttccaattggtttttaaatggtgtaatcgattactatatattggtaatcgagtaccagtggatctcgaacgttact

SEQ ID NO: 172903 - DNA, 303 bp, Glycine max
  unsure (1)..(303): unsure at all n locations
gcggagctnanaaagacaagagtggtgaaagagaatctgtttgtgccagtcactaaggtcacgaaagaatgtgatgagcttaaagatatctacgtgaccaccgttgaagcgttaaaacaggaaacgaaaaaagctcgaaaggaagaatggagcacgaacaagtttcaaagggctttgtggggcagcaataacgagctcaaacttaaaaaggctgagattgacaaatcaaggatggaaaacatggtgttagaggatnagtttaagatttgtccaaagtcaaagagaagtttgacagagcagttg

SEQ ID NO: 172904 - DNA, 366 bp, Glycine max
  unsure (1)..(366): unsure at all n locations
agctngtttaacagacttaggtgcacagcgagtctttantattggggggnttattctatgtaaatgaatgtgagacatatatctgctttgccaaggatgagtgtttatatagtctattataagaatttacatccataggtgaggatgtagattttgaacaaattacaataacagaagcatcattaataagaggatactattctgtagagctatgagtcataggactgtgttggattaaaggtgggtatttctatgcccagctgagttggctgatgaatatgagatgactgcacataaactggaggagagtaatcaacatcgtgagaatgatgatgaacaaaagtggatgatatcttcgtttgagta

SEQ ID NO: 172905 - DNA, 311 bp, Glycine max
  unsure (1)..(311): unsure at all n locations
gatnagatctaggttaaaccatatctagatgagaaattccaatctagatcagataagatctagatttaattatatctagatgagatccaatctcaataatatcttgattagataagatcagataagatctaattttgtagaaaaaagtagtctgccctcttcaagtccaagctcaattctggattcaagcccaagcccaattctggattcagacccaacgcttccttagttccttgaagtacatcaataacatcgcattagctcgacgggcccagctgataaaactgccttataactttgacaattaagac

SEQ ID NO: 172906 - DNA, 452 bp, Glycine max
  unsure (1)..(452): unsure at all n locations
agcttacaggacggaattcaacagacaaactttgttctctattgtctgtgaaacatatcaattcacgatgtataaggtgttcaaatgcctgcacacaaaaggtaaaaaataccaccaaataagtttggggttggggataaatggcatcatttactatatattgcacgtttggcttcagaaaccaccaaagcagatgaacacacccttaagcagacatgtcttgcataacgttcagaagtcagggtgcttatatactctgcaaaatatgacagacacattaaggaataatatagaaagagtgaaagaaatacaacaaatattacctttcatcacagaattgaagttgcataaactttgctctttaacttccaatctcttcatgcaaaccanatattggagttctaaaatggagcaatctgcttgcaagttgcaattatataccaaaagccatt

SEQ ID NO: 172907 - DNA, 437 bp, Glycine max
  unsure (1)..(437): unsure at all n locations
actcagctttatgatgaccatggtnataattgatatatattaagatcgtacatttattgtgcactanaagatgactntaatgtactcacgaatagcttaatttcttcactttcttgcacaaaataatcctccaattattaacttgtttctcaacaaatatccctatctttctattctttctatggntttagccttttcactatcccaaanacatgattgttacaattattgaactttttgattaattttttttctccaatcgatcgattatttgttttggcagggaagcgagcaaacattgttgatgcaaacctgaacatcctaatggaaagaattcaacaagtgagaaagagagagaggctgatacatacacaagagtggaattataagcgtagttatgaccgtaagtacaagagagattcnatgatatcacaatc

SEQ ID NO: 172908 - DNA, 335 bp, Glycine max
aattatttcacattatttactttcatcacatgtatattctactccgtgatgttcttttttgcaagtggtcatcctgtgtacaaactgctgctacattaatttgcctattattttagttattgtttattaactatataacaaattgtttatttgtgctaccgctgttcaattcttagaatataaatctaatctaagactcctaataaatattactgacataatgctattatgcgtatctaaaaagaaacgctattatattatatataacaaattatatacgtgttcttatttattttctgacatcgtgaactgacgaaacaattatatttttctga

SEQ ID NO: 172909 - DNA, 356 bp, Glycine max
  unsure (1)..(356): unsure at all n locations
tctgctgagaggaatgctcatatcttattgtgngcgangngaccacgtgagattaagtacataacttttgggatctaaccaccgcctctgggttggtgtgacgaacatcggctctgagaaatcttggagaagtgagcggcttgttggttcttggtgaacccatgatgtggagagattgctattaaaggtcgttgtacgacagattgatatcggggtgtatgagcaacttcttttggcgtcgggtcttgctgatagaactggaaagactgacttctactaatgttggttcaagcattggaaatatttatacagcgctgcgtacactgcactttagatgctgctctcagaatcttgtt

SEQ ID NO: 172910 - DNA, 496 bp, Glycine max
  unsure (1)..(496): unsure at all n locations
ccgggatcttaagtcaccgcggctgcagcttgaataggaagtgagaaggttgaattttttgctnttattcgctgaccacagagtggtacctggagatatgtcgcgggggtcaggagaccttggggatgtcaggtggggtgctatagcccaaaaccaagcttgaccaatcccgacccaacccgggcatagtcagtcaatgagaacctgtgatgtacctaaacaggcgagctcctggcagtcaacagataanaggaataaagaccacaaagcacggaggcttgtgtggtggctggccacctgtgaatcttgtgtgatatatgggttatggcctctggtaatcgattaccaagggtgggtaatcgattacaaggcttataaatgaaaacaggaggctaagatggtctctggtaatctattaccaggcttgaaacaaatgcaggaagctaggggagcttctggaatccattaccaggggatgtaattgattaccacgctt

SEQ ID NO: 172911 - DNA, 402 bp, Glycine max
  unsure (1)..(402): unsure at all n locations
nttgctacaacctttttctcccccttgggcaacatcttattttcttgaactcggaaattaacacagntgtaactatggagtagcaagatataagtatctgagtattaaatacaatgagtccaactcataatcaagaaatgatccaaccagaattcaaataacataatatgtcgacaatcacgaaatatccaagactgaaattttaaaaacacaagataaataagcaaagtacttagcataataatgtaaattctaagaaactaaaagccaaaatacacggcttaaaaaagataaataatcagaatctaaaagctaacaagacggaggaggtggtggaagatcgaaactctgacgaatgtatccgacatcctcttcaagctgtgtaagacgaatgtccatacc

SEQ ID NO: 172912 - DNA, 439 bp, Glycine max
  unsure (1)..(439): unsure at all n locations
agcttgagaaagtattgcgtgctcgtgctagttgtgttgtcaactgtcatggtcggtacatgccaaggatggcggtaatatgttaactgattttgaaaatttgaaggagagtgaatgtttaaattgaagttacaatattttagctacacaactccactgcataaaattctctgccaattaatcttttgcttaaaaacttaggcaaaacttcatttggaaatgacaaccaccaatagagtttttacttcttaactggatgagtatgttggttactttgttattttttgtaggctcattgcatcacctaaatagattatttgtttaatgacttggtgaattactaattngtcgaacttcctgcaggttatccctcctggtatggactttagcaatgttgttcgtcaagaagatggccctgatattgatggagagcttgctc

SEQ ID NO: 172913 - DNA, 393 bp, Glycine max
  unsure (1)..(393): unsure at all n locations
agcttctcaaggaagtttgtcaagaaatattctttggaaacttctcaaggatgtttctcaaggaagctacctaggttataaatactagcatgtgtaacacttgttgtaactctgatgaatgaaagtcttgtgagacacacctcaatgttcaactcctctccctcttttaccccttcaattttgtgctcccccctttctctttctctttgaatttcttttcctccattgaagcatcctctccaagcttcttatccaaggcacattcttggtggtgaagctccttcttccaaggcttattccctagtggttggcgcctnctctcacctcttctcctttgtcttccattgcacctccatggaggaaaatcaccattgaaggacctcattgaacctc

SEQ ID NO: 172914 - DNA, 412 bp, Glycine max
tgagatgaggaagtgttgaagggtgaaacttcctgttttttttgttgaccacagagtggtacctagagatatgtcgcgggggtcaggagacctctgggacgtcaggtggggtgctattgcccaaaaccaagcttgaccaatcccgacccaacccgggcatagtcggtcagtgagaacctgtgatgtacctaagcaggcgagctcctggcagtcaacagataaaaggaaaacaagaccacaaagcaaggaggcttgtggtggctggccagctgtgaatattgtgtgatatgtggagtatggcctctggtaatcgattaccaagggtgggtaatcgattacaaggcttaaaaatgaagacaggaggctaagatggtctctggtaatcgattaccagcgaatgtaatcgattacc

SEQ ID NO: 172915 - DNA, 305 bp, Glycine max
  unsure (1)..(305): unsure at all n locations
tagctaagctctagcttctcaaggaagttttctcaaagaagcttctcaaggaagttttctcaagaaagcttctcaaggaagctacctagtctataaatagaagcatgtgtaacacttgttgtaactttgatgaatgaaagtcttatgagacacacttcaaagttccacttctctccctctnttattccttacaattcgtgctcccccctctctctntattttcctccattaaagcatcctcttcaagcttcttttccaaggcacattcttggtgggaagctccttcttcctgccttatttcctag

SEQ ID NO: 172916 - DNA, 435 bp, Glycine max
  unsure (1)..(435): unsure at all n locations
ctcttagttatgacagtgtctacgaccgaactgattcttcttctcttccgattcttctatttgggtcgggtttaactttttaaaactcatttcatccacctttgtttttgccacttttttattatttatttctttaatttgtactcactacactacaatttaaaacgattttaatagcttaaaaatattgattcttttactcaattaattcacatactcaatgacctaaactatttgattcttttactacttatacaataagaatatcaccccgttaagtaatctgtgcttcataaaaaaatctttttccaaattaataataataaagtagtacctacaattaaccgcgtcttaacacaaattaattagaataagtttatcattcatntaagaggagtatataattacctatgataatttgataatattctttat

SEQ ID NO: 172917 - DNA, 338 bp, Glycine max
  unsure (1)..(338): unsure at all n locations
agcttcttgaaatggtgcagactgtatatttgtttacncntccgacatnaatctctgtcggacagaatagatactctatgacctttattgatgactattcacattacggttatgtctacttattgcatgagaaatctcaggtaatggatgccttaaaaatttacttaaatgaagttaaaggacatttagaaagaaagtttaaagatattaaatctgatagaggcgatgagtattatggaaaatactatgaaactgggtaacacccaggtccatgtgctatacttcagaaacatggcatctgtgtgcaatacacaatgtctagttcaccacaccaaaat

SEQ ID NO: 172918 - DNA, 416 bp, Glycine max
  unsure (1)..(416): unsure at all n locations
taatagcaatgaaacttaataagctttatcactacttactagtcgaccaatataagtctcaagtgccaccatgaacaccactccatctgcaactttaatgccttatactctctttcttgtttcttttcccaaatgaaatgattctccatgactgcttctttaggcattgcaatgaaaagaaccccatgagaaaactttgcacggattgaattcatattacatccttttaaaattttaatttctctgcagaaacggctccatttgttattggatgcatctcaggcctttcttggtgaatagttaggatcccncagttgtagggttgaatcttaagtgactcctttttaacacatgcacgaagttaagaataagacnacattaccatttgttaccattagaataaattcatcttaatt

SEQ ID NO: 172919 - DNA, 360 bp, Glycine max
caactaacttactaataaggtaaaccagaaagctaaaaatttgttttctttaaaaaaatcaaacgtttataaaaattaaatctaaattatatactaaataataaacttgaagacttcataattcagtccattttagtgggaatgtttttaaaaaaaaaaaaaaagggacgtatctacgtctaaaaaactttttatgacgactggattttgaatgccaatctatgtttacacaggactatatcatttattcgagatacgatctgcaaaacacgccgtgtgatgcttacaataacaatctcctggtgcaatagatctaccaccaactcacccttgatcagtgctaagtcaaattggaaaaac

SEQ ID NO: 172920 - DNA, 362 bp, Glycine max
  unsure (1)..(362): unsure at all n locations
ctgaataactggatgaaatgattaanacatcctgaaggcttaccatgactactatattttacacaggaaaccgtaattggatttttgtggctggagtgggaaatgttgacatacctatgaagacaaattacctcattgtggattcaagtatgccactgaactatattttacttactattctgtagtctgagtatgtttggtattaatcccctaagaactacaatggttttcttgtgaaattgtacatcatgaaangactcccttgctctttagctaccattcaattgtgataccataaacatatacatacttcttgtaatgatgtgtgttgggtgtttcacattcctcaaagtcctgagaca

SEQ ID NO: 172921 - DNA, 460 bp, Glycine max
  unsure (1)..(460): unsure at all n locations
agctngtgtcacaattcactgtgacagtcattttgtcattcacttaccaaatcaccaaatgtaccatgagaggacaaagcacatagatgtgaaactacacttcatcagagatgtgattcaatttgagaaggtgaaggtggataaggttntaacagaacaaaacacgactgatatgttcacaaagtccctctctagtgtcaagttcaagcactgcctggacttgataaattttgaagatgcctaaagcaaattggtagaagtgcagccctgaatcgcaagatagacactcgttgatttggagtcaaggtggagatttgtggtgtatgactcaaaataaaaaatggcacaagtgagaaggctttaagaggtgctgtcataactgaatccagttattataactgaatgggtcttggcaccaaagcactagtagagtgtatatatactcttgatcatgtaatgc

SEQ ID NO: 172922 - DNA, 242 bp, Glycine max
  unsure (1)..(242): unsure at all n locations
atgacctttccagccatagatacaaccctggatggaggaatcaccctaacctcagatggtccagcccttaacaacaacaacagcaacctgctcctttcttccaaaatgctgctaacccaaacaaaccatacattcctccaccaatccaacaacagcaacaactccagaaacagccaagagttgaggcccctncatcatattccctcgaagaacttgtgaggcaaatgactatgccgaacatg

SEQ ID NO: 172923 - DNA, 476 bp, Glycine max
  unsure (1)..(476): unsure at all n locations
gtgcaagcttgctgggtttccatggtatgggaaattttttactaccccaaatacatatataataatagtcgttttgatacccggagcaaaagttatggctgttttaagttttgcaaaaaataagttctcaaatttttttgaatctctcaaatccagccacaccaagtgttcctggtatttttcacacaaaatatgagtcaaaggaacctaccacacaaaaattcagccaaaaataacaaccctaactatcaaaacaaaaatcaccaattaaattgtaaacagtcgtcgctaattcagtcgctaatgtaatgctgtgtgaacagtaacgcagaatcagtctctaattccgccgctaagcactattcacagcanaacaataaactgatatagggaaagcgctaaacaaggcgtactactgaattgcaaacaaaacatcaaatagaacagaataccacactaacacaacacgaacactc

SEQ ID NO: 172924 - DNA, 367 bp, Glycine max
  unsure (1)..(367): unsure at all n locations
ttctatatgaaatatatctcgatacgagtcctcgaactatagagtatcaacattgctaagaataagaaatcacgaacaaccatactatctatgcaattagggcgaacaccatactactaacatacccagaattataaggttcttataataagtatacaacgtacatatgagaagtaagaatttaatagttaataaggatgtattaaagaatcacaaatttcaactactacattcacgactacacacaaaataaagtgagttaagtagtcatgcgtntacacatcaagaaagacatactcatgcaaggcatatatatgggtcgacaaggttttcacacactaatccacacatcaagatagaaataagt

SEQ ID NO: 172925 - DNA, 376 bp, Glycine max
  unsure (1)..(376): unsure at all n locations
ngcttcaacacgagttagagacatatacaattttgttttacagctcagtcatggggagtcttattcttggcattggagtctctcaacaggggatctcccaacctttgcattgttgaaggatacatcaccctcttaataaatntcaacaaagaaaaaagtgtttgaagtttgaactctcaaacttaaatattagaagttagcagtacaataagcaggaataagtaggcccatttaagctcanaaccagagaataatcgatagaatgatcgaatgatgaagctcaaaaagatgtcatgtagatgtttgatcagctttaaatttgtaatatacctcccaagtattttaattcagtgcacaaactagaataattaataga

SEQ ID NO: 172926 - DNA, 489 bp, Glycine max
  unsure (1)..(489): unsure at all n locations
ctaagcttgtttggctacgtgttggggatcaccgcagtatactttctttttcatctncttgcttatcatttgaaacaacaatgcttgcagccttcataatccattttttgcttgccagcctttttagttcattttttgcttgcatcatcaatatactcctcttttgactttaaaagctgggtattcttcttctcttcatgtttgctgagagcaaggaggttcatcttctcaacaacttttgttgtaggtccattcaaatcacattntagattntgaaatggttccttctcaagtgacattgttttcaacttcacggcttcttccanaacaacaccagtggctttttccattccacagggaaacttttatccctcattntaatggacataagctcacagccggaaggatcaaatatagtgtagctcatattnntaaaaacaatgaataattcctttctagcatttgtcaacactcaaaagatttgtttat

SEQ ID NO: 172927 - DNA, 356 bp, Glycine max
  unsure (1)..(356): unsure at all n locations
agcttgccgcccagctcgcccaggcgagtaatgttgcttcctccagaagcaacagccttctggaggaatcttctggagggcccaagtgggcctggttgctatttgcacccccacttttactaaatacaccccctgcctttttttttgtgattctttttccgtaatgttacgaaactttacgaatttcgtaacgatacttatttntcttccgcaaggttacgaatccttacgaattatgtatttactcttntttagctttcgaagaagttacgaaaacttacggattgcgcaaaaacacctcttttcgacttccgccacattacggaatttcacggatcgcgcaagcctgctttctt

SEQ ID NO: 172928 - DNA, 363 bp, Glycine max
  unsure (1)..(363): unsure at all n locations
ctgaatcataaatctacacttgttgcaagagtctgtggtctatgttcttctgcagatcaccatacagatctatatccttctttgcagcaatctggagtcaatgagcaacctgaagcttatgctgcaaacatttataatagacctcctcagtagcaaaaccaacaacaacagaataattatgacatttcaagcaatagatacaatccaggttaaaggaatcatccaaatcttagatggacaagtcctccacaacaacgacagcctgtccctcatttccagaatgttgttggtccaagcaagccatatgttcctcctccaatacagcaacaacagcaacagtcacaacanagacaaccagcaact

SEQ ID NO: 172929 - DNA, 391 bp, Glycine max
catgaaaacacaaaaaagtccctactacaaagactactcaaaatgccctgaaatacaaggctaaaaccctatactactaggatggccaaaatacaaggcctcaaagaaggaaaacatattctaatatttacaaagacaagtggacccaaccttgggccatgggcttaaaactctaccttagggttcatgagaaccctagggccttcttcagcagctctggcccaatcttcatggaatcttctatccaatgcccttgggaggtaggatagcatcatcccctcccccttgaaaaggaattgacctcaaattaagatgttcttgaaactctacgcttatatcctcaacacctataaaaagaataacaatatatatattcactgtgttatgtatg

SEQ ID NO: 172930 - DNA, 295 bp, Glycine max
acacaaagctcaaagatcaatcaaagaacaacccacgtgaatcaaagatctaatctaagaacaactcatgtgaatcatgaacgattcctgatttcggatcagaatcaagaataatcacgactcatgaggaaagttagagcacgattcaggttcaagatctcatagtcaagatcggatcaagactcggttctaaatctgagaagcttatccagatagtttaagcgttttcgtaaaattgagtaccagattgtctacacagttaccaagagtttactcttgaatcatacagattgtg

SEQ ID NO: 172931 - DNA, 494 bp, Glycine max
  unsure (1)..(494): unsure at all n locations
gatccttaagtcacctgggctgcagctttggtccatcatccattgtgtgctttttaggtgactttagcattggaaaatgtactattgccttagaacttgattgaagtaggattgaaacttattcttacaagagggatctgcggattaagttttggttttaattatgttgttacaataatgcagtttagtctaggtctagtcttacaagagggatctgcggatgaagcttaagctaaattaggctaaactttcgtaagctgcttgagctgagtctagtcttacaagagggatctacagacgaaactcgatttaagttagtctaaacctaagagggccatctaaattaggcctagtccaacaagagggatttgagtatgaagcttggattgattcggtctaacaagggatcgagggtttagtaattaggctacaacatagaacacatgagcatctttgattagagaaatatatttatatgcatcnagcttgttgta

SEQ ID NO: 172932 - DNA, 406 bp, Glycine max
  unsure (1)..(406): unsure at all n locations
attcaattaagaatgagaaatcccaaagagaaaacgtccgattgattttccgctttattntactaaaagacattttttgattattatattattattttacctctttttttttatttccaacgtgattaccgcacgaccgaacggtcggaattcattttaacccaagttaacggataatacaattcaaacgatccgtggaaatttattttatttttaggttaagcgagaaatgacttaagtaaaatggcttaagcacgtccagagggggtataaaaaagtnaatgaaacaagaatagaaatacaccaaacaccatgtggaccactaccggtacatagaatgaatcgaannagcttggttcaggtacttacccgttgaagatcgaagaacgatgaaaacaatgaagaa

SEQ ID NO: 172933 - DNA, 453 bp, Glycine max
  unsure (1)..(453): unsure at all n locations
agcttataacacacattaggaataagaaccttatctcatgtctcaaattaatgttaatgatctagaaagaagaatgtaatatcaataataatttatactatgggttctattttaattctctatattcttactctactaaccaggaaattgacatcttgacaagcccataatatctcatattgtcaagtatttttttatcaataagtttcatgataatatcaatcaacaacttttcaataatttaaattatgcagccaattttactagggttaaatgcaagcaaaacacatgaaaaccaagaagtagaaactcggtcaaagtcatctcagcatgtatccaattttgcaatcacatcctaatgcaattagcaatggccgctagcatcctatgatgtctttccacattnttaaaccttgagctcaactataataaaatgttatcatgctaagtgag

SEQ ID NO: 172934 - DNA, 450 bp, Glycine max
  unsure (1)..(450): unsure at all n locations
caaaaactcagcttctgataaaccgctttattaaaataatcttctaagctctttattatacaatgnctaaanntatcagatgatttgcgatattttttttaaaaatcacaatttaactctcatgaatttctgcctttacaagagaacgttgatattcttttatggtcctactgcttatttcctctaagttatttttgaaatatataactcagcccattccgtttaaaacggctaaataatattcgttaaaggattttaccatatatttttaataatattaagtaaaatagttttaatctacgaggttaactntactcactcgttagttggtttcaaatatatacttaaatntaaataatttattanagaaataattaagaataaaataatgagagaaatnctctctttatatatatatatatatatatatatatatatcatatattatat

SEQ ID NO: 172935 - DNA, 457 bp, Glycine max
  unsure (1)..(457): unsure at all n locations
agctngtaagtgtgcttaaagttttggtcctttgtattaaggtattgacttatcttaatcactcaattttgacacatgaatgactcttggaagcccatggaaattgtgtacatcaaacctactattggtattgtttccttttgaattttctactaaaaatggttaaagtagagttttgtcaataatgagtattctcactttatactaaaactagtaaattctatcctaaacaccttgattagtgttctaatatccctaagattacatgaaaccaaagtgaacctcacacatttgtcactctcacacaaagctaaattacactaccactttgtgtacaacgcaatttcattacagatggaattttcatttaggcggtttccatatctatatcaagctagactaaaacaaattacttacactaaatatagggatatatagcacaaaaattctatgatta

SEQ ID NO: 172936 - DNA, 385 bp, Glycine max
aatttgaaattcaaattgaaaaggcataactcatcaaaattaactgtgtaatcaattaccacatatctgtaatcaattaccactgaggaaattttgaaaataactctaaaaagtcacaactcttcacaagttttttgaaagggtaccaaaggcctataaatatgtgacttgtattcgaaattcttcagagtttttcagaacattcattgtcttatcctctcacaagaaagcctttgaccaaacacttgcaaagtcattaaggattcttataagttcttcaagatgtatcattcttctctaaaagagtgaaaaacattattctgtacttcaaagcaaactattgttaatcaagaagcaatgagtctcttgatttgtaaagttctct

SEQ ID NO: 172937 - DNA, 294 bp, Glycine max
cacggacttagcacgcgctcactagaacatggctacttgtcatccgctaaacaacggcaaacggcaaactaaaaacttagtaacaccgagctagctaaagaacacgcctattaaacttcttctaagcgccgggttgtttcactgcatactcttgtgcgctcgctttttgtccacactctttgacttccttttttcttcttcaccggggcttttattttttgcctcttttctttgttttactgctgcctcggcggtcgttttactgctgtctttgccttttctttttttcactcc

SEQ ID NO: 172938 - DNA, 340 bp, Glycine max
  unsure (1)..(340): unsure at all n locations
ttacttcgagaataaatttaatcttgacatcttttggtgctataatataggtggtcaagcttaccgctgtgcatgtgcttgtgatcgaactggacatgctttattgcacactctctatggccaagctatgagacataatacccaagtttttgtggaatattntgcattggatcttttaantaatagtgatggtaagttgttgcagaaaacatcttgctttcacttaatntgcaattaattaacctaatgaagtcttagccttcattggtcttgatgagntaaattcccatgtgcttcacatcacttgttacaaatgtgttatctttttcaatggtaattt

SEQ ID NO: 172939 - DNA, 476 bp, Glycine max
  unsure (1)..(476): unsure at all n locations
agcttaccactataggaggccatggatatgttcttggaggaagaaggagatgaatgaagagagaggaagagaagaactaaaatacacgggctgaaaaattacaaaattacccctaatacaaaaactagtctaggtgccctaaaatacaagggctgaaaaatcctatatttctaggataccctacctacattatggagccctaaatacaaggcccaaaaataatgaaaccttaatataatatgtacaaagataaatgggctcatacttagcccgtgggcccgaaatctaccctaaagctcatgagaaccctagggttttctcttgcatctctagcccaatctacttggagtcttctatccaatgcccttgcagggtaggatagcatcattccctcccccttaaaaaggatttgacctcaaatcccgagattcttgaaactntgggctttttctctcaacaccttgtaaaaagaacaa

SEQ ID NO: 172940 - DNA, 324 bp, Glycine max
  unsure (1)..(324): unsure at all n locations
ctaacagnttcatttaactgaaagttgtgaatattttatgattattctcactanaccaagaggagaagtgaactggttttcaaaacaaaatgtatctttaaaaaacaggtaataaaaaacttttctatggattgcattacaaacaaatatatgaatcacacataattaatacttaatcaatcattctttaaacatgatctttcattaacattatgtttcttcataattacaaaacttgaaccttttgtgaaaaaacgtgattaatacttgaatgagagaaatagattagattaagagaacaaaagcacaatctttgttatactg

SEQ ID NO: 172941 - DNA, 298 bp, Glycine max
ctctctaaaactccttagctgcgatcctaaatataaaaaacacacatttaactcataagaccctaaataataatacaatagatactgtggattaattatatcacaaattcacatggtgtttcagaaatatccagaaacataaataattaacataggtggctggatttaatgaaactacttaatattacatattttaagggataatggtttaacgaataaatataactaagattggcagtagatcagtacatgtattcattttcatagaagatgtgtgatgatctcagtaatcaactct

SEQ ID NO: 172942 - DNA, 354 bp, Glycine max
agcttatcaaggataggctcgctactagagtttatcttttatgaagaaacgcgggtctgcaagaatctatttgtcctctttgccatgaggagcaggaggaggcaagccttcttgtctttcgctgcactcaaactattgatctgcggtgggaaaccttgatatggattaaggctattggagctttccctctttctccaccaagtcatttcaggttattttgtgaaggttatgttgtagggagaacccactctagatggagcgggtggtggatggctctatctattgctatttgcaagcataggaatttactgatttgtcaggcgcttcctttggtatcttccaaatagatggatg

SEQ ID NO: 172943 - DNA, 164 bp, Glycine max
tgtggggtcaagtatggattaaaacccgcctataactgcctcttgggaagacccgtggatgcatgccctgcgagtgagccctttcacgcttatccagagattgaagttcgcagtgggtggacttttattgatagtgtcaggtgaacaggaccatgtggtgagct

SEQ ID NO: 172944 - DNA, 297 bp, Glycine max
  unsure (1)..(297): unsure at all n locations
gtgcataaataaccaataagtcataagtcatcanaacataaatcatttgtctaagttacttgcatctagaagtcctaattctcttctaatggtgtagaaagagtccttggttagtggctttgtaaagatgtctgcaagttggtttttaatatctaccaacttttaaaacacagtcaccttttntctaagactaagtgctaattgattatcaacacttaccaagatgagtttttattatcatagaagggtttatcatatgcaaataattttatttgaaatacaatataataatcaagt

SEQ ID NO: 172945 - DNA, 361 bp, Glycine max
  unsure (1)..(361): unsure at all n locations
agcttctatataagctgaaccattttatcatttattacaagtggagttntattcacaaaattagagtttatctctcttatcttagtgagagtgattctcctaaattcttgagtgattcaagaacaccttggctgtatcaaaggactttcacaacctttgtgtgttgccctcgctggaaagagagattctttccttcctttcatcttcacccttgttctttcaaaccacaattccagaaaatccacctctgcccagaattatctcgtggccataactcccattttacgcactcaaattaagtgattcttgagcctaaattgaattccaaaacgagagctctccacctcgtttggaatcacct

SEQ ID NO: 172946 - DNA, 470 bp, Glycine max
  unsure (1)..(470): unsure at all n locations
gcgtccgatatatacggactattctgtcatccgagtaaaaagtaattgttgtttgatattgttcagagcttcaacattcaatttcgagcttttcgatatattacgggactcaatcaaacatccgagtaaaaagttattatcggttgaatttgctcagggcttctgtattcaatttcgagcgtctcgatatattacgggactcaatcagacatccgagtaaaaatntattgttgtttgaaattgctcagagcttcaacattcaatttcaagcgttccgatatattacgggactcaatcagacatccgagtaanaagttattggtcgttgaatgtgctcagagcttctacattcaatttcgagcttttcgatatattacaggactcaatcagacatccgagaaaaaggtattgtcgtctgaattgctcaagcttcacattcatttcgacctttcatatatacgggatcatcc

SEQ ID NO: 172947 - DNA, 374 bp, Glycine max
cttatggcgacaacaacaaaggtagaaagaattcttggagttggaaaaacaggtacaaattattcaaactccattgaaaatgttctacttgttgaaggccttaagcacaacttgcttagtgttagtcaattatgtgataaaggctatctagtatcatttgattctcaaaaatgtctcattgaacataaacatgatactaatataaaacatatagggtatagagtcaacaatgtttatatgatagacataagccaaaaattagataataataaatcttttcttagcaaagatgatgatccatggctatggcataaacgtattgctcacataaacatgaaacacttaaataattaatttcaaagattagttgttgg

SEQ ID NO: 172948 - DNA, 257 bp, Glycine max
aattaatcatgccgctctgatgaatgagaaaactcgggcaaatcaagagggtgagaatgacggagaaacccatgttgtgactgccattcctatacggccaagtttcccaccaacccaacaatggtcttactcagcccataataacccttctccttagccaccacccagttatccacataggtcatgcctaaatcaaccacaaagcctatctaccagacttccaatcacgaacaccacctttagcacgaaccaaaaca

SEQ ID NO: 172949 - DNA, 418 bp, Glycine max
agcttatccttatggcttgcctccggacttcatctttctgtgccactccggaagaattaagccaagcccctacttttgaggggcaactcccgccttatgacaactatctcgggcaagacgatgaggaaggagatacccatcttggccccctgctccacctcaaagatccgtccccacatgaactaccccaaccaaacatagtccgccatatcctggcctcacccacacccataaaagaatctgttcccttcgcggaagataagggaaagattgaggcactcgaagagaggttaagagcagtcgagggccttggcaattacccattctcggatttagcggatttatgtctcgtgcccaatatcgtcattcctcccaagttcatagtaccggactttgataagtacaaagggacgacatg

SEQ ID NO: 172950 - DNA, 430 bp, Glycine max
  unsure (1)..(430): unsure at all n locations
tgttaaacccaaagtccgcccttggtgagtctctctgttgtctagtttcgccttcggtgaaatcaaagatatgcaaggtttgccctcgataagcttttccattcctaaatttaatcttggtagttgtcataccctagtttcctccggggatgatcatttgctaaagttttgattcttgccagccaaattgagctgcttaacaacagttgtcacacaatccgtaagggttttcgatgctttggaagagaatgcagaaaatacccaaaagggaaggcaaaatggtcatttggtgactttnttaggcccctggctcgcccgggctagcctttggctcgcatgggccaccagaaagcttagggatgaagtaactagctcgcttgggcgagctgctgtgcaacctncagccctcatttnctataaataggcgtga

SEQ ID NO: 172951 - DNA, 473 bp, Glycine max
agcttagagaggaagcttcagtggagataaagtaatatagagagagggggagcacgaaattgaaggaggaaaagagggagagaagtttaactttgaagtgtctcacaagactctcatacatcaaagttacaacaagtgttacacatgcttctatttatagcctaggtagcttccttaaggaagctagagcttagctacacatacccctctaataactaagctcacctccttaagaaacttccttgagaagcttccttgaaaagattcatagagaagctagagcttggctacacacacccctctaatagctaagctcacctccttgagatgagaagctagagcttatctacacacaccccctataatagctaatctcacccctatgccaaaatacatgaaaatacgaaaaaagttcctactataaagactactcaaaatgccatgaaatacaaggctaaaaccctatactacta

SEQ ID NO: 172952 - DNA, 256 bp, Glycine max
  unsure (1)..(256): unsure at all n locations
tcgatcatcccaccatgacgaccggaaaaaccgcggcacataaagacggtgagaaagaaggagaaacccatgttgtgactgccattcctgtacggccaaaattccaacaacccaacaatatctttactcaaccaataacaaactctcttcctacccaccacccagttatccaccaaggccatccctatatctaccacaaaggctgtctaccgcacttncaatgacgaacaccacccttagccacaaaccaaaacac

SEQ ID NO: 172953 - DNA, 370 bp, Glycine max
agcttgcataataatcccaagttagacaatggttcataacaaagggatgagacaggaaatcaaagaaacaaagggagtgattctgtgggaaaacagacaagtgggtcaatgaaagctaagcacaatttggaggctaaaagagtacttagtaagaaaaggctacatgaagatgtttctggtgtccccaagaacaatgcccagactaataaggagttagatattgtggacgaagattaccagatattcctgaattcttgtagggatgactatatacctagtgaattaatagaaaagcagaatttggaggctaaaagaggacttattaagaaaaggccacatgaaaatgtttctggtgtccccaacaacaatg

SEQ ID NO: 172954 - DNA, 336 bp, Glycine max
agttgctccaacacttaagatacttagctcgctctttcttatccactcttatgtcggctaaacggacttcctacttgacttgattgttcatcgccccaaacttgaacctctaggattgctctacgattatatcatttgggctttctatgatgacaccagtcctactccctttttcattggatgaacccatctgcatacaaattccaccactcggattgtagctctgtagttgttgaccattccacgacgaagtctgctaagcattgagccttcgttagacaccttggtttgtacttgatcccaaactctaacaactagaccgactaacatatcatt

SEQ ID NO: 172955 - DNA, 427 bp, Glycine max
  unsure (1)..(427): unsure at all n locations
agcttactactccgtcaccacaattggttaattctatttttaaaccttcttgcatacattntgtccctttttttttgtatctgtgtgatgctgatcttaccttattcagtgtttccaaacgttcatttcttgtgctgcatttgtatgatatgtaagatgtaagattttcactgcattgtaagctcatgagaggagttggtgttgcaggagcgtcagtaaagtgcatgatacatggtttgctgatgaagaacgagttcgaaaagcagttggcttgttggagaagccaattgtccagcatcctaatgctagagaggtgagatatggattgtggggttttaatactatgaagcacatacacttcttctgtttgaagagtcacagtattctacataaggccaatactgacaagtacaactgtgtgacactt

SEQ ID NO: 172956 - DNA, 406 bp, Glycine max
  unsure (1)..(406): unsure at all n locations
gacctataaaactcagcttgaactgaaaaagaggtgctacagagttttgtcttcttattaagatgacattccattgatatgtgattcattaactccatgcagcatgactatagaagtgaaagatgatttacagganaatcattcaactgtctcagctgaactgaatgtaaatgtggtagacacattaatgcaagatcaatcaactgtctcagctgaagtcagttgtgctaaaggtgcatctaagaaattcattgattcaaatgctaccaatatgccattcatcaagtcactttgtgattctgttgtcaactcaatgtcagattctggcatgctagaaccttcaatatcaaaacctgataatgaatgttctgaggattgtgctctggcaaatggttcttgctttgtg

SEQ ID NO: 172957 - DNA, 460 bp, Glycine max
  unsure (1)..(460): unsure at all n locations
agcttttanaaatgtcttagaattggattgtcttaaaagaatcacataacttttagatttttatatttgtcatgttaaaattgaaaacaatgttcacatatcacactcttattaatcttgtataagaatattactttcacatgaaaatgagcaataacaattattgatttatgaataattaaaattaaataaaagtcgtatattttttaaatattaatttgattaatttttaatcttaatcattcacttaagacaatgaatatttatttttatttatttcatttaatttcaatatataagtggcatttgtttaatgttatctcttttccattctcgagaatataaaagtaaaaacatttattctcatgattattaaaaggttatcaaaatatatcttggtctcatcagagtatcatatattcctaaaatagttaaactcttgtgtcttaggaataattta

SEQ ID NO: 172958 - DNA, 314 bp, Glycine max
  unsure (1)..(314): unsure at all n locations
tcttagtctcacctgatgaattcgaggctacttcatgcacttctctaatgacaatagcatcacttctggcactaaattgctgggagtttgaagctatcttctcaattaaatttctggcttcagcaggggtcatgtctccaaaggctccaccacttctatcatacttctctccatgttgttgagtccatcataaaaatattagaggagaagctgctctgaaatctggtggtgagggcaactagcacataattntttaaatctctctcagtattcatataggctctctccactgagttgtctaatgcctgaaatat

SEQ ID NO: 172959 - DNA, 426 bp, Glycine max
  unsure (1)..(426): unsure at all n locations
agctngngaggactgtgaagatgcctcttctgtcttcaatgccctaaggcaaatgcaaggcttccccttctatgataagcccatggtatcatatcatgtagatccttcttatcttctattgcgctttgcaacgtaaattgttatctacttgcattagtattattattttaaaataggtgtttggatatacttataattagtcagggttaacttttcttgttggaattatcttatttccaatgctactatttgttaaacactataacataacaatctaccatttgcagaagcttgcatgatagaaatttgtttggaaatttagcataatttgcattctaggagattaaaaattaataataacgaaagagaagaacgtgcagagcaatggttatcaattataagcacctctcttcttctcaatagcga

SEQ ID NO: 172960 - DNA, 399 bp, Glycine max
  unsure (1)..(399): unsure at all n locations
actaatatatatgttttaaaaaataatgtattcaaatgtatttaaaaataaattatgaatttaattcctctaacatttatcaccaattttttcactcgaacattaataatatagttctgtaaaagatacatctataatatcagaaataactggtttatagactacaagaaataattctacgctctgtaatatatcagacattacttagttttataaaagctcagaagattgaataaatgtcacataaatcatagcatgtgatgactgaagcaccttntacaacatcgtctgggttttctgctttgtagtgttatctctaaaacgctcgtttatatatgagaaagtgaaagtagtgtgaagtcattctacaaaatgctntattaaacaagaagaagtgag

SEQ ID NO: 172961 - DNA, 479 bp, Glycine max
  unsure (1)..(479): unsure at all n locations
tacccgcgatcctctgagtcacctgcggctgcagctttcccgtcaaattgtttggttcacctttctccttnngaaacgtgttttaccccatgtctttatttctacatgctttgaaatataggaaggaaagaagtcatcaatcaacactatgtgattttacactttntaagaacaagtgcatcttgtcggtgacaattgcataatgctcaactctagtagcaataccaataatcttgatcccatcaaggcaagggactttctccaaattgatactctcttttccatactctaatattgttttagagatttcgtggttatatatggcataacattgtaattcctatggttccatcttgcaacacatcttgtgtataggcatgttccttaataaagtctntctttgccaattaaaagaaggtaacatactttctaacacattatttctaacacactttcatcaatcgagttgagcacttaaa

SEQ ID NO: 172962 - DNA, 445 bp, Glycine max
  unsure (1)..(445): unsure at all n locations
agctntgatgttggtgttgaatgcattaaatgtatttataccaaaagcaagaaattaggtgcatatagagctacgacttcttggaattgatacatacagacatttgtgggccatttcatacaccttcatggaatggtcaacagtattttatatcattcatagacaattactctagatatgcatacttgtctcttatacatgaaaagtcacaatctctggatgtgtttaaaacatttaaagttgaagttgaaaatcaactcaacaaaagaataaagtgtgtcagatctgaccatggtggtgaatactatggcagatatgacggttcaggtgaacaacatctggggcctttggccaagtacctagaggaatgtggaatcgttccatagtacaccatgccatggtcacctagcatgaatggtgtggctgaaagatgaaacataactct

SEQ ID NO: 172963 - DNA, 246 bp, Glycine max
  unsure (1)..(246): unsure at all n locations
gtgcttatctcatgttgcttcccctatctctaacatataggaggttttcattctgacaattataatacccattctctaaatagctaatgaagtaatatccaagctatactacacactttttgataaatgtcattcttctgaaattttaatggtttggtagcggagattatactatcaaaatgtagtctctaatagatcgaagattatgtgtggatactcttacctttntcattttcctatatggat

SEQ ID NO: 172964 - DNA, 467 bp, Glycine max
  unsure (1)..(467): unsure at all n locations
agcttancacacccatgaagaataacgaactcttttatatcgacacaatgtgctatacgagtccttagcggtaaaagaacatggccaggtgcgctaagcgagcatcaatgcgcttagcgcacttatgaattgggatgaactcgcttggcgcctagcttgcgctaagcgagattgcaatgctaatcccagagactcgggacaaggcgctaagtgactgctagcgacttagcaccatatttatttttatttttttttactaattccacccctatttttgctaaatccagtcttattgttatttctacaaatggtctcacggaaatgaagatcggtgcccactcaaggcggagaatccacctgggattcctcttgcttcgctatagagatagcttggcacaggtatcaagacaacatcgatgaatttacggagagctccaatgaaggagtgacaccggtactcactaact

SEQ ID NO: 172965 - DNA, 222 bp, Glycine max
  unsure (1)..(222): unsure at all n locations
gggagaagtgataggattaatgtgtcanncccctaagcacttctccttctttcgaacttgcctggaaaattgtttcgtgaaaaatccaacccagcgcttacaaacgtttctttacattgtccttaggaaatttacgaaggggtccaccgtgcttctacgtactcattcattcttcatgttcttcgacctcaaaggttataccttgaccaactattcattctt

SEQ ID NO: 172966 - DNA, 390 bp, Glycine max
agcttgtagaaatgggtcgacctttccatattattatgattaagggcttgttttcgcgttcctcagatgagggatagagatccaactgaacttttgattaagagcaagaaactatatgataaatgtaaatatttgtattttcaatattgaatgggcaacaatagtaactctatgatgtcatttaacaattaaaaaataataagatcctaatcaataaacgatgttattagtttcatattgcgcatataatgtaaatattataagtgtgtttatcatttattcatctactcaagtgaaatatagtttaaaatatgcatgtacacggcagaatcttcctttctacaacggggaacattttatataggttaaattactcatttagtccttata

SEQ ID NO: 172967 - DNA, 492 bp, Glycine max
  unsure (1)..(492): unsure at all n locations
actcaagctagagtanaaccctttgcattgtagcagtttaatttcctgcttatacccaatactgtcccagtaaaattatgatcccggtttcgttaaccgctggatttttatgaaattttgatatcttgttcgaaattaaattgcgcacactttcaccgttgggatntttgagataacattcgtgaagggagaaaaaggaatcgcatgaagacagtataagtggaggtttcaatcttttcttcgtctctctgacgtttgggaattctatcggagcagtcggatgaataattagggaaccactatagatgttactatcgctggctgaagacacgtgagtctgctcagaggtaagggatgagtntatcgcaatngggggttagaatgaacatgtgtatggatccttagagaactaaattgggtntatttgngatgttattgattataattttcttatgatatgaaacatattatgtgtcttgtccaatgatgtct

SEQ ID NO: 172968 - DNA, 401 bp, Glycine max
  unsure (1)..(401): unsure at all n locations
agcttganaagccagcacaatcccttccttctctaacatcccgcaataagagaatccaaacatcacaaaaacaatgctcaacagtgacatcactaatgaatcactaatccaatgcaatgctcttcgatttaaagttggggaatgacctcgtagtcgtttctgtgagcgccgggaacctcgagggcttcgacgtccaaggaatcgatacggggaccggtgcggacaagtctctgttcagcattgtcctcgtcgtcggaatcaaacatggcctggtggcgcaaatcggcggcgtcgaaatcctcgatctcggagggatcctcctcgtcctcctggaagacccaccgcgattcggtcgagtcgagatcgtcctcgccgcctagcgaagggtgacttttcttttt

SEQ ID NO: 172969 - DNA, 316 bp, Glycine max
  unsure (1)..(316): unsure at all n locations
atatgccaagttaagaatccaaacccttacctaaaagaacaatgaanacatgtgaattgataaaaggtaaggttangaacaaagcagaaagagagggagagagatgcctgggaggtctggtagcccaaagaaggccaaatcatgaggcgacagtgctggtctgacccgggcgaagcttgatgacttgagctcactgganacccactgacagcaccaaccatcgatacanaatgcaataggcgctcaaaccaaatgatgccgtcataaacgtgtaccccggttaaacagtaacagtgaggatatatgtttgtatttt

SEQ ID NO: 172970 - DNA, 447 bp, Glycine max
  unsure (1)..(447): unsure at all n locations
agctngaagacaagactatacgaggtatcttctttgtgtatagcaatatctctaagggctaccgtgtctacaacttgcaaactaagaaactcgtcatcagtcgagatgttgaagttgatgaatatgcttcatggaattgggatgaagaaaaagtggagaagaacgttcttatacctgctaaactacctcaagaagaagatgaggaagaagacccaggtgaaccaccttcacttccatcacaacaacaagatcaagaactatcatcaccagagtctactcaaagacgagtaagatctttggtggacatatatgaaacctgtaacttggccatacttgacacctgaagcattgaagaagcgtcaaagcaagaagtatgggtcaaggccatggaagatagatacacatgatcgagaaaaacacacatgggagttagtaatcgtcccatgg

SEQ ID NO: 172971 - DNA, 391 bp, Glycine max
  unsure (1)..(391): unsure at all n locations
tgtccatggtgatgtntntaggccaccaaacaactcatattttctgtgtgtntatgttggaactggtgttcagttttttgggatgattctagtaacaatgttgtttgctgtcctgaggttcctttctccttcaaaccgaggcgggctaatgacagccatgctcttactttttgttttcatgggaatttttgctggttatgcctctgcccgcatatataaaatgttcaaaggaacagagtggaagagtattgccctcagaactgcaatcatgttccctgcaatcgtttctgccattttctttgtattgaatgctctcatatggngacaaaaatcatccggagctgtgccttttggaacaatgtttgccctgatcttttatggtttgggatct

SEQ ID NO: 172972 - DNA, 456 bp, Glycine max
  unsure (1)..(456): unsure at all n locations
agctntgcatagagaagacgaaagtttttttttgtaaanaagaaaaaaggtctgccacgtgtcacaatgaccttgaacaggcagtcagagtcttgtttataaggaaaaattctcgtgacaaaaaaaaccaaagctctacatagggaagacaaagctttttttttttttaaatttaaaaaagaaaaaaggtctggtactccaatttgagtattagaaagttggaatagttaatgctgagctacatgtaggtaataaagtttgattttaaggtaacatgctaacaatatacattgtttgatattgttaggaataaaagaaaggatgaacaataaaaatatgtgaatcaaacaattacatgattggataatataaacctcactaaatcatgaaacatgaaaacactaaggcatgaaacaccaagatgcaaaannaaaaaaagatatgagataaatataa

SEQ ID NO: 172973 - DNA, 297 bp, Glycine max
gtctagatagttctagagagagaaaggtccttaattctatagagactgagagattatgctgtgtgaagacctgctgagaaccgagcttgaagaggaagctgtcctgagaacttgagatgaatttgtgagtgattgtgaagtcctagaagtggaggagacatcctcaccgcttggatttcttcaatccctcatttttctcttctctttggtgtgaaagaagcttcccacttatggagagctcaatcctttatgggttgttgtggaagcaatgccttcccagattattttgatgatgcc

SEQ ID NO: 172974 - DNA, 474 bp, Glycine max
  unsure (1)..(474): unsure at all n locations
caagcttggtactccaggaggtagtngttatatattttctagaggaaactgccatgcacctagttcaatgtcgatagtttctgaggtaaactctatattgggtagcttttcactcttaactattaccttaggggaaaagaattgtggacatagttctctgcaagaaagcaaaagctccacatgatnttggcattgtggacttaaataaaagtgatgatgcaagacattttccaaaatgcttatactttaagtattacgattacaaatttattgttatcactgaataaacatttctgtaggcactagaaaattgatgagaacttgtatgttaagaaaagtgtaaggtcttggctaatgttgatatgtaccatggaagaaacagggctgtagtggtttgcggctttttagctgcaggctcttaatggtttgatgaaaaatattatgtggtgagcatggagatgctccatactaata

SEQ ID NO: 172975 - DNA, 493 bp, Glycine max
tcttcagacagccatggcttccacatagcaggcagattacttatttatctaaagatgctccagccaactagaacacaaacagagcaaagaacttcaaaagaaagctccaaaacagataaagacatgactttgaaatgagatcaaataacagacaggactagatgagtttgaacaagattgaatagttagaaaaattggattgaattgatgtcacatgagatgaaacttcaaggtttttttctttccgaaattggtcaactagacctagaatctcagttggcaacattcagtttttcattcaccaggtcatctgaaatggttcccaatcaggtggaaatagggtcatctgctccaacagattccacaatacagcacagcgatagcagccaattccaccatggtgtaatcttaaatgcaagccagcataataagggtgcccaggatcattgaattgaacaaactaccttggacctgagaaaatgacaatctaaca

SEQ ID NO: 172976 - DNA, 430 bp, Glycine max
  unsure (1)..(430): unsure at all n locations
agctngaagaacagtaacaaatgttgctttgtctgtgagatattgnngtcacgcatttctcgatacaagtttaaggccacatcactgcactcattttgaatatgtcctgaaattaaagcggtccacattacaatgcttttaaggctagaaaactccgagaaaagaatgtttgcatctgcaagcctttgtgagtccatatacatgcccaacaaagaggtccctaagaattcactaccacataaaagacccctcttcactatagcacaatggatctgcaagcctaaaattaccttggcagaacccttacaaacatctatgaggcttgcaaatgtaatctcagatggcttcagtcccaatatctgcatctcatgaagaagattaatagattcttttgtgttgtttagagcatatcctgcaatcagagcattca

SEQ ID NO: 172977 - DNA, 389 bp, Glycine max
  unsure (1)..(389): unsure at all n locations
gctgcatcaaggattaaatatccactctacaggagaaacatgcctgcatgaatgcaaatggacttctagaattgatggttccgtgaattaacctaatcatttctgtagaagatgtgatcaacgcatgttaggaatctatataattattcattttgctgctaactggattaagaattttttcgttgtctcaacttacaatatgtgtacgtaattaagtttaatatatcttntattaacatatctcagatatacgattgatgtgccagatctcaaaccccattgggaaggataattaatcacgaagagtacagaaagaaagcgtgcaattgagtcaagcattaaagcaatctgaaaaggcttcgtgtcataccacatgtgcctgccccagc

SEQ ID NO: 172978 - DNA, 410 bp, Glycine max
  unsure (1)..(410): unsure at all n locations
agcttacaacatgtggatgatgctcgagcatttctatattctgcaaactaggtatatcgcacagtcttcatcacactcttcagtcgaggagtgatcctcacctcgcctcgtgttatcactgcaaaccaaatacaaagaacgatcctccatcgagtcctccatcaaatatgtatcatataggtcatcattagtccctaccttaatgtaagatttaagcaaaacttgtgccttgactcaaattaagacttctagccacatctagatgcatcctattagtagtatactcatttgcatacatatagtcaccataggagctacaatccgattngaaaaaatcatcattccatgcatgaggagggacattaagcaatctcacccataccaatgtgtcatggtctaccaagcgagcg

SEQ ID NO: 172979 - DNA, 347 bp, Glycine max
atcataatgagagtgattctcctaatgctcgagagattcacgaacaccctggctgtattaaaggactctctcaacctttgtgtgttgcccttcctggacagagtgattcttttcttcgttcattttacccttgctctttggaaccacatttccagaaaatccacctctggccataattatctcgtggtcctaactcccattttacgcactctcattaagtgattcttgagcctaattgactttcaaacgagactttcactcgtttggatcacctcttcggagccctgttctacatccttgcctttctatattgtgtacaccacccttagcttctttagcatccttca

SEQ ID NO: 172980 - DNA, 481 bp, Glycine max
  unsure (1)..(481): unsure at all n locations
agctnttactatagcataggtgctgatgatgtcttatgtctaggcgtgaatatgttttctctgtttccttagcagctattgctttatatgacgtccttcttcagcatgatcattttctctctctttccgtgattccaatctattccttcttggttccaaggcctattgtacccccacattagctcaatcatatatatgttagattcttcgttacttttaaataattatgtatatcttctactgtatagaaacgtgggcatgcaaccttattgctaacgtttatccggatattgaaataaagacgtgcttctttttctttcttttctgcanaagagaaacaagtcttagagtctgaaactggtttcgttactagctatcaaattcactgaaagaaaaccatctagctgttacctcagagattctttctattttaagtttattctctaacgacacaaggtatatatatatatatatatatata

SEQ ID NO: 172981 - DNA, 424 bp, Glycine max
agctcacagagccattgtggcgagagagacatattgttgtttgtgaagacaaaccagccatgggttctctatactaggctatgcataaggccaaaaaggacatggttgggaggtttcaaagaaataaaaagaaaatggagtcttacttggaggtccttaataggtgttggattcacagcttctaaaagatctacatgtaggtggtaattggttaaatccaggttgtagatccaatgttgaagaatttgagatgcataggaatacacaattcggcattctggaactcagtgacacatacacatggagatcttgaatcgctaggtaaactaaatgaacgcatgaggatatataataattgtgaatgagattgtgcaagacaatctgcaatacgtgaccgacacatagtcatgtcacgaaaattcac

SEQ ID NO: 172982 - DNA, 290 bp, Glycine max
  unsure (1)..(290): unsure at all n locations
caagaatcaaagaggcactccatccagaatcaagattcaagtgaagattcaagagaagactcaagatatgccagaacttcaagaaaagcctccagaatagtataaaaagattttttcaaaagaaaagattgaataacacaatttggtccaaagaatttttcaaagaagactattttaccagagtttttactctttggtaattgattaccagaagcccanacagttgtataactattttacaaagtagtaatccattaccatgggcatgtaatcgattaccatggttttaa

SEQ ID NO: 172983 - DNA, 420 bp, Glycine max
  unsure (1)..(420): unsure at all n locations
agcttaactaaactgtacagagaggcgattgttgtttctgctccacctncatgtgtctagcctttaccaccaccactagtaggtgttccacctactcttccacccaccgttcaagctgaaactcttagccttgaccctccaccacaaacatccaacccttaaacacttcccacatccactaccaactccaatataccaccaccaccatcccaaccaccatatcctcctactcaaggataacaatgatatccttcatcacttcaatcaccttgagacccactatctttctgctaatgaccaacaacggagaagtgtcatgacacaattattatgtacacacccgtgctacttaataaactaaggtgtctaaaatccgatatacatgtgttcattcttatatactatcatgcataacactat

SEQ ID NO: 172984 - DNA, 466 bp, Glycine max
  unsure (1)..(466): unsure at all n locations
ctaagctctgcttacatgatggcnaactcatactgggtacatacattctatgagcnngtacaaatcttctaccttggaggatcacatgcagcctcttgaacccttccacccactctgtcatcatgtcgagactcatgaagcccaacaggtttagccttctctaagtattctgaacaaaanttaatggcttcttctgcaatgtacctctcaacaatagatgcttctggacgatatagattctttgtatacccttttaagatctttatgtatcgctcaaccgggtacatccaccgtagataaacagaccacaacatttgatttctttgaccagatgcacaatcaagtgaatcatgatgtcatacaaagcagggggaaaatacatctctcattgacacagtataattgcggcctcattttccaactcatcagacatgactggatcaatgactttgctacatatagcatg

SEQ ID NO: 172985 - DNA, 453 bp, Glycine max
  unsure (1)..(453): unsure at all n locations
atcctctgagtcacctgcggctgcagctntgaagttaattagtgattatgtctgtttgaatagngncatagtttaatttatttttcatatagaattgttcaacgaatgtgaaggtccaacccaaatcttttctcttgcaattcatctgagtgaataaattcttctatcacttagctacttgtcgaagactcaatccgctacattttaaaacatatttattttattccaaatatgcaaaaattgcctagattgaattgagcctaatcccttcctctcctccagaatagttaaaatcgattgattgaaggcttcaattttctcttctcatcatttcccttacgtttagatgcccccaaagacactatggatgcacaaaagcagtgcttgcttaaagggttttcactcgctgtgctgggcatgcaagggcaaggcacaaacctttcaccacacatg

SEQ ID NO: 172986 - DNA, 351 bp, Glycine max
  unsure (1)..(351): unsure at all n locations
tactcagcttaagattgtgacccatcattatctcaaatctttttactcgtcntatatcatatattcatacacacacacacacacacatatatatatataggtcaaaaaaatacctcatctacgacagcataaggtggcatatctaatttgacaatctcatagaagccaattcttagaatctgaaacaaagtactaagatcagtcatagcatgttcaaacaatataaggactcaaagacctatgaatcgttatataaaaaaagaccaatgaatatatggttacaccctatatctttatttcagaaggttcaactacaaaatctttcttccttgcaaaactaaattagagtga

SEQ ID NO: 172987 - DNA, 383 bp, Glycine max
  unsure (1)..(383): unsure at all n locations
tatagatgcgtttagcgtgcctacgtgacgtttgagtttaaaacccaagcacttagcctagccttgcgctaagcccaacctgaagttgtaaaatccagtaagcatctggggcttaacgctgtaagttgcgcttagcgctttctgcaacaccaaatntttctgcaatatgcgcttagcctgagatataagtcttagcgtaccatcaagcttcaacttatagagagtagttcaggcttagcgcaacaagcgcacttccaagaattcaaaacccgtaagagaatggcgcttaacacctccttgcccgctaagcccagcttataaaatcaagttacagaatggatcttgggcttatcacaagatagcgcgcttagagctgctacaat

SEQ ID NO: 172988 - DNA, 366 bp, Glycine max
aaatctagcttcttggacccaacagcacaactcttgtaattttttatttctccacggccctacttctttccattgattactattgctccccatgagctcgcatattgttcgccatactcttcttggaccctttggctcttgtcaagctttgcagaatgcatttttccgtacccggccactcttcgaacgggtacggcacttgaactctcttggaagtttgctttctactcctttgagacttgacttttgtttcttcgggctcaaatctttcttgacactttactgggaccatcaactcgtataactcagcttcggtccacatgatcttacatgcttactctgacttctacgggtcctgccttgatc

SEQ ID NO: 172989 - DNA, 295 bp, Glycine max
tatagtgtaacaccctctacccctcacatatatattaataaaggaataaaaattcaaatattaattaaaaatatttttaaaacactataaaaaacaagcctttcaaatgggtaaaagactcacattcaccttcttctacatcatatccaaactcggccaaataaataataaaagcatctcggctcagagaaagtcatctaagtttcatacaattaatatagaacacatatcctaatgtcacatcttatcagagcgtgtgcgttccgcggtctctagcatgaagatcttcatagac

SEQ ID NO: 172990 - DNA, 263 bp, Glycine max
  unsure (1)..(263): unsure at all n locations
agctngcctagcgtaagaaaggnctaatgcatgtatatgtacacgaaggacgaacataagagacaatacctgaagtcttagttatgcatgcgcttgccacaaggcacacaaacaagaatctttgctatagataattgtagcatctacctatagcatcttacagagacactcaggagagagagagagagagacagacagagagaacatgttgtccatttgcagatgagagagaaggaaaagacacggcgaagagtttcacgcat

SEQ ID NO: 172991 - DNA, 317 bp, Glycine max
gcttcttaacgaagttctctcacaaaagcttctccatgaagctacctatcctatctatagaaacatgtgtcacacttgttgtaactttgatgatagaaagtcttatgaaatacacttcaaagttccacttctttacctctttatttcttcaattacgtgctcccacctctctctgtctctcactctttcttttcctccattgaagcatccttccaagcttcttatccaagcctcatcttggtggtgaagctccttcttccatggcttattccttagtggatgagagctcctctcacctcttattctttggttccgct

SEQ ID NO: 172992 - DNA, 469 bp, Glycine max
  unsure (1)..(469): unsure at all n locations
agcttctagcgtacccgctattggtgctcattatatctccaaaacaaatccctcttattactagctattttgaattctttagttcctgaatgtacaaccttcaaattgttgctcgatcccgtatttgttttttgcaaaaaagaaaattaatctgaaacaattcaggctgaattgttatcattattattactcgaaccataaggaataacagctaaacaagtaatttaaaatgtaacttttaaattatgtggtatttttttaattacaattttacttcaatatctaattttgttaatctacttaggtcgttttttaaatataaatatgaatttaaaggtgatctactgataatataaagtacttgctaatcacaaattatgatacgtatcattttaggatttaacttatttntataaatattaataaatttataataagaaaaattttaacatgtgctgcagtgattcct

SEQ ID NO: 172993 - DNA, 370 bp, Glycine max
  unsure (1)..(370): unsure at all n locations
cttgaaactcagcttaagtgctcttgactccaattgtgcattttgtcttatattgttggngatctgtagaaaacatnaccacagactcttgcncaggtgcagatttctgattcaggcaagatgagttactatgttgaccaatgcatcaagttntccctcaagctttttattttcagtagatgaagatgaatccgtggacacctcatggactcctctaaggataataacatcatttcttgcactaaattgttgggagttggaagccatcttctcaatcaaattcctagcctcaacaggggtcatatcaccaagagctccaccattggcagcatcaatcatactcctctccatgttgctaagtccctcatag

SEQ ID NO: 172994 - DNA, 480 bp, Glycine max
  unsure (1)..(480): unsure at all n locations
ggacctaagcaccgcggctgcagctttgaaagaaaaagcagttgagcattttttttatcacaaangaaagaggatggtacatcgtcgtatgatcactgctatgaccctgaggtcaaaggctataattcaaggatctaacacctccactaaaaaaaggtaaagaagggaaatttcgtattattcattatgttctttgaattacatcaatttctatttataagctttctattctattctacaattgtgtaattctaacagaatttggcatatgtgccttggaggaatctgcaaaatgatatggataatgctatcagaaggcgtttctaatggtcaaagatctttggaagattctgtgctgattgtgctgacaaggctgctgctgacaaaattgctgactcactcattatgccacgtaatccctcaggtatcagaggtttctggctatatctctgtgtccctgatcatactctgcgtccctgc

SEQ ID NO: 172995 - DNA, 314 bp, Glycine max
  unsure (1)..(314): unsure at all n locations
taagctgttccacatcgntgcgtgatgattccactcgacaggtttttattttttataccttcatcctattacccaacgtggcggacaaaagtgggcaattaacttgaatggtcattattgtcaatgcggaaggtattctaccctccactatgcatgttcacacattatttcatcttgtggatacgtgagcatgaacaactaccaatatatagatgttgttacacaaatgaacacatcttaaaagcttactccgcacaatggtgacctcttgggaatgaagtggctattcctccttctaatgatgcatggacact

SEQ ID NO: 172996 - DNA, 354 bp, Glycine max
  unsure (1)..(354): unsure at all n locations
acatttgtcatcagtatcaaccaccgttttatttgcggtgatggctnnttgacgagctacagacaanaatgcattcgtcattgattagcccggctagttgtcgcttttgccgtgactgctcttaaccacctttttacctgcttcagatgcgcgctgcgggtcattcttgaaattacccccgctgtgctgtccaccttttttacctgcttctgatgctctttcgcggtcttctgcaaaattgccggaaccgcctcgatggtttgccattactgacctccgtctgggtatagacatcatattgcatagaattaacgcggcgtatggcggctgccatattttcgctacgtgggacta

SEQ ID NO: 172997 - DNA, 360 bp, Glycine max
  unsure (1)..(360): unsure at all n locations
actaagctagtccacgtagcgaaatatgcagccgtcatacccgtttaatttctatgcatatgangnctatacccagaccgaaggtcagtatggcaaaccatcgatgcgggttccgcaattttgcataagaccccgaaagagccttagaagccagtataaaaagtggacagcacagccggggtaatttcaaaaatgacccgcagcgcgcatctgaaacaagttataaaaggtggtatagagcaatcaccgcacaaagcgacaactagccgggctaatcaatgacgaatgccattttgtctgtagctcgtcaaaaagccatcaccgtcggttaccccgtggttgatactgatgaacaatgta

SEQ ID NO: 172998 - DNA, 423 bp, Glycine max
  unsure (1)..(423): unsure at all n locations
agctttgagatggtttctggccttagagttatttttgctaagagccaatttggtgcaattggccaatctgaggagtggtgtantcttgctgctgatttcttgtggtcccctgcagttcccattcatattcttagggatgcctataggtgttaaccctacaaggaaggtggtgtgggagcctctaatcagaaaatttgaggccaaactgaacaaatggaaccagagaagtatatctatggctggcagaattactttaattaatgctgtcttgacagctntgcctctgttctatatgtccttttctagggcccctgcagcaatcattaagagactcactgctattcaaagacaatttctttggggtggaaatttagaaggaaaaaagatagctcgcgttgcatggaatcaagtgtgtgctcctaa

SEQ ID NO: 172999 - DNA, 357 bp, Glycine max
  unsure (1)..(357): unsure at all n locations
ccatcttgtgatcatttttgctaccaaccaatctaaggaaaaataacatcaccactgatttgaaaatcaccttgtttcatttcataagattatcaacatagtacttccatgttcgaacatgatcattgaattcatgtcagttaccaacatggttagggtggtgatatatagacaaatgcttgtgctaacatccgtagagcatttgattaagatcttccttgaagtatcatattcatatctcacctttatgttgtctatcactcatttcacccactattctcttccaaaaccaatgttcttgccacactttctgatgcaatcctactccccaanggcattggatagaagactccaaga

SEQ ID NO: 173000 - DNA, 317 bp, Glycine max
agcttgtagcaaatgcaaacggcaataacgttatattctgatgttcgattgagtcacgtaatacatcgaaacgctcgaaattgaaaacagaagctctgtgcaaattcaaacgacaatacattttaactcggatgtccgattgagtctcctaatatatcaagacactcgaaattgagaataaaagctctgaacaacatcaaacgacaataactttttactcggatgtccgattgagtccagtattatatctagacactccaaattgagaatagaagagctgagcaaattcaaacgacaataactctttactcggatgt

SEQ ID NO: 173001 - DNA, 410 bp, Glycine max
ctcggatgtccgattcatgcgcataatatatcgagacacttgatattgaataacagaagctctcgagaaattcgaatggtcataacttttcacacggatgtccgattccggcgcataatatgtcgagacgctcgaaattgaacaacggaagctctcgagaaattctaatggtcatacacttttactcggaggaccgattcaggcgcataatatatcgagacgctcgaaattgtaaaacggaagctcccgagaaattcaaatggtcataactttgaactcagatgtccgattcatgcgcataatatatcgagacgctccaaattgaacatcggaagctctctataaattcacatggtcataacttttcacttggatgtccgattcacgcgcatcatatatcgagacggtcg

SEQ ID NO: 173002 - DNA, 451 bp, Glycine max
  unsure (1)..(451): unsure at all n locations
agcttaacaaattatgtaagatactntatttctcacagaaatagtaagattaaagatttgtatacaagcaagatatatagcaacagtaatacaaatagtaattcacataattttgatatgaaaattagtatgctaattttataccaaaaaagttgacctcaacgcttccgtgcacatatctaacgtacataaattaatgtttctttcccgcttgtaactatttaatttaagggaaaaaaactgttactttttttacaaaagagaaaaaattgttataaaccacaaatatcttttataggaaataattctattttaagaggaaaatattatcataaatcatcttttactcaaaataattatactaaatattcaataagaatattatattgtaagctattaacttgtacagctcacacttataatcgaagactttttgtaaaatacgcatgtg

SEQ ID NO: 173003 - DNA, 382 bp, Glycine max
  unsure (1)..(382): unsure at all n locations
gacatgcgcgctacagatccagntggtggttgctataggtgcatttttttcatccacaaatgttactttattaattttgttagacatattatttggatgattcgaacctgatacttctctccctaatttacgtccattgatggatattaattatccatgtggcaaaatattatttaaaacataaataaataataagtataatataaatataaagacctttcagtataatctttntgtcatttaggtttgagttcatatttggggtttcctaggcccagcctaacaccctcttctnccttcgagtcaatcttatttcttcctgttataggtacattctcgatctccangcccagatcgagtactatagggcggaactcgaact

SEQ ID NO: 173004 - DNA, 442 bp, Glycine max
  unsure (1)..(442): unsure at all n locations
cgcgatccttnagtcacctgcggcatcaagcttgaatgcctccaggattnttagacaagttgtctctgtatcttaagaaggggggttgaattaagataaanaactttccctaattaaaattttaactatgttttggattaacaatgcaccccagttgcccaatcaaatagctaggtcactcgaatgaaactagtgtccttatctttacttcccttttatttccaataaaagataagtaaagaagggcaactgtcataccctaatttcgtccagggactatcattcatggatattttgattttcgctagccgaattgagttgttcgacgcctattaccacccaagacgaaagatcattcgacgttttggtgaagaatgcgaaaaatacccaaaagggagggcaaaagggtcattttaatccttnnttttgaaccctagctcgc

SEQ ID NO: 173005 - DNA, 331 bp, Glycine max
ctagactaagttaacataccaccttcagactgatggtctttctgatttgtccattcagtcactggaggaccttcaaacttatgaatagttttcaccctaccattggcatggctccctatgaagctctatatggtagaaggtataggacacccccatgctgactagacctcggagaaaacctcaccttatgacctgaagtggtacaaccaaccactgagaaggtcaagttgatccaaaagaggatgaggactgctcagagtaggctgaaaagctattacgacaagagtaggaaagacctacagtttgaggttggtgatcatgtattcttgag

SEQ ID NO: 173006 - DNA, 331 bp, Glycine max
  unsure (1)..(331): unsure at all n locations
tcatattgtaagtaaatacaagccaacatgtacctctctgtgtagcatttgaattgtcctcttcttgaagcttgcgccgataatcttgatcaaatctgtctaaggcatgcaattcatggtataattcctgcacgcaaagaaaaaagtcaaactaaatgaaatcaggtcttgataaaatcagctgtacagctaaagaaataagaaccaactttccatcacgatgtctattgntgctcatatnntgcagaataaagggagatgagttagaatcagttcatgcctcatttttcagtttataaaataaatatagcaaattntgaaaacttctgtg

SEQ ID NO: 173007 - DNA, 465 bp, Glycine max
  unsure (1)..(465): unsure at all n locations
agctngtaaattgaacacatgtagaatatttttatttccatacctagacaaattcccagaatgtcatcaggaaaatcactaatcacaatatcgtttcttgcatgaacccaagaatttaagtgcttctcagaactaaataacaacgattaatacataaccaaaactgaaaatcattagcagtggcggagctttaccaaaaattgccttttgaggggggcaaaagtttcaagtccaatatttaaaagtttaaaacaagattgtcaaacttgagagattacacaaactggtggacttttgtaaactcgactcataaattcgtaagagtttacctaatataaaaagctatattaaaaagcaacctataaatgacaaattgggcacctctagagtggagaatcatttagaaaataataaagtgcactcaccaacattggttgaaagtctatacatatagaacattacata

SEQ ID NO: 173008 - DNA, 417 bp, Glycine max
  unsure (1)..(417): unsure at all n locations
agcttatgctgcatacatttacaatagactctttcatcctcaacagcataatcaaccacagcagaacaattatgacctctccagcaatagatacaatcctggatggaggaatcaccctaatctcagatggtctagccctcaacaacaacaacagcagcctactccttccttccaaaatgttgttggcccaagcagaccatacattcctccaccaatccaacaacagcaacagccccagaaacagcaaacagttgaggctcctccgcaaccttccctcanagaacttgtgaggcaaatgactatgcaaaacatgcagtttctacaagagaccagagcctccattcagagcttaactaatcagatgggacaattggctacacaattaaatcaacaacagtcccagaattctgacaagct

SEQ ID NO: 173009 - DNA, 296 bp, Glycine max
  unsure (1)..(296): unsure at all n locations
ctctcataactaagctcacctccttgagaagcttctttaagaagattcctaaagaagctagagcttagctacacatacctctctaatagctaagctcaccttcttgagatgagaagctagagcttagctacacacccctataatagctaagctcacccncatgacaaaaaaaaacatgaaaatacaaaaaaaaaaagtccttactacaaagactactcaaaatgccccgaaatacaaggctaaaaccctatactattggaatggccaaaatacaaggcccaaacgaagaataaaaa

SEQ ID NO: 173010 - DNA, 482 bp, Glycine max
  unsure (1)..(482): unsure at all n locations
acccagagtcacctgcggcatgcagcttantcaacgaatgtccaaaatgtcttttatgtgtgttganaaagcataacaagactttctgtgattggtttaaagatacaatctttgtagatgaaaatgcttcaaaaacattaagaaagctagcaaatgggcctaaaagaaatgttataacttggcaaggatacatcataaacaagtattcattttacacaaaagcacaagacgacaaaagtacaatgcagaacagtggggtcaccctaaaggctgaatctcaacacttcgcaagtgtgcatgacaccaatccctgtgtagcttccatcccttactttgggttcattgattaaattcgggagcttaactatgtgaaatttactggttatgttttcaaatgtaaatgggttgacaacaacaccggtgtgcgcaccgatgatataggaattacgttggagacctaaagaaacttggtaccacaatga

SEQ ID NO: 173011 - DNA, 234 bp, Glycine max
ttcttgctaggatgggttgaaatgggggtttgtatgacatagccctatgcctataatgtattttgaagccatggggcatgccacattgtcccccgtccctcgctattgatgcctaaacgcgcgcccacccagtgttcggtgaaatgcctcaatggcattagcgcgtgacttttgtacggaaacaacctatgggacaatctggtttgcacatgtattctattgttatggacatgt

SEQ ID NO: 173012 - DNA, 458 bp, Glycine max
  unsure (1)..(458): unsure at all n locations
agctntgcatgtctagggtttgtagagagagattgtgttcagttccagagagttttgagagattttgttgtgtgaagatctgcagagaccagagcttgaagtaggagccggtttgagagcttgagatgagtttgtgagtgattgtgagatcctaaaggtgaaggagacattctcaccacttgcatttttgcaatctttcatcttgttcttctctttgttgttaagaaggcttcctggtatggaaagctaaatcctctgttggatcttccctgtaggtacctgatgtaaatatatttctatctatttaatgatgttttgtgtgttctcagtgctatctacttttcattccagtgtgcctttaccttgatcacatacatgcatgctttgttaggggcattcaatatatgaaaactggtctgactctataagtcttgatatacagggctgagttgtcgtgc

SEQ ID NO: 173013 - DNA, 299 bp, Glycine max
  unsure (1)..(299): unsure at all n locations
agcttatgctgcaaacagtgaggggaggagctttcttatttataaccaaccacagcacgaataantatgaatccttcatgctacagatacgctccaggttggaggaatcatccaaatcagagatggacaaagcctccacaacgacagcagccggtacccaccttacagaatggtggtcggcccagcgagaccattgtccgtcctccaatgccattacaggagctcaagcgacaacatagacaacaagcacaggaggctcctcctcaacctctcttataagagctagcgaggcaaataac

SEQ ID NO: 173014 - DNA, 289 bp, Glycine max
gcgcccccgggagatgggggacacgggccgccaacccccccccatggggggacttgaagaacgaccccttctgacaaggccgagcgaaacaaccgaaccaatcaaaagacggcacgccaacaagcaccatacgcctcaaaaggaccagaagcccaagaagaacaggaagcgacaaaagaccccagaaaaacgacacaggccaggttgcaagcccaccacacaacacccaaggacagacagagccccgccgcaagcacaccgaacggagggagaaaggacagacacccca

SEQ ID NO: 173015 - DNA, 444 bp, Glycine max
  unsure (1)..(444): unsure at all n locations
agcttgggcatcctaccttacatgtnggattgttgggttgagttaggccttaaccccaaattctaacatgtaatataacatcattcatgtctactcacctaacatctttacgctttaagaatagttggttcatgacataatacaataatataaattcatctcaattaccaccataaattcatctcaattcatgactctcttcttttccccattcttaagaaatcattttttcccttgttacatttcttatcaattatcaacgaaattcacacatccaatgattaaaattcagcaaaaagatcaaaaccttaaacaacaacaactgattgaaaaatttaaaagattataaacaaataatggatgagatttgatattgaaaggtgttgatagaagatgatttccagaggagaaaccaccaaacacgttggtgtggttgagatattc

SEQ ID NO: 173016 - DNA, 428 bp, Glycine max
ataatactgctactggcagacctatctcctttatgattgtttatagagctggattgcaaacaaggttccaatttgggtacaagtgtaaaactccttattaattaaaattttatgaattattggttggaatattgaagaaaaaagaactgacaaccagctgtccttgaagaacttaaatcatggaatccaacaagaactctgcatgctttctgcatggatatcatcaataacttgaatagctggaggattgacaatctagtaaatataaggagctgttaactaacttgcatagctggaagactaagctcctcaggtacatgccatgctcgatctttctcgaaagtcgacaaaagctctggcccagacagcaaccgatagaagtatctgaatagtgtagtttcaaataaatatcaattactgccaatgat

SEQ ID NO: 173017 - DNA, 334 bp, Glycine max
  unsure (1)..(334): unsure at all n locations
agctttaggaattggcttgctgagatggagcattcttccacatnggngctgngggcactgaaagcaaccctcagcagcggttagacatggcggaagccattagaaggataatagagattaaatttgagtgtggtcatgaataaagaagccttgcagattctcatcatgctgaacaatcacagaggaggcatggaacaaacagcttcggaaactgggataatatcgaatatggcagctcctaggtaacactaatttaggtttttcataaagactacacttggctttgttattcccctaacacactatctttttcggggaagcttcaatggataat

SEQ ID NO: 173018 - DNA, 329 bp, Glycine max
aaatcatacacacccttgtcttcccgccaattcctccttctcaaagaacccccaacttctcctcatatagtctcaactcacagtaaggtaccccaattcctccttctcgtattctaaatatatagaactagttagtgacagatattgttatacatgtatgaacatgtacacatgcacattaattgacacatgcgtacttgacctcgacggagcaattatgctcaattaattaaatcaagcacataaccaatttcattttctacgaagatatagccagctagtagtccccggatccattaaatatacaaggaagacaaaattaattacta

SEQ ID NO: 173019 - DNA, 473 bp, Glycine max
agcttggagaggatgcttcaatggaggatattaatagggagagaaagagagaggggggagcacgaaattgaaggaataaaagagggagagaagtggaactttgaagtatgtctcataagactctcattcatcaaagttacaacaagtgttacacatgcttctatttatagactaggtagcttccttgagaagatttcttgagaaaacttccttgagaagcttctttgagaaaacttccttgagaagctagagcttagctacacacacccctctcataactaagctcacctccttgagaagcttccttaagaagattcctaaagaagctagagcttagctacacatacctttctaatagctaagctcacctccttgagatgagaagctagaacttagctacacaccccctataatagctaagctcacccctatgacaaaaaccatgaaaatacaaaagaaaggtccttactaca

SEQ ID NO: 173020 - DNA, 443 bp, Glycine max
  unsure (1)..(443): unsure at all n locations
tcagctaaacaaatattaccaattttcttggacagggctttctctgctcaaccacaggatttggggagaaacatctctatgtggatgttgcttgagagagtgagatttaccttagatggtattgaatgtaacaaaattggtgtcagctatgaagcttttaatcaacaaccaaacttttgcgcttctcccttttggacctgcttgcataatcaattgtggaattttcgggaggttggtacttcaacaataattttttcttctttaattcttattctcatcttgcttttttgggttcatttttgtcattttctattcacttctattnttgcaaaatggatntggagaaaaacatcattgataatcattgaaaatttgaaagagactttcttgtccttaacaggctgacctgaatcgaataagtaggaatcaagtgccactctatg

SEQ ID NO: 173021 - DNA, 411 bp, Glycine max
gcaataacaaatatcatgtgcctacagtgtcacgttttgggttagaactaccattattatttctcacgaggcgcacgtaacacatgatgtatttggaaacatacgcgcaccaattagtcatgcatacaactaggcgggtactcaagcatccaacttatggcattatgatactaaggcttgagatttatgcaagtacacccaacgtctccaaattatgttctttcattggttcaacgaatacatccattcttatcttggatattttggaaaataaactcttagcgacagattcttgtttccaaaagatatgtgtgctctctacgaatgattgattcgtcctatgaccataacacgctgaccttgaaggtcatcctatctctgttgttgttgagacattcttttctatgcatg

SEQ ID NO: 173022 - DNA, 355 bp, Glycine max
ctcaatgcaagggtgggcgctaagcgcttgagactcgcggcttaccgcatgaacaaatatgagcttagcgtgaggcttgcgcttatcgaaggaatgatttttcagaaaatattttctaagttattattcagtcccttccttaataaattgaaacccttatatctaacattcaaggataagctgatatactccaatgtacaaattatacagcaagttacaaatgatcaaatgcatgtaaaaacaaagataacagaaattaatactgggttgccttccaggaagcgcttctttaacgtcattagcttaacacatagcttaataccttcaaagtggcatgaaagtcacatagaacaca

SEQ ID NO: 173023 - DNA, 447 bp, Glycine max
  unsure (1)..(447): unsure at all n locations
agctataatagaacttgcctttctctctttcttattagngagnngacacaaccattgagaattgtgatgttggttttatggaacaacaatctatttaggagatagagaacacgatattgaccactaattgtagacgttctaatgtttttattaaatcatttatcacatgacattgtcaagctggtgctccaaattagttttgcaatcgctcttcaactagtttatcttgaatgcatgtcaatatgttagcagttttagactcttactccatagtttaggcttttgtaaataatatactaacaacatacctaacaataataaccttaaatacgtttttcattctttatatacatatttagaacatgaagaaccatgagtcgcgtcatcaacataacaatgttattgtataaactataatacatattgcaatcatattaagtttggttc

SEQ ID NO: 173024 - DNA, 436 bp, Glycine max
  unsure (1)..(436): unsure at all n locations
agctnganaagcgtctatgacttattactcttttaaagaaaagatgttcttcataaagacccattacacattcctttacaatgaattccgaaaccactcatacacattaggagaagcaaacttgaaatagcaaaaataatccaataatgcatcagattggtgagaagtgaaagcaaacaaatttagtgtaaagtgacccatttttttcaatcggagagaaacccaaatgcggaaaccttgcagtgatgaacacatacccacaagcttattacaaaatgtaaattcactaacaggaaatatacttcaaaaaaaaggagattgaacctcgttgatagcaagcacttggtcgttgctcttctttataaaaggatattgtgaaaaaagacagaaactacaaaagaaggttgtgcacacaacatgagaagatatatacaaa

SEQ ID NO: 173025 - DNA, 420 bp, Glycine max
  unsure (1)..(420): unsure at all n locations
actcaactagcctctattaatgcagtgtatctagcacttactcctctatatgaatgnactaaaattatttaattttagtgctagtagaactaacacgtgacttattcttacccatatgaaccttcttcatgggatctccaatcacaaaggttgggttaccatgccaccctataataggctaatatgccatttccagattgacaggagtagattaaccttttcgcgaggagatataaggcctaaattgagacttagacatcgaattttgatgagattttttgcagacacccttagaaaaatgatatcttggagttcccgaagcctcataatttatttccaagggaatatntttttntttatttntaaagtggagaaatgcataaaatccccaaaaaaaaataaaaagggcacttataaaat

SEQ ID NO: 173026 - DNA, 412 bp, Glycine max
  unsure (1)..(412): unsure at all n locations
agctntagagttgcccaatcccgaatacttatggagacctattgccatcattgatcgctaaccaattggcagcagtaacccctagaaggatttatcagtccccattctcaaagtggtacaaccccaacgcgacctgcacgtatcatgagggaacaccggggcattaggttgaacaatgtatggccctcaagcacaaggtccaaagcttgattgaggcaggatggttgacgttccaagaagatgggccaaatgtgaagacaaatccactcgctaaccacaggggatcggcaatgaatgcagttgaggcgggctgtttgcaaaggactaaacatttaaaggatgccataacctctaggaggttaatntttgaagccctacaagaggcaggcgtggtccctctcggtgggcacaa

SEQ ID NO: 173027 - DNA, 358 bp, Glycine max
  unsure (1)..(358): unsure at all n locations
catgccccttgggggcattttgctttgtatgtncatcctatctcgctctttcggatatcttttattcatttaagggagtttgactgatcgtttagccgaatctccttaataatgtaaaaagaattcaacccattgttgtgtgtaattcatttaatcatctttaagaaaaatcaccgatcgtcacgctgaacctcggtaataaaacaataatagttcagccgactttatctgaaagtctctttatgagtgagaatacccatgaactaagcaagatcactacaataagcttgccccaaatgtatttgaatgttcagttaaccctaaggtccttttatttatcataaaccacgttaagtta

SEQ ID NO: 173028 - DNA, 463 bp, Glycine max
  unsure (1)..(463): unsure at all n locations
agcttataaaatatgaaatgaatgtgctgattaccaangaagaactgctgaaggtgttaatacaatctaactactggaaaaaatatggaccactctaaattataggtgtctttactaaatatgttgcgaaattcgaagacgaggtgactgcgacatcgctaaacgactgaatgcaatgaatggttttttgcttttttgttgaagtaacctttacctgtttacggcgtgtttaaatcccataataaagctnaatatgttatttcaatggtccaaagataatttattttaattgtttgaccttcacaccttacacatacttagaagggtccgattcctatttttttggattttctgcctctttttataggcgttattngatcgaaccacaaaacgacaataattttcttgggttcttatgacgtacaacattagaaatagcgcctctctcatgtcttacgccact

SEQ ID NO: 173029 - DNA, 70 bp, Glycine max
  unsure (1)..(70): unsure at all n locations
agctntgatggtgtaaagaagatatcacatgtttgttatcttcaaaaagggggggggggggaatgttatt

SEQ ID NO: 173030 - DNA, 250 bp, Glycine max
gttcaagatcaagaattaactcaagaatcatttgaagaaatccacaagatccaagattcatgagaaggtggcttccagattcaggaaaagacatctagaagaatcaagaattcagagaagatgaattccagattcaagagaagaaatcatgaggcaacaagtcaggacttcaccagaggaagtttgaagagggattttcaaaaaccaaacatagcacagatttgttttacaaaagaggtttctcaaatat

SEQ ID NO: 173031 - DNA, 433 bp, Glycine max
  unsure (1)..(433): unsure at all n locations
agctngaatctgaagctgaacataggcagctgacttcccaaganaatatgaaaaggaagaagctgcagcaagatctttggtcaccaccccaagctcacgagtctttaatgaggcagaaggcgagatcgcgttggattaaggagggggtcagatatctcgatattttcacatgctgattaactcccatcgaagtttgtagctttttccagaagagatttcaagaaactatgagcagcagaccagtttgggatggcacctcttttcaagacactatgttctttggggaggctactatgaaaaatgtcaagactatcaaattgattttgagggcttttgaattgtcatcgggacttaaaacaactaatgggaagaacagcttttgggtgttgggccaattctaacaatgataattgcggctgccggctatctgaat

SEQ ID NO: 173032 - DNA, 479 bp, Glycine max
gatccttaagtcacctgcagctgcagctagcactgcccaaacccaagttttgctcatccaagtgtcatgatttctatattaccaattctgctagctgttaatgttgaatcataattttgctctctcatctggcattcctctcatcttctaaacctatttcgtgtcatccagatataaaacaaatttctcttactagatttcaaaatcattcttctgttttccttacaactcactcaactctatcattaccctttttcaatatgcagaattaccaacatgcacacatatctaatccacctaatggccgcatcaatagccaagctatgatccagtatcagccctcatgtcctatttctttcatcttctaaattgattgaatctcttacagatataagagaatcatctgtcgcttgatttcaacatgaatctgcctgttagcttatgattcactcaattctggctttagccattttcaacat

SEQ ID NO: 173033 - DNA, 442 bp, Glycine max
  unsure (1)..(442): unsure at all n locations
agcttgcctaggcgagctggagctcgcccaatcttgtggcttgcttagggctgaagaaatttaatggctcatgcgatccatatgctagcctgggcgagtttatgttcacaaaaatttaggaaataaccattttgccccttcctttggcttttgttnttggaactgacaaacaaccatcaaaaccctgtgcgactccttgggcttgtgctataaccggtgccaaacaccataattcgattagcaatgatcaaagcatcatatccgaatgataaaaatattatacccggatgaaattagggtctgacaattgtccctctttacttatcttntattgaaaatataagataagataatgacactaatgtcattctagcaatctgactatacaaaattggatgccagagaacactaaaaaatgaactccaaatacagatgggcattg

SEQ ID NO: 173034 - DNA, 410 bp, Glycine max
  unsure (1)..(410): unsure at all n locations
gtcctaattatatgggccattaagtctatcatatgatgacaatagctgagaaatccatgggattcctcgggggcggagtagatgtccgccattgctttggccttggctagcaatccgggaagttcttgactcccgttcaaggtagaacaaatcggtccatccacatggttgcctcttggtggtacgaatcgatcacccttcctctagcctccttctctgcgtacacttgggcatactcatncgccaccctatgctcgtgggctgtggctaggcttaattcttcttgatactnggtgatgatagctaacatgttggtctctgtctcgcacaaccgctgaaacaacttctcttggacctcgagcaagccttaattcatctttaagatcaaccgctactcgcgatggtccttt

SEQ ID NO: 173035 - DNA, 350 bp, Glycine max
  unsure (1)..(350): unsure at all n locations
agctntattccacactttgtcttgttttactgtatggagaaagatttccatactcacttcaatcaatggtctactagcttgaaggaagaaatgtcttagggttttttttggctctttgggactctagctactgtgcttttatcttatgtaattgggtttggcaggtttatgcctttgtatctatttgttatattttcagcccacctagcactgaatcatttataatattatcagattctgctgttaaaaaaaaaaaaagtcatcaacgcatgatacacatgatgttgaaatgctgctagagctggttttgatttattcatcgtacacaccttatgcttataaagtaatca

SEQ ID NO: 173036 - DNA, 329 bp, Glycine max
tgcttctacctatgacagtgctaagggatgtttccctatatgtataaggtagagagattgttttagaaggagtgctcttttgatatcaccttttgttataaaatgattttccttcttaaaaatcttcttggaggaatccttttcctctttttccttccccttggcctttgaagagaaggccttactatccttctttttcttttgtttttctagtttttcttcctcatccctattatctttcatagttagttgatctttggccacctgtgaaggtgtttgaggatgcaacacaaatttagtgcccagatgggtgagggtaatctcattag

SEQ ID NO: 173037 - DNA, 410 bp, Glycine max
agcttcactgatttagttttcattgactaaatgatcaaagtaggtatgataagaggcaaatttaatcatcctgcttggacgaatgaaaaactggggcaagtgaagagggtgagaatgagggagaaacccatgctgtgactgccattcctatacaaccaagttccccaccaacccaacaatgtcattactcagccaataaccaaccttacccatcacccagttatccacaaaggacatccctaaatcaaccacaaagcctgtctaccgcatttccaatgatgaacaccacctttagcacaaaccaaaacaccaaccaagaaatgaattttgtagcgaaaaagcctactagaattcaccccaattccagtgtcctatgataacttgctcccatatctacttgataatttaat

SEQ ID NO: 173038 - DNA, 299 bp, Glycine max
  unsure (1)..(299): unsure at all n locations
accatagatactcagcttgttaaaacggaagaaaaagaaactgatattgaacgatatatatatgaganaccaaaaacaagaaatgaattaaaagtcttggatttggaaacttacccgttgaagaatgaagagcggacgaagaacggaggaaaacctncaaggatttgcttacggaaacctctcggaagcgttacggaagcacctcgccttggattttcttcacggaaaccaattttttcacccaaaacagctgaaatgcatagccaagggaatcagagacccttagaacaacccccttt

SEQ ID NO: 173039 - DNA, 450 bp, Glycine max
agcttgtaacagcttactgtagaatgaagcatggttttattacctataatcaacgaactaacctccatacccgaaatggaagaaattgccttaagttgcatgatataccatagtcggacaagactctgtaatcccctttgattctgagattgatttgtagcctcttcctctgctttgtaactggattcatcagagagagctgctgcaacttcattttggattgaccaatctatagtatccacaaagacacctgatgtaggttttgcatgcaaattttcatcaatgtgattctggtggccatgaaaaacttctagaccatctttctcaacagcattctcttgcttttaatagttgaattggcacggaaaaaagaggaggaaggaataccttttttcacaataatatagcatgccttcaaatagacccctatgcaatcacaaaagcaatatt

SEQ ID NO: 173040 - DNA, 304 bp, Glycine max
tagctagctaccgaatgaaataaaagcgaaatgtatctttaatatatattcataaataatgttaagactcaaaattaaatgacagaaaaactaccgtactataacttaactactataactatttattaacatatttttcatgtaaaataatacacaaaattattaaaataatacagtcctccttatatttttaatgccatattttgcatcgtcaatagatttctttatatcatttatatggtattatgaatcatatatatagttggaagcttcaaaaaaaaataatcgaagtttcatataattt

SEQ ID NO: 173041 - DNA, 384 bp, Glycine max
  unsure (1)..(384): unsure at all n locations
agcttaacaccttaactaaatgaaagcataggtggaatgaaattactaaaacacgatccatgtgataaggctgaacgatgcattacaaaataacaaaggaaaatgcctcaaggacgccaatnttgaaataagaaagagaattagttattgacaaaacaccaagggggcactgaccttgatatctacgtcaagtaaattgcgaacataacagacttgaaatcccaaatgcttaaagtatctgcctaattgccaaaccgagcagaaaaggaaaaacaattactagcaaaaggaaaagaaggatatggttgaattgacataaatgtgtgtgaagacagaaacctgtaaagaaggtcgaaattgacgtatacgcgagcatgtccaata

SEQ ID NO: 173042 - DNA, 281 bp, Glycine max
  unsure (1)..(281): unsure at all n locations
agcttggaagggtttatggtggacccgtcctttttttaacnangataanggctacttatgagtatgtgatcacatttgaacgtgcgcaactgaggatggtgggttcatgtctgatctagggaatagggagacctgatttgcgccttccccttatcgtcatctaataccacatttaacgcgtcccccatactccaccaaccttgatttgacacagtgtggaacagcctactttccttactttgtgtgtggccacaagtggtacctaaaattatttccggggt

SEQ ID NO: 173043 - DNA, 435 bp, Glycine max
  unsure (1)..(435): unsure at all n locations
ctcagcttaacaaccaagtttctttactacgtaccaagcattttggtccagcaatcaaaagattgatgtttgttgtgttaaagagaaagaataacgctattgagattgaatcgngtgtctaataaacacgattctagtttatatggcttattgcacttattacaaacaaatgaaggatatttgattcctctaaatagtgattatgtgccataaactatatttattaccatgaatgcataatatcaatattcattctcaacattcaccttcagctagagcatatagacatatgtgtaagcttgtataaaataaccaattatcggcccttagagactagtgaagaatctgcaactatcatggagaaatgggtacattgttatattgagtacaaatttgatgaaaatctttgaattcctatgtctatttattgcataa

SEQ ID NO: 173044 - DNA, 369 bp, Glycine max
acccggaccttaagtcacctgcggctgcaactttgctaaccgcaacaatctttgtatggaaatgaccctcatcattgagttagatttacaaaacaaaagaagataatgaatcaatgtttcttaacaagttctgtttcttagttcttagatacttgttatggaaataattatcaaatctttgtatctttaacaagaaattaattacttatgaaattattttagtaaacagttgttaaaactaaaaagtgaaaaagaaatcaaactcacccttaatttctgatgttgcttgcgcctgtcataatggtaggtatgattttaccaaaatttcatttcacgttagtccccgaatttgaaaatcaatgcttatcc

SEQ ID NO: 173045 - DNA, 369 bp, Glycine max
  unsure (1)..(369): unsure at all n locations
cactataaaactcaactagactattaaaagccttatagcctgatttttctacctatatatatacttatattattttttgagtactaatatataatattatttnttggatataattaaatttttttaaaaaactatcagactntgattacacattactgttccataacttctattcctataatcaaggactttaattacaattacaatttaggtgtgagtcatgtgttcttttatattcctcattattttgattgactttccttttctttaacttttctattacgttcctactccataaaatattaaatatttattgtgaagatgactnttaaaaaggctatcatgccaggtcagaccaagcttttaaaa

SEQ ID NO: 173046 - DNA, 200 bp, Glycine max
agcttcgatacagtataggataaatttatgctttctctgtcacgccaaccaataattgctctgctgattgtgatcattaggcaattcatctaaacatgtatgattgctgatcttatggtgtaaacaaaccacataaattaggggctgcgttgaatttttatctcaaccttatggaatacatttgttttggaataatggaa

SEQ ID NO: 173047 - DNA, 204 bp, Glycine max
ctgttttcacagctaagaccgatcctctaatcgactcaaatccctgtgctacaccaccggcagaaccctatttcaccatcgcgacaacagattaagaacctaacctcatcaaattcttctctcttttcagaatatgaaaacagcttgaagaatataacaaacttttccactttctagcagtaacatttgctttgaaaaatgtcc

SEQ ID NO: 173048 - DNA, 440 bp, Glycine max
  unsure (1)..(440): unsure at all n locations
agctnctactatgtactgggagtaggaacttttgttgcgcgtntcattantataataaaagcttctatattatgcatctaagatcacacaagattcctgtcggtagtctgaatgagaactttatagaacaccctttttgaattttaagtatgaatttttgtgaattcgagttagcaagttatgatattactgtgtaaaaaaagataatgatatatattcctctggacttaaatatatataaaagaactaactcaatttaatgttgataatctcatgaagaaagttaattcattttttaaagtaccatttatattaattgcatatgacaaaacaaataagggttttgaacataaaactctaattaataaagagtttttggcggtattatattaattggggagaatcattaaattacttatatttaatcacacacttatttt

SEQ ID NO: 173049 - DNA, 455 bp, Glycine max
  unsure (1)..(455): unsure at all n locations
taggttaaattagtctaaacttacgagggatctagttttatttctttangctacaacatagaacacgagaacatgattaattagagaaatatcctcatatgcatcaacttgtttgctagaaagaacccaacgcttttacctattgttgtcaacttttacttacttacatttattgtttttaccatagaattagtttatttctgtttttaaccatcaattatcagtgtttattccaacaatgccttacatctgaataaaactctgtctaataagcaagtttcctgagttcgatactcagaccattccgttttaattntaaatacttgatgacccggtgcgctttccggtatttcatttnccttgaatatatntgttaataatatgaaaaaaggaacctatggaaaatgaacacatgcttatctttatctaatatattaaggatttgagagtttttt

SEQ ID NO: 173050 - DNA, 452 bp, Glycine max
  unsure (1)..(452): unsure at all n locations
tctcggcactgtcattntcgtggcatctgaggggaccattatgtantcattctttgccccaccgaatataactcgctaagattttctggggaaacaaacgatctgcataattctctgagatgaagaaagttaaaaggaagagaatctgcagttggaagatctctcagctcacgaatctctaatgttgatggcttgcttttcatactcaaattaaagtgcgtgtgttgttgtgatcaattaattaatgttgagttttaatcaatggagtatcagtttatatatatttacgacagcagcactaaactttaattaagaaaatatataccactgacatgaattattcaatcaatcagcatgacgacatatcaatgctatccgcattaatataggaataaaagtacaagtttatattattaataattaataatgttccatgaaacatggagagacaa

SEQ ID NO: 173051 - DNA, 404 bp, Glycine max
  unsure (1)..(404): unsure at all n locations
aacactcgcgacaactaattctacttttaagataactcagatgtatatttcaatacgtgagattatttgatttgtttgatgcacgctgatgataatggagatggaaagttgaccctcttcccttatctcatttattntgttgcaatcaattgtgtcttgtatgtttaaagaacattattaaattgatcgctgcttcttctgcattcagagtctatcatttataacggggttaaaagcttattagtggaaaaataattcaccccttcttaagttattgaggccgctggtccaacatttgcaatatctaattctacttctaagttaagtaaaacgtagcttccaatacgcgagaacattcgttttgtctgatgcacgctgatgataatggagatggaaagttgaca

SEQ ID NO: 173052 - DNA, 385 bp, Glycine max
cttgatactagcttagccaaatccactcgcctaacctgactcagattttatttatctccccttcgagaaaacaaaagaaagaaagtttcgtcaaagatcgaagaaaacaaaggaaaaagaggttccgatcaagatcgaagaaacaaggaaaaaaaaatctcaatcaagatagaaaaaaggaagaattttcgaaggtttcgaccgacaatattcaacgtcagaatgtccaaccaatagaaataaagaaccacatgagtggtcctctccttgattgcaccaaatttggcctgacactttcgcccgattaacaaaataaaagggaggccaaaccttaaccaattttaccaacaccttccgaaaagtctttgacctgacaccatgtatt

SEQ ID NO: 173053 - DNA, 466 bp, Glycine max
  unsure (1)..(466): unsure at all n locations
cttgtccgcagatccctcattntagactaggcttagatttttttttttatcatcacaacatattaagaaaactaaaacttaatccgcagatccctcatttaagactaagtttcaatcctgcttctgtcaatttctaaggcaacagtacatttcccaatgctaaagtcacctaactaaacatacaaataggtgatcagaccaagagcatgtagaaattaagcattgaaagaagcattgaacccaaaaaagacaatcaattagatataaagtaattacattagctgttccttagaaatccccaacaagagtgtttagccagccatatagaaaaaccctaacacaattgagattaagagaagagaataattgttccttacacaagaagggggatccctcctcctcttctcagcatctcacaatcactatgcaactcactaatctctctctaattacaaaacctaggtct

SEQ ID NO: 173054 - DNA, 410 bp, Glycine max
  unsure (1)..(410): unsure at all n locations
ntcttcatcttcttgccttaatggcgagccttgtacttttatttttcttcccgcaatgcttttccttatatctgcctgtgtgggtttgtagcccaacccaaacatcccacgatttcctttggcgcttatcaggctagttatgccgccgttgtccttgcctaaacccatttcgggctcgtaaccattccccaacattactcgggccaccattactgccgtatctgacaggcaaggttgccccaagaaagaatccacggaggaaatgcttaccacctcgaaagactagaacgcggnttctaatgactcctccgcgggctccacatatggcatagaggatgggtaactcaccaagatgtcttccncgcctgatacgaataccaaatgtccttccactatgaacttcaatttct

SEQ ID NO: 173055 - DNA, 410 bp, Glycine max
cttaggggtagactaacttaaactgagtttcatccgcagatctctcatttaagactagactcagctcaagtagcttacaaaagtttagcctaatttagcctaaacttcgtccgcaaatccctcatttaagactaggcctaaactaaacagcattattgtaacaacataattaaaaccaaaatgtaatccgcaaatccctcatttaagactaagtttcgatcttgcttcaatcaagttctaaggcaacagtagatttcccaatgctaaagtcacctaattgtgcacacaattgggtgatcaaaccaaaagcatacaaacattaagcattgaatgaagcattgaacacagaacacacaatcaactagatattacgcatttacatcagtcgttcattagaaattcccaactag

SEQ ID NO: 173056 - DNA, 464 bp, Glycine max
taaaactcagcttcctgccacgtactccgaaacacccaaatctctatgtttaataatagaaaaactaacgaatatagaagaatgattaacgcttcaacaggaagatactatgtcaatggaaccacgaccaacgtccacaaaattatagaattagccatgataagtgtcatattttaaatatttttgggataagaatgataacacttatcttttgattctcatagttctcttgtaaacttgccttaattctagtcgttctatatattgcacatttataaatgcttttgtttgaatatggagaattcatccatgcctctcttatgtaccgatggttatttgttggaaccacacatagagccaagatgaagagtgttgaggggtcattatgaaaaggtgaagacctctgttactagcttacgctaatcatagctcgcctgggagaatctatctacacacaaccccta

SEQ ID NO: 173057 - DNA, 433 bp, Glycine max
  unsure (1)..(433): unsure at all n locations
tgcctcanagaggtccaggaaggataaggcggtttttgttctanttccgctcccgagtatgacagtcaccgctttaggagcgctgtgcaccagcagcgcttcgaggccatcaagggatggtcatttctccgggagcgacgcgtccagctcagggatgacgagtatactgatttccaggaggagataggtcgtcggcgatgggcatcactggttacccccatggccaagttcgatccagaagtagtccttgagttttatgccaatgcttggccaacagaggagggcgtgcgtgacatgaggtcctgtgtgaggggtcagtggatcccgtttgatgcagatgctatcggccagctcctgtgatatccgctggagctggaagagggccaagagtgcgagtatggctagaggaggaaccggtctgatgggttcgatg

SEQ ID NO: 173058 - DNA, 426 bp, Glycine max
ttcatgttgaagtatgtatggcagacactcattattgtttttcaacgcatacaagcgagctcgtcacatatcttctacacttggagtgataacatgcaatcctcttgaacccttaccacccactatgtcgtcatgtccagactcatgaaggccaacacgtttagcctttttaatgtactctaaacaaaatacaatggcttcttttgcaatgtaccttacaacaatagatgcttccggatgatgtagattcttggtataccattttaagatcttcatgtatcgctcaactgggtacatccacccgcaaataaacaagactacaacatttgatgtctctgtccacatgaataattaaatgaatcatgatgtccaagacacgagggggaaaatacatctccaactggcatagtataattgcgcgctcat

SEQ ID NO: 173059 - DNA, 434 bp, Glycine max
tataaaactagcttcaacaagcttccaaaaatcatactctatttattctcactaacctacccctcatatctgccaaaaccccatacccacgaaaatcaagagggaaagaagtccacccacacctgagattacgaagtcccactcgtagccacgcacttcacgactccaaaaatgctctcctttcacgatatggggcagaaatggtggccaaaagttgaagcttagcttgaagcttcaatggagaatgaagaagaagaacgctacgtgagagagggagagaaaaggcttcagaatttctgctgtggctgagagaggagagacaaaagcgttatggattaaaataaaaagggttttgcttattttggtggccaataatatatgcaagctctgccacatgtccctatatgattcgagcacaaagggtccactttcta

SEQ ID NO: 173060 - DNA, 403 bp, Glycine max
  unsure (1)..(403): unsure at all n locations
atttngaactttgatgaagccgcatctatagagcaaaggaggctacaactattggagttggaagaaatgagattgactgcatatgaatcttcaaggctgtataaagagagggttaaaacttaccatgataaaaaactactaaagaagaattttcaaccaagacaacacgtgctactattcaattcaaagctgaaattgttccctgngaagctcaaatctaaatggtccggaccatttaccatcaacaaagtcagaccatatggagcagtagagctttgtgatccttaatccaaggatccagacagaacatgggtagtgaatggacaaaggttaaagttgtaccatggtggaactattgaaagattaaccactgttttatccttccaagaataacaaagaacta

SEQ ID NO: 173061 - DNA, 466 bp, Glycine max
  unsure (1)..(466): unsure at all n locations
tactcagctnttacattttgggttttccaagcacgagaaggtgactgttttattgggaaaacactacgcatctcctaggtttttctatttgatctctttaaggtaaatgtttacgacccattatgttagatgagtatgttatagcactaattagtcatgggctatgagaaaaagagttagaaactatgtattagagattattgtgattttctcgaaaccctaggtttgccaaaattggggattttgtctaatcccttgttctattatgtaaatgcttangttctgtggaaaatacagtggttgaccttcctaacagcggtagaagtcagtgattgcgttatttaggtgagtagctaatatacttagcgacttccttanagttcatttatggaggaacaagtatacttccgaacatatatattnttggtgaagcttgatatatatnttgcgatcttgatcatatata

SEQ ID NO: 173062 - DNA, 437 bp, Glycine max
taaaaaactttaaaaaatttttattttatcctccatacaaatatgcgaggggcagagggtgtcacactcttccgcagaaaccgtggcagcatttctcccagcatgtgatctttttgcctaatcgtatttgtgctaatcgcgttggtggctggacctcacatggacagtgtggcagcaacggaacaaaaaaatcttctcaaatgtcacttttgatggtaacaaggtgatggaagatgctatattcacactctggacatggctgaagagatttgagaaggatttcgcaatcccatatacttactgggcatctaacatctcaactggctttcgtctcttcaagggggtagaaaatataggaagtgggagcaacttatcactgtatttccctgccttcctgcctctgcagctaatggttcctttcgagactgctcttagtc

SEQ ID NO: 173063 - DNA, 400 bp, Glycine max
actcattaaaagaggacttgcaaagtaaaggattggttgaaactttatttttcaatgattaaccgaggttacaacacaaacgattggttgaatttttatttttacattgattaagtgagattacggcacaattaattggtggaaactcgatttactatgataaaaaggagattacggcacaattaatcggtcgaaacttgctttacaatgaaataaaattacggatggcagaagaatgaagatgaagatgcaaaaagcaagagtggacccttaagggcgcatagaatgaactcacaacttcaaaaataaaaactaatcggtcaatgaacaaggaacgatgaagaacggacgaagaacgatcacggaatctatcatggaaacgttacagaaacgtcacgga

SEQ ID NO: 173064 - DNA, 318 bp, Glycine max
ccaccctaacctatctgccttaaatagtgcgtaacccaccaatattggactatgaacaacacccttgcattcatatttggcgcacatttcatatacaatactttacttcacctatacaaccattccattaactacagaaaccaacaattgatgagcttgtcatgcagagatacataaaggtgaaaactggtgaaatagttttactacaaccagccactttcactgtgtaaagttgcaaccaatatgatgtagcaccaagaaagctatatgaaatcatatactttaatatccacaaaccttaattgtttggtttaatgt

SEQ ID NO: 173065 - DNA, 460 bp, Glycine max
  unsure (1)..(460): unsure at all n locations
tatcagaaggggaatggtaaaataccacctcaagctgatattattaaggtggcaaagtgtttcttttgcaagaagaagggacacatgaaaaagaattgccccgggttccagaaatggcttgagaagaaaggtaaatcaatctcattagtatgttatgaatctaatatggttagtgttaatattaacacctggtggattgattctggatctactattcatattgcaaattctttacagggtatgcaaaacctaaggaaaccagtgggaagtgagcaaagcattttatcaggcaataagctaggctcacatgtggaggccattggaacttgcattntgactntaagtagtggctctatttcaaaattagaaaggactttttatgtaccaagtttttcccgaaacttgatttctatttcaaggcttgtaccgtntggatattcctttaatttcatagacacat

SEQ ID NO: 173066 - DNA, 448 bp, Glycine max
actaagctgacctgcagttccgagcatctcaagtgtctttgtttttgaaataataaagacaatattatcactattatgaaattactagtaagaccgaacaatagtcataactcttaagtaaaggtaatacattgctccaaccaagaagaagtgcagtcatgagatctcccgttccctacaaacataagaacatagttaaggttctagttattgaatgtttgaatctaaacagagtggattaaagaactttattgaataaatttataagttggttctttgaaaattttcttgaatgatttttttcctatttatcccctttgggctgtggataaacttcttactgtctaacaagcaccaggttaaacagattaagatttaatagcaattaaagtaatatgtcctgttggctgtgctgaattattgcatgcagaaccatgtggcagtcaag

SEQ ID NO: 173067 - DNA, 430 bp, Glycine max
  unsure (1)..(430): unsure at all n locations
cacaaaaactcaacttgttggagaaggaggacaccagtggtttttgaaaacccactagaccgagggtcaacaaaccaccaaaaggcaagttgatccaagaaaggataaagactgctcaaagtacgcacaaaagttatcacgataagaggaagaaagacctgtaattctaggatggtgatcatgtattcttgatagtcactccgtggactggggctggtcgagcattgaaatcctcaaaactcacacctcgttttatccgtcctttccaaattcttaaaagagacagacctgtggcataccaaatcgcatgaccctcatctatntctaatctttacaatgtctttcatgtgtcacaactctgtcagaatatccatgatccatcacatatggtccaataggatgacgtacatgtgaatgaaaacatgacata

SEQ ID NO: 173068 - DNA, 451 bp, Glycine max
  unsure (1)..(451): unsure at all n locations
ctatgaaactcagctttgaancaactttccactgggattatttttttatttnaaaactctggtaacgtagaaaatcttgagaaaaaattttcttgtaaaacacaactgcgctatgtatggtttttgaaaaaaaatcttttcaatacttccctttgtgaaatcatcttctcttgaatcttgattcttcttgatgtcatttcttgaatcttgaaattaatcttgatgtaatattgatcttgaacttgttgactcaatcttgaaatcattctcttgggctttttgtcatcatcaaaactacttgaatcaacctgattcatcatcatgaagcttgcttctacaatctctccctttttgatgatgacaaccctgaaatcaagaaacacatacacattctttttcctagtcgatcactcacttaattctccatattctcccgctttgttttgagttt

SEQ ID NO: 173069 - DNA, 447 bp, Glycine max
  unsure (1)..(447): unsure at all n locations
tgtagaacgggtggacatgatatatgtcacggtgttgttcttttcanggataaaacggaatgtcccacattattttcatgacacaaatgcaacaatgatgatttggaaattttattgcaaactagtcatgcatgcccctatgtggacactcaagtgtcgaaatattttttggttatgtgatgctagggctcacgattcatttcccctattttaagtcaacccaaagtttccaaaatatgttcttttatcaatttgtgcattcatccgagtctattttttttgttctcaggaaaatattcacagcattcacccttcaggtgtatacacattttttntttcacaaactggttatgattagtgaaaaaaaatctcaaagaagacgtggaagtcatctctcttcaaaagcatgttgggttttcagctagacaactttttttcttccctctc

SEQ ID NO: 173070 - DNA, 411 bp, Glycine max
  unsure (1)..(411): unsure at all n locations
ggaagggagtgagtcctatacgagctttgtatgttgttccatatgctcacaaagcttcatctaatttttgggaccactccttccttgactgagcaactgttttctctaggttctttttgacttccctattagaaacttcaactttcccattggtcttggggtggtaaggcaaagttaccttgtgtttgacactatattgttggaggactttcttgaattggatgttacagaaatgagatcctccgttacttatcagtaccctcggtgtgctaaaccttgagaagataattntctttatgaagcgaataatagtttttgcatctacatgttgcacaactattgcttccacccattntgttacatattccaaagctaatagaatgtattcattagagtaagatgatggaaatg

SEQ ID NO: 173071 - DNA, 445 bp, Glycine max
  unsure (1)..(445): unsure at all n locations
ttctttaagactagacacttaataagttgtgatcttttgaaaaatcttcagaaacaagtcacttgaagaattatgactttcggaaatgtatttttcgaaatcaatcactggtaatcgattaccattaaggtgtaatcgattccacatcaacagatgtgactcttcattttgaattttgaaaattaaaacgtttagaagctctggtaatcgattacatgtattgtgtaatcgattacacaagtttaaaatgatttaaaactgtttaaacataagttgtaactcttgaaatttgaaatcttaacattctaaaacactgataatcgattactaccttctggtaatcaattactagaaagaaaaactctttggtaatgattttgtgaaaacttcttgtgctactcaatgttgtgaanaacattcctagtacttatcttgattgagtctt

SEQ ID NO: 173072 - DNA, 403 bp, Glycine max
  unsure (1)..(403): unsure at all n locations
caaatctaagtgttaaacatgaaataaaggcataataagctgaaaccgcatgttaaagagactctacattaccggcttatataggctggatttaataattacatataattaggggtgatttaatttcctctaaatgagatatgtttcctccaaatcaaatcacaaccaatcaatttacaataaatgtgtactatatttcctgaatctctacactaagaaatatatagaatgctgaggaaaatgctcaacaacttttttagaataatttctcttctgctttcagctctccactttcaaccaaagaataaaatctcactttntgtacctttttttttcgctctttcctcatgctngctgtctgagtcttgcagctaactatagcagatatcacagatgagatgga

SEQ ID NO: 173073 - DNA, 266 bp, Glycine max
  unsure (1)..(266): unsure at all n locations
gatgacaaagtgccaagtggaatcatcactcatcccttactatataagcacaaatggtatatactatactagcattgtaatgccaatattagcatgaccaactcantatattcatcctctctaataattctaagaacatggatccatgggaaacactattcaaacttgcactatttttagctcgcttcccaatacttgtacagggaggactaacttctagagcatgccatagctcttanagtaaataccagaattgaacctgatat

SEQ ID NO: 173074 - DNA, 331 bp, Glycine max
agcatctctataacgatcaacatcgagagacccccgtcctcatgacaccaatggctcttgaagatcaaaagcactgcaaacccttatacttgtaacacccctaattgcaaccaaacacacaaatgccagagctggctggtgtgacaacaacatctgccacaacactacaacatagatgtgcataaccccccctcccaaaatactctgccatcaacatacagaggacacaaacaaatcaccaaggacgaaaaaacattgaacatgcaatacaaggccgagaagctcaacacaaaccaagccaaaccctgtgcagcagggaccataacaagag

SEQ ID NO: 173075 - DNA, 457 bp, Glycine max
tgaagccatataatactcttatcctatgcagcacataattacttcaagttgtatcaaatcgatgccaacgagtcctttctgaatagattcgtaaatgaagaagtgtatacaagcttgtcaaagccttgtatggattgaaacaagctccaggagcttggtatgaaagactatgctcattcttagttcagaatggcttcttcagaggaataatggacaccacattatttagaaaggctcagaaggaaaatctacttattgtacaaatctatgtagatgacataatctttggttcaaccttagaaaggacgtgcaagaagttttttgagctaacgaaaggtgaatttgaaatgagtatgatgggtgagctgaagttcttcctacggcttcaagttattcataaagatgatggaatattcatccatcaagagaaatacacaaaggatctacttaaaggttc

SEQ ID NO: 173076 - DNA, 474 bp, Glycine max
  unsure (1)..(474): unsure at all n locations
actaagcttgtccgcnanataactaaaaaccgttttaaggttctttgccttanacgctcctctttgcttttatcgattaacatggaccgttcaaaagcataaaatcaacatgtaactttaccagttttgcaagaactacgtaggtctgatttcctcatcgcaattaaggatacataggagcaaaagccccacttttgtcgaccaccccaagagatcgttaatggtccaacaccttaacgtttctctcctttcaaaaaccaagagatcgttaatggtccaacaccttaatgtttctctcctttcaaaaccaagagatcgttaatggtccaacgccttaacttttctctcctttccaaaaatcaaaagatcgtttaatggtccaacgccttatacgactnttgttcggttaaaatatatcttgcaaaacaagataaaaacaacttaaccaacgttcagttctcacagaactacata

SEQ ID NO: 173077 - DNA, 450 bp, Glycine max
  unsure (1)..(450): unsure at all n locations
ccttctggagtcttagacttagcgatttatttttttataaatcncnctacaacctcatcccatgtcttaagattattaactttgaatgaatgaagccacctcttggcttctcccgataaagaaaatgaaaacaagctcatctggattgcaactttaggcactccagccaacctaatagtattgcatatttctatgtaagtggctaagagtgcatatgggtcttcatttggtaatacatgaaacaaattattatgaatcaagtgacattgctattttgaataatcttccagagtaactcttcttggctcttctaccatgatgtagtcttcactaggatctaaatgagaatattctgcaataggaaaactagaagatgcctcacaagattgaggatcttcctctagaattgctgctacctctaaatcctacaaaagatatctaattctctct

SEQ ID NO: 173078 - DNA, 370 bp, Glycine max
  unsure (1)..(370): unsure at all n locations
cttagggtccacttggaccccatttntaccaactactatacctaaaaagactatattatctacacaacaaggtacancttctctatatttgcatagagggtgtttttcctaatgactgaaagaacttgcctgagatgtncgaagtgatcatctatgctcctactctacactaaaatatcatcaaaataaacaactacaaatctacctatgaaatcccttaagacatgatgcataagcctcataaaggtgcttggtgcattaatgagcccaaaaggcatcactagccattcatacaaaccaaacttggtcttgaaagcgcgtttccactcatcaccctttatcatcctgatatggtgataaccacttttaa

SEQ ID NO: 173079 - DNA, 466 bp, Glycine max
  unsure (1)..(466): unsure at all n locations
actaagccttaaaatggttaattgcttacaaataatttaaaactattgtattctgtgtgaaattaaagtttatgttgaataaattgaattgagtcaaacataattgaaatatcaacctttttattgttgctcgagttgattcatgggtatatatctaaaatttaaggaaaaactttgtaagtttataattatgcacaattataaattttgcataccgtaaaatataatattttgtgtattaatgtaaaaaaattattttatttgtgtaacatttttttccttagaacaacatataagaaaaaaaatttgcaaatcaaattatacaataaaaatgtataatgatgaaattctatttattcttaatgttgttccgaaaaatacttgataactaagataatctaattcaaaacatttaaataaagtgtaatgtttaacctgtcattntaggtcaataagaaagtcattt

SEQ ID NO: 173080 - DNA, 424 bp, Glycine max
tagaatgcaatctttttgttgttacaacagtcaatcttgaatcatcattacaaatgcattgaaggaaggcctacatttcaagaatgcaatagaaaatatgttgtaaaagcagcccatgctataccatcttttgattctgaatctcacgcttccagtcccaaaaacattttggaccctgtcaaaaaattcttggttgctttgtactggttttgcaatcctcactcgatgattggccgagtaagttcaaacttttctagtattcataaataatcgtctaaaacatttttaatacctaattttgtataaaacacctctctggatatagtaatacctaattttttgtctgtgcccagacattaagcgcaacatctgggtgtctgcttgcagtggagaaattgtcagatatatctccattatttttcat

SEQ ID NO: 173081 - DNA, 317 bp, Glycine max
  unsure (1)..(317): unsure at all n locations
tggacctcccagaagagtatggagtcaacaccacttttaacatttctgatttaactccctttgcaaggggagccgatattgaagaggaggaactaacaaatttgaggtcaaatcctcttcaagggaaggggatgaagcaatcctccctacgaagggaccaatcacaagaaccatgagcaaaagggctcaaaaagattgggctagagctgctgaagaaggccctanggttctcatgaaccttanggtagatttctgagcccatgggccaagggtgggtccaattatctttgtacatattagactacgatgtcattata

SEQ ID NO: 173082 - DNA, 429 bp, Glycine max
  unsure (1)..(429): unsure at all n locations
gatgcccgagtcattcatccctatgagatgttgttgaagtattggcgatcagaattgccattccttggattataggggtgaaccaagctcatgcttttacaaaaaggttcatcaagtcaagttgaaatatggaagtaaccgtcttgcaaaattggggcaaaagatgaatcgagtcacatcactgcttcgtctactgccaaacatatttaggattattgatgtccttgttacttccagtttcaccttgacaaagatgtcatggaccatgttgaaaatctaaattgattcaaccccatatcttgcgtaaaaattcgcaatacttcaactgtacatcattcgcatgcatccatgcttttcattggttgcattgctcgttgcattctttccttganaaataaaataanatgaacttaatcattgttataaaaa

SEQ ID NO: 173083 - DNA, 360 bp, Glycine max
cgggtgaccatggtctacacctgcgtaaaacgatttattcgttatatatacttcttgggtatatccataaaattctagaagaaacaaacatatagatgtgtgtatgtatgacccgattttatcaccatataacataaatttgagataataaatgatttttgataaccaattagggacaaaaaaacattgcagatgggatctacccttctaagcatgagcctgaataactcatggcaaccccttaaccaagtgaagaatactaagtaaataatttctccggtaccctataagccaacaatatatgtgattcttaattaacatgataaaaattcatagatgcacccatatgctgaagatgac

SEQ ID NO: 173084 - DNA, 441 bp, Glycine max
tgacccttacgagtcagtttagttaaaggtagagttcacttggaaaaaccttctatgaatctccggtaatatcctgctaagcccagaaaactcttaatctcaaaaacagacttaggactctcccacttaagaacagcttctatcttagagggatccatagctatacccccttgagatatcacatgccctaggaaactaactttctctaaccagaactcacacttggacaacttggcatagagttgttggtccttaagggtatgcaacacaatcctcagatgttcttcatgttcctctctagtcttggagtataccaaaatatcatctatgaatactaccacaaaactatcaaggtaagggtgaaaaactctattcatgtagtccataaacactcctggagcattagtcacaccaaagggcatgaccagatactcatagtga

SEQ ID NO: 173085 - DNA, 456 bp, Glycine max
tcaggctgctcaattgctccaggttgctgtatggaatggcaaaggtctgtatggtggtcagcagaggagcacaaaccacagacccttgcaacaggtacagatttctggttcaaggccagctaggttaccaagttaaccaatgcatccagtttgccttcaagcttcttagtttcagatgatgcagctaagtttgtagctacctcatgcactcctctaatgactataacatcatttctggcgctaaactgcagggagttggaagccatcttctcaattaaatttctggcttcaacaggagtcatgtctccaagggctccaccattggcagcatctatcatacttctctccatattactgagtccttcataaaaatattggagaagaagctgcttcaaaatctgatggtgagggcaactggcacataagtttttacatctctcctagtactcatacacg

SEQ ID NO: 173086 - DNA, 243 bp, Glycine max
ccatagcaatcgcacgagaatttccagcgtttaaatataagctgcgcccgatattgacatcctggagaagagctctgagcgaaaagatatgaccatagcgatctctggagaacttccggcgtctcgatataatcttcgcctgaagtggagctcccgagtaaaacatctgacgcataggatatgaccaagtgaattattcttgagcttccgcggatcaatatataacacgcctgaatatgacat

SEQ ID NO: 173087 - DNA, 459 bp, Glycine max
  unsure (1)..(459): unsure at all n locations
aagatctccacttcattaaagggttcctctcggtgttgtgtttttactgagaactatggcagcttgcagtggctatcggtggttgtgggtggtggacaagaagcttggggcattgatgaagggttttggaacaaagaaggagaaaggaatggttgttttccaaggctacactaaaaataagacttgaaacactcaagtgtttctactctcaggaaaagaagcttttctcacacaccaaaagacatattgtagatcgtaacgatcacgtcgtagaaatctgttctatgaacctccagaccaaatttcgagaagatctaacaattaacgattgcagaagggcgctnttaccaaggtagcttcaggtagctttcttgagaagcttttctcgagaggctctcttgataagctttctcgtgaggcttctgtgagaagctagagtttaactacccacacccttat

SEQ ID NO: 173088 - DNA, 424 bp, Glycine max
gcacattccactgtagaagttgagtatatagcattctgttagtcattatgctcaaagtctctagatgaagcaacaagttgaagactttggagtacaccttgatcacattcctctaaaatgtgacaacacaagtgcccttagagaccaacttactaaaaatcctgtcatgcattctatgactaaacacatagaaataaggcatcattttcttagagatcatttgttaaaaggtgattgttgtattgagttcatagatagtgagcatcaactagcagacatattcactaaaccacttgctagagataggttattcttcattagaaattaactaggcatattagatggatctagcatagaatgacatttctttaatgcacattgtttggtgcatattgttatccatatcactcgattactcctatgt

SEQ ID NO: 173089 - DNA, 154 bp, Glycine max
gcccggcattttttttttcaaggggcttacttcccaacaaatcatttagcaagttctaagattgacagtccaccatagttactacttactaagatagatcaacagaaatcccctaaactggtacccattttcgtattaataaaagatctttaaa

SEQ ID NO: 173090 - DNA, 302 bp, Glycine max
gcgaattgccaagtgtaaatgcttaagacatttccgactaagtcgtacttaatctctatcagttcaatgctatttccttataatgttaataacatcctacagggaacccctttcgacgtaaacaggacacttctatagggaggcttgatttgattcgattcaaattcaatacctcatcgcatcatctagctcatatgtggtcaccttggccttgttttgtcacacgacatgtacaaaacattatgaaaagcacaatagatgaccgttacaagatcaatattaaacgctcaacataactacac

SEQ ID NO: 173091 - DNA, 281 bp, Glycine max
ccctccccacccaccccacccccaacccccgggggttgtctctgcgacctaaaaccccgagagagacaaagaggctttttttcagcccacctacagagacgaaagccggacggcgggtcagaaagagcgtggaacaaaccaaagaggggcgcaaacacccgcaaagaagacgggacacttggggaagcacggaccgaaaagacaaaaagggcgtctaagcgggagcaaactaagacacgattggggacaggaacgcaaaagaagaatgcgaaacaggtgac

SEQ ID NO: 173092 - DNA, 300 bp, Glycine max
  unsure (1)..(300): unsure at all n locations
ccaacgagtgaggctcatacaactgcaacaaggatcacccaccgcttcgaggtcaatcggaaaaccatgaacgagaagtggatgcccgacgaaaaacagaccaacacgatccgcaacagggaattacatgcgtcgccaaacgaccgaagcaagtgagcaatcatctcaccaaaacgaccaatatctctatatgctgactcaaaagaccttctcaccacacgcnacgaaagctatgccacacaagcgcataagagcaacatggacattaaccctctctacacgctcaataaatacctggct

SEQ ID NO: 173093 - DNA, 434 bp, Glycine max
  unsure (1)..(434): unsure at all n locations
ccatctccctaagagttctctcacgaggtggagattgagccatgttctcagtatgaaaattagcagccgaatgctcaaaatcagaatgttcagaatcaccagcaacagaatgctcggaatgctcaaaatgcacagaatgcacagaatgattaggatgcacactatgcctaactaatctatgaaaggttctatctatttcagtatcaaagggttgtaaatcacctagattgcccctagtcatgcactagatgcagcaaatcatgtatttctcaaacaagcaccaggggtaaaaagggggtaaaactaggggtaaaactacaactatacttaaacgatatccaaatgagctaaaaatntgtgagcaacaccctanaataatgaatagatagcacgaanattntcagacaaaaattcaaagtctaactatgaaaact

SEQ ID NO: 173094 - DNA, 394 bp, Glycine max
  unsure (1)..(394): unsure at all n locations
ctacataccgatatgccctttcacttaccttcgtcttganttgggtgtgacattggtcattactcaaaatgaacccttatttatcctccaatttgcaagatgacaagatgcataatgcatgcatgcttatgattaggtagtttaagtgcaacaaataaacaatagttattatgctcaattttacttaaacgcttatggcaccccattgatggagccaaatggctccggattcaagatcaagagtgtttactctaaagatgtaaaaagacacaacacaagaagttgaaatgctaatcatcaatccaatggttattaatgttgcgatcatcggttacaaatgatcggaagactttggagattccaatgagtctttgtagaaccatcatgcattgaa

SEQ ID NO: 173095 - DNA, 311 bp, Glycine max
ccacctttaaaccaactggccctgtgcgccaaagcacgtgttttttttgtcatccccctgcacctcctgttttaattaggctttccgactgcattcttcttaaccccacactttccgaattgtacgacaactcaattttttggtaatctcctcggtcgactttaccatcatgaaccacaagatccatacaagccctagctttatcttctaacgcccccatcctatgcctttatactgaatctccccaaatccccaggaagagcagctttcctcggcccctatggacctactgtaacaggcgatgactacca

SEQ ID NO: 173096 - DNA, 373 bp, Glycine max
cgcgacactataaacactcatgcttcacacttgaccacttctggggactgtaactattttatattgtctctatggggcctatgcaaattgaaagccctcgtcgaaagaagtatccctatgttgttggggatgattactcccgatttatctgggtcaactttatgagaaagaaatcacacacctttgaagtattgtaagagttgagtctacgactttcaagagaaaaagactgtgtccttcatacaaatatgagtgaacttggcacagacgctgaaaacaatccgtctactgaatgttgcacatctgacggcattaatcatgagtttcttgcagcgcttacaccacaacaaaatggcatattgaaaagcaaaac

SEQ ID NO: 173097 - DNA, 448 bp, Glycine max
  unsure (1)..(448): unsure at all n locations
tgagacgtgtcacgtatgggtttatattgttatcaagattttatctatgnggctctggaagtggaaaactttaatgaattgataagtttctcccatacaaccaggaagataaattcttctagaggtaattatggattcagttgggttaagtttaaccaaaaataaatgtgggctaattaattaagttaagttacggttggaaaacactttgttaaatgtgtttaactaagttgagccaaatcaatggattgtgcaagttgttctaggtcacgttctttggatttatgagtacgcattctgatatctaatttgataagggtcaaattataaatgcgcaatctgatatttatttcgataatggttacaatacaatctgtataaattaatgtaacccacgtattggaacatactcatatttttatcatcaaccacatgaatcaactaacat

SEQ ID NO: 173098 - DNA, 455 bp, Glycine max
tcatacaattaatatagaacatatatcctaatgtcacattctatcagagcgttgtgttcccgtgtcctctagcatgaggttcttcatagtcatccacctattcatctgctcccccgaacacaagttcaagatcatcacaggatccaaacacaacaacacacagggagtgagttatcacattcctagctaatagagaaacaagacaattaaatatacatattatataaatgagataccacttgcttaaacatagctcacgtaatttcaccacttcgtcattcaaaattcacttttcaatcatcaatcacattacacaagaatcccacacttcgatcaagatataataacacatcaattagcaagcatatgcaacagttatgctaagactcaatcctatatgcaatgtggtaccatgtcagtgaaaaaccaccctgcggcgcttatgagtacataac

SEQ ID NO: 173099 - DNA, 453 bp, Glycine max
gaaagagcacaaaagatgcaattgtgaaaagataatatgttatagaagacttgaggagaagaaaagaaaatgagatagttgtatgtttagacaactcgtacaattttcaaatgtttgaaaactccctccaacagccataaacaactaacttccaagcttatttaatgagatcaatttgaaggagcttgttgcaaggaaggagtgccacaaagagatggtttggtcataagagttgagtagctcaaaaagatacctcatatatataaaaaaaacttcttagtcaaaacactctaggttagagctaaaccttgtcgatccaaaaacaagtgtaaacacgttcatcagaggagtcacaatgaagaaggcttccaaaaaggtgtattctatccgtatcccttaggaatagaggaaagactcagagaagcaatatagggatatttattattaccgaca

SEQ ID NO: 173100 - DNA, 420 bp, Glycine max
  unsure (1)..(420): unsure at all n locations
aatgctatggatatagatactttttttgacaccaaacacttactcatataagtgagaaggggataaattgtgtagccaagaaggatatgcttccaggattgaagaatgcaacattggagaaatgttctcattgcatggttggtaagcaaatcatagtctctttcatgaagcatccttcctcaaaacaatctgagttgcttgaattgatgcattcaaatgtttgtggccctatgaaggtgaaatcctttggtggtgctaatatgataactacggaattactaacagggaagtttgaagcttgctgtgagatctgcagatngacggtcacctccacatacatgtgagggggaggttgtgtgggattttgtactccctcctatgtgagtaaagctcaaatgaaacgctctatgcacacttatt

SEQ ID NO: 173101 - DNA, 412 bp, Glycine max
ggtgagctgtgatatgaatcttgttatgtttttcaaactccccaagacaccgtggacctacttctctattcgtggctcaagcatgtcaaggatggctctcaccttgtccgcatccatttctatccctctttgacttacaatgaaactgagtagctttcctgacttgaccccgaaagtgcacctagcggggttcaatcttagctggtacttacgcaaccattcaaacaactttcgcacgttgatgaggtgttccccctctgttctagatttggcaatcatatcatccatgtagacttcaatttccttatgcatcatgtcatggaataatgccactgtgtagaagcaagcttcatgattgaatcaagaatgagtcatgaatcaagaatgattcatgatgatgaatcaagattga

SEQ ID NO: 173102 - DNA, 429 bp, Glycine max
  unsure (1)..(429): unsure at all n locations
cctcgcttctcatgaatatcaaaatcattgtgagaaatatatattacaaactangactggctagaagagcactaactgaaattaaattgaattcgaatttatgaatgtacgcaacattatgcaagattaaggtattggtttagcaaaccgaaccaatggcaacgataggtataacatcattgttaggcagagtgacaattttatcataaataagttggtaagatcgaaaataatgaagggaacaagaaatatgaatgctggcaccagaatctaaaagccagcaatcatgaagaaaattacaagtggatgtacaaaggatcataccactggcagaagaaacaccttgagggatgacaacattggtagcatgactttctaaaagattcatcaattaactatattgctacgccgtacgctgaaattgggaac

SEQ ID NO: 173103 - DNA, 370 bp, Glycine max
  unsure (1)..(370): unsure at all n locations
agctacattagcagctagagaggcaaaagaggcatcactcaagcaacctgaagaagaggcagcactaaagaaagctaaattggatgctaccattgtcaaaatgaatcaagtttttggttgccttagacatacacgatgaagtgctagtggatgttgagcactntgccaatcaagtgcccaatctgatcgagacaaatgaggcagttggattcaaacttgatgatgtgtttgaagaagggattccttatgacaagtccaataatgaagagcttattcaagaactacctcagactgagcaaactcaagcatcctcatctgaagatccttccaaagctcttactactcacatggtgtgtaacaacaattctat

SEQ ID NO: 173104 - DNA, 356 bp, Glycine max
gcttacactaatgataaaacacgggcagaaccatagggtgaagatgatggagaaacccatgttgtgactgccatccctgtttggccaacactgataccgactccataatgtgtttactcagccaataacaaacccttctccttacctaccgcccatttatccacaaaggccattcctaaatcatacacaaagtgtgtgtaccgcactttcaatgacgaataccacctttattacaaaccataaacaccaaccaagaaatgaatgttgcagctaaaagcctgtatggttcaccacaaattccgttgtcatatgctacacttgatccatatcactcgatattcatggtcgtcataatc

SEQ ID NO: 173105 - DNA, 254 bp, Glycine max
cagaaatgcttctggataaggtaaccactagctttcaaagtattagcagtgaaatggagaacgctgcaaatgggcaaaagaatgacactactgttgctatgcaaatattagaatgagtctgtactcgtcacttcaaatgctggacagtaaactaatgataccctatctggaaaatccatattacgcatattcaactcagctttggtgatgtatgatcttgtgaaaaaaaaataaaaatgctatatgttaaaaaa

SEQ ID NO: 173106 - DNA, 454 bp, Glycine max
  unsure (1)..(454): unsure at all n locations
tctatagaagggggcgtcctaaaagctctacatttttttttctntaatgagccggcgaagaagaatgtggcatttacctagggtgaaaatcaatagcaagcctttgctttgctcaaagaaaagcttactaaagcacctgttctagctcttcctgacttttctaaaacttatgagctacaatgtgatgcctctggagtgggagtgggagctatattgctacaaggtgggcaccctattgcttatattagtgaaacactttatagtgccaccctcaactaccccacctatgataaagagctntatgccttaataagagccctccaaacttgtgaacattaccttcgttccacgaatttgtcattcatagtgatcatcaatcacttaagccattatagggcaagcatgttaacaagacgcagccaaatggtacagacctacacaatttcatatgtat

SEQ ID NO: 173107 - DNA, 456 bp, Glycine max
  unsure (1)..(456): unsure at all n locations
ngactcttctgactcatgatgtagatccatgttattctttagtagtcatcaattatggacataaaatacatccaccacctaaagaaggtactcttgctggcccccaacagtcagcatgaatataatcaagagttcctttggtggtgtgaattgctttaggaaatttaatcctatgttgcttgccgaaaacacagtgctcacagaatttcaagtcatccaatgtctgatttcccaacagctgctgtttttgaagtatcatcatacctttttcactcataggacctagtctcatgtgccacaattgagttaagtcaggtatgctcttattagatcttgatgcaacagctactagaccatcatcaatacatgttgtaccttgaagtatataaagattacccctttttatacccttcatcaccattatagagcctttctgaattgtcatgaccccatttt

SEQ ID NO: 173108 - DNA, 447 bp, Glycine max
  unsure (1)..(447): unsure at all n locations
tcggaagaaagtgatgaggtacgagccctaaaggcagagcttgtaatatcctgngtagtccaagagaagttcaagtccatagccatcaaagtctgaaaagagtatgatgaactaagggatgtcaatatggccaccgatgaagccttggaatgagaaaccaagaaggcccgaaaggaagaacacgaccaaagcaaagttttgaggggctttatagggcagcaatagtgagctcaagctccgaagaggtgaaaggaatcatcacgggtcaaaggcatgatcttgaaggacgagctaaaggcttgccttatgtcgaaaagaaatttgtcccaacagttaagcaagactgaagggaatatgtgggccatcatcgatgagtgcaaagagaagctaaatctagcggcgactcacgagcaaaggctagaggatgagtacgccaagatatcagca

SEQ ID NO: 173109 - DNA, 441 bp, Glycine max
tacacatcacatgtggtactacgttgttgttctatctatggtgcacaacaagtggaccacattcacaaatcacgcataaacccaccatcccctgttgcccacctacaactgagcttacgtactaccacgtagcccatatcctcatgtctctcaacactgggtccccatcaaccctcccaagctatcccaacatcctagtaattcaacattcaaacaacacaaactatcacagccaataaaacaaggcaaaggcagaaaactatgcccaaaacaccaaccaaaatcacagcttttctcacataaagaccccagtaacaatctcttctttccaggtcgttaaccgttggatcgactctaaaattttaatggaagtctctagtacataagcctacatttgaccgttgggatctactagcaaacattcacaactcattctgcact

SEQ ID NO: 173110 - DNA, 262 bp, Glycine max
  unsure (1)..(262): unsure at all n locations
cattatgaataataaaccttatcttttgaatatttattcaactgtataatcttgttatcgagataatcttgttaacaaagaagaaacagacagtcaattcagcaaagagaaaaaaacagagaatcctaacgacccttatcttttttccagtgaaataaagtctattttgttttaatctgaggcttgagttgagctacttatntatatgtttagtaatctctatattataaaatctctagtaatctatatagacgtaggaaca

SEQ ID NO: 173111 - DNA, 305 bp, Glycine max
agagctcatactcaacattccacctctcaaagcctcactctttttccactcataacaccacattctaactatccaaccctaggataactctacatttcatctctaacagatttccatgggcaatttcagcatacgcacatcacaaacatcatcacaaaaccctaaaacacaatgggtatgtctaactcatccaaacatggcaatatcaacaagctatcaacaagcttcttgacaaataactatcatgaagcagacaactagcaagactacccatcatatcttccaaaaccccatacccacgaaat

SEQ ID NO: 173112 - DNA, 355 bp, Glycine max
  unsure (1)..(355): unsure at all n locations
tcctctcaaacattcttatgcaagacactgtcgctggtttgacgctccccctctcacggcgcattctctaatggatggcacctcctctcacctcttctcctttntcttccactgcaactccatggctgaaaatcactattgaaggaccttattgaagctcaaagatccaccctccgtagaagcttttcaagcaagcttccatcaatgtggatgtgaatccttccttttatcctagagctcccacgtagcatcaccctcattggttgtgctccacatcaccttcactaacggaatgatctttcctcttagctgcttgaccctctgatcattggtcttcagacgtatcccatcataa

SEQ ID NO: 173113 - DNA, 464 bp, Glycine max
  unsure (1)..(464): unsure at all n locations
actcaagcttntacatgcatgtgcacaccatatctactatactgtgatctacttatacaatctatccgattgaaaagataatttatactactcttctaatgtagtggacaactaaaactaaaataatataatagaaaatactgctcaagccattcaaatcaagtaattttgaatctcaccattactatcacgcatgtcaaacagaaggagaatcagacatcgtaatgcataacacaacgaaacattaaaagaaaacatgcttcctaaagccaaccaaggtaaaaatgtattcatatttcgtgaactttttcagaattataacgacacatataaccatatataacaacatggtggaacaatctgaccacatgcacaacacagaccacacattattccagaacatgagttgtaaggaacaataataatgcactcgtaataacaccgtatgtgcactaagataacaa

SEQ ID NO: 173114 - DNA, 377 bp, Glycine max
gatccctacgctcttgaccttgacttgaaagaacctctctttaagcgaacgtgtatgacttgatcccacgtattactaaagtgaacacaaatcggtgcgaatcaaaaccttggcatctatcatgagtggaatggatgaatgcatgaagaaatgcatatgacatacatgcaatctatgaatactggagcccgggaaattgtctccttcttagatacaacatcttggggtagcaaagcgcccgacttatgtatttaagaaggtggcacggaaccctctgtggtctgccaaacacaggggatcgaaacagaactcgcgcgtgatgcatatacgaaaggcgccacgccggagtgtacactatgacaatactcacaaaatat

SEQ ID NO: 173115 - DNA, 459 bp, Glycine max
  unsure (1)..(459): unsure at all n locations
tcatgtatncatattagcacaagacaagtgatttgatttattctatacaatacacatttacttgggattatgatttgtgttactctcttctctcccaaactaccctggtctcttttttttttaggaaggcagtacaactgttcaagataagaagaataaaaagagtcaaagaattaactgtaaatttggtttacacttgacactatttttcgttttagtctctacatgaaaaaactggtacatgtttgtgttaccttcaacggcctctaacctacgtttccaaaagacctccctggtaacttatgcattggaatgatcgctactgcactttcaacggaaaaacaaacatgtacagtcactctccattcttctttccttcaaggaaatggagtgtcatcattgcaaagttgcatcttcaccttcaaacatggtgatacgtgttagatgcctcccaataat

SEQ ID NO: 173116 - DNA, 439 bp, Glycine max
  unsure (1)..(439): unsure at all n locations
ctaagctcacccctttctcattcaggaaggaaactaaaattttattctttattgctctattccgaagtggaaaaacgagctccaactccatagttggatcctgcattgagaataaaacattcactcaggtctgtatgcataatacccgtgaatttttatgctctatttacagaactatatagaggcataaacaaactttcacatagaaccaactgaacccctaatctaacatctaaacgttagtagtcaaaaactagtgactgctattaacaattgccttgaattgatcctactgccgtctgttagatttccatcttccagatcatgctatcaatgctgcagttatgtgatttctccagcgcaacaactttggcccgatgtactgctagtgagttctttgctcttttctcctgnnaaagtacgcaagcttcactgacag

SEQ ID NO: 173117 - DNA, 380 bp, Glycine max
tatcccacgctactatggacggcgtagcgtattatatcttcttgctgtatcaccatccactgattgataaatgagaaagacgagctttcttgtccttctctcttgactccttgaacgcctactttacacctcggcgtagagaggcttcattttgctctctcgcaccattctgtacgagataccacacatcttgagctcctattaacgccctcatactgatgctccaatgatcataaaagtactgtgtgagcatccgtcatttggcaaggaaaacctccattctccatcttttgaggaacatggagctctgataccactttgtcggacacaatgcatgttatgattatgaaaagcgtgtaggaagtatggagactatgaat

SEQ ID NO: 173118 - DNA, 446 bp, Glycine max
  unsure (1)..(446): unsure at all n locations
cgaacttctggctgtgcaatactagtgaataattgttgttctttataacttgaataatcctccagggttactcttcttggctcttcaaccatgactgtatcttcaactagttctatatgagaatgccctgcaataggaaaacaagaagatgcctcggaaggtcaaggtttttcttctggagttgctgctacttctaaatcctgcaaaaaaaatttgattctctcttaattatgccttctacaggtggcgttaatctccaaatcaatgggaatcaaatcacctacagtagatcttctttgtatacaagaaaacaaaacaataattatccagttcaaaagaacattgaatatatgataactaaaatatgaacaaaaagaatcaatgaattaaagagaataatataaagcaatgtcgtnaaactgaactaaactcttcttacatctagt

SEQ ID NO: 173119 - DNA, 434 bp, Glycine max
  unsure (1)..(434): unsure at all n locations
tattntctagtagtgaagctctcttatgacagtcattaagtgttataaccttattatgctcggtacttttatggttggtgttaatcgctttatacgactaacttttatgtataaaacattttccaaaacttgtatagtgtcccaattattggttattttgtagtgatttttgtaaataaatcttgttttaaggttaaagttgtctctagaatatgtccattggatttaatgatgaaatatgtgcaatttcatgtgaaaatgaggctaagtcatgaagtgctaaaagtgacagttaagcttagctcatcagtgggctaagcgcgcatccaccactaagcgcaacttcatcacacttagcacaatagaagaatctagtagggcatcatcatcaacgctgcgcgctaagcgcgagataaatgcgctaagcgcaacag

SEQ ID NO: 173120 - DNA, 365 bp, Glycine max
  unsure (1)..(365): unsure at all n locations
cacctcactccgatacggggcagtcttccaagcaggtactctcccttctacagaaataggccttctttctatgggcaaagtctcgactcatttcgtatggtgtactatatgatgatgtaaaagggataatggtttctaaaccaacctctatacccgccctttgtttatggncncgataatgctgcaattaaccaaatgcaaccgatggaaacctgataacatgaccaaataatgaacttactacgaaaattatgaagaacgacaaacacttctgacatcattcacgtagccatcatgatctcacgagaactcacattatggatagaacacaagtagctctcacatacctatgtcaatatactaca

SEQ ID NO: 173121 - DNA, 391 bp, Glycine max
  unsure (1)..(391): unsure at all n locations
tctatggagggggngtcttcgagctatcaataatgtccttttatggtgattatccgccatggagttgcagcgaaagataaaggataagaggtgagaggacgcgccatctactataggataagccatggaaagagaaacttcaccaccaaaagagtgccttggataataagcttacaaaggaagcttcaatgaaggaagagaatgagagagatagagtgatacaatcctaccccctaagggcattggatacaatatacaagatagatggtgaaaacatgtttctagaatagtccaaactttattgaatatattgctaagtttactttcggcctatatatgcttttggaccttgctaataaatgcttttctggctcctgcaagatcatttttc

SEQ ID NO: 173122 - DNA, 305 bp, Glycine max
aaactaagaagatgccttataagatcgaggttcttctcctggagttgatgctgcttctaagtcctgcagaaattttctaatactctatgcgtttcgattcctgcaagtagcgttaatctccaaatctatgggaagtaaatcacctagcagcatatctcctttgcatacaaaacaagcagagcaacaattatccaatttcaaagaacaataaattctacagtaactaagtattcgcggaaataatcaatgaatcaaagataaagaatgaaccagtgccttcaaactgaactaaactttccacatga

SEQ ID NO: 173123 - DNA, 438 bp, Glycine max
  unsure (1)..(438): unsure at all n locations
tactcagcttctaagggtcgcgcttaatggcaccatacacttttntattatataccaagtataggatttgccgcagcaaaatgcacttagctcacgtaagcttggcttaccgcgcagtgttcgcttccagcaagtgcactggatcgcacaagtagtataaaacggtaagaatcgagtatcgaactcttggggaacttgtgttatttggtaagctatttcatcacatatgtgtctggtgtgtaaagataactgcgaatatgaacacgtgtatacattatttgtgcgaaaagaaagacaatcacgcgagagaaatgatgtgtacaaacaagttgaatacacgttggcctgtctaatatgtgcctgatgtctaaaagaattctctatctaacaatcgtcatggatctctatggtggcttctgagaactagaccctgattct

SEQ ID NO: 173124 - DNA, 452 bp, Glycine max
  unsure (1)..(452): unsure at all n locations
tctactaatgtggcacggcggaacctctgtggcttgttgtccctaccgcgggacttggcctttgttcttcctttccgaggtgtttttccttacgttagcccacgtaggtttatagcctaacccaaatatcccgtggtttcctttgacacttactaggccagccctgtcgccgttgtgcttgcccaaacccattctgggcttgtagcggtgcccgaacatcacctgcgccaccatcattgccatgccagacaggcggngctgccttgggagggaatctatggaagcgatgcttactacctcaaatgattggaaagccgtttccaatgactcctccacggcttccatatacgacatagaggaagaacaacttaccaggacatcttccttacctgatactatgaccaaatgtccttccactacaaacttcagcttttggtggagtgtggagggga

SEQ ID NO: 173125 - DNA, 71 bp, Glycine max
tcatttcatattttattcttccctccaggtagtatctccttcccccgtttaaaataccggcacactcttaa

SEQ ID NO: 173126 - DNA, 328 bp, Glycine max
tgcaagtggtggtcatccatggtgttctgaccccaaagactctattaatgtggttctaacatcctcaaacataaccattgaggggttctattccagtaagtgtgggactcacgctgatggaagcttgcttgagaagcttctatggaggctatatctttgagatttaatgaggttcttctatattgattttcatccatggatttgaagctaaagatatatgagaagaggtgaaaggatgctccatccactttagaataaaccatggtatgaaaagacttaccaccaatatagtgccttagactaaaagcttacataggaaacttcaatg

SEQ ID NO: 173127 - DNA, 314 bp, Glycine max
  unsure (1)..(314): unsure at all n locations
actcttagaggtgactctgaacgtttgtttatggaggagtccgagtcaatttctaattatttttctcgagtattgggcgtagtcaatcaacttaaaagaaatggtgaatatgttgatgaggtgaaggtcatggaaaaaatacttcgaactttaaatccaagttttgacttcattgttaccaacattgaagaaaacaaggatttatagaccatgactattgagcaactcatgggttccttacaagcatacgaagaanaacacaagagaaaaattatacaaaaggaggctacggagcaactactacaactcaacat

SEQ ID NO: 173128 - DNA, 450 bp, Glycine max
tattagtgtgaaaataattcaccccttcttaagatattgaggtctttggtccaacatttgcaatatctaattctacttttaagttaagtaaaatgtagttttcaatacgtgagattatttgttttgtttgatgcaggctgatgataatggagatggaaagttgacactcttcccttatctcatttattttgttgcaatcaattttgtcttgtatgtttaaagaacattattaaattgattgctgcttcttctgcattcagagtctatcatttagaagggggttaaaagcttattagtggaaaaataattcaccccttcttaagttattgaggtcgctggtccaacatttgcaatatctaattctacttttaagttaagtaaaatgtagttttcaatacgtgagattatttgttctgtttgatgcaggctgatgataatggagatggaaag

SEQ ID NO: 173129 - DNA, 308 bp, Glycine max
tgaagttgccaaaagtgtgttgaaaaaatgctccatatacgttaacttcatatctagttcaaaaagaggtcttgcatattctttctatcaaagtgaagaaccatatttgtgagaaaatcggtgattcctaattttgcataattgttgatgaagctcataatgaattaaataagggaacacatggttcttgttttgggatttgttgtaaaaatgatttcatacaagcaggatattgtgcatattaaagatactaccacattaactcttaagggaaaattatgtgttatactttcctaacatagtcttaa

SEQ ID NO: 173130 - DNA, 443 bp, Glycine max
tcaactcgcacacgagtgtctactactataggcacgatattttttgtataatttatactcatgatcatggctcatgccttttagaattggaataaccgatcagacacgatattctgctatccttattcatcttggatgtctacttccgttagttatgtggtctatcctgctcctatgcattgagacattcatttaattgaatcatatatgcaacaattgcttaatttattgcttattcgcgttagctattattcttctggacttaatcaaatgtttcaatattccttttgcatacgagctggagagtcatggaagtccacaatatctaagcaggtacgagaatgcatagacgtccttgttttagctctgtatatactcgctataatgctgacattcatccgtcatcttctgactgtaatatgcacataaaactttcgtttcaa

SEQ ID NO: 173131 - DNA, 445 bp, Glycine max
  unsure (1)..(445): unsure at all n locations
acctgaggcatgcaagctntaagaaactccaaatatgtcaataaatttcttatcacataaaacaattgataaatcatcatcatgatgcaggtcttcaactttccatacaagtttaaggaactccggttttatatacttatctgcctattactcaatggctatggaaacaaagtatgtcatagatgaaaaattgcatgggaagaaggtaacaagacatgaaactgaggagatattggcaggattaaagttgtggagtaagaattaaacaaaagatctcaataactacaacattatttttcaatagtgatgtaatcattagtttgctaatccatgaataaaatccacccagacacatganaaaatattgaaattgctcactttctctgcagaaccaaagcttggtgattgcagttcccctgtaagcacatagccatgaaaccctaat

SEQ ID NO: 173132 - DNA, 470 bp, Glycine max
  unsure (1)..(470): unsure at all n locations
cggccgcanacatacttctgtataattgtagagagaaatgctattgacattttatttcatactcttctcaaaaactctgtctatgattagttagaatctattaaaaaatattaatttttataaaaaattctcacagttaatataaattaggagagagaattattaaaggagaaacaaaacttacaaaaataattataatttttaataaattttaatcaatcagagtcttagacagagagtcttataaatagatcaaatattaaaaaaagtgttactaacatttttcaattttgaatagataatataaaataactaagataaaaatatattattaaatcttatacgaatttaaataacttattaataaatatttaaatattgagatgatttatatatcaatatatatcatgtgtcctactcctacatatataattaattatatgactaatgttagagcatgtagacacaac

SEQ ID NO: 173133 - DNA, 414 bp, Glycine max
gacccggatcttaagtcacctgcggcatgcaagcttgtctagctgcaacttggacccaatttgtggcagcacacacagctcggtaaggacctcttcagtcacgagcacttgtgccttgccgatgtgctgtgcaaaaatatagacctgtttgcctggcaaccatctgacatgctaggaatccaccccgacataatctgccacaaacttgctatctacctctaggctaaaccaatatcacagaaaaaaaggaagatggaagaagagcaacgcaaaaccgtcaaagaagaagtcgacaagctactttgtgccaacttcatcagagaggtcagattttccacctggctcgccaacatcatcatggtcaagaaggccaacggcaaatggcaaatatgcatcgactacactgatctgaac

SEQ ID NO: 173134 - DNA, 397 bp, Glycine max
actcagctaattaagtggtgagggcttgccagataatgttttacctgcaaaacacatgtgggaagggacctcattttttaacagcatttgcttaccctgaaaggggatgtacttggaaatgatttttccatattctcacacttacggaggaagttggctccattctaagctgagcaattatgaaatgttgcatatgaaagtctaaaaactattctgccatgttataaaaaaacaatcgtttataatgtcaggggaaatgttaaaatacttattctccatgtatcaaaaaaattgtgcataatgtcacaatctaaccacattggctctgccgctactccgttgccaaattagccatcttgtcctattgtgattgcaatggtgatacttagtcatgtca

SEQ ID NO: 173135 - DNA, 421 bp, Glycine max
  unsure (1)..(421): unsure at all n locations
agcttgtatactactaaaataataggttttaacaacgctctcttaacattggttatgatgcaaatcaatgttacaaaatacgcagtggcatttttgtaaatacaatgtcattgttaacatcggttttagaaaaattgatgttaacagggcaatgttaacattggttatttaaaaatcgatgttgtcaaagcactcacaacattggtttttaaaaaaatcgatgttaacatgacgattttaagatcgattatttaaaaaccgatattgcctaagcactcgcaacatcattntttttaaaaatcaatctttcttttgttattcattgttcaccaaaatcaatttttaagaactggtgatgtttatttctatattaaaatcactatcacccttcctctctctncacntttctcctctattcttc

SEQ ID NO: 173136 - DNA, 421 bp, Glycine max
ggaacttctggctgtgcaatactagtgaataattgtggttcattataacttgaataatcctccagggttactcttcttgggtcttcagccatgattgggtcttcaacagtatgagaatgccctgcaatatgaaaactagaagatgcctctgaagatcaaggttcttcttctggagttgctgcttgatgtaagctccattggagcttgtagccctaggatcttcttcatcaatgaattcctttgcttcttggaagatgaatggcatcggaatggagaaggaagagagagaggagacaccacttcaaggagaagatgagtctataagaagctcaccaccatatgaggtcatggataatagcttggaggaagaaggagatgaatgaacggagaggaagagaagagcaccaaattttgtgctctg

SEQ ID NO: 173137 - DNA, 409 bp, Glycine max
ggaccttagagcacctgggctgcagcttgactgtcaatgctcctgtttctgttggcacgagcaaagtctgtatggtggtcatcagaggagcacaaaccacagacccttgcgatagggacagatttctggttcaagaacagctgggttaccaagttaaccaatgcatccaggtagccttcaagcttcttagtttcagatgaagcggctgagtttgtagctacctcatgcactcctctaatgactataacatcatttctggcgctaaactgctgggagctggaagccatcttctcaattaaatttctggcttcagcatgagtcatgtcaccaagggctccaccactggtagcatctatcgtacttctctccatattactgagtccttcataaaaatgattgagaagcatct

SEQ ID NO: 173138 - DNA, 400 bp, Glycine max
gtctcttacgaggagactaactgaaacggagtttcatccgcagaactttcatttaagactagactcagctcaagtagcatacaaaaggttatcctaatatagcctaaacttagtgcgcatatccctcatttaagactaggcctagactaaacagcattattgtaacatcataattaaaaccatgatgttgtccggccatccctcatttaagactaagtttggatcttgcttcagtcgagttcgtaggcaacagtagatatcccaatgctaaagtcacctaattgtgcacacagttgggtgatcacaccatatgcatacaaacgataagcatggaatgaagcattgaacacagaatacactatcaactagatattacgcgattacatcagttgtgcattag

SEQ ID NO: 173139 - DNA, 456 bp, Glycine max
gaccttaagcgactgagctgcaactgtcttgatgtgtaagttttttttttttagaacaatatacttgtccttcatgtaactgtctttgggcttggtggtcactatcaacaaagtactttcgacacctactatatgttgatttgaccaatgctgttatcggtatgttgcgacaatccttcaataccttatttatacattctgagaggttcgttgtcatatggccatatcgacgtccttctttatcataagccatggtccattttttctttgaaatgggatcaatccatgttgctatggctggacttagatgacggaatttctctaaattctgataaaaaatatgcttgcaaggagtgtagcctgcatgaaattagttagcaaccataatttgaagtatacatgaaaagttaactaacgtgaccatgataaatgaagtcttaccaatttttcaacatt

SEQ ID NO: 173140 - DNA, 460 bp, Glycine max
cgcatgtccccaactcgatacccttaagtgagaggctctcatttctttcacatcaacagacaggccttcttcggaagttcacaatggtgaacaattcaactgccactggccattacgatcaagtgattatgatatgaaacctgtgttaaaggatctagttcactcatggcctgttgacggggatgatctggagaaacaagaatctgttatgtcagatatatcagaggagtgtgggattacaggtgcctcagattctaaagttgtacagcctgacaatcttatttttgatgaatactgggaggggtttgatgcatacaattccacttcagatgtcacgttatgtgggcaagacgatggacacaagaatcaatcagagaactcatcacgctctataatcaattcatgttgctgaccaatcaaaaactctggcatatcaagtatatcgtctcttactctaccc

SEQ ID NO: 173141 - DNA, 167 bp, Glycine max
  unsure (1)..(167): unsure at all n locations
acaggaatgtgaatgtttgagccctaataagacaaaaaggacgncatcttctttctttagangaaaagggaaccgagaaagggaggacggaagaagncaacgaggaagggccccaggaaacacggaccccatgactatgggaggattattgctggggaggaagagaa

SEQ ID NO: 173142 - DNA, 426 bp, Glycine max
  unsure (1)..(426): unsure at all n locations
tgcggcatgcaagcttgcttgaggagcttctatggaggttgtatctttgagcnncaatgaggtcctttaatggtgatattccaccatggagatgcagcggaagacaaaggagaagatgtgagaggaggcgccatccactatggaataagccatggaagaaggagcttcaccaccaagatgagcattggataagaagcttggagaggatgcttcattggaggaaaagaaagagggagagaaagagagagggggggagcacaaaattgaaggaagaaaaagggataaaagttgaactttgagttgtgtctcacaagactctcattcatcaaagttacaacaagtgttacacatgcttctatttatagactangtagcttccttgagaagcttctctgagaaaacttccttgagaagctagagcttaac

SEQ ID NO: 173143 - DNA, 457 bp, Glycine max
  unsure (1)..(457): unsure at all n locations
naagaccaggagacttctgtgtgaagagctatacatgcttctcatacaaaatctttgagagatgcgtagaagttgatcctcaataacattcaataaatcataacattgaaatatcacatgtgttattagtcatattactcaggaattaatatgaagcatcatatatagataaagcaccagtatgaaccatcttcaaaagataagggatcaatctaaaccaacataaaaagataaaggacttatatgaaccaacataaatagataaaggactaatatgaaccaacacaaaaagataaggggctaatctaactaaccttctattggtctcgatatgatggtatactttataaatttttctgtacctcccaagtttntgattataagttccattacccacttccaggagatggtattctcaccctcgaccacagcataagctattggcaacatctggtca

SEQ ID NO: 173144 - DNA, 443 bp, Glycine max
  unsure (1)..(443): unsure at all n locations
agctttcaccccaaattgccccanatttatcanaattgctttgaaccanaattcacttttatgaatgatgctctcctacaacctaagacaaggtagaaggagataaactgtacaggctcaaggttcaatcaaataatcatactttcagctcaaaatgggtgtaagggataaatcaatcatacacaaagtaagctttttagctaagtggctctcttcaatcaaaacatggccttcatcatcttcaatttcacgcattcattccatacttagagattcatgcaaaaatcattactcaatgttagtcgtactctcacaattaaagatcagactctcactgggttgcggctaatgcattccgtcacaatcaacctgacaaaccacctaacattttcagtcatgatcctaattccatgttctttctcttctaatgactacatgctcat

SEQ ID NO: 173145 - DNA, 456 bp, Glycine max
ctagtgactgcgacaaccatagatggtacattgtagtgttctcattgataagttctatagatgatcttgcatgaatttctaattatcataacatatgattcatggatatgatttacgccgtctttctttctttacattttaagccattggccaaaaagctatcccgatgtatattgttttatcatttgcaaaccctttgagccaaacacttcataatttgttggaacactaacctacgataagaatttcctaccttaccttaggttgagagcaaaggtgtttagttaaggatttctatcatttggtggctaatgtgatgtaaatactatatttaaatgtgggtattaacggaaattaaatatttaacagaaaaaatgaaaacatcgaatagacaagagaaaagagatagataatggaaaacaagttctttatggataaataaatgtctgaatcatc

SEQ ID NO: 173146 - DNA, 437 bp, Glycine max
tgcaagcttataagtatgtttacatatggcatataatatattatatcactatacatatatagaataaaagtgatacacaagcaagatactcaaactcatgaatttccaaattggttcctaaagtatacttaagcaaatacatatattttatatatgaaattgaaatctaaaacaaaatcactacatatgtatccttatatatatatatatatatatatatatatatatatatatatataacacattagaatcttatatacatataatcatataattttatatatggaaaacaaatatacatatatcactaaacatactccaaggcaaccataggaatctagccacgagaaaattagtcaatagaagattatgatcaattttccaagggcttcgcattctaattcacaacaacttggtttcatgtactgttccaatat

SEQ ID NO: 173147 - DNA, 458 bp, Glycine max
  unsure (1)..(458): unsure at all n locations
tgtatactntattgtttataatttattctatcataacttatctgaacaatattaaagttattttattccatttcatctcagtttcatttcattcttcctatcattaaagatccacacaatgttaggtatcatcatgtcatgtcatgtgtgctcaaaaacaaactttatgccgcacgttcataagtacatataggaaatttcaatccatcacaaattattcttgctagggagaaactataatgtttctatgatacaaaactaggcttgcaatccctttgagatctttcctttgagaatatttcactaatgttgagagcttgttatagttctttggcttgttatagaaaatttgttattgttcatcaaggtaattttattctgctatattctctttgctaataataccaaatgatttcgtaactaatgtgatattgtaatgaaaataatattctaattta

SEQ ID NO: 173148 - DNA, 451 bp, Glycine max
gctgaggaagcctgtgttatggtgaattatttgatatccacatacctcccaaagcaggtggtaatttaaatactaaaaaggtacacactccccccctcattttatttggtacatgttcatattcaactctaaccaaagtatgttttcaatttaagaaaaaggcgcgacaaaccttttctttgtcaaagaagtctgccagaaagcaagagtataaggagcttgcagcatggcatatgaacagtgaaaaaataaagggagattgcatggagaatttaaatccatctttaccacaagataataaaaaattactgcttcctattatgtctgaacctgaatgggagcttctctaattctaaatgccacgatgaataagttgtgttcataacaagtcaatcctacaaatttggattcactcataagtccatgtgtggagataagatgccctactgga

SEQ ID NO: 173149 - DNA, 473 bp, Glycine max
tataaactcaagctatcagggccactctctgctgaaatgtcccttgtaataatgttgtataaggaatacttatgagttaagaccgttcatattataaagtacaaataactcaataaaaaatgtcaacccaaaagatatatgtcattagtataacactcatatcaccgacggcttgaaccaactagtggaagattatttcaacttaacaagaggtcttgaattcaagtcctaactatatatgcaattgtgttaatgcagcctacaatgtgtatatctgatctcaaatcaaacataattgtctactgtgaaaaatacatgttatttaaaaaaaaaacaataaattattgttgtataaattatacagtatacccttattttagttacttatctgacatctttctatgtttagcaactaatatgactaatacaactcacatagaaaactttcaattctctctgctatctatcatttc

SEQ ID NO: 173150 - DNA, 424 bp, Glycine max
aactgcataccctaaatttatgtgcatgctcaaattaatatcacatgcaagagttcatttttatacatcaaaagtcactttaagcacaaagcttatcttcattatatcaataaatgcatgtaattattaccttttgctaaaaaaattctgtcctagacagcctctcctctaaagtataccaaataccagcacaagaaaaactactacaccagccacaattgcagccacggaacctgcagacatgctacttccattttctgaggaaaggatgaagtctgcttgattgttatagaagacattgttatacgagcttatatggcatgttttaattgttcctgggaatataaagaatatttcccaactaatttataattaaccaacacatcttttattaaatacttaagaataatattctcatggttta

SEQ ID NO: 173151 - DNA, 415 bp, Glycine max
tctttccatgaaaaataatatgaattcatttgggttttggttaagtccttcattgtttttcattctcaatgttttcaaaaaaattcttttgttgtgttctaattgaaaaataagtttcaaaaatactggttgttgattcttttcaaagcatgttatattcaagaaaaaattattgtttaagtcccgaaaagagttataatctataactatactaatagaatatcaaagctcacgtaagttttctaaaaaattcaaaacaataaataaggtaataaagtactgaaattttatacaaagcgataaataaacataaagacaatttcactaattctcgaagatcatggttgaggagctcaatctcctatatgatcatggatgaggagctcagtctcttccaatgaaataattaacatga

SEQ ID NO: 173152 - DNA, 357 bp, Glycine max
agcttagcacacacacgtctctattatcttatttcacctccttgagatgagaagctagagcttagctacacaccccctataatagctaagctcaccctcatgacaaaaaacatgaatatactaaaaaaaagtccttactacaaagaatactcaaaatgccccgaaatacaaggctgaaaccctatactactagaatggccaaaatacaaggcccaaacgaaggaaaaagctattctaatatttacaaagaagagtagatccaaccttgacccatgggctcaaaaatctaccctaaggttcatgagattcctaaggccttctttattaggtctagcccaagcctcttggagtcttcta

SEQ ID NO: 173153 - DNA, 431 bp, Glycine max
  unsure (1)..(431): unsure at all n locations
tcgcttgtctcntcggtatgcgagagcgagacctacatgtttttcatcatcagcaagtaccaacatgaattatatctatccatggcccaccagcacaacgtggcgagtgaatatgctcgagtgtacgcggaaaacgatgctagaggaagggtgattaactctttacatctgacaggcgatgatgtggatggatcgatttgcccttactttgaacgagagtcaagaacttcccctattgctggccaaggccaaagctatggcagacgcctactctgccctcaaggagatccacggactcctcagctattgtacgcctacgattgactaaatggcctatattattaactaccgccttggagtttgtattgacactcacatcttgactagatataaccttctgaatataatgagtttatctcgcatgtatactc

SEQ ID NO: 173154 - DNA, 420 bp, Glycine max
agctttcaaatgcttcaaagaatggaatgttcttattgaaaaacaaactgaaaggaaagttaaaagactcagaactgataatggcttggagttttgctcaatagaatttaacaaattctgcagagatgaagggattgtcagacagcttactgttaggaacactccttagcaaaatggagttgctgaaagaatgaacagaacactcctggaaaggacaagatgcttgctatccaatgttggtctcaacagaagtttttagggagaagctatcaatacaacttgttttctaatcaatagaacaccctctactgctataggacttaaaactcctattgaaatctggaatggaaaaacagcaaactactcaaacctaggagtatttggctgcaatgcttattatcatgtcaatgaaggaaaact

SEQ ID NO: 173155 - DNA, 445 bp, Glycine max
  unsure (1)..(445): unsure at all n locations
tgtccttggtttagacatgattggtacatgatttgggacttgtangattcaatttgggcaaaattgtatgagggaaagagtggttttcgaaatatgcactttatgcagaattttgctgttgaaatgtgcagcagaattttgtataagtgcagaaaaatgcttgtgcatggttggttgtgaaaagggtagtacatatggggttctggacattggctagcagatcccaacggtcaaaatgtagaattatgtactagagacttcgagcaaaattttcgagttgatccaacggttaacaaattggaacgaaggaaatgttactggggtatttgtatgtgaaaagctgtgattttgagttgtgttttgggcagagttatctgcctttgccctggtttgcttgattatgttagtccatgatgattggatgtggaattacttcggatttatg

SEQ ID NO: 173156 - DNA, 445 bp, Glycine max
agcttgttgatcattatggggggattgttttaaataaataccaatgtggagttgtaaggttgaacagttgtaatatgagattgtgaaagagaattggaattctcgttgagtgtgatgatctgttgcaacttgcagcatttgtgtgaattgtttggaattaaaaacacaatataaaagcctttggtttactttttcatttttctatttgtccttactttgttttgttctctctaaggatttgatgaagtaagaaagaggaaacaaacattgatagatactactttgcagaaaagggtggttgttttgtttcagttgagattgggacaaggtcagtgacacagttgttggcagccctggatattcctgccgtgatcagaataacactctcccttggctatgcccatatatataaatatatatatatatatatatatatatatatata

SEQ ID NO: 173157 - DNA, 474 bp, Glycine max
  unsure (1)..(474): unsure at all n locations
ctataaaactcaagcttaaaaactgattccctcttctagtacgatatcaaatgttgtgcacagaagggtatctacatcaganaactcacaattgagacatctttccaccatagaagtctatgaattgggacaacaaagatagtcgagcctctgttgtgctcagggagaacaagtattcattcacatcttcatacaatacaactctcaagagttgttcatcctcatctgttttgtctgcttcgttagcaggagaggttgtacctattcatggttaatcagcacacttgtataagcagcttgtttgtaatgaataattgcatttcaaagcaataaagcaaattcaagaaaagcctattacacacacacaatacattcagagagaagtatagtagttaatgaaaggagagaaaatcctacctgatttcccacgaacaggcattcactgatcacaatctctagaagactcttcttttg

SEQ ID NO: 173158 - DNA, 418 bp, Glycine max
  unsure (1)..(418): unsure at all n locations
gcttgtttttgacttaagagaacttcattctttgttgtgcccttccatttcacgtggagaatacaagaggtaaggagggtctttccacttcttgaaccctaaccttgttgtctttggaagctaggcttcattacatgttttgatgtttaaatttcgtatctacttccatgaatggaatgggatgatatattanttttctgtaatttttaaggtttgcaatgagttttttgggtgttaaacatagggttagccttttcacttaaataagagttttctagcaaaagttatgaataaaacaagttttagaacatgttatcggataaaatttgtcacagaagtaatctgatagggagtgttgtatggactgggtttcttaaagttttgacctaaaaatgagtttattaggtgtgacaatata

SEQ ID NO: 173159 - DNA, 459 bp, Glycine max
  unsure (1)..(459): unsure at all n locations
cgcttctacaatctcccnctttgtgatgatgacaacttctgttatcaagaaacacacacacacacacacacacattttccttgtcgatcactttcataaatgtccattccccccctttgtttttgaatttatgcttctcttaaaattaagttgattactcatgtgagttcttgatttaatctcaatttctcaacccctttggcatcaacaaaaagccaaagtgcgtaacaagtttgaagcatacaaatacaacgaagcatccatacaatattcatgggaaaaatataaaccaaatcatgcagcacgaatcatgaagcaagaaccatgaatagatcaaatataaaatccacatagtcaaataacataattaatatttgttcaaacataccatgaaaataaagaaatagtaaattgttcaaatatcataatganatagattatctggataagtcactgaca

SEQ ID NO: 173160 - DNA, 442 bp, Glycine max
  unsure (1)..(442): unsure at all n locations
agcttattttatttcatatgcagtacatttcttcttactttattttttcagatagtctagttatttgtgtgagtgtgttattttcggagttttataaactattactgtacgtataacgaagttgattcctcatgcatttgtcttgtaaatttttaagaaaaaaaacagagaaattgatggtcctttctttgcctaggaaaattaatgatcacaaagtaaccccagaatgcctggtgtagcacgtatgacagcttcatttatcacaagcatacgatgcctggtagtttaaatgattgagtaaacaaatccatgtgtgttttgttggaagagcttaaacggtaagagaagaaaatatatttgctctctttntatntattttaaaagcacgaagtttgtgtgattggtgtatctctggagtttggagtactcatgatacgtactc

SEQ ID NO: 173161 - DNA, 460 bp, Glycine max
tcaagaattatggcctcatcaaactacttgtttcccgttgtaaattctataaatagacctcccatatttaatggagtgggttaccaccactggaaaacccgcatgcaaatctttatagaggcaatagatttaaatatttgggaagccatagaacaaggaccttatgttccctctataatggccggaagtgcaacaatagaaaaacctatagcagattggactgaggaagaaagaagattagtaccatataatttaaaggccaaaaatattattacatctgccctaggaatagatgaatactttagggtttcaaattgtaaaagtgctaaggatatgtgggatacactacaagtaacacatgaaggcacaacagatgttaaaagatctatgataaacactttaactcgtgaatatgaactttttaggatgaatgtaaatgaaagtatacaagacatgcaaa

SEQ ID NO: 173162 - DNA, 371 bp, Glycine max
  unsure (1)..(371): unsure at all n locations
agcttgtgaactactgatttcaatatactttttaaactgnnggnctgctggcttaaataaatgttcacttacagtatatagttgggcagtcatgatcttcgactgtggttcacacttcacaataatttctacttcagtatcaagctttttgatattttcatagtcgcgtcgcgcttactattatattttttcggtgaggacttacttttatatttgtatatgaacttttttaatatcaaagattcttccgtaactatgattacaagtccaatttaaatttaaatattgttttaataggataatcttattaaaatggaagactattcttaacaaaaatatttattctttactaaaaaattaagaaaaattac

SEQ ID NO: 173163 - DNA, 432 bp, Glycine max
tgtaccaattggtccattgttgacaagttactatgatacatatgcaactgcaaaaacaatcggacaatattgagaagaagatctatcctgcatgagttagcttgatcaacaacctcatggttgtgttgtatgttacctttggtagtttcactcattttgaccaaaaccaattccatgaactagctcttggactagacctcactaatagaccttttctttgggtggcgcgtcaagacaataagaagtataccctaatgaattcttgggaagtaaaggaaagattgttgattgggctcctcaacaaaaggcgttaagccaccaattagagatatatattacggcaaaaatatcaaatagggttccttctacacattatttacctaaatgggtctgtcttgaaattatttaccacgtgaatttgttttatcctac

SEQ ID NO: 173164 - DNA, 430 bp, Glycine max
  unsure (1)..(430): unsure at all n locations
agctntagtcaaacagaataatcaaaaattgtcaaagaattgggtgttgaaaaagcataacaagaacttttgtgattggtttaaagattcaatctttgcagatgacaatgcttctgaaacattaagaaagctagcaaatgggcctaaaggaaatgttataacttggcaaggatacgacataaacaagtattcattttacacaaaaacacaagatgacaaaagtataatgcagaacagcggggtcaccctaagggctgaatgtcaacacttcgcaactgtgaatgatgccaatccctgtgtagcgtccatcccttactttgggttcattgatgaaatttgggagcttaactatgagaaatttactgtatgtgtttttaaatgtaaatgggttgacagcaacaccggtgtgcgcaccgatgatataggatat

SEQ ID NO: 173165 - DNA, 287 bp, Glycine max
  unsure (1)..(287): unsure at all n locations
gctgggtggtgactcttaagagacttcttctacataaaaacaaacccgcttgccaatcatggagggggggtgagttatgccattcacgctaaaacgtcatactctcacaaacttttcatgtatttaagatcttatataatgctaanttcaaatcctttatatacgcgatcacttatactcttcattgtgcaccaacacaattatcgtatatatcatccatgtgtactccactatatgtatatctttcttctactaatatatctttacatcacaaatcaataccaatg

SEQ ID NO: 173166 - DNA, 400 bp, Glycine max
  unsure (1)..(400): unsure at all n locations
cccatggaagctcctaatatctcccacactttntagggtgggctattcttggatgtccttgattttctcagggtccacttggaccccatttctaccaactacaaaccataagaaaactatattatctacacaaaaagtacacttctctgtatttgcatagagggtgtttttcctaaggactgaaacaactttcctgagatgtcctaagtgatcatctaggctcctactgtacactaaaatatcatcaaaataaacaactacaaatctatctatgaaatcccttaagacatgatgcataagcctcatataggtgcttggtgcatgagtcagcccaaaaggaatcactagccattcatacaaaccaaacttggtctggaaagcggttttccactcatcaccc

SEQ ID NO: 173167 - DNA, 465 bp, Glycine max
  unsure (1)..(465): unsure at all n locations
tggaaggatgcttcaatggaggaaaagaaagagagagggatggagcactaaattgaaggaataaaagagggagagaagtggaactttgaagtatttctcacaagactctcattcatcaaagttaccacaagtgttacacatgcttctatttatagactacgtagcttccttgagaagcttctttgagaaaacttccttgagaagctagagcttagctacacacacccataaaaaaactaagctcacctccttgagaagcttccttgagaagctagagctaagccacacacacccctctaataactaagctcacctccttgagaagagaagctagagcttagctacacacccctataatagctaagctcaccccaatgacaaaatacatganaatacaaaanaaacgtccctactacaaaggctactcaaaatgccctgaaatacaaggctaanaccctatactac

SEQ ID NO: 173168 - DNA, 442 bp, Glycine max
  unsure (1)..(442): unsure at all n locations
tgcagctaacagttggtctgttttaagcgtgtttacttacggcaactaanaaaaaatgaaaaaaaatactaacttacatgaattacattcataagtctaattntattatgatttataagatagccttgatgaaaagaaaatgtgttaaattatttttatactcaaattgatcgtcaactattaatacataataaaacacgaagttgcttattgaactcctgtatgataatgtagcaaactattgacttcaattgaaaatatgtatgatcaaaatagtaatattgagaccttaaaaaaatagtaatattgaagtaaagacaattctaattgctgattgcttttaagatacactggaatctatttttcttttcttttcttttttaatctttgtcggtgattcactttaaaatgattgatctataatgaaattaatgaataaaaa

SEQ ID NO: 173169 - DNA, 459 bp, Glycine max
tcaccaatctcacctatcccaaccaaaccatcaagcacgatcctgtatgtatgcaagttgtgccctacacccttccaccccatctccttcattagcccccttgccttaactaagtcccctgctacacacaaggcacccaatatagtattgtaagtaaccacattcgatttgcattctaactcctccatagaagcaacaatctgaagcgccttgtctaccttattctgcttacacagaccatttatatacacattataagtataaacatcaggaatgagtccaattacaagcatttcatcaaatagttcacctagcatcacatactccccttctgctacaatcccactcaagaccatagtataagaaacaatatcaggattaattccatcctgtttctgctggttcagaatgtggaaagaatccatgctcctcccttccttcaccaagaacctaatcatg

SEQ ID NO: 173170 - DNA, 399 bp, Glycine max
  unsure (1)..(399): unsure at all n locations
agctngactccttttaaataaaagtgttatgtctacttacttttagtaaattctaagtcttctagacttaagctatactaatgatttgttttgagtatatcattaataaaccagactttatgaggaaacatgaaagaaagatttgaagcatcagtctaaattatgtcatacctccaaacataggatatgtcgcattaaattaaaagtggaattacaagaaagagattgaccatatgcatgaaagatagtttatgctttctaaaatcaaagtgtattaaagacctatgattagaagtacaattagaaagtatctcaagtcaagggctattataagtagaacatcttttttattatctaatataagaaagggagattctcattcactactacaaaagcatg

SEQ ID NO: 173171 - DNA, 447 bp, Glycine max
gcttaagttaaggagtcaaaagtggtaggataattacttgtaacttattgaagttagtggaacttggtgggttgccaagaactgaacgtagtctaggtgattgagattaacctaaaatcttctgtcttatactgtttattttattttatgctctttaaacaaactcagggtttgaatttaattcttgcttttgaaaaactccattttttatatgatatgaaactattgtgtgatttaccttgtgaaaatatagtatttgcttctttagttcttcttcaccaaactataacattgttgttttcgaaaaaatgttttaagttcagtaaaaatcacaatttaattcccttcttgtgatattttttttttacaaaatgtaatatatagagttcatcaaaagtgacatctctactcaaaatgaacctttcttttgacatagaccagattctg

SEQ ID NO: 173172 - DNA, 432 bp, Glycine max
gtcacctgcggctgaagctcatagatctccgtctaagagttattctctaccctcgcggggagcagaatatctgggagctccatcttccctgtacttatcttcccaaccatcctcgtgattttgattatcatgaagaaaatgacagtgactgcctcttctgcatttaccagcagcaaaatctctacatggttgtgtcgatcctccagcccgcattctacttctgtcattgactcccgaatcccacctaaaaccatgaggagggctcctgcttcgactactcctagtaaatgacataatccaaaggtagacaattaacaaaaccaactgcatctaataatattatgcgccaccacaaccatggccacagtataatcactaatatctaaacgcaataatttattagagaaagagtgcataatttcaaaataaaga

SEQ ID NO: 173173 - DNA, 408 bp, Glycine max
ccataagttcaaataaatgtttccatgttccccctttgtgaattatggtgctatgatgtaaaaataagaatgcaactactaaagtgctgagcataataaatgataaccaaaatttgggatcagaaacttgttaatgtgtataaaagaaattcaattcttgaataaggtctatggatttgtcaaatgactctctgcaactagaattgctaatgcttccaatccatgtcaaaccttatattttggatttctttataccctctactatttgtagtgaagagctcgcaactgatgcaaaggtaatacacattactattgttatttaattgtgattgacccagtcaattgtattcatcgattcttggtacttgactggcaattaaagagtttatatagatgtcacaagtgagt

SEQ ID NO: 173174 - DNA, 420 bp, Glycine max
  unsure (1)..(420): unsure at all n locations
agcttgccacccagctcgcccaggcgatctgtttgcttcctccanaagcaacagccttctggaggaatcttctggagggtccaagtgggcctggttgctatttgcacccccatttttactacgtacaccccctgccttttttttggtgattcttttttcgtaaagttacggaaacttacgaatttcgtaacgatacttgttttcattccgtaatgttacggaaccttgtggattacataatcatcccctttttgacttacggaatgttacggaacctcactaattgtgcaacgatgctttcatttgatttccggtgtgtcacggaaccttaaggattgtgcatcaatattttcttttgttntccggcacgtcccggaatttcacaaattgcctaatgatgggtgccaagcaacctacaag

SEQ ID NO: 173175 - DNA, 439 bp, Glycine max
  unsure (1)..(439): unsure at all n locations
catgatacatgtcagggtttggtttgtttcattgataaaagggatgccccacattatttccatgacacaaatgcaaaaatgatgatttggaaactntatgcaaaactggtcatgcatgcacctatgcggacactcaagtgtcaaatttttatggtcatgtgatgctagggctcangattcatttcctctattttaatcaacccaatgtttccaaaatatgttcttttatcaatttgggcattcacccgagtccatttcgggcgtctgggaaaatcttcacagcattcacccttcaggtgtagacacattttccaaaaattggttatgatcaatgaaatttttttttaaagaaaagttggaagtcatctcttttataagcatgttggttttcagcttgaaacttattttcttttctttttatatttgttattcttttctt

SEQ ID NO: 173176 - DNA, 369 bp, Glycine max
agctataagctcactaacaaaactatttctctatattttataaaatgaaaaaagcctcatattttgacaaaaataccacatatgttgacaaaagggtctaatacataactcttttttttacaacagataatcaatgtgttccattttaacaatagagtttacgaacattggagtacaatggaaaattctacatccaggattctctatagacgatcttgttaactcatgagctaacatgttagccttcctactcgcaaaagagactttaaactctacatttgcttttaggaagcttcttatttgctgaataataaaaccacattcaataattgacagctaatggctttgaatctgatatattactgattt

SEQ ID NO: 173177 - DNA, 431 bp, Glycine max
  unsure (1)..(431): unsure at all n locations
atcgtagtngcactntccaccctaagctggcttccatcatatatataaaaaaaagtgtagatatgatctatctttcgccttttcatattactgcctcgctttacccttgacaacgaattctaattccttggtaacttggtttccctgtggatattctacgatatgcatgaatattcattgatgaaacccatgcacgtaatctacaaaatccaaatatgtttttcttggttgagataacacgtgactgcttatatatggggccaaatccacatacccttcaaggcaaaaccttttaattatttaatttttcattgttacatatgatggcacaatatgtcaagttttgactccaatgctataagatgtaacgagaatgatcttactcaaattacgaagtactcttcgccaaactcaatatcttctttctttct

SEQ ID NO: 173178 - DNA, 433 bp, Glycine max
agtcacctgcggcatcaagctaggctaattagcaaaacttttttttctatttaagctaagtctagtccaataagaggcatctgaggatgaagcttaggttaagttaatctaaacttagaagggctgtctaaattgagcccagtccaacaagagggatctgaggacgaagcttggattgattcagtctaactagggattgaggtttagtaatttaggttatagcatagaacacaaaagcatgattgattagagaaacatccttatatgcatcagctggtctgttagaaagacccaacacttttacctactactgtcaattttacttacttgcatttttattattgttatccaaaactatacttaagtatgtattaaaccatcgattatctatgcttctttcaacaatgccttatttcttaaattaacccggtct

SEQ ID NO: 173179 - DNA, 404 bp, Glycine max
cttgattctaaatcgggaagtatgcgttcatgccattgttgtctttctcctgggcaaacattaacattgttgctgactagacttcttagcaggatgatatgcctcctgtctttctattacgattcagctgttctttctttctttcttttccttatttctcgtttttttttttttttggctttccctcattacggagaaccaagaatcgcaaatactgtgcatggtactgttactggccccattccaatgtgcagctcataagcaaagttcaagcccatttctataagactaaatttctatcagcccaaaaaacattagcatgatggatatccctcttccactttttttttattattatttataaattcctacgattcattaagagcgtgtttgtgttctaattc

SEQ ID NO: 173180 - DNA, 432 bp, Glycine max
agcttctcctgctcttgacatgaatctatttaattagatccctctcaacttgtttcacccatcataggaaagcaaaaaaaaatgagaagctttgtgtcgtatgccaagactgttgacacctgtttgtccatgactaccaaatctcatatcaattttcaaactatgtttgattaataacattttcaaagaaacacaaactaatactcataaaacatgttatattcttttgacactcttttgttgagaccattaaacactacacatgacaaaagcttgttatttaagtcacattgtatttctctgtttgcttcaaactactagttaccttcacaaatataagaatttatattaaaaaatgtggtctcaggctcagctgtaaaaaataaaacattgaaaatggaggactgtatgaatgaacctaattgtgtagaa

SEQ ID NO: 173181 - DNA, 458 bp, Glycine max
  unsure (1)..(458): unsure at all n locations
tagagttgctccaacactntaagtacttggcttctactttcttaactaatctcaggcagactaagagagcttcatactcggcttgtttgtttgtcttcttgaactcaaacctcagggattgctctaggattacttcatataggctttctaggatgattccaacatcaatccctttttcattggatgaacaaactacatacaacttccaccacttggactctagatctatagtgaagtctgctaggcattgagcctgcattggacccttggttcgtaactgagctcaaactcgaacaacttgattgactaggctatcatttggtctgtgagttctagtttcttcgtaactatttggatgggatggttaattcaaaccatgatccaatgaatttggaagtatggtctttgtcttttagcaattgtgactagagccaaggctaacttctcaatcatttgat

SEQ ID NO: 173182 - DNA, 303 bp, Glycine max
tactcctttagactagtggtccctaggctcttgaccttgacttgatagaacctttttttaagtgaaggcatttgacttgatcacatgttttactaaagtgagcaaaaatcggtgcgaaacaaaactctaacatttattcatgggtggaattgatgaatgcatgaaaaaatgcatatgacacataagcgtattatgaatacgggagcccgagaaattgtctccttcttagatacaacgtcttggggtagcaaagtgcccgacgtatgtgtgtaataaggtgacacagacccttcgatggtttgt

SEQ ID NO: 173183 - DNA, 457 bp, Glycine max
  unsure (1)..(457): unsure at all n locations
tcttatccaaggctcatcttggtggtgaagctccttcttttatggcttattccctagtggatggcgccgcctcttacctcttctcctatgtcttccgctgcatctctatggtggaaaatcaccattaaaggacctcattgaagctcaaagatccagcctccatagaagccccacaatcaagcttccatcatccgccatggttaggtcctagatcttaccataggctttgcgaaaggcttgtcgctggagttgacccatcaactgtcctaactctttcaaactgacgactcctaggctcctgatcttgacctgatagaacctctttttaagccaaggcgcttgacttgatcccatgttntactaaagtggaataaaaaaaacctatgcgaatcaagactctgacatctatcacgggtaaaatggatgaatgcatgaagaaatgcttatggcacagatg

SEQ ID NO: 173184 - DNA, 353 bp, Glycine max
  unsure (1)..(353): unsure at all n locations
agcttgtagcaaatgcaatacacattatctnttagctcgtatatccgattgagtcccgtaatatatcaagacgctcaaaattgaatacagaagctcttagcaaatttaaacgacaataaatttctacacggatgtccgattgggtcacgtaatatatcaagtcgctcgaaactgaatacagaagctgagagcaaattcaaacggcaatgacttttacctccgatatcccattgagtcctgtaatatatcgagacgttagaaattgaaacagaagctgtgagaaaattcaaacgacaataacttnttactcggatgtgcgattgagtctcgtaatatatcgagacgctcgaaat

SEQ ID NO: 173185 - DNA, 468 bp, Glycine max
tgtaggattatggggtacccattacatgtggtactatgtggcggtcacgcgatggtgcacaacaagttttccacatccacaaatcgcgcataaacccaccatcccttgttgcccacctccaactgagctcacgtactcccacgtagcccatatcctcgtttctctcaacaccgggtccccatcaatcctcccaagcttccccaacatccaagtaatacaacattcaaatagcacaaactatcacagccaagaaaacagggcaaaggcagaaaactctgcccaaaacaccaaccaaaatcacaaccaaaatcacagcttttctcacttaaagaccccagtaataattccttcgttccaattcgttaaccgttggatcgactccaaaattttattggaagtctctagtacataagcctacatttggaccgttgggatctactagcaaaaatccagaactcattctgcact

SEQ ID NO: 173186 - DNA, 448 bp, Glycine max
  unsure (1)..(448): unsure at all n locations
agcttataagaacaaaattgtctctatcatttcaaatatgcatgtgaattaggaagcatcaacaagaatcaagccaaggctattgtgcaagcaatcaatggggcataacacaccaattgattatgatgatggatggctcaaattctcacaaaggtaaactcatcactttcaaattgagctttcaaaactatcatgacatgtagaggagaatcaaggatttcaagtcacagaatgtcaagaacttttattttcaaaacaactacccatttcttgaacatatcctataattcaaagaanaacatgcaaagtcatacatgcacacaaaattgacccaaaatattaaactaaaaatccgacgaaacttacaacatttacaaattaacacaacttacaaattaaccaaacccaccaaacttgccaaacccaagaacacttccccccatactta

SEQ ID NO: 173187 - DNA, 461 bp, Glycine max
  unsure (1)..(461): unsure at all n locations
actcagcttaggttgctcattgactccagaatgctgcaaagaatgttttatatctgtatggcgatctgcagaagaacatataccacagactctagcaacaggtgcaaatttctgattcatggcaagctgagttactaggttgaccaaggcatcaagttttccctcaagctttttattttcagcagatgaagatgaatctgtggccaccacatggactcctctaaggacaataacatcatttcttgcactgaattgatgggagttggaagccatcttctcaatcaaattcctatcctcaacaggagtcatatcaccaagggctccaccactggcagcatcaatcatactcctctccatgttgctaagtccctcatagaaatattgaagaaggagttgctcagaaatctggtggcgagggcaactttgcacacaattcttgaatcnttcccagtactcataca

SEQ ID NO: 173188 - DNA, 423 bp, Glycine max
  unsure (1)..(423): unsure at all n locations
agcttatcaagcaagcttccatcagatcttcattcaaatctcatgagaaaggtgttgcacttagtaaaaataattctaaccctactcctacttcttcaaaaaaaagttctattaaatgttttaagtgtttaggaaagggtcacattgcctcccaatgtgctaactaggactatggttgtgttgggtaatggggatatcactagtgcatcttcttctagctcttatagttcttctagtgagagtgaaagtgaatgtgatgtacagcccctggaatgtgatcttttgatgattaggaggttaataggtaatgtgtgtaaggatagagatgaaactcaaagggagaacatttttcatactangtgcatggtcatggggaaaatatgttctttgattattgatggggtagttgcagtaatgtagcta

SEQ ID NO: 173189 - DNA, 457 bp, Glycine max
  unsure (1)..(457): unsure at all n locations
tgccgccacagagttttccgactatgctcttgtgttgtttaacaagctacaaaaggagagaacanganatgaagagtcaatggttgatacatggacgaagatgaaaaagatcatatggaagcggtatgtgccaagtggactaccacctttgaggggaattgagcatcaaattgatctcattccgggagcttctttgcccaataggccagcctatagaagtaatccacaagaaaccaaagagattcaaagacaagtggatgaactcattagcaaaggttgggtaagaaatagtatgagtccttgtgctgtcccagtgattttggtccctaaaaaggatgggacatggcgcatgtgttccgattgtagagcccttaataacatcaccattaaatataggcatcctatacctaggcttgatgatttgcttgatgaattgcatggtgcatgttacttctct

SEQ ID NO: 173190 - DNA, 404 bp, Glycine max
  unsure (1)..(404): unsure at all n locations
gtcacctgcggcatgcaagcttagactccatttgaagagggagcctttgtgcttatggctgatgaanatgcagagcatgctcaggctaatgttggcaatgaaatggatgaagcaagtgaccatgatgcctatgttgcgaaacggtcaaatggtaaaattcagaagcagagtaagccaaaaccaaacctcaagttgcctccttccaaaattgcaaaacgcaaagtctccactcccactttaactgtaaataaaaattcttggcccgtgaaagatgaacctttcgatgaagaagatagtgaagaaacagaagaggatcgtgacaatgttgaagatgggtggagatatgcaggaggaaacaatgaagatgatgatgaagaaacagaatatgaagactgaatcagtta

SEQ ID NO: 173191 - DNA, 464 bp, Glycine max
  unsure (1)..(464): unsure at all n locations
nntaaagatggtttaattgcttacaaataatgttaaaactcatgttattctgtgtgaaattaaagtttatgttgaataaattgaattgagtcaaacataattgaaatatcaacctttttattgttgctcgagttgattcatgggtatatatctaaaatttaaggaaaaactttgtaagtttataattatgcacaattataaattctgcataccgtaaaatataatattttgtgtattaatgtaaaaaaattattttatttgtgtaacatttttttccttagaacaacatataagaaaaaaaatttgcaaatcaaattatacaataaaaatgtataatgatgaaattttatttatttttaatgttgttccgaaaaatacttgataactaagataatctaattcaaaacatttaaataaagtgtaatgtttaacctgtcattttaggtcaataagaaagtcattta

SEQ ID NO: 173192 - DNA, 410 bp, Glycine max
  unsure (1)..(410): unsure at all n locations
tgcagcttcagcaatttttgtgaaattttctctattgtagatgctaaaaaagacgatgtacagaattcatgggtgatcagctgttgcagcatatcatgcgactcgaattggtaccaccaataagcaatttcctttaagctttccgattaaaacgcacgaatcaaagttattggcgacatacgaaaatgacgaatgtttatattctacattggcactgccaattagatgggcggcatgcttccagcattntaatatgggtgtgtctcgcaggagaaactatcgagatcagtgcacgtcagcagcatgtctcgcctgtgccactggcgacaccctccagctcagcgtactttttgatttcaaatatatagtatcatcatcatagtcataatcattttaatctaaataaattc

SEQ ID NO: 173193 - DNA, 353 bp, Glycine max
cactcaataatcatcctaacacactctttccaagaatgcacacttctcattgaatttcaatgcattcggttatatgaactaataaaggacaatcaacgatttaagacaaaaattattgtttgatttgcaaatgaaactgaaatgaaataaacgtattctaataaggcttaatactggtttaagcaaaagtgcgcgcagcaaaacgatatactttctaaaataaaaaatacatctctttaattcgtcaatatatctttatgaccatttaatttcgcatacttcgctctttaacgatatctacgttatttctattaaataccgatatctaacttacctaatgagcatacctcttc

SEQ ID NO: 173194 - DNA, 385 bp, Glycine max
ctctattctaatggtgccacttgtcaaagttgttgacgaatagaggtcagtctcggtggatacacatagaatcttcacactattaaaaaaaaatttatgcttcatgagttcatcaacaggtacactttataatacggtatctgtatataatctaatttaaatacaaaatagatcattttattctgctatgtgtgttttgaacaccttaatcttctgcacaaatgcaacaaattctaattacaatcccaattaggttgacactacatccaacatcccacattaaacctatgcaacacctattgaattaataaaattaaataaaaattaagaagtgttaaacctgaacaccaagagaatcatagaagaaaaaggtgattatgaaaca

SEQ ID NO: 173195 - DNA, 364 bp, Glycine max
accgcctcatggaggaatattctggacggcctaagtgggtctggttgctatttgcacccccattttactaaatacccccttgtctttatggcgattctttgtctgtaacgttaccaaactttacgaatttcgtaacgatgcttgttttctttccgtaatattacgaaaccttacggattacgtatttatcccctattatgcctttcggaacgttacaaaactttacggagtgcacactaacacttccttgtaatttccggcatgtcacggaactacaccgattgtgctacaatgctttattttgacttctggcatgtcacggaactgcacgaattgcctaacgatgggtgccaagtacctctaa

SEQ ID NO: 173196 - DNA, 435 bp, Glycine max
  unsure (1)..(435): unsure at all n locations
gcttgtggacggtggcatgaatatgtatggtgatggttgggccagcggttcaaggataaaggaatgtctcgcattatttccatgacacacatgcaacaatgatgaatttggaaatttatgcaaaactggtcatgcatgcacccatgtggacactcaaacatcaagtttttatggtcatgtgacactagggctcaggattcattttccctatttaagtcaacccagtgtttccaaaacatgttcttttatcaattcatgcattcatccgagaccattttgggcgttcgggaaaattttcacagcattcacccttcaggtgcatacacattttttttcaaaaaccttgtgttctgaatggtaagttcatttcctttcaaaagcatgttggctttttagctaaccaaatntatttttctttactttttttggtttttt

SEQ ID NO: 173197 - DNA, 439 bp, Glycine max
  unsure (1)..(439): unsure at all n locations
agttattcgtaatcaccgactaacaactcctttaaatttacagttttgcttgtcctcaagcaaaaagagaacagctcacttgtcctcaagtgacaataacatgcagtgactatgtacaaaggtgtatgcaacaaaagctactgattgcatgataagagaatgaagcattatgtactcatcacttgtctttcacaaaatatgcagctattcaaagagaagaataaaatgtaagcatactattagatgaagttaatcataagatagatattaaggaaagtagcttacaccacagtctcacggctactgtttcactcaagcacaagtgtttaagctattcattaataacaactagcaagaggtccaatctttgcacttcatctcatgccatanagtcagaaatgtataaacagaatcagaaggactntcccaggcttatagt

SEQ ID NO: 173198 - DNA, 416 bp, Glycine max
  unsure (1)..(416): unsure at all n locations
agcttggtccaattcagacggccatagtttttgacatgggtgtacgattgagacacatgatatatagagacgctcaaaattgaaaaattgaggtactcgagaaattaaaatggtcataacatttcacttggatgaccgatttaggcacataatatattgagacgctcgaaattgaacacgaaagctctggtgcaattcagacggccataacttttgacatgggtataccattaaggcaaatgatatatagagacgcttgaaatagaaaaattgtagttctcgacaaatgcaaatggtcctaacatttcactcagatgtctaatccaggcacataatatatcgagacgctcganattcaacacggacgctctggtccagttcatacagccataacttttgacatggattgttgattg

SEQ ID NO: 173199 - DNA, 455 bp, Glycine max
  unsure (1)..(455): unsure at all n locations
gcgtctcgatatattacgagactctatcggacatgcgagtcanaagttattgcggtttgaatttgatacgagcctccgttttcaatttggagcgtctgaatatattacgggactcaatcagaaaatctgacttgaaagttattgcggttttaattgctagtggcatctgttctaaacttcgagcatctcgatacattgtgggactcaatcggacatccatgtaaaaagttattgtcatttgaatttgctacgagcttccgttttaaaattggagcatctcgatctattacgggactcaatcggacatacgagtaaaatgttattgttgtttgaatattgccagagcttctgtttcaatttcgagtgtctcgatatattacgagacgcaatcggacatccgagttaaaagttattgtcatttgaatatgatacgagcttntcgtttcaatttggag

SEQ ID NO: 173200 - DNA, 417 bp, Glycine max
  unsure (1)..(417): unsure at all n locations
cagcttaacaaagctctgtatggcttatattatttcccaaggcagtggtttgacaggttaaaatctactttactttagtttgtctttgtgggaagcaaatgtgattcttctctactcatctacacacatcataaacatattgtctatcttttagtttatgtggatgatatcatcatcataggcaattctgtctctcttattcagcagctaacttctaaactaaacattgccttctctcttaagcaattcggtcatttggattactttttgggactagagatcaaataccttcctaataattctatactaataactcaaagcaaatatatttgtgattntcttcacaaaactcaaatgattgaagcacattctatttcctttcccatggtttctaacttgtaactgtccaaacatgtg

SEQ ID NO: 173201 - DNA, 450 bp, Glycine max
  unsure (1)..(450): unsure at all n locations
cttctttagcaaccatcaaatgaagggtattatattaggaggacgcaccaacaaaacgcccactcctcttgtctctgcgatcagaaggtcgtgtgatgtgcatatcagaggccaaaacttgtgctcaatttcagtttgttctctgtccacaatacccactgaatcacaaacatatcaattaatagcgtctntgtgcgatggtggtttggtgggtccggaacggagtcacgggtgacgagcttgaaatgggtagagcaagatataaggttcaagtgtaaggtcactggttttaggttcaagtggaaaaggagaacaagactattgtttacggatgaaatgtaatttcaacaggctaaccaaatnggttcactatatattacatatttaactcgttcaccttagacaccgcctaatattttnttatctccttgatgttgcgtgaatgaatat

SEQ ID NO: 173202 - DNA, 435 bp, Glycine max
  unsure (1)..(435): unsure at all n locations
agctntatatgatcggagtatggtctatttttttattttaaagtttaagtatgattaataaaattaagttctcttttaaggtttaactttattttttaaaaataacttacatttaaaactgtgccaacaacttttgttacttgtgccaataatttttgtcaaaaacttttgattaaaaacaaagattttacccgcatttggactcatttttcattgctaatgactcatgtgcatatatagtttggataatatgccgagcaagtatcatcattttgtttatatgagcctaaatgatgcaactattgttngcaaataaaacctaacccatctatataattgtctctctacaaaggcgtaaaagcgtgttggtcctntggacggccaggtatcatcggcatgctgattatggtatatatttaagtccatgccaccttc

SEQ ID NO: 173203 - DNA, 458 bp, Glycine max
  unsure (1)..(458): unsure at all n locations
tctaacttatgaccctgtaaaggtgaataatgcatacctcttgacttaatttagtaaatagtaattggtttcagtgtttattaagaatatgagctgttatcattaatatacacagcggatcacggctgaagaagctctaaaccatgagtggtttcgtgaagttccccttccgaagtctaaagaatttatgcctacattccctgctcaacatgctcaggacaggtgaccaaataagattttgcctatggtaaattgttttttaattttacttgttcatttgacgctctataattatgtaaataggcgaatgaggaaaatattaaagagtccagatccattagcaaagcaacactggaaggagatgcagcatggtgaatcanggactggtggtatttctggtttagaatggtgcaatatatattttggttcacaataatcattctaacatggtctgctca

SEQ ID NO: 173204 - DNA, 360 bp, Glycine max
cgagaaaaaaatcatagatatctatcaatcactctgaatgctttaaaaaatccacaaattttttttaaatcctaaaaattcataatattctttcaaatctcatgaattcatattctataaatacattaaacttcaaatgacaaaatcctaatcataaaaatcttttaaaaaaccttaaaagccattatatccctacaatttcttaaaaaaaacttacataacttcttctataccaaaataatctcctaaaatactaacccaatatactcccaaaaatcaagagacaagtccatccctcatagagaatatgccactcgatttgctttccggacacatgtctccaaccctaaattaagagaa

SEQ ID NO: 173205 - DNA, 372 bp, Glycine max
actccctgatcaccaaccccggagcaattcttgacagagatcgacctcacatcgcgacacttcaccaatagcgccgtagaccttcattaccaatggggggacatgactctatggataactcaaccagatgcggacaggtcttcgcaactgcgattaaagtcatgtcagaaatatcaggacacttgcataggtcaagcacttctaactgagggcacccactagcagactcaatcaggcctacatcaccaacagtagcgacatcccatagagagcaaaccattagagaaggacacccatgagcaatcgcctcgagacctacataaggcaccccacgacctgacatgcatccacgagatgtaagcttccccaacc

SEQ ID NO: 173206 - DNA, 368 bp, Glycine max
caagcttgttctttttataaatgagaagttctgaactcatcacgttatctaaaaaacccttggggtggatccaagtgctcctatcattcatttgcatgttcatgttttggtggcatactcaccgttgtttatttctttaggaatttcatcataactaagaaagcacagaggcacccctataacactcgatccagaaaaatggataatgaagagggcgtgcaggaacagatgaaggccgatctatcggccttaaaagatcaaatggcttccatctcggaggtcatgttaaaactccagaaaactatagaggataaagccacggcaaccgcctccagtacagttagggaagcggagccggtgctgcagcc

SEQ ID NO: 173207 - DNA, 460 bp, Glycine max
tgtaagagataccaaacataatgggaatgtgctaccttattgccattctttagttcaccttaaaaaaatattagatagtgcataatgacatttgttaaataacaagtcaaatgtacaccaatgcaacttgaaaaaatttaaataataattatacacaaaaaagcattgtctaggtacgtaccattccgaagcattttttttcttcaaatcttttaattggattaatatattttgccttttatgtattaattgaagattagctgagctgaagactaaaatctatatattacgaaatatcaaaacataaaaggtgaaaatattgataattaattttgtcaactatcatatatcaatcatgcatgctatgatccatggattcatcactaaaccagccttgtccaagttgtcaaattgatcaaaaggttcaactcagccaaaaggttctgatggaattacaact

SEQ ID NO: 173208 - DNA, 364 bp, Glycine max
  unsure (1)..(364): unsure at all n locations
nntgcagcttgatctaacaactttaaattgttttatatttattcctagaactagtcgcattntcattctaagcaacttgaatatctattatgagctcaaaacacttcttgatttttaactatttctttcgaaactaacattagaagccattgattccaaaggaaacataaaaagttttaaaatcccaattcgacccccttcttgtggtagttttgtcacttcatctaccactaagattgtgtccatttcttggcaacccaccaagttccactaattataaataaagttacaagtatttgtcaatgccacttttggatcttacaacctaagccacctagtattgttggtctaccaatccgctact

SEQ ID NO: 173209 - DNA, 467 bp, Glycine max
tcacccctcatattacttggcaaaccaaaacttataagttcaaccatcaccatatcaagcaaggtacgaattttcttcccgtaatactatcagattgaggagcatacggaggtgtcacttcatgaataataccatgcatttcacaaaaattactcatgtctaaagatgtgtattctccatttttatcataacataaaattttaaattctctttctaatggattttctacttctgttttatatgctttgaacttatcaaacaacacacttttgtgattaactaaatacacataacaatatttggagaaatcatcaatgaaaataataaaatatctcttaccaccacgtgttaacacatcattactatcacatacatcactatgaaccaattcaaacaagttagtttctttttcaatacatgtagtaaaactctttctacgttgctttgcttgaatacatgtttcacat

SEQ ID NO: 173210 - DNA, 281 bp, Glycine max
cctcacactatgaagatcgtggtatggtatctatagtgacatccttggccagagcgggtttgattgggatgacactaagtacatgttcacagtggagaatgaaaatgcttggaatgaatattgcactgtaagtattctttagtatattgctacttggtatgtaaagatatagccactggtcatggagctgaaactgctatggatgctgatgaagcgatgattagagagacaaatgaagtggaattcatggggttaggtgctactactactatttacttaga

SEQ ID NO: 173211 - DNA, 456 bp, Glycine max
  unsure (1)..(456): unsure at all n locations
ntngaagtatacgtgtagaggatgcatgcatttttcatttttttctggatctaatgcccatctatcctcaattgaatcaaatgaaccaatgtctcccgcacaagatgagaatctatagaattcttcataaacttttgtcctaacattaacatgtggaaaacatctcttaagacatttattcctttggctagaaagttcatcatctctatgaggaggaaccctatctggaacctcattatgccaattatcactatagtacctataaaaaaaatatatgtatacattttagtcatactatggttgatacagagctaagctaagccatactcattattgacaaatggatataaaaatattaccctggatttagagaatgagcttagcaatgaagtggattacaactcttactccacctagaatgaagtatttcatgaataacttcaatgaaactataac

SEQ ID NO: 173212 - DNA, 332 bp, Glycine max
ggaggagatgacacctaagacgactcctcctattcgagaaactcacgcttcggatgaatccacagtgagagctctgagtatagatgcgcctacctccaataattcctatatcttgcataggccttagctagctcaaaaatcacgcaaccctacactaagcccactgcgcttaacgagtatggtagtgatcactaacatagcgcgaaatctgtgctgaacgccgcttcaaatctattcgcaaactttcttaccaaaaatatcgaaatccgacaccgttcaccatgtgacctcaccacagtactgataccacgacaaatcatccgaaaaacaaa

SEQ ID NO: 173213 - DNA, 384 bp, Glycine max
ttcttttttctccacaacacactggtgtatcacataggcgtaatacatctcttatggatatggatacgagctattttcatccctttatactttaccactgatcttggcggatgcatgccatgaaaacatctcatgtctttgttgaacacggttgctagtaaggccatttctaagacatcttttgaactgtgcacatatcggatacctagtataatgcacctgcatgtttggggttgccatgcacaaattatgattcataatctcgaaaagagataattggatgcatgaacaagtcagggatattttataggctattcatagaaagataagagggtctatgttccactgctctaatcatagcattgagaatgatgaaactggaaa

SEQ ID NO: 173214 - DNA, 458 bp, Glycine max
  unsure (1)..(458): unsure at all n locations
aatactcaactctagcaattctcaacttcttcagacagagaggcatctgttttattntcacacccaaaccatcaatagagaagaagaatatatgaaattgagatacctctactgataggcattgaaatgctgtggtgaacttacattcacaaaagatgcaatgaaacatatgcaaacttaaacatcgaatatagattcccaccaaagttctgaagaaaaagattagctatgtagctatccaaaaaaataaactacctacatacatgcagaaattcttttattaaagcaactaattataatgaattggctgaactccaaacatctcaaaccttctaattatttaatatcctgtaagaagtattatttacaaaaatcactctgttatcattctccatgtgaatcaggaactaagaaaaaactatgtacacatccgcactacctacaantatttaacaagc

SEQ ID NO: 173215 - DNA, 403 bp, Glycine max
  unsure (1)..(403): unsure at all n locations
agctttanatncaagaatacaaacaacatattattttcttacctcaactcccaatacgaactcttatagcagacatgagattattccatacaataaaaatatgatacaaacttacaagtgtctatatggctccatactcatctgctgcaggggctggaggagcatcaactacagcagataacacaacaaaggcaccaaataagattgtgataatggcactgaagttgacaagcaaagcctcagaaccatatttgttcaatcctgagttctcaaggaaagtgagcttctccataaacccaagagcatcattgcccacagcctagacaaatacaaacagtccatatagcgcgtgccaatgaagtgaggctcgtttaatgtctggagtcccaccagtgaagaaaaa

SEQ ID NO: 173216 - DNA, 461 bp, Glycine max
tgatatgccgattgaccttccacattgatgtgaagaactgcttgctgatttcgtgtggcatatgtggcgacaaagggtcacataccactgagacgccaaatgcaaaaaggtcatggtgaggatggaataatcggaactgatcggcccaagagcttttaaccactgaacgccaagcactatataatcacctgtgatgggaaggttaataaggtccacggaaaattgatgtccctgaactgaaatagagacatcatggaagactgaatcgcattccagtgaattgacattgacgaccatgactcgtaatggtgatgcgcgtgatggatgaatgtggaggacattatcgaccctggtctatataaaaatgtgtgtgctatctccgtcaactaaaatgacgagtttgtgataaaggacagtgccataaattctgaatgttttcaagactgacaattctgacagat

SEQ ID NO: 173217 - DNA, 390 bp, Glycine max
gcttaaatccaagaatacaaacaacattttattttcttcctccaactcccaatacaaacttttatagcagacatgagattattccataaaataaaaatatgatacaaacttacaagtgtctatatggcttcatagtcatctgctgcaggggctgggggagcatcagctagagcagataacacaacaaaggcaccaaataagattgtgataatggcagtgaagttgacaagcaaagcctcagaaccatatttgtccaatcctgagttctcaaggaaagtgagcttctccagaaacccaagagcagcagtgcccacagccaagacaaatacaaacagcccaaatagcgcgttgccaaggaagtgaggcgcgtctaatgtctggagtcccacc

SEQ ID NO: 173218 - DNA, 462 bp, Glycine max
  unsure (1)..(462): unsure at all n locations
ctgtatgcnacattaccttcacattgatgtgaagaactgcttgttgatttcgtgtggcatatgtggcgtcaaatggtcacataccactgaacgccaaatgcaaaaaggtcatggtgaggctggaataatcggtactgatcggcccaagtgcttttaaccactgaacgccaagcactatatcagcacctgtgatgggaaggttaataaggtccacggaaaattgttgtccctgaactgaaattgaaacagcagggaagactgaatcgcattccagtaaattgtcattgccgaccatgactcgtaatggtgttgtgggtgatggttgaacgtggaggaatttatcgaccctggtctagataaaattgtgtgtgctatctccgtcaactaaaatgacgagtttgtgataaaggacagtgccataaatcctgaacggtttcaggactgacagttcggccaatgcat

SEQ ID NO: 173219 - DNA, 360 bp, Glycine max
  unsure (1)..(360): unsure at all n locations
gaaaaagcactaccggattagtattttttatgggtgattgtgttattacatggagntctaagaattttttgctttgtgacactttctacttgggaagccgagtatgtagctgcaacttcttgcacatgtcatgccatttggctaagaagattgttggaggaacttcagttgttgcaaaaggaaagcacaaagatctatgttgataatagatctgcacaagagcttgccaagaatccggtgttccatgaacgaagtaagcatatagatacaaggtatcactttactagagagggcattaccaagaaagaagtagaattgactcatgtgaaaactcaagatcaacgtgcggatgatttcacc

SEQ ID NO: 173220 - DNA, 464 bp, Glycine max
  unsure (1)..(464): unsure at all n locations
tgcgctaagcacacgaagagacgacgtcctccctatgttgatcggctgcacgttgggcacgcttatctctgacttatcctcttctagggtttctcatccgctaagcgagctggctgcctcgctaagcggatgaagctcactcagtcaatatgcctcgctaagctagttcatcagtagctttttgcaccttctcttctttggcctacaaactgagttgacttcaacattatgtcacaaaaaatggagtttaaaatcacccacgacagaaaatatatacaatttccgcaaaaagaaccataaattgaaggcacattgctatcttctcgcaaattttcaatacaataataactcatgaatagcaactaatagaataacagtgaatttacgaagaanaggcacacaaatgcgatcatagaatgggactataatgattaagaaaccaattgcgatgattaggagggatg

SEQ ID NO: 173221 - DNA, 455 bp, Glycine max
  unsure (1)..(455): unsure at all n locations
agcttataagaacaaaatggcctctatttatttccaaatatgcatgtgaattaggaagcatcaacaagaatcaagccaaggctattgtgcaagcaatcaatggggcaaaatacaccaaatgattatgatgatggatggctcaaattctcacaaaggtaaactcatcactttcaaatngagctttcaaaactatcatgacatgtagaggagaatcaaggatttcaagtcacaaaatgtcaagaacttttattttcaaaacaattacccatttcttaaacatatcctataattcaaagaanaacatgcaaagtcgtacatgcacacaaaattgacccaaaatattaaactaacaatccgacgaaactaacaacatttacaatataacacaactaacaaattaacaaaaccaacaaaactagcaaaacccaagaacactcccccccccccccctcata

SEQ ID NO: 173222 - DNA, 421 bp, Glycine max
  unsure (1)..(421): unsure at all n locations
ctgttatacgacagtccaaacaaccctacatttcttacttggcaacaagaatcacgtctcgcacttgatgacgccaaccttccagtcactctacagtgagttaatttcgctttgtacgtagttctcaattgttccaaacacttaaatggttcttctgaaaaaattaccaatgagattaacattacatatacataaaaaaaaaccaactagtgcaaaaatataatcacaatgagccaaaagatttgtaaatagcataatgcctactctttgagatgaacaatacaaaagtgccctttgactgacacatgtatatctgaggaaagttctccatgtcacaattntgaagaaaacttaaaacttggccttagtgaagtggaaaaatatcataagaagggggttgaatagttgttttacaaacttt

SEQ ID NO: 173223 - DNA, 336 bp, Glycine max
tatgaagttgtcttaccataatgcttcacaaaatattcattccaaccaaagaatctatgtttgaagtactgatgtcaatgagagatttcttgtaactgaattgagtattgaaataaggacagattctgtgtgaatatatatttaatagagtagcctatgctttaatgttgtttttaaaggcaaatttgttaccattgatgagattcttctgtaacaccaatgcccatgcacaagaagtatacgctctagaaaccgaaattgggcaattgcgatatcactcgacattacagcctgaaagttttttgttccaagggagaaataataattctagatcta

SEQ ID NO: 173224 - DNA, 447 bp, Glycine max
  unsure (1)..(447): unsure at all n locations
atactccagnttacgctctattcctctttttatttgttttgctactacaatatcatcttcgaaaggcatgcattgtggtagcttcttggatatgcttggcacttcactaggactacatgctcatgctatcttatgcagttacgcaaaatcccattgatctcagaacatggacaatgcatgtccattataccatatgttaaaatataatttaattttgaagaacgggcggcaataattgaaatcctaaccacataatcgcaatggctctgatataatgtcaaagggtatctccaagacaagctttagtgtttgattgcgtttccattataatgaagcttagagcctgatggatgaacacaagctacgctgttatgtggagggttacggctagtcttatatctctaatatgctttatgagatttgtgtgtatgggttcaaatatcgagt

SEQ ID NO: 173225 - DNA, 436 bp, Glycine max
  unsure (1)..(436): unsure at all n locations
agctntgggcattaaccggtgaagttcctttcttgtcatgaaatgnntgaagatctccgtttttattacaactaagatcatgtctgtgcatgctcaattagtactacatnttatctttcctttcgagaacaaagaaggctagctcagacaaaggtgtcaatcttgttgggatcttatccagccagggtcaaatttaggggtgccgaccttgtcgagatgcctaagtctgactagtcatccctccaaaacatctacaatttgttggtgtttaagttcattttccttcaataagacaagataagcaacacaattaatatattgactgtcattaaaactgatacatggtcaacaacatcacgaataacacaattatcttaccgacatgatacctatggtacctggttggcatcacctacaatgacacaaatatcttact

SEQ ID NO: 173226 - DNA, 472 bp, Glycine max
caccttaaaactcagctttgttaccccacgatccatatgagattacattttttttataccatgagggtgggctcatgggccactttgggatataccacacccttgtcttactcaaagaaaagatttattgcccccatatgaagaaagatgtccataatcattgcactacgtgtgtggcttgtttacaagccaagactatggtgatgcctcatgggctatacacacccttacccatcccatctgcaccttgggtagacattaatatggactttgtccttgggcttcctagaacccaaagaggtgtagactctatctttgcggtggtggatatcgttagcaagatggcacactttataccatgccacatggtggatgatgctatccacatctcataactctttctcatggaagatgtgagactacatggctttctatgaccattgtgtcagatagagatgctaagttccttacc

SEQ ID NO: 173227 - DNA, 363 bp, Glycine max
  unsure (1)..(363): unsure at all n locations
agctngnngaacttgctatgntnggattattttatcatacccattctattttagggtttttatgatgatgcttgtgatgttcatgtgctgaaattgcttatggaaaactgttagaaatgaagggtagaactaacctagggttagagagtgagaatgtggtgttaggagtggaaaaagagtgaattttttagggctggaaggccaaatctagaattggtagtatttagaggttagagtgaataaatcttagcttgaaatgccatttaggacttatgagaaagcttggactgtgctatggagaaaaacaaatgaccaaagtgaaccaagagccatttctagggcaaaattgggtgttgaagagtc

SEQ ID NO: 173228 - DNA, 373 bp, Glycine max
agcttcattaagaggcttcctcaagaagtcttttcatggcttctttgggaaggtttctaaagaggcttctttgagaaactagatccttatctaccgacacccctctattaactaaattaacctccttgaaaataattacggataaaaataacgcaacaaatataatcaaacatcaaacataattactaataatatatagatatatatcaaggttttacaggaagcatcatcctccttgcggcagggtataaagtgtgtcatcttgctaaacctatcaaccaccacaaagatagagtcaacacctctttgggttctaggaagcccaaggacaaagtccatactaatgtctacccaaggtgcatatgggatggat

SEQ ID NO: 173229 - DNA, 455 bp, Glycine max
  unsure (1)..(455): unsure at all n locations
ntctttggaccttgaacaggcaactaactcctctttattttcatgctatgngctcgcgactggtccctttcttcccttcgcaacttgagttcactattgctaccccatagagctccgcgaaatttgttccggccatactctttcctgggaacccttctgggttcttggtcaaagggctctggcaataatggaatctttttcccgaaaccggcgcaattctttccaacctgtggaacgggccaacttgaacttctccttggcaagttatgcctttcctaactcgcttttgagagatgggacttcttcgtcctcttccggcgcttcaaaatcctcttcactgacgacttttaacttggcgagccaatctaaacctcgtatatgaactttcagccattcgtggtacccaccaatgataccattacgagtgcctctaagctcttgatctttccttaacg

SEQ ID NO: 173230 - DNA, 441 bp, Glycine max
  unsure (1)..(441): unsure at all n locations
tgcaagctgtccttggtttagacatgatnggtatatgatttgggacttgtaggaattcaattgggcaaaattggatgagggaaagagtggttttcgaaatctgcactttatgcagaattttgttgttgaaatgtgcagcagaattttgcataagtgtagaaaaatgctatgtatctgctggttgtggaaagagtagtacagaatgagttctggatgtttgctagtagatcccaacggttaatgaattggaacgaaggaaatgttactggggtctttaagtgagaaaaagttgtgattttggtttgagttttgggcagagtttcctgcctttgccctgttttgcttggtttgttagtttgtgatgatttggatngtgaattacttggatgttggggaagcttgggaggattgatggggacccggtgttgagagaaaccaaga

SEQ ID NO: 173231 - DNA, 442 bp, Glycine max
  unsure (1)..(442): unsure at all n locations
ntaatctcaagtggactgttggtgtcttgtangggattttaattgtattagacatccctctgagagaatgggtagccatcacagtaattcagactctaacctgataattgaattcaatgattggctacatgatatggaggttgatgacattccctgtgtgggtaagctttttacctagtttaggccaaatggatcctgtcgcaacctacccttctgcgggagggcgacgcgtgactcgcgggatgcgtgttccacgaaaggaatacgcgcggagtcgccaccaacgtttatttgaggaaaacgtcggaaaaaccggaaaagacgcaatctacgaactttttaagcaaaaggttcgggagttgtatttacgtacggcgaaggtattagcaccccacacgtctgtcccaagggacggcagcctttaatcgaatgtgcaaacatg

SEQ ID NO: 173232 - DNA, 428 bp, Glycine max
  unsure (1)..(428): unsure at all n locations
agcttgtacatataggaacttgaattgttgtaccatctatnaactattcccataaagatattcttggcagctttgaatgaagaagatggtaaaaacccgtcgttaaaggaaaaaaaaagaaggaaaattgtatagttgctaatagtaaaaaagatttgtaaccggtgcacatacgtttgttcctttcacgacacagattcctccaaataaaaataaatcctttgtcttccctcactaagctactttgtattctgccaccatgtttgtcttcaaacccacctcttctcttctctttctcctcctcagaatttcatactctgcttcttcagttacctcactcaccgtaccgccgcgagggggggccccactctacctcaccactacttctgaacaacaaaacgatggcgaagaagatttcctcacctacc

SEQ ID NO: 173233 - DNA, 455 bp, Glycine max
  unsure (1)..(455): unsure at all n locations
tgtactgagttgctagagtgtggtgtgagttgtatatttcttgggcagacaatcaaatatggctttgggtcacatgtgatatgagcaccaatgcgccttgttgcatcgaatgctaaatgtggccatattggtgtggcaaacgaggtgtttgatgggatataccatagaacaatagtttcatggactaccatcatttctggatatgcacacaatgggaaagctgtggaagcatagataatgttcagtcaaatgagagataatggtgtgaaaccagattggattgctatggtaaacattctgagggcgtatactgatgtagatgacttagagcaagggagatctattcatggctttgtcatcaaaatgggacttcgaaatgagcctgcttcgctcatctatctgacagctcatgatgctaaatgngggctggcgacagtgctaaatctctctttatc

SEQ ID NO: 173234 - DNA, 458 bp, Glycine max
  unsure (1)..(458): unsure at all n locations
gcaagctttcttgagaaagattccttgagaagttataacttatctacacacaccctctcataactaagctcaccttcttcagaagcttgcttaagaagattcctaaagaagctagagcttagctacacacacctctctaatagctaagctcacctcattgagatgagaagctagagcttagctacacaacccctataataactaagctcacccctatgccaaaaaaaacatgaaaatacaaaaaaattccttactacaaagactactcaaaatgccccgaaatacatggctaataacctatactactagaatggccaaaatacaaggcctaaacgaaggaaaaacctattctaatatttacaaagataagcaggctcatacttagcccatgggctcgaaatctaccctaaggctcatgagaaccctanggccttcccttggatctctgggccaatcta

SEQ ID NO: 173235 - DNA, 443 bp, Glycine max
  unsure (1)..(443): unsure at all n locations
gagtccatgtgcgttgtcaagttgagaattcatacaacgtgaaggtttgtgattcataccagcttgcactatttctagaatgagaccatttgtgcaatagagaaagaatttcaaaagtgaagtagatgtgacataagtattaaacttctcaaatttttttcatgttagtttaactttctttgggactttatcattttttatctatgatgcagtttagcccatgtcagtctcagctagtgcagtgccactgttaggggatcgactgtgtgaaaatggatttaagtattaaaattctccctgccaccaatgatgtacatggaggagtcattgtggacttaaaagagcctatggactctgaagattntgctactctgcttagatcttcacttttacattggaagcaacaggtaaacattatgatccagagcctcaaatggtacttt

SEQ ID NO: 173236 - DNA, 432 bp, Glycine max
ccaccatcttttcatagtagagtattctatttgtgtctaccatcacgaatatcgtctccctttccattattgggggtaccacctgtgccgccagatccctccaccttttgcgcgtgttcttttaatgatccgtccccctttttgcacatgttctgtagttgcatcctatccggaaccatatcaaaatttgactgatactgcctaacaaaggcaaccattacgttcttccaagaatggactcgtgaaggttccaagttactgtaccatgtaacagctaccccagtaagactttcttggaacgaatgtattaacaattcctcttcttttgcgtattcccccatcttctgacaatacatctctagatggttcttgagacaagtacttcccttgtacttgtcaaatttcagcaacttgaacttgggaataccatgt

SEQ ID NO: 173237 - DNA, 404 bp, Glycine max
agccttttggagagaaacatgggaccatttattttatttttaaaaggaaagccatatctagtcaaggtctaatagacctctacagtttcctaacgatttctgattatgtgggccattaagtctatcatatgctgacaataaccgagaaacccgtgaatctctatggggcggaaaatgtgtccgtcattgctatggccttggctaacaatcggggaagttcttgacttccgtttaagggaagagcaaaccgatcacatccacatggttgtctcttggtgtaaagaatatatcaccctccctctagcctcttttacgggtatacttgggcatattcgaccgcaaacctatgcttgtgggccgtggcttgatccaacttttctggtcctggcgaagaaactaacatt

SEQ ID NO: 173238 - DNA, 206 bp, Glycine max
attccttatcttctcctaatcattctcctcatgttgaatcagcttcattaattccatttcgcgtccctataactttccaaataaagtagcaagaaacaagtaataaaaaacccttgatcctgtacaagtggtaaccttaggttgccattccctacttagacatcttaaactttattaaaaaaaccctattgggaaatatctctcct

SEQ ID NO: 173239 - DNA, 359 bp, Glycine max
agcttgttgagtctgagatggtgtcgtttgattttatatgtgataaaaaggaagtgggagattatgttatttatttgggtgcgaaggggaggcttattaggtttgaatgggcaattcaggaactgatgcattggcaattcaggaacgttggattgtaaactaatcgacggtctatgttcgcgatccgtggactgatgaatgggcaattcacgaacgtcaataagaaagttttaacggtcaggtattgtttcctgagccagttacggaattggactttgtttgctttttctcggctttccagttgtagacttgtagtgcctgtcactttttaacatttatttttatagactgtttatttc

SEQ ID NO: 173240 - DNA, 444 bp, Glycine max
aagctgaggtatatccctacaaaatgtattgatgtattgtagcacgataccttacacatgcatgtatgtagcgcacaaatacctcacacaatatatatatgtatgtttaggtagcaagataccttagatatgcatgtatgtagcaaaaagatacctcacaaaatatatatatatatgtatgtttaggtagcaagataccttggatatgcatgtatatagcaaaaatacctcacaaaaatatacacatgtttaggtagcaaaatacctcaaatgataatgataaaaaaaaggaagataaaaagaaaaataaattgtctaactgaaaaaccaacatgcttgtgaaaagaggtgacttccaacttttctttaaagagaaattcgctgatcatagctagttgttgaaaacaaaaatgtgtgtacacctgaagggtgaatgccatgaaa

SEQ ID NO: 173241 - DNA, 391 bp, Glycine max
  unsure (1)..(391): unsure at all n locations
aagtaacctgaggcatgccagctganngagatcttcttctagcttatttgtttaccccatatcagnagncgattactctgatctttngagaccatgtatgattttctcgggtctctgctttaatcgattacgaaggtatagtaatcaattacatcattcttgaaagtgttgcccaaagtgatcatgaacactttaattgattaaattaaggatctaatcaattacattgttcttgaatgctttccaagtgttgggaaaaacactgtaatcaattagagtgataatctaatcaattacttctttgagataatcgattacattgtcaatttaatagactataggcgagtataataattttctctatatataaccaccttgtggtctcactttg

SEQ ID NO: 173242 - DNA, 303 bp, Glycine max
tgatattccgagttctttggatttggcacgaccatgctcttctgatttcacagctgggaaaattggcgagtggaggaacgccccggcatttacgcaacacgcataatgtagacctttactgttttaaaagctctatagttgggcctaggctttagagttttcattttgttaaggctttgagtctttggtgtttgaattattaatacagggtccttccttcatctggccctggcctttacccatcctaatcaattggcaggtatactcctttttaaaaccgcgcaatccaagacaaattccccc

SEQ ID NO: 173243 - DNA, 382 bp, Glycine max
acctcctaagaagatgctcatataagataaagttaagaacacacgctttccctatttcaggatataatacacaactgacacatatgtctcataatgaagccatatctgatcaacaactcatcagactttaggtaccacattttaggactttgctttagtacatacaaagatctttttacgaagcacaccattgtttccccttcttcataaccttcaggatggttcatgtaaatggttctcttcatatcttcatggacaaaagctgttttaacgtccatatgtacggctaaaagtcatattgtttacttgaccaagtttgattctattggccatgtttacacctgtgtaaaaactactgtaggcattcttaacctgtgccatc

SEQ ID NO: 173244 - DNA, 450 bp, Glycine max
tggaggatcaatatacaggaacatgtggctgggatatatatcaaataacttcaaattacagatctttgaatgttgtaaaaaattatcactatgagtgtaagttcttggtaccatatcaattcattagtctacatgttagaaatttattgattaccaccctcgcaaactcagcatttgttataaaaagtttaaaattcatagagaaagcatttgtctttatttattattaaattcacttcacaacctttagcaaactcagcatgttgtaaaccaaaatgcagtgatatagtgccatccaacaacaacaacatcccgtcaagttcaaaaagctatgcacaaccattcaactattgcacgaatggtctgcactaattgcaggaagcaactaagataatatgtaactaaaaagtgttttattaagcagacctgaagtgagcacactaagatgag

SEQ ID NO: 173245 - DNA, 433 bp, Glycine max
  unsure (1)..(433): unsure at all n locations
acctgcggcatgcaagctncagctatataactcgcacttatgttgtttctattctnnnncctcagtactcaatgcacgcatcccatccaaattgtgtatggaatattagaataatgaactgtgcaactgctaatcctcattgattatatataattttagttctatttgccaatggttgatatctatgttaggccttgttcgaatctacaaaatagtatctatctaatctctcatgctaccaattgcatggtaccaactactaatgctgggacagatcgatttgtttaaacttatgcatttcattagcatctatttatcaacaaattttgcagactattgcaaattataaccaacacttatttttttacagaattattatcatcactttaatctataaccagtgagacttcagttcctttaatatttatcgtcg

SEQ ID NO: 173246 - DNA, 449 bp, Glycine max
actagcttctgaactaccacacaaggcggggaggcttattttacatcacaattctctcttgttgcccaggctcatgcttcttctttgttctccttccgtgtacaagttgacaagggaatctccagcatttttccatgtttacatattacttactaacaataaccttattaaaaataagagtaattttaagggtgaagtctcattaatttaaaagttaatacaaataagttacttataagtgaatacaaataaaatgggtcgagcctgcttaattacctttaacctatcaaattaaatgtataatatgttttatttataaaaataaaaaataatgtaagaaaatgtagaataatttattcaatcctgcattcaatactagcttttatttggcttgatactattaactccatgtcatacatcgtgcatgagttaagctacatttgctggac

SEQ ID NO: 173247 - DNA, 408 bp, Glycine max
  unsure (1)..(408): unsure at all n locations
agctttgagttattgtacatggaatatatatctatgaactcagaggaaatactaagtgctcaggcgcaagtaaagggcctccatgcactgggtaactgttactttccttggatctggttgtgttgtgtattttttcaagatgttgttcattcaggatcttattcacgtggtggttgaatttttctttctgccatctagaagggcgatgcttaaatntaaccagtcaatgtattgaaaatggaacttgacaaaatcaattgatagttgttgttttggagttttatgatatggtttttttgctggatctatctcatgttataaagacactgaaatttcattacaactggcatgttattgaaaggatggcttctggtttttttcaactccttgtattgacttggcttcttt

SEQ ID NO: 173248 - DNA, 441 bp, Glycine max
tgccacccatctcgcccaggcgagctaggttgctttcttattaggcaccgacttctggagaactttctggaaggcccaagtgggcttggttgctatttgcaacccctgtttactaaatacaccccttgctctttttttttttttgctgattcttttttcgtaacgttacagaaacttacggattacgtaacgatacttgttttctttccgtaatgttacggaaccttacggattatgtaatcatcccttttttgccttacagaatttacggattgcgcactaacacttccttttaacttccggcatgtcacggaacttcacgaattgtgctccaatgccttcttttgacttccgacatgtcttggaacttcacgaattgcctaacgatgggtgccaggtacctcgaagtggcaaacgagggtcgcatcccaacaacgaatg

SEQ ID NO: 173249 - DNA, 437 bp, Glycine max
gaccttaagtcaccgcggctgcagcttgcagattggtcttcgccatgtttgttcgatgtgggtctgaaaaaaaaggcaaatttgatcatcctactaggacgactgagaaaactggggcaaataaagagggtgaggataagggagaaacccatgttgtgactgccattcctgtacgaccaagtttcccaccaacccaacaatatctttactcagccaataacaaaccttctccttacccaccacccaggtatccacaaaggccatccctaaatctaccacaaagtctgtctaccgcacttccaatgacgaacaccacctttagcacaaaccaaaaacaccaaccaagaagtgaattttgcagcgagaaagcctgtagaattcaccccaattccagtgtcctatgctgacttgctctcatatctacttgataattcaat

SEQ ID NO: 173250 - DNA, 462 bp, Glycine max
  unsure (1)..(462): unsure at all n locations
tcttatccaaggctcatcttggtggtgaagctccttctttcatggcttattccctaatggatggtgcctcctctcacctcttctcctttgtcttctgctgcatctccatggtggaaaaccaccattagaggacctcattgaagctcaaagatccagcctccatagaagctccacaagcaagcttccatcatcctcttaatcacccatcgtcatagatttggatttggtgcgatagggatgccttggggcgcgtttagttatggcatttttcctaaaaaaccaaacgtgaggagtacgtaaaaataatgaatgcatgctagagataaaatgtgggagtgatttgattcgcactgatttttggagtaaaaacgcgggataaactcattttattcagaaagttataactactcaagatcagagtgacaatacaaacttcctagcnggtcctaattatatgggcca

SEQ ID NO: 173251 - DNA, 267 bp, Glycine max
  unsure (1)..(267): unsure at all n locations
agcaagcagagaggggagaggnttgctttctttttcatgcggaacnaagagggagtgtgctctcatcaagaggacatctgcagataaacattccagagtgtccttggaaagagctcagaaaatgatatatatcgcaacgcatgccaagcttgtaagaccaaacttatccactgaggaagagacagaatcataacttcttgccatgaaaggtcgcgatgatggcatgctgggagatgcctttgctgatgcacccctaaggtaatgggc

SEQ ID NO: 173252 - DNA, 434 bp, Glycine max
  unsure (1)..(434): unsure at all n locations
cactatanaatactcacgcgtatgaactaagcgaaagaaaaagtgaagagaagcaatttctattagtgaaaactaagaaagagccgatctcgtaaataattaaaatacaagttaagcatactcagagaaatacggatacccaactcggagaacacaaacaagtgtttcctacaacgagaaaaatgtggaacccaattcaacgttgtatactaagcaatgaaatgaaaatgaaaagatgaaacagccctactccgagtggtaacattactcggaacagatagagagaaatgagatatgtgtgatctaaggaacaacttgtgaaattggaaaagaaaaccctataagttgtggattgtttcaccttacgagcgcgagtgagaccctctctttttttttgttactttgcgctacgtatgtgtctgactccctctgct

SEQ ID NO: 173253 - DNA, 429 bp, Glycine max
  unsure (1)..(429): unsure at all n locations
gcttcttttctttattgcaatattaattatattcctttngaattcttgggttttccaattggtgcaaatccaaggaaagtggctagatggaagcctgtcatggtttcattaagagtaggcttgcttctttgaagggtacgtatctgtctttgagagattatgttacgctcaattcagtactatctacttagcaactttttttttttgtcttcctttaagatgccgaaaaaagtatcaattttgcttattggaattcgaagttttttctattggaggtggaagtgatgatgttaaaaaaagtgcatgataaattgggataagggttgtcagcatgaatgcattggtggacttccctttaaacatcttgacctccttaaatnttttaatttttttatcagtgaacttnttatttaaataagccttctcaac

SEQ ID NO: 173254 - DNA, 455 bp, Glycine max
  unsure (1)..(455): unsure at all n locations
tgaacccaaaccggtgagagtgtgaacttaaactgtgttttaatgactagctatgagtaataatctttgcatgaatctctgaattttgggatgaaatgtataaatgagaacatgatgaaggccatgatttgtgtatacacaagccttttgaccaaacaacttaccttgcaaaataactgtatcctttgctccttttataagctgaatgattntgtcataaattgaaccctcaacttaaataattatctcctgataccttgcttagattctaggagaacatatggttcaaaacaaaatttaccctaaatttgggggagtaaagtcagttataatgcatagaataaggtaaagcattagcacacacaacaaataagttgtatgttaaaaaaaagaaaaaaaaaacatattgttgtgctgttacaataaggtcaanagcaaattaagaggaaaagata

SEQ ID NO: 173255 - DNA, 394 bp, Glycine max
agcttgaaattgaacatcagaatctctctataaattcaaatggtcataacttgtcacaaggatgtccgattctggcgcatcacatatcaagacgctctaaattgaaaatcggaagctctcgcgaaattcaagtggtcataacccgtcattcggatgtccgattcaggcgcataatatatccagacgctcgaaattgaacatcggaagctctcgagaaattcaaatggtcataacttgtcacacggaggtccgattctggcgcatcacatatcgagacgctctaaattgaaaaccggaagctctcgagaaattcaaatagtcataacttgtcacacgaaagtccgaatcaggcgcatgatatatcgagacgctcgaaattgaacaacgaatgctc

SEQ ID NO: 173256 - DNA, 458 bp, Glycine max
  unsure (1)..(458): unsure at all n locations
tctatatagctgaaccatcttatcaataaacacatgtttagttttattcagaanattagagtttatctcttttatcttggtgagagtgattctcctaaattcttgagtgattcaagaacaccctggctgtatcaaaggactttcacaacctttgtgtgttgccctcgctggaaagagtgattctttccttcctatcatctccacccttgttctttcaaaccacaattccagaaaatccacctctgcccaaaattatctcgtgaccataactcccattttacacactcaaattaagtgattcttgagcctaaattgaatttcaaaacgagacctttcacctcgttttggaatcacctcatttggagccctgtagctatcgttattgccatttctatatttctgtccagccaccacttaacctacgttttaccatcccattcatccattttatgccagaa

SEQ ID NO: 173257 - DNA, 437 bp, Glycine max
  unsure (1)..(437): unsure at all n locations
gtgagaaagtgtggaagagtcagttttcctactnttaattgnngaccacagagtggtacctggagatatgtcgcgggggtcacgagaccttgnggacgtcaggtggggtgctattgcccaaaaccaagcttgatcaatcctgacccaacccgggcatagtcagtcagtgagaacctgtgacatacctaaacaggcgagctcctggcagtcaaccaataaaagaacaaagaccataaagcaaagaggcttgtgtggtggctggccagctatggatcttgagtgatatctggaatatggcctctggtaattgattaccaagggtgtgtaatcgactacaaggcttaaaaatgaagacaggaagttaagatggtctctggttatcgatttccaagggggtgtaatccgataccacgcctataaatggggacaggaagttg

SEQ ID NO: 173258 - DNA, 457 bp, Glycine max
  unsure (1)..(457): unsure at all n locations
gactcctganttcttggaactctcttaaatcttgattctttggcatcataaaaataatcttggaagtcattgcgtccatagtccaaagtattgtctgatggtgacatcaactccaataacacgaacacgactagggtgctttggtcacccaatggcagtagtcaatacatcctaacatccataagcaacaaagttatcctatgcagactgctattccaaggaatcctacaaccaataaaggagattatgtttatagactattgttgttattatatgcagttacatttaaaactcaaaattaacttacaatcctatcaacaatttggcatgtcgtctcanatgtgatctaattcaattttttttttgcaagctagcttccaattcacgtgtcatctaatgggagatggaggatcaacaatttgtccactactcccagattgggctgcttgctccaatc

SEQ ID NO: 173259 - DNA, 337 bp, Glycine max
atgcaagcttgtccaaaatcaaaattatatggataacttattcatctacaacaaaggttgcacttgtacacatttatcacgcactatttaataggacatcgacatcttccattcagcactatttggtgacttagtcaaacacaataattaatgtttgctttaaatttaaatcaggttggctttaccttcagtaatccacaacaacctaaatttacatgacatattaacttgagttgagtacaacaataaagtagtctaatagatgggaaagaggggggggggggggactccttttactcttttatattcattcaaccttatccataaattatgtctc

SEQ ID NO: 173260 - DNA, 458 bp, Glycine max
cttcatctctggtaatcgattacacagccttggtaattgattatataggccaaactcgaattacacagcttcaagacatgaaaacctgaaaaaggcactgtgtaatcgattacacatacctggtaatcgattaccagtgacccattcctctgtgtaatcgattacacagactggtaatcgattaccagaggcctccacaatctcccagttccctttttgaagcctggtaatcgattacaccccttggtaatcgattaccagaagctctcctagcttcctgacctcgttttcaagcctggtaatcgattacatgttagacaagcggcctcagatatcttaagaagggggggttgaattaagatattccaaactacttccccaattaaaaatctatttcactttctattcaagttatgaattcccttactgacaatcttcttatatattgattcacataa

SEQ ID NO: 173261 - DNA, 432 bp, Glycine max
  unsure (1)..(432): unsure at all n locations
gggagacagacattggntcctctacctcattgtttcagatgtgatcactgctacctctatggtatcattagagaagaagggaaagtcattccctcctcatggacatgaaagagatgtagttcttccgagaagtcaggaaaagctcatatctcttgttactgaaggaaaaggaaaaaataatgcacaacaatcatggagtgaacccactgccagaagaatgccaatgccccatgacggtccagctaaatggaattcatcttgccaaccatcaagggccctagaggatgatgcatcttcttttgccttaaaacacacaactcaaacacaagaacagatgttaagcagtgaaagatattcatctgggtctacaacgagtgatatgcaagtaaaaagggtatcatcatctatgagtgctgtgatggaactaagatt

SEQ ID NO: 173262 - DNA, 461 bp, Glycine max
tgtttgtgttgaatgcattaaaggtaaacaaactattttcattaaattaggtgcatatagagctacaaacgtcttggaattgatacatacagatatttgtgggccatttcatacaccttcatggaatggtcaacaatattttatatcattcatagacgattactccagatatgcatacttgtttcttatacatgacaagtcacaatctttggatgtgttcaaaatatttaaagttgaagttgaaaatcaacttaacaaaaagaataaaatgtgtcagatttgaccgtgatggtgaatattatgacagatatgacggttcatgtgaacaacattcgggaccttttgccaggtacctagaggaatgtggaatcgtcccacagtacaccatgccagggtcacctatcatgaatggtgtggctgaaagatgaaacataactcttaatgatatgataaacagcatg

SEQ ID NO: 173263 - DNA, 437 bp, Glycine max
  unsure (1)..(437): unsure at all n locations
ttaagtcacctgcggcatgccaagctggagcatnttgatagaatngctgcacatgttactgatctgattatgtacacaaggtggttgtggtggtgatggtgggagcaaaggctgaagagttgattgagcaaaggtgtttgtttctcttcaatttttgctcatttttgcattttggtgtcttgtcattgagcattttttttttcctttctgaaaaatgttaatatgggggtagagttcactttggttggagggttggaagttggtaagttcatcacgtgggggtacaaatcgtatagagagaaaataaagacttatttctttctatgttttcctctaatgtactagtactactctggaaaaccaaaagtgtaaaacgcttatttaaatatgatggtgtacaagttgctcactatcttaatcaagacatttgtttgttt

SEQ ID NO: 173264 - DNA, 444 bp, Glycine max
  unsure (1)..(444): unsure at all n locations
tatgttgcaattgataccattatggagttgagacatgatggtttcttaataaaccatgtaatttctctaactttcaagcatttgagagaagttgaggactgatgaagaaaatggcggtatgccttttaaacacattggcacatcttttcctgctacactccacattgatgactagtagacgaagtcggtaatatttgtaaccatggaaggtgttgcatcaatgagagatgtaattactgctatgattcggtgttgcatcaatgagagatgtaattactgctatgatttggtgttacataactcttgctggatgaagtcttaattaggtgttgtatcttgngatcatttcttttgtggccacattatgtcattagcccaagagtcatttttgaaaatatttttaataataaaaatacacaattaattttgtccaggtgggagaat

SEQ ID NO: 173265 - DNA, 372 bp, Glycine max
  unsure (1)..(372): unsure at all n locations
agccttctagcttttcattggtgtatttttatcttcttttggngctctaaattgtgggagtgtgctcaaatatatggggcaattttggtttgttttcttgcttgattangttgaattaagggttggtatgggatggccctangcctataatgcattttgaaacaatgggacatgccacattgtccccattctcttgctattgacgcctaaacgcgcgcccaccaagtgttcggtgaaatgcctcaatggcattagcgcgtgacttttgtaaggaaacaacccatggggcattttggtttgtacatattttctatttttggaatatgtattcattcccgaaaaaggctagagtaattgccccacatatatcct

SEQ ID NO: 173266 - DNA, 467 bp, Glycine max
  unsure (1)..(467): unsure at all n locations
aatcctgactcaccataatccttaccctctgttgtctaanataatagaagggaaatttccaatcaaagaaaaagagaaggaaaatttccaatgaaagcaaaaaaagaaaagaaggaaaattccccaatcaaagagtgggagaaagcaaaaagaaaagaaaggaaattcccaatcaaagaatgggagaaagtaaaaaaggaagaagaagaaggaaagaaagctcctgatcagggatcgaaggaaaaacagaagaaatgtgcagaaaggtctttggaccggacaatatctgaacaatacagaattgtcaccaaatgaacaaaaaagaaggaaaggaaaccacgacctanaatggtcttctccctttgattaccaaccaaaatcccgtgcgctagccactntttcgccccgcactaaacaaaaaaaacagaaaaagaaaaagccaacatatatcataagccaaaaacaca

SEQ ID NO: 173267 - DNA, 437 bp, Glycine max
  unsure (1)..(437): unsure at all n locations
agcttgaaggtaaactagacttatgatcttctgttagtgttatgcctctgtattatagggaacagtaagtttgacaatgccatgctagacttaggagcttctattagtgttatgcctttgtctatttttaattctatatctcttggtcctttgcagtcaactgatgtggtaattcatttagctaatagaagtgttgcctatcctgctggtttcatagaggatgtcttagttagagttggtgaactgattttccctgttgatttttatattttgaatatggaggacggattttctcaaggattatttcccatcattctaggtagaccttttatgaaaactgctagaactaagattgatgtatatgcaggcacactatatatnggagttggtgatataactgttcattttaatattcttgatgctatgaaacacccacc

SEQ ID NO: 173268 - DNA, 363 bp, Glycine max
  unsure (1)..(363): unsure at all n locations
tctagccaaatggacttaccttgagatgaaggccttgtttgttccttcngagccacgtttccctggccttgtttcgaagctcactacaagccttaagtgaaaaaccatgatattaccatatcctttaggaatttcggagctttggaattgccttgggaataagtgtggggggtctttgattcaacgtaccacatcgttcgtcggctatgcttcattatgtaatgtgggctatacacgacgcactattcttctatgtctaaagctgtacatgcttcatgaaattgttttttttcgatgtttaagtttactatattacaaattacactctattcgatttaaataaagtgttttcaattattttct

SEQ ID NO: 173269 - DNA, 292 bp, Glycine max
  unsure (1)..(292): unsure at all n locations
caaacataaaaagggaaaagggaatcatcgagccgatgctctttcacggcgacatgcattacttactatgctagaaacaaaattgagtggacatgaacgatagaaaaacatgtatgaaaatgaagaaacctgtggagaaataattaaaaagagcgaaaacactacaaaaaagggactctctaaacaagaaagctntcttaccaaagaaaacaaaaagggtgcgcccaaatagtctaccacaacaatgcctgggtgcgaaacacatgaacgatggtaaaagaggaactatggg

SEQ ID NO: 173270 - DNA, 205 bp, Glycine max
  unsure (1)..(205): unsure at all n locations
acacaagaaaccagctcaccaagggagaggaccaggaagggcagatattttatgacaagccnacaaaacgagccgcccgcgagaaaatgaaaaaccaccagcaagacaccgaaaatcccggacagaggcagacggagaaccacgactgaagacaaaaacatctcaagacggagagaaagaagaggacatgaccaaaaacaacggc

SEQ ID NO: 173271 - DNA, 304 bp, Glycine max
agctaagcatacagctcggatggattatttttctcgttatgccgtataaattaacaaatatatatagtttgctgccactggtgtcattataatcccacgtacgctacctatagccatgcccttgataattctcataacaattatttaagtatacaaaatcataatcatttgtcatgtaatttgtatatgaaggaggtatcgctcataacaaataacacccctatacatgtcacactgtaatgtgttgtgttcatgaattacattccaaattatataatagttgctagagtatatgtctttccat

SEQ ID NO: 173272 - DNA, 442 bp, Glycine max
gcgatgatccgggaagacataagctgattcttcttctatcacacagaacactataagaactggtactgctgtcatggccaccttcacctgcaaaaatttcaagtttttcagaagccatacaatcatgtgaagcacgcattatcttttatatctgatagagaacacataaattaatattgttcaagcacaaatccaaatatgtgtttcttaagtcacatggtgccttttatctaatttcttttatatcgtggtttagtgaccaagaaatgagttaatattcttttatcgtagaaattgaacaccagaagattcaactaaactcttttggtgactagagttaatatttgaccattccctatgtttttggaagacatttaatatatgatgaaaactttccatgcatgtatcactgatggtgcttgggatgaaatccttgggttga

SEQ ID NO: 173273 - DNA, 403 bp, Glycine max
  unsure (1)..(403): unsure at all n locations
agctngtnctaagatcctcaagacgtcattgttttgccaatctnncggaaaagactttcaagaaattnttgaagatatctcttgatgaaaactataacctgcattcttttgagttcaaccattcctatttctgcaccatggggtttattacctggtgggaaaaatattattcgacccgttcagttggagacactactatcatgatctccatgcttgaaagtggttntacacaaccaacggtcgagaatattcgttcaaacctacaagctcaaggtattaacttacttttgactttctaaattgatatgcatttttgccctttctaatattattacattcaagcgaaacaatcattgacaagaaaagtgctgaaacatcttgagctgacatgagacccaagaaa

SEQ ID NO: 173274 - DNA, 444 bp, Glycine max
  unsure (1)..(444): unsure at all n locations
cacacctcaaaacgnnnnttatcttcgatctgcactttcttcttctactactcctaatcatcaaatccatcttgctgagttagtaccctacaactctacccaacactccaacaaagacaacaacacacaaaatgctcctctcactgacctattgaaacttggctatgcatcactcacccttgagcctccttttcgctccttgatatcacagatcacagaataagacggtcaccctccactttgcataatatctgacatgttccttggttgggttaacaatgttgcaaagagcttatgcactatgaacctaaccttcaccacttgtggtgcttatggtatctaggcctatatctctatctggtccaacctccctcataggaaaactgattctgatgagttccatgttccgggattccctcaaaactactcgtttcacaaaacaca

SEQ ID NO: 173275 - DNA, 378 bp, Glycine max
  unsure (1)..(378): unsure at all n locations
agcttcacgtccacaacaatttattattttataaaaattanaaaaggggttttcttgttcacatcacttgtacaaatcagctgtattaatttttaagagaactttcttactgatcttctgcttaaatgataacaaaattgatgaattgatcatttaatagtagtattatgtgtagtgttcctcttctttttttctgtttgcctgggatccatttttgttgcataattctcaaattttactctatgaatcagctttttaacttcctcactcgtgtcttgcttaatctcttggggttcggtgtcagcttcttgagcagcatggggaaattagcatgttggattaaaaagtgctgatgctccaaagttgttcttgtattgg

SEQ ID NO: 173276 - DNA, 464 bp, Glycine max
tagttcagaacacaaaatggaaatggaaattccaattgcttggaaaacatataattaatggtcctacttggtattactcagaattggaggtgaagtggatataggcgcataattgtagctgggaattgcacttttgagcatctacgtaaagacttggaaagtgttatatattaaaaactgtttctcaaccatggaaattggaatctttataaagaattgaattttcccattctaaaaaaggcatatcaaacatgaaatttagaatttaatagttcaattctgattccaaggttgatttggagctcaattccaagcaccaaacaaggcctaacattttcaacagttgccaactgctgctgagtatacccaacatatttccaacctcataaatttgtgagagagaatctacaaggcgtatcatattcatacagccatctaacaaattatagaagtgattcacttac

SEQ ID NO: 173277 - DNA, 387 bp, Glycine max
atcaactcttaatttgttaaacaaacacactctagtcttcatgcatttattccaaccctctccgtctcactattagatcgattttagtgggttaaataaaataaattgacaccactttttttatccttgtcttatcacataatcaagtatttatttaataatttttattaaaaaaaattatttgtaaatttcactatcaagtttattaatataaattagaaagagtttatttaataattttgctatgaaccttattaaaataaaattcttagtttatggaatgaaaatttttggggggcttatcttgtttaaattttagaacacgttatcttaaagaaatatatatatatgaattagtaataatttattgagcaccatacattttat

SEQ ID NO: 173278 - DNA, 365 bp, Glycine max
ggacacaaaaactcagctatagaataaaaaaaaatagggactaattttttttttttgaaccaaatgaaaaaatatttataactaaaatagtaaaaaaattatcaaccaaaattaaaaatgtaactttaagaaaaaaccttaatatattaagccatgtgagtcacttataagtcttaccaaataacgtggccggagaaagtactttttagtcgcgttattttagcccaaatacctggacatgcatgatgaccggacccaaaataagagttgtatggcttaacttttgctatggcctataaattaaattctaagttcttccaaagaaataaaacattgtgattggaggtaatacggggtataaatga

SEQ ID NO: 173279 - DNA, 353 bp, Glycine max
acaaccagtcttttatatggaaaaatcacacgaaagtgctctccccaattatacaacgcaacacagccgcgaacccaagataggacccaaactaaagatgactgattaaatcaaaacaaccatgtagcaacagatccacgtgcgtagggggggactatagtttatgcgaaatactcataaaagtacataaaataaaaattggatgggaacagcggaatacccctaatctggtgaaggcatcgataagagtgacacaggcaccgagttttgttgaaccaagctagcaaggaagttcaccacctaagcctgagaacaaaagaaaaaaacggagaaaataatgagccagacactaa

SEQ ID NO: 173280 - DNA, 453 bp, Glycine max
  unsure (1)..(453): unsure at all n locations
ntattctcccttctgacaatatcggcgtactgaatctgttatcattctcaatcactaaactctggtttgatgtacataattttatcaatgagaaatgctacgaagacctctacctctgtactaagaattctatctatattttattctttttttggttcttccacttgaggagaaataagctcgatggactgcctatcatgagctatagtgccaaattctttgtcttgctgttttctttagcaggatttccaattacaatacacgtatcctttaaaaacattgaaacatgaatgtaccttttaattttatatacttcttaattcagaaattgttcttagcatctgagctactaagtgttcgcttatatcttttgtgccgctttctgtcaatgctcggggttaatgattatatgtgacctgtccagcccgtttatgatttcatgaaatgtgcagc

SEQ ID NO: 173281 - DNA, 435 bp, Glycine max
caagctatcttacctatctatctcccaaatgtctttgctttatattcaatggataaaaacatgaagttctaattcaagatgttttctttgttgcatgggcataatgcaatcactctatgtctagcaatgattctattaagatgtccctacctttgagttctactaaaaattatcctctctcgagcgactaatccctaaaactgatgcatataaaaccttcaatgtatttctactaaggattaccctctttcaagcgccaaacccctaaagatgatgcaaggatgaagcatataatacatttgttggcattctacgcctgccaagccctaactaaacgggtttagcctttcattgtcatgagagacttttacactttatggggttgatatgaatggaagaacatggatggatagaggaagaaaagaggataatgga

SEQ ID NO: 173282 - DNA, 452 bp, Glycine max
tttacatgcatgtgcacaccatatgcactatactacgatcatctgtttcaatctattcgattgaaaagataatttatactactcttctaatgtagtggacaactaaaattaaaataatataatacaaaatactgctaaagccattcaaatcaagtaattttgaatctcaccattactatcacgcatgtcaaagagaatgagaatcagacatcgtaatgcataacacaacgaaacattaaaagataacatgctttctaaagccaaccaaggtaaaaatgtattcatatttcgtgaactttttcaaaattataagacacatatcaccatatataaaaacatggtggaacaatctgaccacatgcacaacacagaccacacattatttcagaaaatgagttgtactgataaataataatgcactgttaataacaccgtaggtgcactaagataac

SEQ ID NO: 173283 - DNA, 445 bp, Glycine max
  unsure (1)..(445): unsure at all n locations
agcttctatataagctgaaccatggtatctattatcacgaggtgagnnttattcaaaaaatcagagtttatctcttttatcttactgagagtgattctcctaaattcttgagtgattcaagaacaccttggctgtatcaaaggactttcacaacctttgggtgttgccctcgctggaaagagtgattcttccctgtctttcatcatcacccttgttctttcaaaccacaattccagaaaatccacctctgcccaaaattatctcgtggccataactcccattttacgcactcaaattaagtgattcttgagcctaaattgaatttcaaaacgagacctttcacctcgttttggaatcacctcatttggagccatgtagcttcaggtattgccatttctatatttctgcccgccaccacttaacctacgtctgaccatcccattca

SEQ ID NO: 173284 - DNA, 441 bp, Glycine max
ctaaacattcaatttcgagcgtctcgatatattacgagtctttatatacatccgagagaaaagatattgtcatttgaatatgctcagaggctcaacattcaatttcgagcgtctcgttatattacaggactcaatcagacattcgagtaaaaagttattgtcgtttgaattagctcagagcttccacattcaatttcgagcgtctcgatatattacgggcctcaatcagacatccgagtaaaacgttattgtcgtttggattggctcagagattcaacattcaatttcgagcgtctcgatatatgacgggactcaatcaaacatccgtgtaaaaagttattgtcgtttgaattggctcagagcttcaacattcaatttcgagcgtctcgatatattacaggactcaatcagacatccatgtaaaaagttatgtcgtttgaa

SEQ ID NO: 173285 - DNA, 471 bp, Glycine max
  unsure (1)..(471): unsure at all n locations
aaaaactcagcctatcatatatngagataggacttcaagagtctgtcaaaatattatctattactttaagggaaacatgaagaacagaagataatttttcagaaatttccactcaatcatgtgatgactttgaaagtctaaagttaaagacaacaaagcttcaccttgagaatgaggaaatnttgtaagaaagatctagtctattggaagaccttcagaagttgaaaaatcaactagaaggcttacaaaatgagtacaccacactcaataaagttcaagattacctaaatgaggaaatgtgtaatatattgaaagaatgttcataagtccataagaattatgaaaacttgaaggcaagtaaatataacttatgggatgaatgtgaaggctataagaaaagcctaagattctcaaatgatatacttgaacagtacgagattatctaaaagcaaccttaagatgtcgtacact

SEQ ID NO: 173286 - DNA, 405 bp, Glycine max
agcttgaaggtgtgtaaccttctctcttctcgtagtagaaccctggtaatgtgtcaactatgattgttatcatctccctcaccatcattgggggcgctacttgagctgctagatccctccacctttgggcatattctttgaaagattcatgctctttcttgcacatgttttgtagctgcattctatctggagccatatcagaattatactgacactgcctaatgaaggcaaccattatgtccttccaagaatggactcgggaaggttccagattattttactaggtgacagctgccccagttagactttcctggaagaaatccatcaataatttttcatccttcgagtatgcccccattttcctactgtccattttcaggtgattcttggggcaagtagttccct

SEQ ID NO: 173287 - DNA, 466 bp, Glycine max
  unsure (1)..(466): unsure at all n locations
ntataagtgcgggttcgggagacaaaggtcattctttctttatatgcgaagatgatattccgagtactctggatttggtacgaccatgctctcctgatttccagctgggaaattggcgagtggaggaacgccccggcatttacgcaacaagcataatgtaaacctttacggttttaaaagctctatagttgggcctaggctctanagttttcattttgttaacgctttgtgtcttttgtttttgaatttataatacaaggatctttcttcatctgttcctggtctctacccattctcattcatttgcatgtttacttctttttctaaaacggcagattcgatgacgagtcccccgaaggtactaatacctgtgacccgtctatcaacttcgagcaagaaatgaatcaaacggaagatgaaggagatgagtatgtgggacttccttcggaactagaaagaatggtcg

SEQ ID NO: 173288 - DNA, 412 bp, Glycine max
  unsure (1)..(412): unsure at all n locations
agctntcctctttagctaagcctatcattgttttcagtaatgcaaattatttactcttgtcatggaaatcaaagatcacttctgtattgttaaatgacacataattggcttcacaggcgacaagactacttttccaaacgttaattcattgaggggctttgatgttatttagtattganttggcctacatgcagtagcaacaagcaaaagcaaccccaactcgtattatttaggatactacatatatatgcatttgcctatatagaggaaccttcagctttaaaggcatcctacatcttccactaccttaattgcttctacttatcgaaatcaaaattgtgtcccactttcaatcacattctcacacacaagagggaaaaaatgtaactagcacttgtccctgaaatcttta

SEQ ID NO: 173289 - DNA, 453 bp, Glycine max
  unsure (1)..(453): unsure at all n locations
tacatcatgtggtattagagcatcttcatctaggtgttgttgaaagaatccatgagttacaagaacctatggatntgaggtcaaatccttttcaagggtgagggaatgatgcaatcctacccccaagggcattggatagaagactccaagaagattgggccagatatgcaagagaaggccctaaggttctcatgagccttagggtagattttggggccatgggctaagtatgagctcacttatctttgtacatattagattaagatttcattatttttggtccttgtatttagggatccataatgtaggtagggtatcctagacatatatgaattttcagccattgtattttagggcacctagactagtttttgtattacgggtagttttgtaatttcacatgcactaagtgaatatatgatgtgtgtgttgcgaaataaatctaattgaatt

SEQ ID NO: 173290 - DNA, 437 bp, Glycine max
agcttggagtctatgatctaagaaaaaaatcattatgaagtgtaagagagaaaaaacaaagagtggatggagaagaataaaatactaatgttgttaactttctaaccaaatagaagaactattttgaacattttagataagataaaggatcaaaataaactcttaaaaaataagataaaagactgaataggtcatttgtgccattttaaaaatagatgtttaagactttttcttatttttctttacttttttatttctatcttttccattttatcccgtattgaccctattgtcactcaacgacaaccgccaattgcaactttcgttctacacggtggagccaccgaccaccacaaccacccttcttccaagccttttttctttgtccaaggaaaccaagccaattgatcctaaaacaattcttggatgacacaaca

SEQ ID NO: 173291 - DNA, 454 bp, Glycine max
tgtccgcgggcaggtccggcggcacgttggcgacgtatatcttactgagagctacgtcagcggggttgacgttcgacgcggagttcccggcggcggcgagctgcgtgaccgtcacgcggccgtcgatgcgcttgctgggctcgcggagggcgagaagcgcgccgtcgacgtggcggaaggtgacgaagccgtatcccttggacttgccagtggccttgtcgaggatgacaacggcctcctcgaggtcgccgaaggtggagaagagcgagcggaggccgtcggtggtggtgtcccagccgaggccgcggatgaagagcttgcgctgggagacgtcagggtccgcgacggcgcgcacggcggcaaggacgtctaggtggcgcgccaccgcgtcctgtaggatgtctaggagctggtcggaggtgaagcgctcgatgagcttgcggacttcggaggg

SEQ ID NO: 173292 - DNA, 417 bp, Glycine max
  unsure (1)..(417): unsure at all n locations
agctnnttggagtagaaacatgggatctcttctattttatttcaaaaagaaagtcgtatctagtcaaagtctgagagaccatacaagtttcctaacgatttctaattatgtgggccattaagtctatcatatgctgacaatagccgagaagcccatgaatctcttcgggggcggagtaggtgtctgccatcgccttggccttggctaacaagcggggaagttcttgactcccgttcaaggtaagagcaaaccgatccatccacatggttgcctcttggtgtaaagagtcgatcactcttcctctagcctctttttctgcgtatacttgagcatactcgttcgcgaatctatgctcgtgggccgtggctagacctaactcttcttggtacttggcgatgatagctagcatgttggtct

SEQ ID NO: 173293 - DNA, 341 bp, Glycine max
  unsure (1)..(341): unsure at all n locations
agcttgcttcttctgttaatgaagtattcttttttgtctttganccgnatgaggaggtgaaaggcatcatagacactttgtctattgtgaaaggtgtgctgctggatgctgatgagaagaacgatcactagcatgggttgtgcgaatggctctggcccattctaaatgtatgcttagatgctgaagatattcttgggtggatttgagtgcccaaaccttataaagcaagtttgtaaagcattaagcagcacaaggatgaaggtaggccacttctattcttccgtacaatgctcttgttttccgtcttacgattgctcatcataataaaaatgtttgacgtc

SEQ ID NO: 173294 - DNA, 416 bp, Glycine max
ctcgattaaactgctttttctttgtaataaaaagataactatctattttttaagtgaatatttttttcttaaaaatattttctttagaaagtattgttctttagttcaaacaatccatttggagaagagaactatatactaataagtaataattatattacataaaaaatgagtaaatttcccattgagtgtgagaggcaaatgatgtgaagactactgtttggttcgggaagacatctatacatcttgaaatgaatgagaagagtctattttcatttagtgatttattagataatagaaaacaaacaatcttgagaactattcaaaactcagaagaattactggaaggcgccattgaatagctgagtgaaaaggccccaagctcacttaaggaatgtcgatacataagcagatcc

SEQ ID NO: 173295 - DNA, 376 bp, Glycine max
  unsure (1)..(376): unsure at all n locations
agctttagttggattagtgttttttttttctgatcatgatggacttctatggttntgtaactagtggtaggtgatcatttaatttgtaaatattttatgcttaagtaagatataagtaaatttacactggtgtatgtggttcaattagtaaaattatgctttctagcgtgtgtgagtgcatcatatcccgcaccatgggtaaggatatttttcaccatgaacggttgatttgatgcaatcaacgttatgttagcacaccacattataggaccgcaactccttgggtcgtgtaatcctttgaggccgcgaagccaagcgcatgtaacatacttctcatctcaaattaaacataattttgtccctcgacattggtgag

SEQ ID NO: 173296 - DNA, 440 bp, Glycine max
  unsure (1)..(440): unsure at all n locations
ngttgctgtgtgctgagtgtgtgagcaggtcgtgtttgtgtttctatggaacctgtgtttatagtagtttgagcgtggttgctggtccttgtttgtaggggttgttgtagccttgtagataattcccggcttatagataatagttgggagcttagagataatgttagagacaaacatttgaattataaataaaggtagaagataatcataccttgtagataatgtggcattatagataatttaatacctgccaatagataagatattcaaatacatttgaatattagttatgttagagataacctgtttgttgggaagcccgactactaagggtcaaacgtctatgctcttgtagtaaggctgacatggagggtggacacatgtctccgggtgccatgttggatgcacacatagatcatgtgggccatggattgtacatt

SEQ ID NO: 173297 - DNA, 406 bp, Glycine max
cacaaaaaacccccgcggcgaccaaacagggggcgaacaattaaagaacaccacacaaacagcgcaacaacagacggacgaaccccagaagccaacacgacacaaaaacagaaaaccgaagacccaccgagcaaagacccagaccaaaacaaaaagcaaaaggcacacgcatgacataaacacaccccggcacacgagcaacaaccgcaacgcatcacaacaagacgacggacaacccggtacgcgggacagaactgcaacacacaaaaaacacagagggccagagcaagcccgaaaggcacacgaggtcacaaccacgcgaaagagagacacaaaacaaagaccaacaccccacgcaaaaagaaaccgagcccgaaaaacaagaaggagacaacgaaaacggccc

SEQ ID NO: 173298 - DNA, 381 bp, Glycine max
  unsure (1)..(381): unsure at all n locations
attagctgatttagtcagtttttctgctgctaaagcgccagcttccactcttttttaacagcgaaatttcgtaggacgtgcgatattttgcatggacaaccacgtaaaaacttaaatattgtaaacatgagtaaaaatatcttatttgaatatcaatactgaatttagttttatagaattttttataggcattagtttctatagattgatagtgtaaaaaaattattttcaaaacttttacaaataggtactgctacatatattcaatataataaattctttaataatgataaaaaaataaaatgttaatataaatattttgacatctggggacatatgatattatatcaaagcctttacctnttattcaaacttatttat

SEQ ID NO: 173299 - DNA, 171 bp, Glycine max
  unsure (1)..(171): unsure at all n locations
gtggtggtatccatggtgttctgaccccaagactccncgttgtggttctaacatcctcaaacataaccattgatgggttctattccagtaagtgtgggactcacgctgatggaagctttcttgataatttggtatggatgctttatctctcagatttaataaaggtcctca

SEQ ID NO: 173300 - DNA, 61 bp, Glycine max
  unsure (1)..(61): unsure at all n locations
cgctgctgtaaagacgaatgggggagaaccatcanttttgggggggggggaggaaccaaac

SEQ ID NO: 173301 - DNA, 399 bp, Glycine max
  unsure (1)..(399): unsure at all n locations
ctatcatcgccaagtaccaagaagagttaggtcaagccacggcccacgagcatagaatcgcggccaccgctgcctctgtcagttcggctgccgaagcagacccgactctcttggcaactgcgcaccatcctccttcaaacatagtaggacggngaagggacacactgnggcacgatggcaaccctcacctgagatacaaccgagcggcttacccttatggattgccgcccaactactcaccacccgtcttgcaagaagatgcgggccacattgattctcccgtgcttgaaagagagcctnctcaacagcccgacgaagtccactaatacccgtatgactatgctccaagggatgtggagttccatcacttgatctctttaaggccgtgaacattctcgt

SEQ ID NO: 173302 - DNA, 167 bp, Glycine max
ttgcactatgcaatcacttcgcgtggctccagactcattggtggatgatgcatgaacgacaatcaattcatggtgctccgaataaaagtggagaatggagaattgcactatgcaatcactacgcgtggctccatactcattggtggaagatgcatgaccgacaatca

SEQ ID NO: 173303 - DNA, 373 bp, Glycine max
  unsure (1)..(373): unsure at all n locations
attttcttttatgtttgggctatgattttcaatctcaacaaatacaatgttagggaatcagacaattttgctatagatgttgttgacacagttttacatacttactcggatggatgaatacaaaatgtntatggagtttagtattactcattaagttatgacagaattttcaaataatctaatgcatatgttccataaaggctcgccattggccagagacgtgtcaaaagctatattacatctctcataaaaagcagagctgaagagattggaagagaagtggctgattacctcaccggcatcattctccaacgtgaccctcgatgatacggacagttcgaagctgagaaagttatggattctatatgtcatc

SEQ ID NO: 173304 - DNA, 366 bp, Glycine max
  unsure (1)..(366): unsure at all n locations
taattagntgagtaaaatgcataaattattatanatcttctcaaactggttttcattctcatggattaaaaaaaaatctcattnttattgcatttcttagctaaaaatctcaatttgtttgcatttcttagctaagctagctaggcatgtaacaatgaanaaggctacaacaacttttaataatttcttagctaggaagcanaagagaagcanagaagagtactaaacataacanaaccaaaaaattatgaaacaccaagaatacatgattcttcanaatntcaaactgtaaaactaanaccctngatcaatgaccaaatcctctttagtttcatcaacattatatccaaccagaacaaccaattc

SEQ ID NO: 173305 - DNA, 395 bp, Glycine max
  unsure (1)..(395): unsure at all n locations
tgctgaaagattgcaattttatagtnntttgtgatgnngctgcaatggggtgattantggttgggatgantaatttgtggaaactgtgaaagggtatgttatgcatcatatngtttaattcggtttcctcgttttttcctcaggtgtccaaaatgtatggaattgaagcttcctcgagaaggtgctgccttctggtttgtgactgaatcctactttgtcagttatttgaattttgaatttctttctctgttttcgtgatagatggtgtgtttggatcatngtctcttatgtgtgaattgttatnatttgtgacaaaccaaatataatgtgtgtttggacaacaattgcatagtgagaaaccggaagctataactactggtttctctgtacgtgtg

SEQ ID NO: 173306 - DNA, 349 bp, Glycine max
  unsure (1)..(349): unsure at all n locations
gctttggagtagaaacacgggaccttcttantttatttannaaagaagtcgtatctagtcaaggtctgagagaccatacaagtgtcctaacgatttctaattatgtgggccattaagtctatcatatgctgacaataaccgagaagcccatgaatctcttcggaggcggagtaggtgtctgccatcgccttggccttggctaacaagcggtgaagttcttgactcccgttcaaggtaagagcaaaccgatccatccacatggttgcctcttggtgtaagagtcgatcacccttcctctagcctctntttccgcgtatacttgagcatactcatccgagattctatgctc

SEQ ID NO: 173307 - DNA, 339 bp, Glycine max
  unsure (1)..(339): unsure at all n locations
gagctgaggaagtgttgaatggtgaaacttcctgctnntttgtttaccaatcccgacccaacccgggcatagtcggtcagtgagaacctgtgatgtacctaaacatgcgagctcctggcagtcaacatatataatgaacatagaccacaaagcaatgaggcttgtggtggctggccaactgtgaaactngattgatatgtgagatatggtctctggtaatcgattaccaagggtgggtaatcgattacaaggcttaaaattgaagacaggaggctaagatggtctctggtaatcgattaccacggtgtgtaatcgattaccatgcttgaatacgatgtc

SEQ ID NO: 173308 - DNA, 449 bp, Glycine max
  unsure (1)..(449): unsure at all n locations
agtacctgcggcatgcaagcttcaccttgtggtcctcctcattttttttgcatgaganaacatgctctantttcatctcccactgcaagtaggcctccggatcattctttcctttaaagggaggaatgttgagtttaataccatcaattcggttttgtctaagaacaccatcattccctcttctcctcctttcttcttcattatgatctctattctccatttgatccaacctctcatggagcgcatcatctcgttgtttcattaacctctccatatgttgcatcanagcttgcatttggatttgcgaaagcccccctccatcattaggatttgttcctgccatctcanacaaacatatcatacctaacaagacaattatagtttgtgtttgaatacctcacccactcatgtgtatcacaccaatatggcttttctctaatgaaacactc

SEQ ID NO: 173309 - DNA, 440 bp, Glycine max
  unsure (1)..(440): unsure at all n locations
ggttcttggattttcctgagttctgaacaagcttatatcttttttcttggccttctcttaattgtctttgggcttggcgaccacgatcaacaaagtactttcggcacctactatatgttgacttgaccaatgttgttattggaatgctgcgacaatctttcaacaccttattcacacattctgataggttggttgtcatgtgaccatatcttcgtccagatgtatcgtaagtcatgctccatttttcctttgaaatgcgatcaatccatcttgctatggctggactcaattgacgaaaattttctaagttntgatcaaacgcatgcttgcaaggagtgtacgctgcatcnatattgttaccatcaaaagtgatacgtagatatgaaactcaaataaagttaatgtataaaataaaacttacccaatntcttgaacatctc

SEQ ID NO: 173310 - DNA, 391 bp, Glycine max
  unsure (1)..(391): unsure at all n locations
tgcgcagcccaccatttctttcttattagaacaccggtcacgtgtctactatcattgtgataatctctntctctgtttgtgggggtgctacttgagttgccaagtctctccatctttgggcgtgttctttgaaagattcgtgccccctttntgcacactttttgtagttgcatcctatccggatccatatcagaattgtactgacactgccttagtaagattttcttggaaggaatgtatcagcaattcctcatctnttgcgtattcccccatcttctgacaatacatctttagatggttcttgggacaagtagtccccttgtacttgtcaaggtccagcaccttgaacttgggaggagtgatgatattgggttctaggaaacaactcttt

SEQ ID NO: 173311 - DNA, 425 bp, Glycine max
tactaagcttctatccatgctcatcttggtggtgaagctcctttattttctttttgatggcgcctcctctcacctcttctcctttgtcttccgctgcatctccatggtggaaaataaccattaaaggaccttattgaagctcaaagatccagcctccatataatccccacaagcaagcttccatcagaaggctccttggaggtaaatattgtgatctatctcaatcccaaagagagaacatctttcatacaagatgcaaaatgttagataaaacttgttctctcattatggataatggatcttgttgcaattgttgtagcacaagattagtttcctagttgaatctcactatcattccctacccaaaaccttataaacttcaatggctcaatgagcaaggggaaatgatagttaaccaacaagtg

SEQ ID NO: 173312 - DNA, 440 bp, Glycine max
  unsure (1)..(440): unsure at all n locations
gcttcaaaccacagcaacacanaancatgnanttttaacccctcaatnaaaaggattctcaaggtttgagaagtgaaattcagaatggggtaaatttggagtaaaacctcacctcacacaagtctataacatcaatttaaacttgctcaactggatttacacctaaaatttcaccgaatcaaaatttgactcctcaacacccaattntaccctaaaaatggctctttgttcactttggccatttgtttttctctcttgcacagcccatactttctcataagtcctaaatgacatttcaaactaggattaactccctttaacctccaaataccactaaatccagagttggctttcaactctcanaaactcactctntttccactcataacaccatattctcactttctaacgctangttaactctacncttcatctctaac

SEQ ID NO: 173313 - DNA, 386 bp, Glycine max
  unsure (1)..(386): unsure at all n locations
cctcaatcatttccaaatatgtctttttgttttgacgcatcaacaagaatcaagccattgctattgtgcaagcaatcatatggggcaaaacacaccaaatgattatgatgatggatgactcaaattctcacaaaggtaaaattatcactttcaaatngagctttcaaaactatcatgacatgtagagaggaatcaagggattcaagtcacaaaatgtcaagatacattattttcaaaacaattacccatttcttgaacatatcctataattcaaagaaaaacatgcaaagtcgtacgtgcacacaataattgaccataatatttaacttaaaatccgacgaaacttacaacatgtacaatattacacaacttaccaatttacaaaa

SEQ ID NO: 173314 - DNA, 333 bp, Glycine max
  unsure (1)..(333): unsure at all n locations
ttccgccccggagtacgacagtcaccgttttatgagcgttgtacaccatcatcgcttcgaaaccatcaatggatggtcgtttctccgggagcgacgcgtccagctcatggacgacgagtatactgattttcaggaggaaatagggcgccggcggtgggcaccactggttactcctacggccaagtttgatccagaaatagtccttgaatnttatgccaatgcttggccaacatatgatggcgtgcgtgacatgagatcctgtgttatgggccagtggatcccgttcgatgccgatgctatcagccagctcctgtgatatccgatggtattgga

SEQ ID NO: 173315 - DNA, 430 bp, Glycine max
  unsure (1)..(430): unsure at all n locations
agtcacctgcggcatgcaagcttgaagttcaccacgatatattatggtttctctacttcactttaaattttgctataacttgatagattcttgctataatgaaaataattttagccataatgcaaattttagccgtaaggaaaataactttagccatggcaaaacaaggtcaagagacctcactcaacttttagccacaacgaaaataattttagccattgcaaaacaaggtttgcagaatcacaattttatgtttttcttgacctctaataagttccaacccatatccaactcanatattttatttccaaacatgaacatcgaattaagtcaccattaataatctaaanacaattatccaacacatcaaacataagagtaatagtagtttaaagcttcaattacctatcaaactcaaggaacttgtttg

SEQ ID NO: 173316 - DNA, 398 bp, Glycine max
gcatgtaccctttatctactaacctggctttgaacttgtctatttctctagtctctttaaatttggttttgaagatccatttgactccaattggctttactcctcttggtagatcgtgagctcccaagtcatgtttttctctattgattccatttctttcatcattgcatttctacacttctcactcttaatagcttcctcaaatgagattgggtcatcctcagtattacatttagaccattatcatatgatagaccttctcctatttcataatctttcgtccaaacaggttttctcctattccttctaaccctcccttcaactgggagttcataattaataatatgagagtcattatgataagtatcagtacctgtagaatcattctcaacatcttc

SEQ ID NO: 173317 - DNA, 410 bp, Glycine max
  unsure (1)..(410): unsure at all n locations
gactggtgtgagggtgagagttgcttcantttttcctcattctcaatttcactgttcaaacctataatacccattgaatggagggatgttggacacctagattctgtgttgctgtgttttgaagcttggttctgggttagacatgattgatacatgatttgggacttgtaggaattgatatgggcaagattggatgagaggaagtgtgattttcaaaatctgcacttatgcagaattttgctgtcaaaatatgtgcagcagaattttggctttgtgcagaaaaacgcttgtgtgtggttggctgtggaaagagtagtgcagaatgagttctggatgtttgctagtagatcccaacggtcacaatgtatgcttatgtactaaagacttccagtaaaagtttcgagtcgatc

SEQ ID NO: 173318 - DNA, 176 bp, Glycine max
  unsure (1)..(176): unsure at all n locations
actagactgatagtaaatgtgattcacttattcttagatctgatgtcgtgtaatgagcatctggcacgtatgaatttatnggtntggttgttaagccgtcgcatattgacgtaagtaacgaattatatatcccttcatgatgtgtgttttaactctatgcattttttcttatcccc

SEQ ID NO: 173319 - DNA, 379 bp, Glycine max
  unsure (1)..(379): unsure at all n locations
taagctatcgtggcctaacagtacctgaaataanaaaaaatagctcatgttctcggtagcagacctttggagatgatgtttgagtttaattgtatcttcttttgcttgatttgttccttttactatatatccttaattgtgtgtcaatgtgaagtcattcttgactagtgatcttcccatgtttatttcctatagtgccagctgttgattgatcaatatggtttatgagtgttaatttcacttttcaaattgcattggttggttgcataaataaagtgttttggtgtgtggatacctcattgtgtggtaccatgcatatcaaaagttcttatttgtcgagtattattcaattctctntattgtatgcgtcgtcaactta

SEQ ID NO: 173320 - DNA, 189 bp, Glycine max
aggaagtcgtatctagtcaaggtctgagagaccatacaagtgtgctaacgatttctaattatgtgggccattaagtctatcatatgctgacaatagccgagaagcccgtgaatctcttcggtggtggagtcagtgtctgacatcgccttggacttggctaacaatcggggaagatactgacgttcttgc

SEQ ID NO: 173321 - DNA, 194 bp, Glycine max
cagtgagaacctgtgacgtacctaaacaggcgagctcctggactcaaccaatataaaacaaagtccacgaatcaaggaggctcgtgtggagactggccaactatttatcttgggtgttatatgacaattaccgtctggtaatcgagtaccattcgtgggtaatcgattacaggagctaaaaatggagacaggat

SEQ ID NO: 173322 - DNA, 322 bp, Glycine max
  unsure (1)..(322): unsure at all n locations
actgcataccctanatttttttgcatgctcaaattaatatcacatgcaagagttcattnttatacatcanaagtcactttaagcacaaagcttatcttcattatatcaataaatgcatgtaattattaccttttgctaaaaaaattctgtcctagacagcctctcctctaaagtataccaaataccagcacaagaaaaactactacaccagccacaattgcagccacggaacctgcagacatgctacttccattntctgaggaaaggatgaagtctgctcgattgttatagaagacatngttatacgagcttatatggcatg

SEQ ID NO: 173323 - DNA, 431 bp, Glycine max
  unsure (1)..(431): unsure at all n locations
atgaaaaanaatatgaattcatttgggttttggtaaaagccttcattgtttttcattctcaatgttttcaaaaaaattcttttgttgtgttctaattgaaaaataagtttcaaaaatactggttgttgattcttttcaaagcatgttatattcaagaaaaaataattgtttaagtcccgaaaagagttataatctataactatactaatagaatatcaaagcacacgtaagttttttaaaaaattcaaaacaataaataaggtaataaagtactgaaatgtaatacaaagcgataaataaacataaagacaagttcacgaattttcgaagatcatggttgaggagctcaatctcctagatgatcactggtgatgagctcagtctcctccaatgaaataatcaacaggatctaccatgtcttcatccctcta

SEQ ID NO: 173324 - DNA, 405 bp, Glycine max
  unsure (1)..(405): unsure at all n locations
ggaaacaactattgagttatgggtgatcatgaaaggcttgagaaaaccatactattattgaaagtcatggaggcgtgagaagaatacaccgtggctttgtaatttgggagtaattacactgataaaatccctttgaggtagagaataaatgtgacctaagtaatttaatggtaaaatagtacgataactctatgtgtaacattctctttctttctggtttaagttntatatttgctttacttggttttagcttttggattgatttcctgttttaattggataaaatatattctgtatccttttactttcaatcaaaattaatcttatccgtatccgttcaaatgatcactttggccttaaatttgaaaatatgtgaagttatcctattaatacaatgatcaattt

SEQ ID NO: 173325 - DNA, 280 bp, Glycine max
  unsure (1)..(280): unsure at all n locations
gatgacggcctgaaatgcgctaaatcaacttgcaatctttctatctcatgttcttggcagtgtgaattctgtggaaaatagatatgagtgcatttctacctctcttcactcaccacaacggtggaactatattccctcagaccagcccaaccagtataagtaacacacattatcgatcgcagcttcactcatcttacggtcacaccacgacatgagaancgcatctacttctcattatttcacgtactatcaaatcttcatcatccatatgcatctccta

SEQ ID NO: 173326 - DNA, 363 bp, Glycine max
  unsure (1)..(363): unsure at all n locations
ttaattaaatctaatgacatatatttttgttttatatntagtaaaataatgaaatgtaaaatttacaatggttactgnaatcaatatattattatacaaaattcagatgttaaaaaaaatatttaaccaaaaatatcttaaataaatgaaataatataaaaaaataattgaatttaataatatgatttgttaataaacaaaattataaaataattgttctaaaatgaatttattaaataaataatggtaaaatctattaaaaataattgtatataatataatattgtactgtaatgaaatggtaatttataataaataataaataataaataaataaaagaaaganaaaaaagctgaagaacg

SEQ ID NO: 173327 - DNA, 223 bp, Glycine max
  unsure (1)..(223): unsure at all n locations
tctagcttctttangaatcttctcaaggaagcttctcaaggaggtgagcttatttattagaggggtgtgtgtagctaaactctagcctttcaaggaagttcatataatcttctcaaggaagttttctcactaatgcttctcaaggaagctacgtattctataaatataaccatgtgtaacacttgttgctacttaatcactgaaatcttattgaatcatctca

SEQ ID NO: 173328 - DNA, 433 bp, Glycine max
  unsure (1)..(433): unsure at all n locations
ctcatgtgggtacatctcaataaaaacatacttgttttcttctttggtttggngagcacgggaaggatcattgcagatgcgggaagcatgaccacggatctcgctagaggtgctgatgtaagtggtgatatttttgggatcattgatcgtcgtacgaagattgagccggatgatccaaatgggtacatgctagagaggttaattggtcaaatagagcttcatgacgtgcattttgcgtaccctgctatgcctaatgttgctatctttgaaaatntctcgatgaaaattgaggcagggaaatcaacagcattggtggggcaaagtgggtccgggaaatcgaccatcatatggctaatagagaggttntatgatccacttaaagggatggtgacaatagatggcatgaacataatattgtataacctaaagtcac

SEQ ID NO: 173329 - DNA, 192 bp, Glycine max
tgctttaataggagaccacagagtggtacctgtagatatgtcgcggaggtcaagagaccttggtgacgtcatgtggtgtgctattgcccataaccaagctcgaccaatcccgacccaaccgcggcatagtcggtcagctgataacctatgatgtacctagcacgcgaagctctggtactcaactaatattgg

SEQ ID NO: 173330 - DNA, 433 bp, Glycine max
acgcatcaacaagaatcaagcctatgctattgtgcaagcagtcaatggggcaaaacataccaaatgattataatgatggatggctcaaattctcacaaaggtaaaatcatcactttcaaattgagctttcaaaactatcatgacatgtagagaagaatcaaggatttcaagtcacaaaatgtcaagaacttttattttcaaaacaattacccattgtttgaacatatcctataattcaaagaataacatgcaaagtcgtacgtgcacacgaaattgacccataatattaaactgaatatccgacgaatctaacaacattaacatattaacacatctaataaagtaacaaaaccaacattactatcgttaccaaataacaactccccccccataactaacaacacatgttctaatgtacacaataaaagataaa

SEQ ID NO: 173331 - DNA, 312 bp, Glycine max
  unsure (1)..(312): unsure at all n locations
agtacctgcggcatgcaagctntgataactatagaacttcctcctaatttgttgtgtttcattntctacttggttgtttctcaagtccaatcatgccacattggacgccatggaagtattggatgtgaatgctacttggaaactgaccgggatgaaaggatcagcataacaagtttctttgtagatgaggaatgcgtcttgcttcatcctaaatctccatttgaatttatggcagatcatgtattnttatggtatgatgcacaatnttacaagcagctgatggaagtaattaaagagaggaaaaccattatt

SEQ ID NO: 173332 - DNA, 440 bp, Glycine max
  unsure (1)..(440): unsure at all n locations
tggtagcaaacagttcataaagaaaggggttctgtcnntttatatctgccacaagcaatgtgttccgtagtgctggttacaagtttattgacggataggaattcagtcgcatagtatattataatccgtcgttggaaatgcataaaaagttgtgtcactttgtgattgtattaactactgatccttgtgtgcctatagttttatcgcaattaacgtcgctatctcctaattatggacatatttgttttcggtgcctaaatcagtcactaaacatantttgggattaaattgtttcgtcgctagattcagtggctatttgggtttttttccattagtgcgtgtaaaagcaagttaatcactgcatatctctcaataaccttataaaaatatgtatatatatgtaactagtgaaataaattaaccatattttatagttatcc

SEQ ID NO: 173333 - DNA, 365 bp, Glycine max
  unsure (1)..(365): unsure at all n locations
catgcaagcttgaagcaacatgctcgcccaggcgtgctgnntttttctctagaagattcttgatgggcctagatgggcccaaagctgaagaacaccccctaaattgatcagttcacccccattttgagtgttttttggcttatttccttccaaaacaatacgaaaccttacggatagcatgacaattggctaagaatccgcatgtcgacaaacaattgtccccgaacgaaattagggtatgatagttgcccctctttacttatcttttattggatataaaagggaagttaagacaagacactaatttcgttcgagctgaatttcctcccgatcgacgacctgctcaatcagtgaaacctgtcaac

SEQ ID NO: 173334 - DNA, 284 bp, Glycine max
cctcttctctgtaatatattcaaactgctgagtgtgttaactcactcaagcatcttattcaaactagctctattctaaacttggtattagaatgggaacgatctcactctgtctattccgtcaagatcgctgatccatcaccatctcttgccattctgccgctggcaacattgccggtgaacccagtgtttggtgcgcctcattgaatgcgccatttgatggagcctctgttccagtgaatgctccgtttcagatataaggaaagtctctacgattgtgagcat

SEQ ID NO: 173335 - DNA, 210 bp, Glycine max
acaagaggacaccgcatagtagctattggtagagattacttagatttggaacaattgttcacatcacaagttcaattcttaccaaaccccgccactgaacatgaacagattacatcatgtgagctttcgacgtcttttcaaatatgccaaacacaacagggtgtaaacatgggttccatactaagggcaaacacacagttatatatatga

SEQ ID NO: 173336 - DNA, 381 bp, Glycine max
  unsure (1)..(381): unsure at all n locations
tagatggcacagctccaactccatgaatccactcccttcctaatagcatgntaaaattagccttagactgtatcaccaggaaaagagttggtcgaactatactgcctacagcaacatctacttgaatggctcccaaagaatagccagttgtaccctcataattcgaaagcacaatgttgtgggcagatagatcagtgtcatggttcccgatcttgtagagcatagatcgaggcattaagttgacagccgctcctccatcaatgagcaactttgtgattccaacattctcaacttttgctctgatgaanagaggttngagatgactcttcatctgaaaatctggctttacgaataagctacttgctcttcacacagccttat

SEQ ID NO: 173337 - DNA, 412 bp, Glycine max
  unsure (1)..(412): unsure at all n locations
agtcacctgcggcatgcaagcnttttattgtctggatctctttaaattattatatatccacttatcaaaacggtgattattatatctctctataataaaaagagagaaactntggatgattgaactctntaaacaaagtaatactttatccacaaagttataaatgggggctttacttatgctaattntaatgcagaatgtatctctatcctcaaactctagattggtgatgaatgtccagaggtatatccaattcttggataaaacactagtacaaattgcttctttagttggtagaaagaggagaatgcaaccaataatgacatcangtagagattgctgagtttgtctggacctgcgtgtatggaaattttgctctnnttcaattcaccttcccaaattgagtctatga

SEQ ID NO: 173338 - DNA, 407 bp, Glycine max
  unsure (1)..(407): unsure at all n locations
atttattattatttggatctattttnttgttngaggncngnnnattacgatgaagcaagatatgttgtccaatcttcacatcaatttgctcctttggtacatactgtggtcactacttatttactaatttatgatttaatctttcttaataatttacttatttctgacagttggcagagaggattaataaaggagggatggtaccagaagagattgcagctaccgcaacagaggaatatgaaagaatgttgattgtcattacccattgaattgtgaaattcaagtacacaaaatattcaaacaaaagatatagcaaataatggttaagttccaactttcnaagtgtataaatggttggtggtttcttgtattttaaatttcaacaatccttctttcaattatattat

SEQ ID NO: 173339 - DNA, 266 bp, Glycine max
  unsure (1)..(266): unsure at all n locations
tgttacggatgaaaaatnntttgttgaatcaaaacttcgatatcctatcatggaggaaatagatgatgctgacacaatgcatttacgacacgagagcccgaagatcattttcttactgcaacatttacagcacggtgccccatgtattgcattaagaaagtgatatggatatttcactttttgtganaaaatgacgagaccaaatgcatcacatgcgtgatgatgcaatatatacataaacacgttgatagcatgaaagatgaaca

SEQ ID NO: 173340 - DNA, 387 bp, Glycine max
tgggttccttacaagcatacgaagaataacaaaagagaaaaatttaacaaaaggatgctactgatcaactactacaactcaacgtaaaggaagcaaactatgcaaattacaagatccaaatatgacgatgtcgcggccaatatcgtggacgtggacgatgacatggaggagaaggaagaggtggttacaacaaccactccaacaaattcaacaatggagaaagaagttggaatccacaagtaacaagaggtcgtggaagaggaaattcatggtcgaggtatgacaaatcacaaatcaagtgcttcaattgcaacaagaatggtcactacgcatccgagtgtagattctcgaagaaggttgaagagaaagctatacttgtagaagaaa

SEQ ID NO: 173341 - DNA, 413 bp, Glycine max
  unsure (1)..(413): unsure at all n locations
aacacgacaacaaagagaagagaatgaananaanaataacagagaagatattgaaaagaattggaatggtttataaaaaaaagggtttgataatgcaacattttataaaggggtaaggaatagaaaaaggagtgcaacccaagcttgttgggatcttaccttcctgcgtgccacactcgtccaaaacgcgggtgaattggttttctgnttatttccgcttcatctacacgggaacatatccttcttttgttattccattcattgactccatcttcattattgttttatatctaatctaattgcctactattttcaattatccctttcattttaacttatttttattattgtaatcaaatttctctttttcattagttgtactataaattaatctctttattatatctattatt

SEQ ID NO: 173342 - DNA, 479 bp, Glycine max
  unsure (1)..(479): unsure at all n locations
gggtggacattatagtggactaccttacgcttctgttagtcgannatgcngaggggtacagcgacccatcaaagatcaaacgtgaattgaattgggttgctaagcacactgatcttcaacagagtttgaaggttgcatggagatggcagaaatctcatcgtgatggttacagtgtttcaaatgcattattttgaattacatagaattctaacataacagcagaagactataagaaaccccggcagcatccatttcagctgcacttctatgatatcttagaataggggttgatattatatttttcttcttttactccattgaggaatatgttcttanggagcatgttgtccattcgatacatgtattgaccgcataatatgactcaataatataatgcagaggctctattatactctgtctctacgatgatatttatatcacattacgtatatggtttttcatctttgaattccttcctt

SEQ ID NO: 173343 - DNA, 352 bp, Glycine max
  unsure (1)..(352): unsure at all n locations
ttaagcacgcggctgcagcttctaagtaagtttctaaggaagcatccatgcttataatgaagcatgtgtaacacttgttgatctttgatgaatgtgaaacttatgagacacacttcanagttcaacttctctccctctttttgtccttcaattccgtgcccccccccccccccccctctctctttctctcttattcttttcctccattgaagcttcctctctaagcttcttatccaaggcactctcttggtggngaagcttctccttccatggcttattctctagtagatggcgcctcctctgatagcaatctaccccatacnggcattgataaaagactccagtatattgc

SEQ ID NO: 173344 - DNA, 397 bp, Glycine max
  unsure (1)..(397): unsure at all n locations
ccattcngncatattcaatctctgtgtatactgcatcatataattgaagactatcttaccatttatggtgttacccatattcaaccataaaagctctctcgggtccatctcangcataccttgtgatatctgaattgtcctttgagtagttattcttaatcctgcaattgcaaacaatacaaaataaatactaatatacaacaaatttatggttatttattggagtttaatgatatgtatggtgtcagtgtaaaaacaaaaacttacattatctcttaaaatgtggattaatatttaattcaatattcaaaatctgcttctaaaataggagttgacactcacttatatattttattgtggtcatatttttagtagatgtaaaactaaaccaccactc

SEQ ID NO: 173345 - DNA, 378 bp, Glycine max
  unsure (1)..(378): unsure at all n locations
taatagacacatttaagttaatgttaatggagtatacatattaacatttgacattagtcacatgaactaaaattantaaatttttaaaagtgagagataaaatgtctcaattaaaaaataggaaattaaaattaatttttttttaaaaaaagaacaaaatgtctgaataaaaataagaagactaaagaatttagaaaaataagaagacaaaaattacattntagtcaaatgaattttaccttcttgagagaagagaaagaaatggactgagtactggtcttaanatttgtgtgtaaatcgctaatatattccaatgaaaaattatgtttgattatatcagcaaatctcatatttgtatatagtcactcatttaatata

SEQ ID NO: 173346 - DNA, 382 bp, Glycine max
  unsure (1)..(382): unsure at all n locations
gttgaggatattccaaagattgcttttaggacccattattgtcactacgaatatctaatcatgcccttcggtgtgactaacgctcttggtgtggttattgattacatgaataaaagccttcacccttacctcaataagtttgtggtaatattcatagatgatattttggtatactccaagactagagagaaacatgagaagcatttgagaattgtgttgcagaccattagggactgacaacttcatgttaagttgtccaaatgtgagtnttggtcagagcaagttagtttcctaaggcatgtaatatctcaagggggtatagttgtagacccttctaagatatgaagtgtccctgagtggaaaagtcctatatctggttttg

SEQ ID NO: 173347 - DNA, 209 bp, Glycine max
  unsure (1)..(209): unsure at all n locations
tagnaataataattcgtacaggggaaggttatatatattttatagtttcttgggaaccatgagcaggtatatatggaaggtgtaaggatgatgtatatgtaaagaccaattaatgaagtccgtggtgcatttaaatcaatcttacattatcatttatacaaagacagtgaccatcatgtgatctaaggatcacatgaaatactatgatt

SEQ ID NO: 173348 - DNA, 406 bp, Glycine max
  unsure (1)..(406): unsure at all n locations
tatagctggaatctccaatatggtacatattggttaaagcatgtcaatttgatctctgtagttgcgtttttttttttcttcttgacaatcttgtcctccacaatttgatttctgtagttgccattttttttctcttgtcaattttgtcctccccataaaatcacccttaacgtcatctgttctatcaatgttgtctttagtctgccacgacaattgttttgagtggtggtagattgcaattatggaatgttgggatggatgaactgctttaattatatgtactaaatggaaaagtcagaacaactataggcatcgaaagaatatgtaaagtttatacctacatgtgtttaacatnatttttaaaacccatcggttattattcattgaaattattaaaataataaat

SEQ ID NO: 173349 - DNA, 471 bp, Glycine max
  unsure (1)..(471): unsure at all n locations
ctttcactcggatgtccgattcatgcgcagaananatcgattttgttttaannngaacaaggaagcgccggagcaattcaaatgatcataacttttaactcggatgtccgattcatgcgcataatttatcgagacattcgaaattgaacaatggaagctcttgagaaattcaaatggtcataacttttcactcggaggtccgattcagtctcatcatatatcgagaccctctaaattaaacaatggaagctctcgagaaattcatatggtcataacttgtcactctgatgtccaattcacgcgcataatatattgtgacgcgtgaaattgacaactggaactctcgacacattcnatgtgcataacttgtaactctgatgtgcgattcaagcgcattatatatcttaacgttcgaaattgaacaatggaagctctcgagaatttaaatggacattactttgaactcgatgt

SEQ ID NO: 173350 - DNA, 448 bp, Glycine max
  unsure (1)..(448): unsure at all n locations
gtcgctgcanggcatgcaagctttcgattcattctatgacttatgtttggtcatattgngnnnngngtatttctattctcgtttcatttactttntatacccnctcttgacgtgcttaagccattntacttaagtcatttctcgcttaacttaaaaataaaataaatctccaccgaacgtttgaatggtattatccgttaacttcggttaaaatgaattccgaccgttcggtcgtgccgtaaccacgttggaaatcaaaaagagataaaataataatataataataaanaatgttcattagtaaaataaagcggaaaatcaatcggacgtttctctttgggatttctcattcttaaatgaattgactaataacctaaggtgagacttatagcttanatcaactcgcctaatcaagctcgtccacaaaaataggttttgaaggttgtca

SEQ ID NO: 173351 - DNA, 261 bp, Glycine max
  unsure (1)..(261): unsure at all n locations
gcctagtgagtataatgtaagtgccactttcaatgtgtctgatctatctctttttgatgcagatggaggagccttggatttgaggacaaatccttttcaaggaaggagtgatgaggacataaccaatggcaatgaccatgaatcacttgaatgtcccatgaccagaggcagactttatcaatcccaacacatcatagagacaaggctggtcatttgtatagctgtcattgatgatgatngaaggcccaagtggagatagat

SEQ ID NO: 173352 - DNA, 415 bp, Glycine max
aaaagaataaaatggatgaaattaatatcaaattatttttctgtcttttacaaatattcactttcaccttattaaaaaaatcttacgggaataatatctatttttttatgaaaacaaaaaatatatttatttaatatattaagtaaaaaaaattattttgtgggaacaattgccccattacccataatgtagatccaccattgcacttgagcattatagcgttttgcatgtaccctaactttctactattgatctcatatgtgatggaaaggaatacctctcgcgcgaatatctcacacctcaattaaaactcatgtcaaacatctcaactacatatgataaatcagaaaaatactgagtgtataacgaataatatccttattataacacattattaatatatttttgactgggt

SEQ ID NO: 173353 - DNA, 359 bp, Glycine max
gacacagaagacatgatcttctatggcatttccaccgcaaagaaatcgaagcaccggcgatagatgaaggaatacatggtggacgaagattggcatgtgggggcacaagtaataccggcaaaaagaatctggttgtctctgacgaggccttactatgttttgggattgggtcccacacctcttatggtggaacaccgtgcaatgttgcgctacctgcttctgcggctcgtcatccatcatcattgggttgcagacagtggtgttctcagtgtctacttgaatggaacactggatgataactctccctacaggtaccgtcttaagttttggtattcccttcactatttgtgctgtgccct

SEQ ID NO: 173354 - DNA, 210 bp, Glycine max
ctcatgcggagtgccagaaacaactggctcctcctttatttgagtaagcttcggaggcaaagatatagtacttcctctgtcaggctcggtcatattcaaacctgaattgtcaccaaacctcagcactcttgctttctcagcctattctttaagttgtatctcccttgccagggccaacttgaggcgatcattgtacacaagatacttctc

SEQ ID NO: 173355 - DNA, 276 bp, Glycine max
  unsure (1)..(276): unsure at all n locations
acccacaganagagaggangcatcaccaaccttcttaccaatgttatcagattggaggtgtggtgtatctgaagagtgatgtgccatcccacctgctggttgacgttcgtcaaaaataactctagctgctatattatgaagagatgtaggcaggtccgtatctattgtctctacaccaaaattgacatttgacagtggtgatgtaccatgcatgtttatagcccaacagcatcagctcttttactttgggacagattgaaatcgtggttgtgcatt

SEQ ID NO: 173356 - DNA, 304 bp, Glycine max
caactacagaaacattcgcgaccggcggagcattgacaaagtcatcattttagtaggcccagcctttggtcacgaggttttgacggaatgccataccatatgatatagcatatctcttcaaatgcaattcctttggtcagaatttgcccgttattattagtgtgaaaaaatgcggcaactctgtagatgccaacatttattttcacagatgcctttctatttatttactgctctccattctcttttgtataaaaattctcaatatttatttggcatgcctgatatacattttcatttgatatat

SEQ ID NO: 173357 - DNA, 336 bp, Glycine max
ggaactctaagctccttgcaacctgcttaacaaaattgaaagcatcattctttgttgatgtatattttaatctccttacataaacaataacaaagaattttgagggtgttaggtgagacaaagatgtcaccttcaaagcaaggtcttcagatatggttgatcgataccgggttgagccttcaatgggacagcttcttcctttaaatataaaattagaattgcagagactggatagctgcaaaagaatgtcagacatcattccaccattgccaccttcaactcctaatccatcattattttgttcctcctcgtcggatggttcttctgcaactgata

SEQ ID NO: 173358 - DNA, 244 bp, Glycine max
aaaatgactgtttaaactcttgaaaacaatatgcagaagggtgtctacctgcgatggggtttgataacgaatgtttatctgtttaactctctacatacccatccatattactctctcacccaccccctctatatacactattctcttcatcaactctccacttctccactctccacttaatatttcacttctaccctccttcatacacatactcatccctctctaccacactacccttcaatct

SEQ ID NO: 173359 - DNA, 387 bp, Glycine max
  unsure (1)..(387): unsure at all n locations
aaatttgtgtgacgtttttgttagataacactctatcaatatggaaaagattgattcttaaaatcatcatagtagttaagagcaatattatgaggtgaattcagattctttcccacatgagatgaatatgcacaatctttgtcactatgtacacttttccaaattttgaatcattttgaagtaaaaggacttgatttttttggaaaataaataacaagtaaaacaaaaggaagcatattctggtgaatactctagccaaggaaaaagtttaaaccgacaagcttgaaatcgacaaggatgatcatcttgaccaataggtggatatacatcccataaaatggatatggtcaaaattntatatatgctctacgaatntcatcttgtcga

SEQ ID NO: 173360 - DNA, 211 bp, Glycine max
  unsure (1)..(211): unsure at all n locations
cataaggccatgttaaaagnaccttctcctaacaaaaaatgaactatatcagtatatcttcttctcttctttctgacttttgatctcttaattacctctacttgattctgcaaggactgcacatagtttatgatttcatccaacattactgccatacccattgnctgtatccattaatgaaaatataatatataagagtcggctcatgtgt

SEQ ID NO: 173361 - DNA, 419 bp, Glycine max
  unsure (1)..(419): unsure at all n locations
ggaagagtcgctaaactcgngaanaggcttttggggtcttctngaaancaaaccacggaggcggaagttcatagtgaagattgttcaaaattcacactgggaagcgatgagaaaccaatgttcggataatgctacggattcggcatccacgaccgcatattgtctcatcaccacatgtccttcgaactcgaccattcagactcanaggatgctaatgttgtttcattcaaagtcataaggaagaaccccttttgggtgcacaacagagaagcacttcggctcttcaacaagttcaacaaaggtcgctagcaactcggacacnatttattcggtaatgttgatatcctgatggccgcacacttgggtgtttgttttatgccacaatgtctgaagcatttacttggtattacacaatttac

SEQ ID NO: 173362 - DNA, 251 bp, Glycine max
  unsure (1)..(251): unsure at all n locations
atctttaagaacaaccaattcttcgagtatcacgtgaccccggagcatgaacggctgacgattgcctccttctacatggatggtcgtgctctggcatggttccagtggatgacgagcaacagacagttcatatcctagccacttttccttcaagccctgaaatccagattcgcgccttcacaatatgaggatcctactggcacattatntaaattaacccagatagatacatttaacgcttacttctccga

SEQ ID NO: 173363 - DNA, 384 bp, Glycine max
  unsure (1)..(384): unsure at all n locations
taagctnctcaagagaccgactctnggtgactgttatcaagagactgtcggtgcgttttaatcactacacacaaaggagttatgccctttgtggctcattgcaagaagcggaatctgcttcttggttaaatcactggacacaaaggagtaacgtcctttgaggttcattgcaagaggtgggtttgtctcttggtgtaaacactcaacacaaaggagggaagctctttgcggttcatttcttgtacagaattttaccaggatagtggaaatctcaagcggcgtgcttggggactatacgtaggcacgagttgtggtcgaaccagtataaatctggttttgcaatctctcttgccttatctcttctactttctgttgtctctacat

SEQ ID NO: 173364 - DNA, 347 bp, Glycine max
  unsure (1)..(347): unsure at all n locations
gcaagcttctgggngacatcttgacttgcttttcancttacnntcaccacagattctgccttcttctattttcagattgggaatgcctctaacagcacctttgtcaatgattttcttcatgcctcttaagtgcagatgtccaaatctttgatgccatattctgacttcatcttctctggagaatagacatgtggaggagtaactggtttcttgaggtgtccatatgtaacagttgtctcttgatctgctgcccttcattacgactcttctcttatattcgtcaccacacattctgtctttgcgacagttcattttatccttaatatactattgacttattctttcta

SEQ ID NO: 173365 - DNA, 323 bp, Glycine max
  unsure (1)..(323): unsure at all n locations
acatcaattgtaatttagagcaaactcatgcacatacttccttacgaacattcactcgcacaagatattcttctaactaagaaaaacgcacccacacacaatcaatgcaccttcgttacctatatcacttatatgtacttccaatgtgtatttgctacctacatcacatgcatttgctttgctaatattacatacatgcatactcaaagcactttggctccaaatattgcatacgtgcatattctggtatttctaatacctatacatacancaaactcgtgatgaatcttggctacctacacaataaggtgctacatntcatg

SEQ ID NO: 173366 - DNA, 373 bp, Glycine max
  unsure (1)..(373): unsure at all n locations
aaatgaagatgaaagccaacaaagcaagaaatgaattgaaagtctcagattcgaaaacttatcggttgaagaccaaagaacgcacgaagaacggcagataatcttcacgatnatgctcacggaaacgtctcggaagcatctcggcttggattttcttcacgaatacgtgtntctncactcaaaacccctgtaatgcatagggtgagagggcaagatgctttagaacagcttcctctatttatcatacgattgatgtgaacttaagtggattgtctttcatatctacgtcccagcacaatagttttattgatgttttattgtcatttgttaagggtgtataacattgcttattttcgctttggttgaacttaat

SEQ ID NO: 173367 - DNA, 270 bp, Glycine max
  unsure (1)..(270): unsure at all n locations
tcagggattggattgtcatcctccaaaaaggggaaaatggagatgcaattggctctgacgttttgatgatgctcatgatgatgggttgcaattgatgcaaatgggcttttcaagataaaattcaaacaatacttcagattacaggcacaacataagatgtcactagaatttaggaaaggaattctaattgattacaaaggttggccagtgattaaaataaaagtgttntaaaagtttactctctggtatcgatccagagatgtatcattc

SEQ ID NO: 173368 - DNA, 307 bp, Glycine max
  unsure (1)..(307): unsure at all n locations
acctaatctcctagatcaaagacaacttgttttcgacctttattggcatgtttagcataatttntagttctcctcccaatttgagccttcacctattcatgctttctgttcaatggccggcaagtgcactggatcatgcaagtagtataaaacggtaagtgaataccgagtatcgaactctcagggaacttgttttacttggtaaagccgtggntcagtaaataagtgtctttggatgatactttggtgtgtggtatggacaagtatgccaactaaactatttaaagtaaatcacgtgagtagtggt

SEQ ID NO: 173369 - DNA, 330 bp, Glycine max
ctgcatgttcttctatctctgtgtgtacatcttgggttcccccactgattactgcgcgctgtaattttctcgtcacagtcttttaaaaggagaaaatatgcgattgatgcttcagtcctcactttgcgctttaaaccatgtacaatttctgataacattgagccttttcgttcaatccatgggatgccccaagcactttattaatactgaacctgatcagctctcactaaaaggattattgcattcgaaaatgctcatgcatacgcatacgcatgcatattttgttatcttatgacataagcagaatcgtcttaggtagtggtcaaatgc

SEQ ID NO: 173370 - DNA, 245 bp, Glycine max
caccgacttcacctccagtaaaaaggaagtcccctgtatggctatttgccaaagcataagtattaccaacatgagcttcaggatgtccatacaacacatcaatactatatcgtcccataaaagtcttactcctaaactccctttccacaaaaaagtacctccatgacttatcatcatccacaacacctgaacccacaggcaaggaagctgccggaagtccccacctttgacacttatattatcat

SEQ ID NO: 173371 - DNA, 377 bp, Glycine max
  unsure (1)..(377): unsure at all n locations
aatcgaatcaatgttacggtgttacaataatttacgcacatgctctaccacctgaactataccccttgattgtgcttctatgttttgaatgtttgtagcttacagttttaatgatcattagaccgtggtttctcaataatataataatagtaaggacaaaanttatatgcaattcgataggtgcctttggtgttgttctcctactagacttgaagtttactctgggaatcctgcattggcatttagtgttaaaccttatttgacgaattaccgaagtgaaacttcaatttcttaatgaagacaacaccatatgtatctcatatggatctggatctatgttacttctcgaatctatgataatgtcttattatgacatc

SEQ ID NO: 173372 - DNA, 349 bp, Glycine max
  unsure (1)..(349): unsure at all n locations
ctcacgaatattataattntttctaatagactgcgggtctaaatcttcttactaccaacactaacagtgaccaatctatggtggatgatgagatatcacccaattcagaagacaaaagagctaagaatgaggtaaagacagatatttaatgatattgcatgttagggtgatggggtgtttttcttcttcatctgtttcaaaattgagggttcgctaccaaccgtttgtttttcttttttgtcagatggctgttcttcaagctgatcttgaagaatgaaattgaaatctaaagttggcgacttacttatgatgtatcactatacttctcccttcaattatttcttttttt

SEQ ID NO: 173373 - DNA, 377 bp, Glycine max
  unsure (1)..(377): unsure at all n locations
ttaagcgcctgcggcatgcaagcttctggacatataggcctcatcttatagtgtgtgttgtctcacaacagatagaattcttcacttgttctttgtttgatagaaaatggtcgttggatcatttattgcttgcattaaatgcatgtcttttcttcatgcaaagagtagactctttgttgctagcgtcttgaacactacacagganatgccttcctttttgtcagagtaagtctatgtagcagagctcttcttttgatggtgattgagaaattttagattttgacttcatttatccttcataggattcaatagatcataggggaatgttatgcaaaataggtcccnacacaaaatattaaatgaagtcttaaatgtca

SEQ ID NO: 173374 - DNA, 483 bp, Glycine max
  unsure (1)..(483): unsure at all n locations
tcaagaataatggcctcatcaaacttcttgttcccatttttttattctctttatatgcctactatgtttaatggagagggttaccactacatgaaaacccgaatgcaaattttcattgaggcaatagacttaaacatttgggaagccatagaagttggaccttatgtacccaccatggtggctggaaatacaacaatagagaaacctagagaagagtggtctaaagaagaaagaagattagtgtagtacaatttaaaggctaaaaacatcattacctctgccctaggaatggatgaatattntanggtgtcaaattgtaagagtgctaaggatatgtgggacactctacaagttacacatgagggaacaactgatgtcaaaagatctatgataaatactctaactcatgagtattgaattattatgatgaagacaaatgatagtatacaagatatgcagaanagaattacacatatagttaat

SEQ ID NO: 173375 - DNA, 319 bp, Glycine max
gcatccaatctttaccatgaagtttgactgaaccttacaagtacctagctaggagacagatgtttttatattagaccttttcgaagacgtattaaaccttgatgttgctagatgcatgaacattaaacatattttgagtgcatgatgatgggaatattgcatgtggtaaaacgtgctcatgatcacgtcaaaaatttaagaggaagacaagtggaaaagttatatctagttgagaagtacatctagttatatctaaaaatgaaaataatggtgagctagctaccatatcgtaaaaaaaatagtaatgtttttaccccac

SEQ ID NO: 173376 - DNA, 342 bp, Glycine max
  unsure (1)..(342): unsure at all n locations
tacggaaggtaaatgaaangaatttttctcgtctctttcatanggggaccaccaagggtacatagaatgaattgaaaagtttgatttcgggaacttaccggttgtataccgtataactacgaataacgaacgaatgatggcggaaaatcttcacgatatcacccacgtgaacgtctcgaacgattttctgaagcgcctcggcttggattttcttcacggaaacgatttttctcactaatttcaagtgatcctcagataccaagatggttgaatgcttttgttcttccctcctccccctatttatatggaaaagagggaaaagcttgccacccatctcgccca

SEQ ID NO: 173377 - DNA, 392 bp, Glycine max
cgatccttcgacttctggcgaggcacctccccaagccgaagagggatgtgatgcttcaacttcaaccagcacatagagtagtgatgatctgctgatgcctaaggagttagcaacagccaaccatcacattgagagcctttatatgaagagtaccacttcagctttgcatgtcttgcaggatatacgaaagggaagctcaacagttagcatgtcttcattgccaccattgcagataagtggcttggaagaaacatggaacataatccctattctggaacaaacagccaagttatgtgcttgagtacattggggattgtacactagctagttttgtgggttgagagttcacctttatttaatttttttacctttcaaaactagcgtcttctttc

SEQ ID NO: 173378 - DNA, 473 bp, Glycine max
  unsure (1)..(473): unsure at all n locations
acagattctcattatacatagcttgcatgtttctttttagcaaaggccaattatgagtgtagagcagttcattaagaaagtggcctggcctggcctggagcctgaccttcttttgtgggagataatgaaagttntacagcccatgcacctcagctgcatgagccataaccagaaaatgatcaatcatttgaagccaccatccctggagttgttgattttgcanaaagaagattagagacgagatccaatgatgctgatcatcctggaccagtgtctgcatcaactgatgcaccatttccaagatcggatccatcttcacctcagcatgcatcagactcttccactcttgtcttatagatgcatgatggctagactacaccagtcctgtctacgaacacctctcctccatctacccctgtgcttcactaacagatgaggatgatgttatacacatgataccccggacagatcat

SEQ ID NO: 173379 - DNA, 397 bp, Glycine max
  unsure (1)..(397): unsure at all n locations
agcttacccncactattaccctctttcacctactatacctatcaatggtaagaaaatgacatcggcagaaatgcagttgagaagagaaaggggcctatgctntacttgtgatgacaagttntcccctagccatcgttgtcctaataagcaatattttgttctacagtgggaagaagaggatgaacctgcattacaaccagatccaccagacgaggttgagacagctggtgaccctagtttgcaagatcatcatttgtcttataatgctttaaaaggctcatcangtcttggaacaatgaagtttcaaggatcaataaatggatggggagtgcatattctactagatagtgggagttcatataacttcctctagcctagactatctccatgcctgaag

SEQ ID NO: 173380 - DNA, 440 bp, Glycine max
  unsure (1)..(440): unsure at all n locations
tatcttacctatctatctcccagaagactttgcatagaatttatatataaaaaacacgaagntctaattcaagatgttttcttttgtgcatgggcataatgcaatcactctatgtctagcattgattttattaagatgtccctacctttgagttctactaaaaattatcctctctcaagcgactaatccctaaaactgatgcatataaaaccttcaatgtatttctactaaggattaccctttttcaagcgccaaacccctaaagatgatgcaaggatgaagcatataatacatttggtggcattttatgcctcccaagccctaactaaaggggtttagccttccattgtcatgagagacttttacactntanggggttgatatggatggaagaagatggatggatagaggaagaaaagaggataatggacatatataga

SEQ ID NO: 173381 - DNA, 438 bp, Glycine max
  unsure (1)..(438): unsure at all n locations
tctntctaggatcctaggaatgaagtacatcgctcttcttgaaattctagattcttgactcgaatcgtgctcatctntggcatcatcaaaacttcacatcatatatgcttctacaatctccccctttttgatgatgacaataatctgaaatcaagataaacgatatacaatttgataatgcgtgctcacaacctttactccctcttaagattagaatntatgcctaagttcatgataaattctacccttgttctctcccncgttggaaacatcaaaaaggcaaaaacgtctggagaaaggaactaagacaacattaaaatcatagcacatattatccataaactgattcaatccatagaataaaccagacaagtcttaatcatccaaagcagagtcgaaatataccaaacaccaaccataacataatggttaacatct

SEQ ID NO: 173382 - DNA, 472 bp, Glycine max
gctaagcgcctccaactgcacaaggctcttaatatgcgaagagtagcttcttgtgttccttcacccgacgaagacactgacataaacttatcttatccatttcggacaaagtatggcaagcggtgggcaagtatattttcttcccatcaaaccttggatgcaattgtaattgcgtgcccatatcagctagatcttgacgggtactcaagccatccttcgccttgccttgaatgttatggagcgtcccaatgacactgtcacaaacatttttctccacatgcatatcatcaatacaatgtgtaacatcaagatcaaaccagttcggaatatcataaaacatggacctcttcttcatatgcactcttacttatccttctttatgactttccaaatcattattcagctgttgacccactgatatacccgcccctagtaacggattggcgcatatatgctcttactccattaaagc

SEQ ID NO: 173383 - DNA, 330 bp, Glycine max
ttattaaaaactaacatttctctcaccatcaattaataaaaaactcccttattctctctaatagacgaaacagtgagaggagtgacataaatatataaatgcacagattacatacaatcgtgccagagactctaacttacttacaagtgcagaaacatcaaacacttattggtgcctcacatgacaagctaccagcgacaggtgcgataacaatagagacaggacagaattctatatcgtcccatcggagctaataactttgtcttgaaatgcctctgacccacaattacacctatattgtgaaacctgaccgcagtgtcaccgtcactc

SEQ ID NO: 173384 - DNA, 479 bp, Glycine max
  unsure (1)..(479): unsure at all n locations
taagctttcttttatgcaactaatattcaaaatttaatgtctttttccactctgcaaaacatcacaaatgaacaagaaatgttagcaactataacctcaaagttaaagaattcttgtcatgcatggagtagtaaacaaaagatatgaagaaagtaatagtgacaactaacaattacctgctctctcagaaatatatgttaagtttggtgacttgtataatgactatattaaaattcataccaaccatgttttctaattgcttggcaatgtaaaaaatttaacgctaataatgcatagaaattaaactcttcccatatcagaacaacaaggattaatgagagtgaatatattaccttcccattgcatcatangtgcctgctagattgtatagacccctaagtgtctggatatatggacatactctnttccaatatagtctggctcttaaacaatctgctgctcattatagataacactga

SEQ ID NO: 173385 - DNA, 473 bp, Glycine max
ctaagtacgaggatgcagcttatgagagagtcaaagatcaaattgattgtatttatataagttatgctaaacaagccaacaaatggagaaagaatgttgtcttcgaacccagagattgtgtttgggtgcacatgagaaaagaaaggtttccggaacaaaggatatcaaagcttcaaccaaggggagatggaccatttcaagtgcttgaaagaatcaatgacaatgcttacaaagttgagctgcccggtgagtataatgttagttccaccttcaatgtctctgatttatctctttttgatgcagatggagaatccgatttgaggacaaatccttctcaagagggagagaatgatgaggacatgaccaagagcaagggaaaggatccacttgaaggacttggaggacctatgacaagggctagagcaaggtaagccaatgaagctctcaacaagtgttgccatacttattgatac

SEQ ID NO: 173386 - DNA, 414 bp, Glycine max
  unsure (1)..(414): unsure at all n locations
aatgagaatggggtaaacttggagcaaactctcatctcaaacaagtctatatcatcaatctaaactcgctccaactggttttatgacataaaccctaccgaatcaaaatttgactcctcaatacccaattttaccctagaaatggctcttgttttcactttggtcactcatattcctcatttgcacagtctaagctttctcataagtcctaaatgacatttcaaactaggattaactccctttaacctccaaataccactaaatccagatttgtgcttccaactctcaaagcctatctctttttccactcataacaccacattctgactntctaaccctatgttaactctacccttcatctctagcagttntgcatatgcaatttcagcacataaacatcacaagcatcatcat

SEQ ID NO: 173387 - DNA, 396 bp, Glycine max
tagcggatccagatattgagcatggtatgtaaatcaggatgtatgtattcttttattgtatatttgcaaggtatgaaatttcttctgttgagaatcttaataaaatcttttcttttattgtggcatctaatatatcttattaatgattaatatctatcgagaatccgatgattactcttattttggaatttgtaactctagtcatgtgtttttctcttagactctacccattcagactcacactaccctactgacctgtcaactaccattacctccctttatcctccacacaccatctaatccaggattgttcctcccactctgataaacttatctctgttttcaccataatcccatattcttcctatctaccctatgcaactctccctccactct

SEQ ID NO: 173388 - DNA, 484 bp, Glycine max
ctaagcttcccgaggcgcatcacaattgcaataccaataaaataatttgctgtgtttattcactatatatctgctaatcgaaagcaaatattcttttcactggagggaaacacacatgtagagatactgaacttcacagaattcattatactgtatagtacaaactaaacactggttactacatagaacacgaccaatatcacacccagatattgtaagagaaaaatgaggatagacaaaaagaatatgctgagccacattgtgaagtgacagacattatagaagcccggagcaaaatcctgaggagaaagtctcacttatgcccccggaaatacatgtatattttctgcatacacaaatgataaggaaacaatcatgaagcaataaagttaaacacgtattagtaaataatttatgggcaagtcgatgatgatgaagtaaaagcatgtacaaaaaagctacttgttgagaagtatggtaaaat

SEQ ID NO: 173389 - DNA, 311 bp, Glycine max
  unsure (1)..(311): unsure at all n locations
catgcaagcttgcatagctcctaccttttcnctagattcaacanantatagcaactccatgaagcctgtttcacagcaagaaagatatntgttcttagcttttagttntactagatatggcatacttcanagggctacgtgacaactgtaattaagatgaccctaaagccaaattgattgtgttttctgttgaaagttcaaaaagattactttatctagcatacttctgcacaactaattaattacatcaacttataattaattagaaattgttgaagggttacattttatgaagttgatatgcatatgag

SEQ ID NO: 173390 - DNA, 319 bp, Glycine max
  unsure (1)..(319): unsure at all n locations
aaacnccattggtttagctttcattttatttcttctggtctttgagtattgcttgtctctttgattccttgtttgtgggttgccatatatgaattggaaagaggattggtgccatcccttgaagaatttgagtccagaagtaatgtgccaaccaccttaagagctattggactaagaagcactccatatngagtgaatcaccaaagagagaacaaccaccaaaattgatgaaccgtttgtaattttgtaattngcaatttacttaccttcattgctttcaaagttttgtaacaataaagcctttcattggaagttgtgt

SEQ ID NO: 173391 - DNA, 440 bp, Glycine max
  unsure (1)..(440): unsure at all n locations
ctataaatagatagtctctctattaatantatcatcaataacctttacanttttttaataaacttgtacaatttcttctaaccattntacttttgggaatntaatatataataataaattattttgagctgtataagttataattttacatntctatttttatgtcatatcttanaatcacatatgtgatacaatctatattaattntaaaacgttaaattattctctttattctgactntgttaatcacattttttgcaggcaacaacgctattgaattattttctttattctgactntgttaatccgaaacataaccaatgtgatattcaatcctttgaattaattaaaattaattntcattaacttaatcaactaaaagcatactctaatatatgttatcnttgttggaccttatctttcactcatttggacttcaa

SEQ ID NO: 173392 - DNA, 419 bp, Glycine max
ctactcttaaaacataaatggcatacaaccttctccaataaacatcaatgttaatttagagcatactcatgcacatacttccttatgaacattcactcgcacaagatattcttctacctaagaaaaatgcacccatgcacaatcaatgcaccttcgttacctatattatttatatgtacttccaaggtgtatttgctacctacatcacatgcactcccttggctaaatttacatacatgcatactcaaagcattttggctaccaaaaatggcacacgtgcacattctggtatttccaatacctatgcatatacaaactctgtgatgaatcttggtatctaacaataaggtgctcatttcatgcttatttatgtgcttttgctcctaaagcgatgcaaatcaagtgtgtttctttactga

SEQ ID NO: 173393 - DNA, 378 bp, Glycine max
  unsure (1)..(378): unsure at all n locations
ctgcagctgagatgaggaagtgagaatgtgatancttctgctnttattcgcngaccacagagtggtacttggagatatgtcgcgggggtcacgagacctttgggatgtcaagtggagtgctattgcccaaaaccaagctagaccaatcccgacccaacccgggcatagtcagtcagtgagaacctgtgatgtacctaaacaggcgagctcctggcagtcaacagataaaaggaacaaagaccacatagcaaggatgcttgtgtggtggctggccaactgtgaatcttgtgtgatatatgaggtatggcctctggtaatcgatcaccaaggtgggtaatcgattcaaggcttaaatatgaaacatgatgctaaatggtc

SEQ ID NO: 173394 - DNA, 474 bp, Glycine max
  unsure (1)..(474): unsure at all n locations
acacttaaatctcagcttctactgaaaatcatttcttggtggagttttggttgttctaaangtgacgnnacgcattggaagtgcggtatacagactttgtggttgatttacggatggcctttgtggataactgggcggtgggtaatgagaatgtttgttattggctgaataatgacatttgtgggttggtgggaaacttggctgtatatgaatggcagtcacagcatgagcttctccctcattctcacccttttcatttgccccagttttctcattcgtccaagtgggatgattaaatttgcctcttttcagacctgctttgatctctctgccggcgaattccaaatccgcaaagcttgaatgtgtgtaacccactatttccgtaatagaacactggtaacatgtctactatcattgtgataatcttcttctcttgtattgggggcgctacttgagctgacaagtctcttcatc

SEQ ID NO: 173395 - DNA, 291 bp, Glycine max
  unsure (1)..(291): unsure at all n locations
tgaaagtntattcttcaatcagtgggcgaccgagtgtatagtaaagtaaattggactgaaattttgtagggtgagcgttccgtttacaatcgtaaaaggtgaagtttgatntatctattgatattaccaaaaagtaggtgatccttcaatacttccctcaatacactcaaccaaaattgaggtggaacgtttttagcgtgtaataacattaacaagtatgaagtatgtgtaccaaaaaaatcanaagcggattgaaatattataattttaagtgatgccaatgagtttctt

SEQ ID NO: 173396 - DNA, 493 bp, Glycine max
  unsure (1)..(493): unsure at all n locations
ctatgcttcaacttcttggcagaaccttcctccaccaaccaagttctgttctcttccacaagatattaccgnatcacaaatatttaagaaaaaaaatctttcaaatcctcctctaatagtgaattttctgtagcactttatgcaaatacatcttccaagttctaagtcagattctagaagaaatgccatgatattgttcacagtaataaatatccagagtgagaagaccacttatcaagcatctttgaatgctaataatactgctactgtttaccaaaaaacacgaagagcaaatccatactcatcctttgtatatgattatttccttatgtaaggttcttttgtgtcatgaaacaaacctgagttgatcactcgacttccaatcatattgaatgactaaattcgaccaaaccaggaaattatattggcctggaatctgttgttgtctttaattagtgctatcagatgcattaaagcttttgaaattcatcgg

SEQ ID NO: 173397 - DNA, 332 bp, Glycine max
  unsure (1)..(332): unsure at all n locations
gataatnacatttattccagaacttgaaaaacaattntaatgcgtgtaaaagaaacatgaagacttgatttaaattaatcaaatggccaaatatgcttattagaaaaacctttaaacaatttaacctaagtcttgaatcttgtagtttcttgacttgttcgtgttcaagatttttcatgttattttgctttcgccttttcattgtttgcttcttgacatcatcaaaacctacaacattacataatcatacgtatgagagtcgaanatgggtctcccctattgttgattaagtagaacaatggtaagcccatagtatgggtggtagttcttta

SEQ ID NO: 173398 - DNA, 475 bp, Glycine max
  unsure (1)..(475): unsure at all n locations
taagcttaatgcaaggaaacatgcttatggctaggaatccttagttggttttatgattagaaaagcgcgaaaatagggacttttttgtaaggatttgagctgccccatgattggcactttgcacctaagtaacatgggagatgcttttcaatggtgtgtagatatatgtgaatatatggcataaaaataccttgcaaagtgaatgaatggtaaataatgcatctcaagatatgtatatttgtggataggtagcataagaagcttttcaaaaaatgtacccatgccataatggcacaagaatgcttcccaaatgaatatatgatgtggaatngcccctcaagagtaggtagatgacatgaaagttccttttcaaatacaagtgtgtgcgtgatgtgagaatggctctccaatgtgcatatatgtataaataaatatgaatggaacaacaaanatgtgtatggtaataaaatacttc

SEQ ID NO: 173399 - DNA, 401 bp, Glycine max
  unsure (1)..(401): unsure at all n locations
agtcacctgcggcatgcaagcttggatattcaacctgatgatgtatctanggtttagntaattaggctacagcatataacacaagagcacgattgattagagaaatatatttctatgcatcagcttgtttgttagaaagacccaacatatctacctactgctgtcattntatttaccttgcattntatagtttttagcataatagtttagtttaaattctgtctgaaattatcacttatacatgttatctcaacaatgcttcaattctgaacttaatttaggctaacattagttccctgtgttcgatactcanattcattcgttttaatattaaatacttgatgatccggtgcgctttctggtaaacccncattgaaatttccttgagacatatatgcaca

SEQ ID NO: 173400 - DNA, 430 bp, Glycine max
  unsure (1)..(430): unsure at all n locations
ctaagcttacaccagtttattttctcaaacttgagttgtgtttgactctttactaagtatttcctaattagatgatttagatgatgcatgttaatgtgtggagtcctatgatgtcacaacctataatcatctattttacttaccaagcaacttagctcatgaaatgatgcatgttcaacatttagcatatagatattacctattctctttccaatgatgacacctttaccggatatgacttcacttatatggcaataatttctgttgaattcaactttcaagtatttatcacaatgttgactaatgctgtagtccatccacatataacacattctttatctaattgttccctatattcgtttctcccactattttttctttgctattgtctccaaacatgacatatcctccacctttngacacaaagtca

SEQ ID NO: 173401 - DNA, 263 bp, Glycine max
agcatacttaattactgatcaatcagcgaatcggttcaacttgtgattaatttatattggcaaaccggtatttggttaaatatatgggctgaataaattaggtgattattcatacatcgtgatttcttcatcaccacataaaacatcggtttaagatataataattcataattattatatgaaacatttctgttataacaattcgagtatctgaagaggacaaattgcttaacggagacatatagttgcggatcacatctgat

SEQ ID NO: 173402 - DNA, 476 bp, Glycine max
ctaagctaaggtgaactgtaggaagttggctgctgatgctcttttccttttttcacttggagcttgccaagccaatgtttcatattgggtttttgaagacagcctttgttatgaaacgagaaatgctccttatatttcgaggaacaaaggacatcctatgaataagaagaaggataagaggatgataattttctgcttatcattcatgacctcagtacagctatatgggaaaacactatggcactcaaagcatagcactactcctaacagaattattctcattgtctggatgctatggcatcacatctcattcctttcacacaaaatctgacaaatacttgggtgggtcgctcttcctttatggcctcatgttccctctgccatcagtcttagctataatgcgttgtgcttgcttcaactgctctaatattctagctaatgaggtacttcgcataatattgatcgaataaatatat

SEQ ID NO: 173403 - DNA, 357 bp, Glycine max
tggaatggataaactaaaatcacgcacgctatcaaataagcgcatataatttatagaatacattagacaatttagcagataactggaaaagttatatgattcacagagtttataacttgaaataacggcgtagtgatgacaatcgatgacgtgactgttgtgtgtatataacaaggtaaaactatatacaaggattttcttagatagtgaacaataaagataagtttaatggtaaattgtatcacaaaactcttattatcttacaatatctgccactaaagtcttattctcataaatcttgtcactcaactttcataattctacaaatgttaacacttaagattttttcacgaattt

SEQ ID NO: 173404 - DNA, 314 bp, Glycine max
  unsure (1)..(314): unsure at all n locations
atatatagcacactgtgcgtttganttatggaaaacacaccgtaagaagagaacaataacgaaggaaaacgaatagaacatatataaatgattctttttttcaaattgtatgacaagaaacaaataaacgataagaaaattagtattgttctcttcttgtatagttgtatagaaagaagaataaaaattgtgtttaaaattataaaacaatttaaaacaaaaagataaaaaaattgagaaaaaaattgtttaatttgcgcatganagagttttttctattctccatcttctatgttcgaacataataatttaat

SEQ ID NO: 173405 - DNA, 420 bp, Glycine max
  unsure (1)..(420): unsure at all n locations
acctaacagcactcttaaatttattcaaacttatgcccaagccatacaacatttcaaatatttttaaatttctgatgatgaaaaatatactttagtttaatcttaaatattcaagtagaatactagtatggttgtcggtctaataaagctaaattaatgttattcactgtctgttacctacatcaacaaaccctatatcatactgtatacgtgatatacagatgtttgaatgttttaaaagggaattgattcttttaaagtattttttatcttgaaccaaagaataggcttctngatctcaaaatacgcaaagcataaattcaatggcaaaatatgtaagataccacacccatatgacagtaccacttggactcaactaaatgcataacataaattgaatggcattccaaacactcgtca

SEQ ID NO: 173406 - DNA, 216 bp, Glycine max
  unsure (1)..(216): unsure at all n locations
cgctccggagtatgactgtcatcgctntatgagcgctgcgcaccatcagcgcttcgaggccatcaagggatggtcgtttctccgggagcgacgcgtccagctcagggacgacgagtatactgatttccaggaggaaatacggcgccggcggtgggcaccactggttactcccatgggccagttgatccaaaaaacgccttgagttatttccaatgc

SEQ ID NO: 173407 - DNA, 406 bp, Glycine max
  unsure (1)..(406): unsure at all n locations
acgcagaaaatgtcatgccaatntctctaatttagaccaaactcatatgatccattcatgcacacacgcatgtgtagaaaataccctattatttacatcaacatacaaggatattcataacattctaattaccacacatatatgtttttgtggaaagaatacttacacgcatgctcaatgtattgtgccaaaattacatatgttcatatcctaactatttgctaccacaaactaaccacacatatttgaagtattttattaacatacaaatgtttgtggttcgttcctatttattatacatatatgcgcattggagagccaatctctcgtcacgcacatacttgtcattgataagatacactcatgccatctacccactcttgatgggaattgcacatcatatatt

SEQ ID NO: 173408 - DNA, 294 bp, Glycine max
  unsure (1)..(294): unsure at all n locations
tgcaggccatgcaagctagtagccaacagcagggcacnnatcncattacacaacaagggcttagcgcacagacgcgcttagccttattcaaaggaaaacttatagaagcaaagaggtgcttagcctgataggtcaagcttagcgctgaacaaaaattctcaaaatcttaatgtctaaacacttgtcccgcttagcgcacagacacgcttagcgggctcatcacttacgttcatcagcagggatgaacgtgcttagcgcgacatggtccacttagcgctgtctatttgtaaccaa

SEQ ID NO: 173409 - DNA, 489 bp, Glycine max
  unsure (1)..(489): unsure at all n locations
gcacttagatactaagctgtaagataattcaagtcttatangcttgtttctcttattgaagaatcaccggagctgctaccatgttaaaaaaaaacaattacataaaaacatattggtgagaaaacacacaaaggacgatgtagaaacaaaaccactagtaccctttcagcagtcatcacttcttcttttcaaattatctatatataatatagaaagaaaaaaaatcacacccacaaccacataacatgtaccccaattaaaatcacacgaacctgaaacaggaacagagtggagccctttcgattccacttttctgccctttacctgtcatcattagaaacaaacaaacaaacgcacacacaattaatagcgtccaaaggccaaacacttcactcatcacatatatgtatatgaatagagatgtgatagagacacaaacaatacagagacagctacagagagagaatatangcataaatatacatacat

SEQ ID NO: 173410 - DNA, 222 bp, Glycine max
acacttttgcactttggtttaataaagaaaaggaataggtgagacaagataaaaatatatagcccgatgattatttacgtgctcggtagaaccgactacacaacgacagaatctacaaaaatctagttaaatggacttgttcctattatattcaatctacttcttgcttaatcaactttcatctcgctcctattctcctttttctctctctactttactact

SEQ ID NO: 173411 - DNA, 422 bp, Glycine max
  unsure (1)..(422): unsure at all n locations
taagcttacatggagctacatcagacactcacttaaagatgttngtgntttcttggctnncgncnctnnaattgaacctataaacataaatgaagccataattgacaaacattggattatgtctatcaagaagaattaaatcaatttgaaagaaatcaagtatgggaattagttgatagacctaatgatcatccaattattggaactaaatgggtatgtagaaataaaatggatgaacatggaatagtcattagaaataaggctagattagtggctaaaggatataaccatgaagaatgaatatattatgaagaaacttatgctccagtagctagacttgaagctattagaatgttacttgcgcttgcatcaataatggattttaaactttatcacatggatgttgaaagtgaattttaaat

SEQ ID NO: 173412 - DNA, 365 bp, Glycine max
  unsure (1)..(365): unsure at all n locations
aagnggacaccagaggcagagacaacattngttcaattgcagaaagtcatgacttcagctccagtgttagctcttcctaatttccagctgcccttcattctggaaactaatgcttccgacactggtattggagcagtattacatcagaatggccatccaatagcatttttttccaagatacttgcacctagagtgcaaaagaaatctgactaatttagagagatgttagcaattgttgaagctatagctaagttcagacactacttgctgggacacaaatttattatcaaaactgatcaaaaaagctggagatcattgatggaacaacccctacagacacctgaacaacagcagtggttacacag

SEQ ID NO: 173413 - DNA, 444 bp, Glycine max
  unsure (1)..(444): unsure at all n locations
gcactttaatctcagcttaatatgtccttcatggtgatttcagcctggtgttcntctgtagataaaagagaagaggggagaggaggcaccatccactatagaataagccatggaatgagaatcttcaccaccaagaaagtgtcttggataagaagcttagagaggaagcttcaatagaggaagagaatgagagagaaagagggaagggcgtgggaattgatgaaggagattagggagagaagttgaactttgaagtgtgtctcacaagtttctcattcatcaaagttatgagaagtgttacacatgtttctatttatagcctatcacaatggaagcttccttgggaagctaggggaagaaagcttccttgagaagctagagggggctactcacacctctccaatagctaagctcaccccatgtcaagatgcatgaaaatacaat

SEQ ID NO: 173414 - DNA, 378 bp, Glycine max
  unsure (1)..(378): unsure at all n locations
caggcatgcaagcttaagggtgctaacataaaacaatgttcattannttttataacatatatcaaacaattgatcaagtgattcataattataccaaaagcattttggaaacaagcagaaagccagtatgtacataagtacaggataacattgtccatttattaacctagtacacaatgattcatatttttgcaattaaatatatttaagaattaagagacttattaagggaagtacggcttactaatagtcatatattgctgtgaagaatntcatgtttctgtctttctctgtggtaagaagttaacaactcacttagcttggtattaagtatcatttgaccctcaccttatgtgatccgaatttaattattgaacg

SEQ ID NO: 173415 - DNA, 455 bp, Glycine max
  unsure (1)..(455): unsure at all n locations
atgtgaagagatggtgcttagcgcaatgggtgctctnatttgataaacaatatgaaaatgtttctaagtcattttctgcttatctcttcacacataatttaaaaaccctttgtgtgcattactagacatgctgaaatcaatcacaatcacaagcaagatgtcctaactagatgcaagaaataaaaaatgaagatagagaagggaaagaaaagctgggttgcctcccagtaagcgcttctttatacatcattagcttgatgcatcatcctattatctatgatccaataatgtccctacttcaaggactttgttctcaggtcttctttcctccatcacatgaactntaaaatagacatttcggtcaggtggtgttttatcttcatgagatagatcaaagatgatgttctgatcttctatgcccaatttgaacatctttcttctcatatctactacat

SEQ ID NO: 173416 - DNA, 316 bp, Glycine max
  unsure (1)..(316): unsure at all n locations
gacaaaannaaggaccgcccgaaacgctatccgtcctcgttttcttacccacaagaacacagcttagcgccatctcattttatccaatcaccttggcctatgacttctgtcatactacgtactcaaggaaagatgacctctaggcgcgataagggcgcttgcttcaactatgatgagatatggaactcatcacaccgtattaatggtcgagtcgtgtgttcattgagcctctatgatcctcgcctccgcatatcattgtggaaacacccaccctcctttgacccctcacttttgaccaccctttcccctccatagc

SEQ ID NO: 173417 - DNA, 323 bp, Glycine max
  unsure (1)..(323): unsure at all n locations
atctagagattcatttattgaacccgtagaataatatattcgagataaaagagaagaaaagganagcantagatgagaggaatgttactatcgaaaagaggcagaaatcggagactactaaaagtcgtttgtcttcttccctcanagctcaacatganaagaagaaagctctagagaaagagaaggcgttcccttcaagagacctggaaactcatgagaagaaatttagcanattactttcttctggttaagttaatttgtaatnttcttcatctgcagtctacttgtcggtgcntccnaacaaatttatatctttattgaac

SEQ ID NO: 173418 - DNA, 329 bp, Glycine max
  unsure (1)..(329): unsure at all n locations
tgaaatcattcaatgattaaagatgaccaatgtatattaacaattatttcattcagacataaaatgaactaactaattgcacatggtgagaactatgcaaggctcagcaaatcatatcatactctaaataaaccaaagacaaaactgggaatcgcacacacaatcatcaaccgcatgcataacaccacaaaataaccagttatgtatgctcgtaaagtaaataaacagactataaagtatcccatgcaatctgtgctaacaaatactacaggtactaccataacattacctgtgaagtgtgtaaagatgcngacactcctatcagcatc

SEQ ID NO: 173419 - DNA, 201 bp, Glycine max
taatcgattaaagtgttcttgatcacttattggaaaactttcaagaatgatgtaatcgattactatatcctcatagtcgattaaaccagagacccaagaaaatagacatggtctcaatatgaactgtgttatcaattacagatatatagcaccggatatactatactatgatcttttacatagtcccaagacttagtaaca

SEQ ID NO: 173420 - DNA, 79 bp, Glycine max
gacctgttcccttcttgttgagctcactacaacccttaaatgaaaacccatgatatcacccatatcccttaaggaattt

SEQ ID NO: 173421 - DNA, 475 bp, Glycine max
ttctgaactagcagcaagaatcttctgtgatgcttagcatcaggtcgtgttccattagataacatgttgcagaatacccccagtgatttgtgtgccattccaatttcagcatagccactaaacaaaacagcccatgaaactacatccttcttgggcattctgttgaaaagttcaattgcattttcaggtgagaagcacttcaggtacatgtccataagagctgtagagacagtaatatccaactcaaaaccataattgacggctaatttatgaatctgcttaccttcttccaaatttgaactggaagcacaagctcgcaatgcactaatgacagtaaccctgttgagttcaattctcttatctatcatttcattgaaaagattaacgcattagtttcagctccattatcagcataacatgcaaccatggagctccaagatataatatctgtatatgggcatttcctgaacaaata

SEQ ID NO: 173422 - DNA, 322 bp, Glycine max
cttcacccgacgaagacactgatctattactatcttttcccttctggacaaagtatggcatgctgggggcaaagtaattttcttcccatcaaaccttggatgcaactgtgatcttatacccatatcagctagatcttgatgggtattcaagccatccttcgtcttgccttgaatgttaaggagcgtcccaatcacactgtcacaaacatttttctacacatgtataacatcaatacaatgtctaacgtcaagatcacaccagttcggaagatcatagatatatgacctcttcttccatatgcaactctgacttttatccttc

SEQ ID NO: 173423 - DNA, 191 bp, Glycine max
  unsure (1)..(191): unsure at all n locations
taagnnntttcgctattgactttggtgcctttgcatttgcatacagcatatatatatatagatagagatacagatgtataggatattaactttaaaaaaccttagtgtagcatttaatgctattattatgaatatatatatcgttgactggctggtaagtgcaccaaattataaagcaactgacaactcga

SEQ ID NO: 173424 - DNA, 367 bp, Glycine max
agtttgaatatgatgtagaagaaaatgaatgtgagcctctttcccctttgaaagacttgtttaaaaaaaatgttttaacaatacttttaattaatatttgaacttttctcacctcctatcaccatccatcgcccgaccttctctcttcccctcacttccatccccctcccccattcccccaccttctcataccccttctctctccctctcctctcactacctctctcccccctcctccctcaatctctcatccctccacctaaatcactctccacctctcttatttttctacctattaaataatctctctattcctctcctccctactccctacccccctttctctctcttctcccctccctcatcc

SEQ ID NO: 173425 - DNA, 403 bp, Glycine max
  unsure (1)..(403): unsure at all n locations
ggttgtgggttcagaactgactcattgactcccattttgttggntcttgatataagcagaacattgatttgggtaattatttcctgatgatgataaggaaataagtatgactttatttgtcactatgatcaatgaatattcattgacacaacctaaagaaactgtctagataatttattagcagaaatgtcaattcaaaacaactttgggagtgtggatagtagtatataccttaagaggacaacatagagtttcttttcctttntgtcatcagaccatacttctaagtttgaagtctggcgcctggaatttttctttggggtatcactttgcaccatctncacaacattatctcncttttctccttctgacaagtcttcatacatgttctctactggccttc

SEQ ID NO: 173426 - DNA, 276 bp, Glycine max
  unsure (1)..(276): unsure at all n locations
catatatctggcgagaattcagaatttagctgacattatctgagcacaagtttttgtggcagatcaaaaaaatattctggtcaaactttgggcttatggggttcacatacacattattattgggcaaaatattaagagatacctattggactaaatatccgttattgttcaaggtaaattgagcgacctaagaataaagtaggaaaagtagagcgccacaatttgctggtgctttcatttagccaacacatnatgttttgatttttctataattat

SEQ ID NO: 173427 - DNA, 365 bp, Glycine max
  unsure (1)..(365): unsure at all n locations
attctcatcctgggtcaaggtttatggtgaattgggattttggctcaaagcttgtaaaatggctggacatgaagtatgtcanggtgttggtttggccagccggttatggataaaggggatgtcccacattacttccacgacacacatgcaacaatgatgatttggaaattttatgcaaaactggtcatgcatgcacctatgtggacacttaagcatcaagtttctatggtcatgtgacactatggatcacgatttcattcttctattcaagtcaacccaatgtttccacaacatgttcttttatcaattcatgcattcatccgagttcatattggcttttgggaacatttcacaaattcactctt

SEQ ID NO: 173428 - DNA, 176 bp, Glycine max
ccaatatatccttaagagggatgtctcacatcattgccctatggtcctaaaggcatcggtggagaactagggtccaaagccatttggttttgtgaatggttggctatcacttataggaatccatcagtttgctagaaggaagtatctaggttcacgggtcaggggctttcattctg

SEQ ID NO: 173429 - DNA, 364 bp, Glycine max
agcttgcatttggacttgcgatagtttcactccatcattaggattattacctgccatctcatacaaacaaatcaaacgtaacaagacaattatagtcgttgtttgaatacctcacccactcaagtgtagcacacaattatggattttctctaatgacaacactcttgccttttaccactctaattccccttgagttcttaggaaattcaagagattatggccacaacaaagaacaattcaccaatatgtgtaaggtaaggctatagagacaaggaataggttaaccaagaataaggctaacaatgtttttaggcacaatttaatgaaataaaattcagaattaggaattcaagaacaatccttc

SEQ ID NO: 173430 - DNA, 439 bp, Glycine max
  unsure (1)..(439): unsure at all n locations
actaagctaaagtatgcccgagtcattcatccctatgttatgttgttgttttattggcgancaaaanggccattccctggattataagggtgaaccaagctcatacttttacaaaaagggtcatcaagtcaagttgaaatatggaagtaaccggctcgcaaaattggggcaaaagatgaatcgagtcacatcactgcttcgtctactgccaaacatatttaggattattgatgtccttggtacttccagtttcaccttgacaaagatgtcatggaccatgttgaaaatctaaattgattcaaccccatatcttgcgtaaaaattcgcaatacttcaactgtacatcattcgcatgcatccatgcttttcattgggtgcattggctcgtgcattctttccttgaaaataaaataaaatgaacataatcattggtataaaa

SEQ ID NO: 173431 - DNA, 413 bp, Glycine max
  unsure (1)..(413): unsure at all n locations
agctntcaaataaacgaagtgtctctatggttgtgaatacaagtaattagagcattcttttatganattacacgacacaagatatacctncattattatgaattaacggtacaaaagagtcttcaagtcaagtgcacatgcagtgcatacaataatcaaaatcaagccaagcacanaacatgcaaaaagtgcacaagcatatacaatgagaaacaagaacattaaaaaacccaaaaacagcctgtaccgcgaacaggtgttctcgctctcccaacctcaaaacaactattcaagcaggcaattgattggtattggcggacgaacttgatggggctaagaatggctatgcggaacatgttgagtgatnatttggtggacttgcaaagcctgctttgcttgacataacacaactg

SEQ ID NO: 173432 - DNA, 231 bp, Glycine max
  unsure (1)..(231): unsure at all n locations
acaatgataataatatccggtacatgatcaagtctttcaacattntatcagtacaaatattggcttcacgtgaagatcgttatatatatatatatatgtaaagtagatgtgtggacattnttgtaaaatcaactttccttcctttgtttagtccctattttagaaaattgcatctcatatttaaatatatgtgctaattaatgacatttaaaaatttggtctctcttttca

SEQ ID NO: 173433 - DNA, 357 bp, Glycine max
  unsure (1)..(357): unsure at all n locations
caatcctatcacgcaacatggcggacaaaagtaggcagtaaacttaaatggccattattgtcaatgtagaaagtattttgtgcttcactatccatgttcacacattattgcagcttgtggttacatgagcatgaactactaccaatatgtagatgttgtttacacgaatgagcacatcttaaaagcttactccgcacaatggtggcctctcaagaatgaagcgacaattcctccttctaacgatgaatggacaattatccctgacccaactacaattcgtgcaaaaggtcggccaaaatcaactaggataaggaatcagatggatnggctcgaactgtctgagcaacgacaaatatg

SEQ ID NO: 173434 - DNA, 229 bp, Glycine max
  unsure (1)..(229): unsure at all n locations
ctgcagctgaatagggtatgtcaaacaaattcnnttcacttncatatatcaancgccttaaatacctgtaatataggccacaagagtcatgtggtacatcaagaacctttctactggaatacacgtggtcaagagtcacatggtatgtaagcttagaatcagtccatcacttccattcctacagcttgaatacattcctactttctcaggttacttcattcaatagtgg

SEQ ID NO: 173435 - DNA, 391 bp, Glycine max
  unsure (1)..(391): unsure at all n locations
aatgccaaaccaagccctgcttttatagactcttcatgtctggtcaagaggaccatttaaaagaattataacttttaaaaaaacctaaaaccaatttgaaaaagtcaaaaaccttttgaagaagtacatcttttgatttattcagaaacaatcgctggtaatcgattaccaaatcagtgtaatcgattacataaagcttttatgtgaaaggatgtgactcttcacatttgaatctgaatttcaatgttcaaaggcactggtaatcgattaccaaaacattgtaatcgattacagctttttgaaattatatggaacgttgtaattcaatttgaaaacttttataacaattttgtactggaatcgataccnagagtaaaactcttggtaacat

SEQ ID NO: 173436 - DNA, 228 bp, Glycine max
  unsure (1)..(228): unsure at all n locations
cctggacataaagagaacaaaacaaactctggntaataaccctgccaagtcagcaccatttgaacccattggggtgggcctacctgctccttgtggaatctttcactattcaccactcatgcatttgangccctcctcaatcgaggataaatgagtcatcttacccttgaatgaaaaccaagacaatcaatcacctccaagttcattgtcttcacagtggctgattca

SEQ ID NO: 173437 - DNA, 404 bp, Glycine max
tttcttcttcatcttttaccattttatttcacaaaaacaatatcttttctttgtattaagcgtctcctgtcaatggagggctatgaacatcattgttggggagttattctaatgagcactcttaatgtaaacttctaactatctatttaacgtgattctctggtgtcatagcttctgtatgcatttattttacatgcttgtggcttgatcatccatttgtatgcttggttacgtttcttagtgttggaaaatgctcgaaaaccttacaacttgatagaacagctagaggtttgtgtatctaggaatagaatgcagaatctagttatttatactgtgtgtgatcgcaactttttaaacgaatttgtgaggatcaagacaaatgctaaaagtaactattcttggag

SEQ ID NO: 173438 - DNA, 196 bp, Glycine max
cagaatggcctaacgagagggtgaaacaacactttgccaatgtgcaattaatcaaaattgagagaaatggatattaacacacagacaaagtgtaatatctatacctaattaacaaatgactatatatacaaacacataatggaaagtgaacaatacacattattacaagtagcatttacgaaacactatgtgtccc

SEQ ID NO: 173439 - DNA, 346 bp, Glycine max
  unsure (1)..(346): unsure at all n locations
tgcaggaaagtgttgggctcaaagtctctggatgaagcaacaactagaagactttagagtaaaccttgatcacattcctctangatgtgacagcacaagtgctatcaacctaacaaaanaccctgtcatgaattctagaactaagcacatagagataaggcatcaatttcttagagatcatngcattgagcttattgatagtgagcatcaactagcatacattnttacaaaatctcttgctagagataggtctttttcattagaaatgaactangcacactagatgcatcaagcatagtatgacattttgtttgcatagatgagatcacattgctatcattgtttt

SEQ ID NO: 173440 - DNA, 378 bp, Glycine max
cattctcaacagtcacatctttgtatgtgtttcttgaatggctatcaaaggcctatatatatgtgacttgagacacgaatttgctaagagttttgaagaacaaaaaggtcttatccttttaaaaagcaaaatcgtttgatcctcttacaaattccttggccaaaactcttgtgattcaataaggaattatttgagtgctcaaattgttcaatctatctctttcaagagagatttcttcttttcttcttctttattctaaaaagggattaagagactgagggtctcttgttgtggaagaattctaaacacaaaggaaggattgtccttgtgtgtttagaactcggtaaaagaatttacaagatagtggaactctcaagc

SEQ ID NO: 173441 - DNA, 329 bp, Glycine max
  unsure (1)..(329): unsure at all n locations
agcttgccttccaagaatgatatttgtctgtttcatgtacacaagtggtagtacaggtctgccaaaggtttgtttcttcgtcaagttttgttaaaggtgtccctttctgtgtgtctgtgaatgtataatctcttattcatatttgtgatttgatgcaaagtgcttttgtccagagtcatgcttgtgaataatgatnttgggtgataaaatatcaacaagaaccatatcaagacattgtattaatataatgaaaattntcttgtctgcaacattgagaaccaatatgatctccctcagctcagttctatgattccctttgatttgacagg

SEQ ID NO: 173442 - DNA, 346 bp, Glycine max
  unsure (1)..(346): unsure at all n locations
tcgcggtagagcttgcaagtgtaagagcctttttgttagttttcaatangnngaacnnggagaagttagtggaaacttggtggttgccaagaactgatgttgatacaaaccagtataaattctttgtgtgctttcttgtttaactaacaaaaggtatttgaatttgttttggatctcacatcttcttcctaaagaaaactatttttctcatcgtctaatttatttatattcatctgacgataaaagtgttttacaatgttaagaaaagctataaatttttaaaaacacaatttaacacgccttattgtgttatttgcttctacactctttattattatttataatg

SEQ ID NO: 173443 - DNA, 227 bp, Glycine max
taactcatcaagagttctaatgttggccttgttcacttcatcactttcatggtactttgttaggtatctcattccccccattttccagcactcttacactaagaccttacattataaattacaatagtatctttttacctcaattttgtcttcaacacatgtattgcacacttcgcttaatctcaactaagtcctattttcaacacacacataactttaaccaatac

SEQ ID NO: 173444 - DNA, 469 bp, Glycine max
  unsure (1)..(469): unsure at all n locations
tactaagcttacctttctaagatagctttcatagaagatttgtggttgtggagactcagaaattgtgattcaagatgcattccaatgagcctgattcctcacaagcacatcatgcttgtgtgaagaattgagttgtcttcattgccggtatatccgtgatcctgagcgttggatggacctcatgccttgaagcaagggccctaattagggaagaccactgaagggtattctccattcctaagtcgacaatgtgcatngagctctttccttgtgatgctngatatatgacttcatctgcacccatgataccaaaggaaatgtaagggcgtggctcgggtaatagattaccaaaacatctgtatctattactgctttttgaaatgaattggatcgatgtagattcatttgaaacttgtcaaacatttgtgtactgggatctattccataagtaaaactctttggaacatgt

SEQ ID NO: 173445 - DNA, 321 bp, Glycine max
  unsure (1)..(321): unsure at all n locations
tgcagctattaaaacccattggactatttgattctttttagtcaaaagacgaaaagccgcatggctanaactataaatacgcgcttattgcattattgtaagttagagttagtagaattggtaaattggtttaataaatcanactttcctgttgacattanntatgggaaaaagaaactaanaatggctggttaaatntagagttattctcttaanagttgaaatcattcatgagctgcaagaagctacccaatgtactgacttttggacagatgtaagtaataaaagatgttgatatttgcatatcatcaatatcaatca

SEQ ID NO: 173446 - DNA, 470 bp, Glycine max
  unsure (1)..(470): unsure at all n locations
aagctaacagacttaatgacgagagataaccagaactcttttctctcnttttatactagagtatacgatgcaaaagatttatagtaaatattataatcaatgacaaattttattacatacatatgtaattttattatgttttaaaatattttttaattaataattataaatatatttaaatgtaattgaaatgcattaatagtataaaaaataaatgtatcatttaatttaaattatgggataattaaaattaatactttctatataattaaaattaatatttttttctaatatgttttaatttaattaaaatgtataaaatatataaatattgttttacattatcatctaataataatttattagatataataagaattacgacatttggtagaattcatttaaaaattgtattaaaatgacttctagtaaaggtaatagatagaaactaaaatcttacacataaaatc

SEQ ID NO: 173447 - DNA, 373 bp, Glycine max
  unsure (1)..(373): unsure at all n locations
ctatnaccatggcggntaagatgtggcaacattacctgttacgtcaccctttcgtgattctcactaatcaccatagtctgagggaccttatgactcaggcggtccaaacgccgaagcaacatcgatacctcgtcaggctattgggattcgagtatagcattcagtatcgcccagggcgcgagaacggcgtcgcagacgcattatctcgagtgaatgaggaagacacccaggcttccttatatctactgtccattccccagttcgcctttctagctgaccttaagaaggagctagtcactcttcctgaagcattagcactactagagaaactncaaaaggaacccacgctagctccagaattatagttcgagaa

SEQ ID NO: 173448 - DNA, 464 bp, Glycine max
  unsure (1)..(464): unsure at all n locations
tgtacgtgagcaagattgtggaggatggcgtaacatttctttctattttgtgggngagcttcccaagggaggaactgggtggctcattcatgagagcaacanagaggatctgaaggaggatcttgatgaggacatgtgtgatgtttcctcatgggagtccgactataagggattttctagttgccgacctcttgcctcacctttttttttttgcatagtttctcccctgtggtggggttagtggtgactactatgggattgagtgtttccctttctttaacatatgtatgggtagacctatgttccagataattntccttgtactttttagtcattagctttctattatttgtattttggggcatatccacattctgatgtatctaatggtttcaaacttagtacttattgtatntaatctcccccaccccccctctctctatatataagcacattctgttcta

SEQ ID NO: 173449 - DNA, 391 bp, Glycine max
aggcagccttgtccaaatacctgaatataaagagcactcgcttaatccatgtttgataacgtaacaagtatttgcattaagttttgaaattatgtaaatctaaaattatttctctattgtataaaatctaaggatgacttgagccaagatgggagaaacatcgaggtgtgaaagaattagtgctaagataacaaatgccattttagtttccaaattttactgtatattaccacaccatgtcgtcactaccaaataccatgagccgtgatcaattattgtattgttactcaatcaaatcggtcccctattccacattgacatgcactttataattgtgcacaatatctttacgacactgtgtgggcgctcaaatgtactcttttatacttat

SEQ ID NO: 173450 - DNA, 363 bp, Glycine max
  unsure (1)..(363): unsure at all n locations
agcttcatgatgaatcaagagtgtanncatangatgttntgatgataacaaagatgataacaaaagatgatgacaaaggtgatgacaaaaagctcaaaggacaatcaaagaatgagttcaagatattcaagatagaatcaagaacacttcaagattcaagaggaaagttatttcaagaatcaagaatcaagattcaagagatcaagattcaagactcaagattcaagaatcaagaaaaggcataatcaagataagtatgaaaaggttttttcaaaaactgagtagcacatggatttttctcataacatgctcaccaaagagtctttactctctggtaatcattaccatattgttgtattcgat

SEQ ID NO: 173451 - DNA, 419 bp, Glycine max
  unsure (1)..(419): unsure at all n locations
tctaaaggaggtcaacaacaggaaaagggttgttttctntttggtgataaactccctagcaaaataacagtttttgcttggaggttaatagaagataggctaccaaccaagatgaatttacatatgagacatgtgcaactgcatgatctgcgatgtcctttctgtagagaagctgtagaggaggcatctcatttgttcttccattgcatcttcatccaaccaatttggtgggcatcgatgtcttggctgaactatcatactgcctttcctcttgggcctaaacaaaattttctacagcatatcttcactgaggtaaaaggattaaagattaagagatggagatattggtggatggcgggcacatgggctatatggaaactcagaaacagatatcttgtttcgaatgcatgaattgatgc

SEQ ID NO: 173452 - DNA, 351 bp, Glycine max
  unsure (1)..(351): unsure at all n locations
agctgggacttcctgaggnttgtgatctttctttcctcaggtgtacccaaacccaatcacctggttcaagcacgactttctctctgcttttgttggcttgacttgcatatctcgcatttttcttttcaatttgaaccttcacttgctcatgcaacttcttcacatactcagctatagcctgtgcatccttatgcttaaacatagcaatgttaggcataggcaacaaatcaagaggagtcaaaggattaaatccatacactatctcaaatggtgaacaattatttgtgctatggacagcccgattataagcaaactcaacatgaggcaaacaggcttcccaagatttaagat

SEQ ID NO: 173453 - DNA, 362 bp, Glycine max
  unsure (1)..(362): unsure at all n locations
cttacctatcgctctcacagacttagatttggagcctttccatccttgngttcggactctcagccacttatgatagccgccgatgatcccattactgcttcccctaagctctctgtcctttcttcacgccgcatcccatgccttgcgaactccttggagtaccctcgcgtttgtggtcactgaaaccccatgcgatgaaaggcatgatgctttcgtctgatggcacttctctcatggggtagccaagctgtcttatggcgaggacgggattataattaatacaaccccttgtttccatcaagagaacatttggacatccttcgcatgaagatagaatcctgattcttccttccttctagcga

SEQ ID NO: 173454 - DNA, 251 bp, Glycine max
  unsure (1)..(251): unsure at all n locations
gacatataaggggaggcaaaccaagcagcgaancccgnngggatagagacaagnatgcgccaactaccaacagaagaagnnaannagagnnnnacatganactacgaataatctatacctactgcaggactatgagggacggaaaattaaacctcagtgtgcagggtgtggaaatgctattaagcgtgagattttgcaattatgactnttgttgcgtgtttacaatatttcttattctgatttgtgccatt

SEQ ID NO: 173455 - DNA, 225 bp, Glycine max
atccaagaaaaggatgggtcaagaaaatagtacattcatacatattgtccatagaggtatatatagatgcagactttgccgagttagttgtaaataaaaggtcctcctctggatattgcatgtttctgggaggaaactagtaacatggatgagcaagctagaagcataacgtaattgctcgtgttattacataaacaaaatctcaagctatgacatacaatatgt

SEQ ID NO: 173456 - DNA, 414 bp, Glycine max
tagagaagttatatcttatctatacacacctctctaatagctaagttcacctccttgagatgagaagctagagcttatctacacaccccctataatagctaagctcacccccatgccaaaatacatgaaaatataaaaaaagtacctactacaaagactactcaaaataccctgaaatacaaggctgaaaccctatactactagaatggccaaaatacaaggcccaaaagaaagaaaaaacctattctaatatttaccaagaagagtggacccaaccttggcccatgggctcagaaatctaccctggggttctcatgaaccccagggccttctttagtagctctagcccaatcctcttggagtcttctatccaatacccttggggggtaggattgcatcatcccctccaccttg

SEQ ID NO: 173457 - DNA, 439 bp, Glycine max
tcttatccaagacttatcttggtggtgaagctctttcttctctggtttattccctagtggatggcgcctcctctcacctcatctcctttgtcttctgctacatctccatggtggaaaatcaccattaaaggacctcattgaagctcaaagatccagtctccatagaagccccacaagcaagctttcatcaagtgtgtatcagagcacaagagcttcaagtaggtgctccttaaacctccatgtattttttgctttaccttctcttccattgttgcttcttcatcttttctccatgtatctcctcacatttcttgtgctaaatgttgttaacatggatctttagagtttcacccacttaacttgctatataagctagaattgactttctatggctcacaaatcatattcttcgtcttgaaccattaattgtgttgagttt

SEQ ID NO: 173458 - DNA, 412 bp, Glycine max
  unsure (1)..(412): unsure at all n locations
atgttcacaagagagattcggagaatcttccagtcatggttccaattcagcattgaatactgaaggcaggggaaggactaccctgaagggtcagaatggtcgaggcagatcaaagtcaagagggaaaggtcagaaaaaatttcaaagtgacgttacttgctggaatngtgacaagagaggtcactttatcaatcagtgcaaggcaccaaagaagaacaagtcgcacaaaaacaagaagcatgatgatgatgaattcgcaaatgcagcaactgatgaacttgatgatgcattaatttgcaattnggatagtcctgtngattcatggatcgtggactcaggtgcgtcattccacaccactccctctaaagatttattgtctaactatatttttggaagatttgggaaagtttac

SEQ ID NO: 173459 - DNA, 419 bp, Glycine max
  unsure (1)..(419): unsure at all n locations
tgctanaagcatccnccttttcaaatataaattagcattattattggtgcagttgagtcaccagcttttgtccttttacaggaagtgctattttttgaggatggtgagcccataattgatggagagtctggagatctaagggttattaacttagttttttcatgtttttataacaactgcttagtatgcatggtaacgtgcagtttgcttacattatatatggtattttgagcagtttcgtatccgcacagcagcccatgacctcttcagaagggaaggcaatgacttgcacaccactgtcactataacactggtaaacattacaatacttcgcaactctgtattgntatcaaatatcaattgcatgatctgtactatgttcctagctatattggtacaggttcaaagcatgtatcagt

SEQ ID NO: 173460 - DNA, 319 bp, Glycine max
agctagagctaacctacgcacacccactgtaatagctaagctcacccccatgcgcttattcatgaaaatatgtaggaaaaaaacgcgctcttactgagactgactttaatgccctgaacacaaggctaaaaccctatactactagaagggtcaaaatgcagagcccggaagatggaactgccaactctatcattgacaaagaagagtgaatgcagccttgacccatgggcttaagaatttaccctaatgttcatgagaaccctatggccttctatagtagctctaggcccatcctcttggagtcttctatccaataccc

SEQ ID NO: 173461 - DNA, 359 bp, Glycine max
aagataggggtgactgtagcatgcgactatttatctcacctaccgctagataaaatatgatctggcaaattaatgtcttaactgtttccgccatgctggatttccatatgacttactgtgtgctgtatctttctaccaatcaacgaagaaagggattaaaatggctgtggaacacactctagacaacacagagaaagacatgaagctcttgcatttctctttataaatcctaaaactctaataaatgatctaagttattaacaatattttggttctgtcaaacatctcatgcaggttctcaactgtcagttatatatcaagggcatactgttgcttataaaaatcattacttgctttaa

SEQ ID NO: 173462 - DNA, 445 bp, Glycine max
agcttctcgatatattatgcacctgaatcagtcttctctttgaaaagtgatgaccatttgaatttgtggagagcttccgttgtgcaattttgagcgtctcgatatattatgcgcctgaattggacttccgtgtgattagttatgaccatttgaatttctcgagagcttccgttggtcaatttcgagcgtctcggtatataatgcgtcagaatcggacttccgtgtgacaagttatgaccatctgaagttctcgagagctttcgttgttcaatttcaagcttctcgatatattatgcgcctgaatcagacttccgtgtcataagttatgaccatttgaatttctccagagcttccgctgttcaatttctggcttctcgatatattatgcacctgaatcagatatccgttttaaagttatgaccatttgaatttctcgagagtattc

SEQ ID NO: 173463 - DNA, 436 bp, Glycine max
  unsure (1)..(436): unsure at all n locations
tctcgatatattgtgcgcctgaacaagaacgaaacaagtattgttgacgctaacaagaacgaaacatgatgttaacaaaaacgcaaataacagaacaaggacaaaacacgaacctggacaaattacaaagaaaaataataggataggatagaacctgtatcaagacccgaagctctgataccagatgatgtgaacctgagtaagagcggatcgtttgatacaggctacggaggtttggatgacgccacctccggtgaaggaagataagtcagggtagacgccacaaggattaccttgataagtctgataattggttcaacaaggaacccagagagaaactctcacccaattttatcaaatgcccaaaagttnttttntattcaaaacaaaaaccaatacttatagtgtagctgaacaaaaagataaaaatagacat

SEQ ID NO: 173464 - DNA, 407 bp, Glycine max
  unsure (1)..(407): unsure at all n locations
gatattaagaaggtggcgaagtgtttcttttgcaagaagaagggacacatgaaaaagaattgccccgggttccagaaatggcttgagaaaaaaggtaaatcaatctcattagtatgttatgaatctaatatgggtagtgttaatattaacacctggtggattgattctggatctactattcatattgcaaattctttacagggtatgcaaaacctaaggaaaccagtgggaagtgagcaaagcattttatcangcaataagctaggctcacatgtggaggccattggaacttgcattttgactttaagtagtggctttattttaaaattagaaaggactttttatgtaccaagcttttcccgaaacttgatttctatttcaaggctttgtaccgttggatattcctt

SEQ ID NO: 173465 - DNA, 454 bp, Glycine max
  unsure (1)..(454): unsure at all n locations
gtggagagggggtattgcgatggaaatgaagactttgttcagttaccatctctggagttgaccgagattngtcgacaactcatttgttgaagatatccttgaataggttgtccggttaacacatattagcttctttctttcaaaatggaaatccattggtgatgttcctctgcccaatttgtgtcactatgtcctctcatgtttgtttgatggagtttgtcaagattatgcagtgggtttggtatgtcttaccaaagtccaaattggagtttgaccttgttgatttcatgtcatactaccactgggaaacaaattaaaacaacacaagcactccatattttgaaatcctntaatgcatcttgtttggaaaaatngactcataccctcaataagacatccaatanaattggaaaaaatattgggtggaattggtgttttaataaataacataaaa

SEQ ID NO: 173466 - DNA, 403 bp, Glycine max
  unsure (1)..(403): unsure at all n locations
ctatcgnatgctgacaatagccgagaaatccgtggatctcctcgggggtggagtaagtgtccgccattgctttggccttggctagtaatcggggaagatcttgactcccattcaaagtaagagcaaaccgggcaatccacattgttgcctcttgatgtaacgagtcgatcacccttcctctagcctccttttctgcgtacacttgggcatacttgtctgccactctatgctcgtgggccgtggctagatttagttcttcttggtacctactgacgatggctagcatgttggtctctgtttcgcataaccgctgagacaaagttcttttggacctcgagcaaacctttaactcatcttttaagatcaaactgtctactcgagattggtccatttcctctctccg

SEQ ID NO: 173467 - DNA, 449 bp, Glycine max
  unsure (1)..(449): unsure at all n locations
tgtgtttcaccanaaggctaactactacaaagggaatatttttcttattgaagaggatgataaagctcaactatgtatgtgaaggctcgtcctancatactattaaaacatgagcttgaggctcttaaatagaagactaagctttcaagtttggactggtatgtaatggagaggtactacaaactcagagctcattgcttaggtctggaactagatgaaaagcccctantggacaaagagcaccttgagattggacgatgctatcagactcttcatcaaacttgcttcacttatgagacccctttcaacatggtctacctatggaaaatggagttatatgctatgtttgatcaccctttctcattcgttgtgcatttgccacattctaaattcacttttactcaccatgtgtagtggatcataaaaaaaaggatcttgatttgaaatgt

SEQ ID NO: 173468 - DNA, 382 bp, Glycine max
  unsure (1)..(382): unsure at all n locations
tgatcggntcctccggcaaggatgtgtatatgtgtatatgcgattatattcgntgttctggttgttgtttgtattttcgtttgcgcacaagaaaaatgaagaagtagagatgagagtcgtcatcacggaaagggcaggacggacgaaatcagtgtcctatctttgctttcctcttatctccgatgagaggtaagtaaagaggggcaactgtcataccctaatttcgtctggggattattacttgatgacatgcaacctttggttagccgctttgagatacttggcgtcctttgttgcacaataaatgaaatcccgagacgtctcaaaaatcttaaggaagcaggcttgcgcgatccgtgatattccgtaatgtggcggaagt

SEQ ID NO: 173469 - DNA, 346 bp, Glycine max
gacctataaaactaggctgcgtcccagagcatgttatgaagccttctttttgttttcgcgaccattacgaagaacgccatatcttgttctttcgttcttccaaggccatttctaaagcacccagacattagttgatcacccacagcccccattagccaccacagaccatcattgtactgcagtgatgacccacgccaagaggagccctctaaccgaagcggaatcttacaacttggctcgcggttacgtgctagaatgaaaaccctaatccgacctttcgtgtgatttcgagagacttgtgtggaatcgacgagcaatgacaacaaggagtcttcgagtgactcga

SEQ ID NO: 173470 - DNA, 390 bp, Glycine max
  unsure (1)..(390): unsure at all n locations
ctggactaatacatgtggtgcccacctttcatggtcttgcaggtgaagatcctcataaacatcttaaggagttccatattgtttcgtccaccatgaagccccctgacgttcaaaaagatcatatctttctaaaggcttttcctcattctctggagggagtggcaaaagattggctatactaccttgcgcccaggnctatttttagctgggatgaccttaagagggtgttcttggagaaattcttccctgcatctatgaccgctgccatcagaagagacatctcaggcattaagcaacttattggagaaagcttgtatgagtactgggaaagattcaagaaatggtgtgcaagctgccctcaccaccagaattctgagcaactccttcttc

SEQ ID NO: 173471 - DNA, 366 bp, Glycine max
tgacccctatgctatgcatttccgctatttcgggtataaaacacgtttccgtgaataagaatagagtccaagtgcttccgtaatccttccgagacgtttccgtgagcaaatcttgtaagatattcctccgttcttcaccattcttcgtccgttcttcgatcgttcttccttcttcaactggtaactgttcgaatccgaaactttcaattcattctttggttcgcttgattacctcctcatctcgctcactttcgattttcctttcttccctcttaacgtgcttaaccatctattaagcccttatctactcaataatgattaaatgaattcaccgatcttatgtgtatcgcgttatactataagcaa

SEQ ID NO: 173472 - DNA, 352 bp, Glycine max
  unsure (1)..(352): unsure at all n locations
taaccatctttcttgcactggattggtgggaagtcgaagccattcttctcatcaaattcctagcctcaacaggggtcatattcaccaagagctccaccattggtaccatcaatcatactcctctccatgttgctaagtccctcatagaaatatttaagaaagagttgcccacaaatatgatggtaaggcagcttgcacataatttcttgaatctttcccagtactcatacaagctctctccactaagttgactgatgcctganatgtcttttcagatggcagtggtcctagatgcanggaagaatttctccaagaacaccctcttaaggtcatcccagctganaatggacct

SEQ ID NO: 173473 - DNA, 421 bp, Glycine max
  unsure (1)..(421): unsure at all n locations
tcctcggggccattcctgcgaaggcaaacattngaaaatttattttacaagacatataacaatcattacaaacaagggccaaacaacacttctcatggcacgagtgtcaacatgcactttataaaataatcatattggggtcgtgctattttatgacacatacgtatttgcacacataaaaatattgtgtgaagcattttacaacacctatccatgtacatatttttttgacaaaccttttcatgctacatcctatatatatacacacattttttggaaggcttcttttgttacctactcacaaatacacatattttgaaaaacacttttacgctacccatccaacactctgtaaggcacttcatgctatatatactcatattatgcaaggcattttcatgctatatatattcatactttg

SEQ ID NO: 173474 - DNA, 415 bp, Glycine max
  unsure (1)..(415): unsure at all n locations
cgctttgctatgggctgtntggttgatgacaatgaanatattgangctntaagagaagcataccatgggggttctagccaattcctcaaaaaattgtttgtaacaatgctcatatcaaatagcattgaaagaccaaatcatgtatggtctgaaacatgggagtgcataattgatggtatcattcatcattagagatagaaacataccaagtaacatatatcaaaccattacttccttttgcagttacaattattgtttagaacttaaaaatttaatttatttgttgcgtccaaagatttactgttggatacaaaggagttacagaatttagcaatgtttgagaatgaaaaattattacaatcccacananaatccgttaaagattatccaacctgcctttttcatgacaataata

SEQ ID NO: 173475 - DNA, 392 bp, Glycine max
  unsure (1)..(392): unsure at all n locations
acccaatccaccaaatagatctgttcttcattcagattaggttcaataacctttctaccacaggctatctccaaagtaacaactccaaagctgtatacatcagactccctactagccttgcctcttgtggcagcttcaggaggcaaatatccaattgttcctgctaaaccagttgttttggatcctattgcatgatccattagtctggctaacccaaaatctccgagctttgcattaaaattagaatccaacataacattgctggattttatgtctctatgaagcacacattcttcccactcttcatgcaggtataataatgctgaggccagacctctagcaatatcatatctcactttccatgtcagcagaccctntcctttaaatagata

SEQ ID NO: 173476 - DNA, 443 bp, Glycine max
  unsure (1)..(443): unsure at all n locations
tgtccaacttgcttctttgccatcaccttgaatttctggaaaactgagaacttctcatcttangccatgatcaagtatgcccacatcattctgctatgctcatctacaaatgatgtgaagtacttgttcccacccaattatggtacctcaaaaggaccacactcattagaatgcacaacaccaagcgcactggaagctctcattggcaaatgggaattaaaggaatttcttggttgcttgccaatgagacacacatcacacaccttctctggtacatttaattttggtaaacctataaccatattattagttactaacatattcaaactttngaaatttaagtgaccaaacctgagatgccaaagccagctcaattgggtgatctttgtagccattaaacattgtacttctgcttgcttaatgttggcttgaaaggtctattt

SEQ ID NO: 173477 - DNA, 397 bp, Glycine max
tgttgctgggccatatctacatgaatacatcagtgcttttagatagatagatcactaaatggccaacatcaacaacattctaaaaggtaaatattttttctgagacacataattgcctattctggacacacgttttatatcataggtgcttataaataaatgtcctatggccaagtttgctccacacaacttggctgtcagataaatttgaccagaacattcaattatatcaccaactccttataaaatgaaattgccttatagaagtgaatccatacatccacctaattatcaatcacaacttaatagcataacaatttactttctcattctaaaaccaaggcacgcccaatttatatgatgaccagatccagaagcagcttacttcgtaccccat

SEQ ID NO: 173478 - DNA, 412 bp, Glycine max
tagcgaatggacctgtgtgttgcctagattcatcagatctatttttatacttatcacactcatcatatctaataattgtcacatttatgcctaattgccatattacttcattgtagtaaatctctaaggcatgcattgcctaagagatctctggcagaaagataacatcaccgtaacgtgcataaccatcataatggtgataaagcatctttcctttccgaaagaactaacattgaaaggtccacaaacatcaatatgcacaatttctagaagctgagcgcttcttgcatctcccttctttgcacgttttgaatgctttcccttaatacaacccacacaaatatttagatccgctaaatctagataaagaagaagtccattcgttattagtcttatcaatctttctctagaa

SEQ ID NO: 173479 - DNA, 347 bp, Glycine max
  unsure (1)..(347): unsure at all n locations
tgccttttataattttaacttgagggcanacatgacctttcattgaattgctgggtgcaccancaatattgctgggtgcacctagcatatccccatgttaaaaatgcaaggcccacaataaaacccataatttaattcctcgtccaatatacataaacgttgcccattttaataaactttgtttacacacattttaaaattactatgtaatttaattttaactaaagatcaaataataaattctaaagtattaaattaaatacttgacataanttttttcatatgtaaaagtacaactaattactataattcaattcatctttatttaatgtatatatacatatata

SEQ ID NO: 173480 - DNA, 438 bp, Glycine max
  unsure (1)..(438): unsure at all n locations
ctgcaagcttgattttttggtggctttntccttttcttgttttgttactgattctggttggcaattaaagggagaagaccattttaggtcatggtttcctttccttctttttgttcatttggggacaattctgtattgttcagatattgtccggtctaaagacctctctgcacatttcttctggtttctttgaccaggagctttcttcttctttttttctttactttctcccattctttggttgggacttttctttcttttcttttttctttctccctctctttgattgggaatttccttgtttccttttttcctttgattggaaattttccttctctttttctttgattggaaatttcccttctattcttttttgcttccgagggtaaggattggcattctcaccctgngtcaaggtttatggtgagtcangatctt

SEQ ID NO: 173481 - DNA, 407 bp, Glycine max
  unsure (1)..(407): unsure at all n locations
tctccccntatttgctataaatagggggagaagtgaatatattatgtggttagccccttaggcacttctctctctctcgaaattgctgaggaaaattagttccgtgaagaaaatccaagccgaggcacttctgtaacgtttccgtgagtaattacgcgaagattctcgaccgttctttaagattcatcgtccgttcttcattttcttcagtcttcaacgggtaagtacctcaaaccaagcttttcaattcattctatgtacccgtggtggtccacattttgttcatgtatttttattctccgttccatttacttgtatacccccttttgacgtgcttaagccatttattaagtcatttctcgcttaatctaaaaataaataaattccaccgatcgctgaattgatca

SEQ ID NO: 173482 - DNA, 449 bp, Glycine max
  unsure (1)..(449): unsure at all n locations
gctntcacactnttatgcatataatngaacatgtttaaaatatatcttggtggcacaaacatgatttagttcagatatgtcattttacaaaacagttaagcttgttatgaaaacctttgtatgcattntgatgctcagaacattctaatgcagatgcaatattttatacagtaaataacataatgtaaaagaggaaggaaaaagaagattcagcatagagattgttactatttcacccaacctcgggctacatctagtctttacctaaactaatgagatttccattaacacaactagcaacatgttggacaaaccaactgttggattcttacaatttccatccacttgctggacttccaaactggattttcaccttgtcaaccaactattggacttttagtgtctcctcaccacactaggtcttggattagtgatcacccactcaacca

SEQ ID NO: 173483 - DNA, 437 bp, Glycine max
  unsure (1)..(437): unsure at all n locations
tcctctctatgcttcttatccaagacactctcttggtggtgaagctccttcttccatcgcttattccctagtggatggtgcctcctctcacctcttttcctttatcttccgctgcatttctatggtggaaaatcatcattgaaggacctcattgaagctcaaagatccatcctccatagaagattcataagcaagcttcaatcaagtggtaatcagagcacaagagcttcaagtaggtgctctttaaacctccattaattttcagctttaccttctcctccattgttgtttcttcatttttctccatgtatctcctcacatgtcttgtgcaaaatgttgttaacatgaatttttagaatttccaccgaataaacttgctatagaagctagatttgattntctatgggtcaaaattattggtctttttcttgaccatg

SEQ ID NO: 173484 - DNA, 447 bp, Glycine max
tgcagcttggatttccttttagtagggtatctatccttcctaagatggagccaaacccagtcaccctcattaagaactagctcttttcttcctctattgcctttagttgaatacacctttgtttggttctctatttggttcttaaccctctcatgcatcttctttacaaattctgacctagattccccttctttatgtataaaagaagtgtccagtgggaggggaatgaggtctaacggtgttaggggattgaacccatagacaacctcaaaaggggactccttggtggttctatgaacccccctgttgtaggcaaattctacatgaggaagatactcatcccaagacttatggttgcctttcagaagagcccttaaaagggtggataaagacctattcactacctctgtttgcccatcagtttgtggatgacaagtggtagagaaa

SEQ ID NO: 173485 - DNA, 409 bp, Glycine max
  unsure (1)..(409): unsure at all n locations
tggttcgaggtacttacccgttgaagagcgaatatctatttataacgtctaanaacggtcgaaaccttcgcgaaattccttacggaagcgtttcggaagcgcctcggcttatatattcttcacggaaacaatttttccgagcatattcgaaagagagagaagtgcctaaggggctgaacccttttcacttcacttctccccctatttatagaaaattgggggagaagcttgccacccagctcgcccaggcgagcagggttgcttcctccacaagcaacagccttttggaggaatcttctggagggccccagtgggcctggttgctatttgcacccccatttttactaagtacaccccctgccttttntttggtgagtctnttttcgtatagttacgggaacttacgaat

SEQ ID NO: 173486 - DNA, 444 bp, Glycine max
  unsure (1)..(444): unsure at all n locations
ctgcagctgtcttgtttttctaattcttttacaacttagaacaatatacttttccttcatttaattgtctttgggcttggcgaccacgatcaataaagtactttcgacacctactatatgttgatttcaccaacgttgttattggtatgttatgacaatccttcaaaaccttatttatacattctgagaggttggttgtcatgtggccatatcgacgtccttccttatcataagccatgtgtcgcaacctacccttcggcgggagggcgacgcgtgacttgcgggatgcgtgttccacgaaaggaatacgcgcggagtcgccaccaacgtttatttgaggaaaacgtcggaaaaaccggaaaagacgcgatctacgaacttttaagtgaaaggttcgggagtngtatttacacacggtgaaggtattagcaccccacatgtccg

SEQ ID NO: 173487 - DNA, 433 bp, Glycine max
  unsure (1)..(433): unsure at all n locations
gacacttanaaactcaagcttatcattcaagaacttcatagatttcttgtgttcttctatttccacttaaagaatatgtatactcattttggggtctttgtgtgcttgcgcacattttctccatgttggatcaagtggcctcagaataattaagaaggggggttgaattaattattcctaaacctttactaattaaaaatttactcttctaaagcttttactatgttgttaagcttatgaagaatatataagatacttaaccaaaagtaaaagcgggaattaaagcgcacaacggatatcaacagattagggaagaatgagacaaacacacaagagttttcatactggttcggtaacaacccgtgcctatatccagtgcccaagcgacctgcagggcttgagaattattttcaagcttgtataaattctttac

SEQ ID NO: 173488 - DNA, 389 bp, Glycine max
cgagccttaatttaatacatcaatttgaatattaaataaaacttgtctgtgttattttttggtggtataaattgtcttcgtcacatagaaaattctgcaattcttaaataacggatggcagtttttttacgcagccttctttcttgtctttacttgctttcacacttgtgtttaattatatataacaagtttagttgatggcaataaaagaaaaacaatggaaaaagtgtatgccattgaattcatgttaataaaaactaactcctaatatctatcgaaaaatatatatttatgattaattaattgtgtcaggaaaatgctagccaacatattttctaatacttcttttaaatgtatttcctattatcagttaaaattaggtaaaatca

SEQ ID NO: 173489 - DNA, 407 bp, Glycine max
  unsure (1)..(407): unsure at all n locations
taactataatggtgctcgtatatgaggangatatcntttatctggcaanncngcatcccttattactgctttaatcaagaatccgaatactgattnttccctcaaacagttgggtaagttggattattttcttggcatagaggtaacacacttgcctaatggctccctccttctctttcaagccaaatatctgacagatttacttgctaaaattaacatgctcaatgctaatggcatgcctactcctatggtgtccacaagcaaattgtctaaaattggttcgccggctgtttcagatcccactcagttcaaatctgttgtgggggctcttcaatatgccactctcaccagacctgaaatctcattttctgtcaataaagggttgccaattttatctaatcccttga

SEQ ID NO: 173490 - DNA, 435 bp, Glycine max
agcttggagagatgagtctcgtattggtttattcaattacatatatctcacaatacattacactgttatttgagacaatgactaatttagtcaagagtctctgctttaatcgattaccaagtggattaatcgattattatttctctctcattaagttgtttagatgttaacaagaacacattactacaaaagtcatttactacgacgtaccaacaaggacggtccacagaaaaatggcatagaatctttagattgtaagttcaaggacggttattttaaaaacccgtctttgaattgttatgtttttttctctctcttatcttatcttctcgggtacactactgacccttcattttcccctaacctttcattttcctctctcattgatgccttgtatctccctttctctgtgtcgtttctctctctgcagaggac

SEQ ID NO: 173491 - DNA, 443 bp, Glycine max
aacaaaaaccaactgatggattccagattagacattagttctgtcatgaaaaaaatgttatttgtggcaaatgcaaagacaatgaatgactaataaaggcataacacatttgtaccatttctatcgcaggggttaaactaaaaactaatagaagtcgctatgttaaaaattgaactacacaaaatgtcaaggtatatgtgctatgcaaaagtgcacgtctgcaacatcaaatacaattgtagaactataagtaaatggaatgaaagcaatgtggtccactatgacaacgagagtaacacaaaatcctctaaaaatctcatgatgaatgggaataaaaagaaataatgccattgatgatcaaatgtaataacaaaaatttatcatgacttggacatagaaatactacattgtataggtggttacaaagaaagagtcatttatat

SEQ ID NO: 173492 - DNA, 430 bp, Glycine max
  unsure (1)..(430): unsure at all n locations
agcttatgattctgctacagggtgatttttttttcttacacatgagcaaagatcctattcgcgcaggagacatcagggtttacaatctagatgtatgtatcatcccccattataantttgttttctattggctatgaattttgaaatgctttggaattctaatatatgaatttgttgttattcaccatcatgcttttgtacttagtaagtaaatttatcgttgacatgaatatgtttgttttttcatgaaaacattatgatattatttataaatttataaattttttattcatatcattgantttattttaatgaaatttgatctagaaaagtggtaaaattgaaaaatacctccaatattacatggcaagacacattgacatgttgggactaagaatatatttttagtgtaaaattcttaagggatttc

SEQ ID NO: 173493 - DNA, 384 bp, Glycine max
  unsure (1)..(384): unsure at all n locations
actaagcttgaaatggtatactttgtattagtttgctttattgttttgcaatactgatagacaataggcgattctgcttttctatttactgggtttggccaggccagggcacttcttgaatggcataaaatatcacgactttgtggacattgtggagagaaaacagtccctatggaagctgggagacgtaaacagtgctcaaatgaatcatgcgaacagaggatatatccacgacttgacccggtttgccatcttctgttctaatagttgtgtgatcaatggatgatcangttttgctgaattttgtagtcaccttaacttatgcaagtggtcattatgctagcaattgatccggagaatgaccgcgcccttttgacaaacaat

SEQ ID NO: 173494 - DNA, 360 bp, Glycine max
gccaattttccattcgagaatcaaaaaagctgagaattcttaattttttcaacttccctatgatggataaagttgtgatctaaaagtgcatcgctccaaacaaagcaatctgaggtctgataggcacttaattgaagatggtaagcttgatagatgaaagccagtcaatattaacactctgagttttttcattcttcttaaaaaactataaggtatttttaaagatggattatcattgtcaattcggaaaaacttaagttgaggacagttcataacattaggaagctcatcaatgatatcactgttgcatatagaaacagaagtgcacctctcgagttcatgcccaatcatcagtttgtc

SEQ ID NO: 173495 - DNA, 359 bp, Glycine max
  unsure (1)..(359): unsure at all n locations
tctctaaattgggtacccgttgcagaaatacattggacttcttatgaaagaacaaaacccaacatattttactaatgaatgcgatgaaggataagtgtgaggtgaaattctatatcggatagaaataaaaaagttaaatatcatataaggaaaaaacgtataaacttgaaccttaaagttttgagttaaagtgtggtattagattcacttatatgattgctctagaatcattaatgtaaatctttccggtgtttattccccttaatttcataacagccaatatgtatcagctcatatgatttagaccaaagaagactntctgttactacaaataacttgcatttgcagacagaaatgga

SEQ ID NO: 173496 - DNA, 385 bp, Glycine max
  unsure (1)..(385): unsure at all n locations
cgccaactttgaccattggtctttctttccacgatgcttcttttcatggtccgctgagtgggcttataacctaaaacatacttcccacgatttccttgggtatttatcaagctagttatgcccgccgtgttttttcctaaacccatcccgggttcataaccgttccccaacatagctcgggccatcattaccgctgcatcggacagacaaggctgcccaaagagggagtccacggaggaaatgctgaccacctcanaagactggaaagcagtttctaacgattcttctgcggcttccacataaggcatggaggatgggcagcttaccaagatatcttcctcgcctgacacgatgaccaagtgcccctccactacgaatttcagct

SEQ ID NO: 173497 - DNA, 386 bp, Glycine max
  unsure (1)..(386): unsure at all n locations
tgtcaactcttcatcccatttccttctctctagttccttcttaagttcatcaaattcagtgtggtatactaccacatttctctctggcagcagcttcctatgtaccacaatatcattatatctttcctaagtttcttgtgaatggaatcttgatatgagaagatgaagaagcaaaggactttctcttcttggaagccatttgaaaacataagatcaaacaacaaaagattgtcacatgttattttcaacaaaaacagaaaaataaaactgaaattntgactgggcgcttatcgtanaaaggctggcttantgtgtcgtataaaattttgctcatgggctaagcgcagcagactcccgcttacctgaagacacaaaaattttttttg

SEQ ID NO: 173498 - DNA, 370 bp, Glycine max
cgacaatacttttcatttggatgtccgattgagtaccgtaatatatcgagctgctcgatattggaaacagaagctctaggcaaattcaaatgacaataactctttactcggatgtttgattgagtcctgtaatatatcgaggcactcgaaattgaaaacgcaagctcgaagccaattcaaacaacaataagtttttacttggatgtttgattgagttccttaatattttgagacgttcgaaattgaaattagaaggtctgagaaaattcaagccgcaataacattttacttagatttccctctgagtcttgtaatatataaaaattctcgaaattaaaaatcaatactagtagcaaattcaaacgacagt

SEQ ID NO: 173499 - DNA, 376 bp, Glycine max
tgtgttctcaattctgagcgtgtcaatatatgacggtacttaatcggacattctagtaacaattattggcatctgaatgtggtacgaaattccgctttcaacttggagcaatttaatatattaggggactcaataggacatccgattaaaaagttattgtcgtttgaatttaggacgagcttctattttcaatatggaatgtgtcgatatattacgggactcaatcggacatccgtgtataaagttattgtcatttgaaaatgctcacagcttgtgatctcaacattgagcgtgtcgatatattatgggactcaatcgaacatacgaactaaaattattgtcgttttaatttgctacaacttccgttttcaattgg

SEQ ID NO: 173500 - DNA, 114 bp, Glycine max
gcctatgaccattcgaatatctcgagagttttcgttgttcaatttccagcgtgtagatgagttatgtccccgaatcggacatctgcgtgaaaaggaatgaccattcgattttct

SEQ ID NO: 173501 - DNA, 344 bp, Glycine max
  unsure (1)..(344): unsure at all n locations
ntgatttcctttgttccggaaacctttcttttctcatgttctctcaaacccaatctccggggtcgaagacaacgttctttctccctttgttggcttgtttagcatagattttattttttcctctcaatttgatctttgactctctcatgaagcttcttcacatagtccgcctttgcttgaccttctttatgtttaaaaacagaaacattatgcataggcaaaagatcaagaggagttagtggattaaaaccataaacaacttcacaaggagaacaattagtggtgctatgaacagctctattgttagcaaattccacatggggtaaacaagctttccaagtttt

SEQ ID NO: 173502 - DNA, 439 bp, Glycine max
agctgggggagcatctgctctcgtttggtttacttttatctttgctgctctgtttctttaccttgtttttggttatactgatagtagatacctatcagaccaaaagtattggtttcggattttataccagtgaaaaccaacaaaaacttttacaaggaccaaaattaaaatatgcttatttaacatagacaaaacatatttgaccagcatttttgatataatgttattctctgtttttattcctactttttaactttgtatctttggatggttacaggatgatgaatcctatatcttacctgtgctcttacgatttgatggtcaacctgaggttgacgaggaggtatactgagacaataacttctgcccttcctcattttcctctcaaatgatgtttacaagatgatactgtatattagtccttagaattgttatttgt

SEQ ID NO: 173503 - DNA, 402 bp, Glycine max
ccttgggctgaggacctatataacagcactagggttttattttattgagtttttagaataggagaataattctagggtttttgaattccagtttttactgttcatgcgcactattcagtagaataaaattcgttttctgcaattttgtttctgcttcaatctacaatttcgttttctactgattaatggaaggctaagtctccagcgttgttttctcttgaggatcaagcacaactctctttgaggttttattattactattgaattcttatcagtttttccttttcaccaattactttgtatttgttgctattaatccatgcatgcctagagcctgattaattaggctctacgcttaatataccgtcatgcttaatgatcagccttcgtcatgaataattg

SEQ ID NO: 173504 - DNA, 461 bp, Glycine max
  unsure (1)..(461): unsure at all n locations
tttatcaccgccgctgcagcttttatctgtcatcttctgtttagagcctgttgatgcangtgatttatttatttcctgcactatgtttttaacattatttccaattatatagaaactcttccggacatcaagatgctaaggcaacatggaccaagagaagactcaagtctttcagaattccaagtggagttaatccagcttgcatctcagctcaatggtgattatgtactcaactcttatccaaacattggtaaaactatgacagtgaaagaagcaaacaggtacgcagaagatgcggtgaagagattcctggaagctgcaaaggctgctcttaaagctggggctaatgaatcagccattgtcacaatgaggccttccctcacaagcagagtcgctgatggagataaccacaaacttgtagaatcttactgattctttcacactataccgctgtaaatatg

SEQ ID NO: 173505 - DNA, 424 bp, Glycine max
  unsure (1)..(424): unsure at all n locations
tgngctcttgcctcactcaccgcctttgaggtttcatttctatctatcttatacttatcccatgtttcagaatttctacacctagaccactccttgaaacactccttttttactctaactttgctctgaacactttcattccaccaccacgattctttacccctaggtccaaaacctctagattcacccaacgtctctttagccactttaataatctcttgggacgtcttgttccacatatcatttgcacttccttgtgattgtccacaccatccctcccatatcttttgttggaagattccttgtttctcacccttcaagtgcctccatttgaaccttggtgctaccataggacttcttctctttggctatctctaattcttacatccataagcaaaactctatgttgggtagtcaaactctc

SEQ ID NO: 173506 - DNA, 348 bp, Glycine max
  unsure (1)..(348): unsure at all n locations
caatattctcattggatgaagagaaaaacttcaagccatgagatgtaatcaacaactaaaatgacaagaaggatgcaaacataaagatatgcacaatgaacatgacatgaagaacaacattgatacaacacacttaaaatgcaatttcatcaatagtatgagttcgttttggacattgtatcaagagttccaaaaatgcaattgagttgttcttggtggctatggaaatattgaagaaagctctttaactttcatgaacaagtcatggttggatacaacctagatcatggacaaatttaagcttcaagtngcaaacgttattatgtctggacaacatgatatatgtgc

SEQ ID NO: 173507 - DNA, 381 bp, Glycine max
tccaagaatcaagatcaagattcaagactcattatttcttattcaatagaagacttaatcaagataagtatgaaaaagttttttcaaaaactgagtagcacatggatttttctcaaaacatgttgaccaaagagttttactctctggtaatcgattaccagattgttgtaatcgattaccagtaagcaaaatggttttcaaaaagttttcaactgaatttacaacgttccaattgatttcaaaaagctataatcaatcacaaggtttggtgaatcaataaccagtgcgctggaccgttaaaatccaatttcaagtgagaagagtcacattctttcacaaaagagatttgtgaatcgatcacactgattgtgtaatcgatca

SEQ ID NO: 173508 - DNA, 386 bp, Glycine max
  unsure (1)..(386): unsure at all n locations
acactagtaatatgtctactatcattgttattatttctttctttgtcattaagggaaaacacttgggctgccagatccctccacctttgggaatatttttaaaagatccgtgccccctttttgcacatgttatgtagttgcatcctatccgaagacattatactgacactcctagtaagactttcttggaaggaatgtatcagcaattcctcatcttttgcgtatgcccccatcttccgacaatacatctttagatggttcttggggcaagtagtcccattgtacttgtcaaagtccagcaccttgaacttgggaggggtgatgatattgggtactangaacaactcttcttggttagcaaaggcataatctttacctccttcaat

SEQ ID NO: 173509 - DNA, 459 bp, Glycine max
  unsure (1)..(459): unsure at all n locations
tgtaggattatggggtacccataacatgtggtactatgtggcggtctggcgatggtgcaaaacaagttctccacatccacaaatcacgtacaaacccaccatcccctattgcccacctccaactgagctcacgtactcccacgtagcccttatcctcgttcctctcaacgtcgaggccccatcaatcctcccaagattccacaacatccaagtaattcgacatccactcatcacaaactaacaaaaccaagcaaaacagggcaaaggcagaaaactttgcccaaaactcaaaccaaaaatcacagctattcacactcaattaccccagtaatattctcttcgttccaattcgttaaccgttggatcgactcgaannatttactggaagtctctagtacataattctacattttgaccggtgggatctactgacacaatatccagaaccccatatttact

SEQ ID NO: 173510 - DNA, 433 bp, Glycine max
gcttatatctggtcgagtgcaggtctgttcatacataatactcccaacaactgatgcatacaaaattgcttccatttgtttccgttccagatcatttttaggacattgtgcgagactaaatttgtctcatttctgaattggaacgggagatgctgagcacttttccatcctaaatctctctagtactttattgatatatgctttctgagacaagcctaacaatccttgtgatctatttcggaatatttctatccttatcacataacttgcctcacccatatccttcatttcaaagttactagaaagaaacttcttagtctcatgaagaagaccaagatcattagttgcaagcaatatatcatcaacatacaggattagaaacataaccttactcccactgaccttcagatatacacaccgatcaacagtgttt

SEQ ID NO: 173511 - DNA, 413 bp, Glycine max
gcttaaattgaataaaacgtgcacaactgctggttatcgattaccatatatgtgtaatcgattacacagtgcaaattttgaattcaaattttaatagttgttgtaaatcattcttggccactggtaatcgattacatcctctggtaatcgattatcagagagttaatctcttgaaaaagactttttaacttaaatttcttggccaaaccttttgctacttcaattaggaattcccttcctatttaatatacccttcctaagactctagagactgtcttgatcatccatcttgaatatctttaatttctatgtcttgaataaagctctgagaagtatgtgatcctatggcatcatcaaaacattcagcttgatcctttgtctacagggtgagcctcacaagaacgacaacaacc

SEQ ID NO: 173512 - DNA, 427 bp, Glycine max
  unsure (1)..(427): unsure at all n locations
agcttgngaatactgtgcgtacatgactatttattaatgataatttatacaaagagaagagatatgtttcaatatttggtatttataaaataaaataaaaaagagatatatttggtaaattgcaattttataaattatttaactaaattaagtttaaaactttaaataatttgtctctcaagttgaagaccatagcagtcggtgaataactgtgtccatggactatggtgaaagccaggctgagttcatacttggatnttgtggtcgaatgtagacttgtgaatttttgacaaatgtactttcataattcgtttgtataaaaaacaattataaaatatagcatcactaattttatcaagcaactggtattgaagcaagcagcattcacgttatattgtatattatttgctccaacggngcaactgac

SEQ ID NO: 173513 - DNA, 428 bp, Glycine max
agcttgggctaagcgagcttgcccgctatttccaagacacttgtgattttctttatgttttgccatatgctaagcgtaatttactatttgtttctataattgtcagaattgagcttatcgatccttctcgctaagccatttatgtccagtagtgttgtcgcactaagcgcatttggccgtgctaagcgcaatttggtttttgttgtggaattgggctcagtgagcctgctcgctaagccaattctgcagaaaaattttgatctgtgtcaatttgctaagtgtgtggctgtcgcgctaagcgcatgagtaatttttcataaggcgggctaagcgcatctgtcgcgctaagcgcccagtctgaatttcagtttcatttttcagcttgtcatttcaaataaaacctgttttaaccttgtttctgtgtttct

SEQ ID NO: 173514 - DNA, 461 bp, Glycine max
  unsure (1)..(461): unsure at all n locations
tggataattacaattnttgtttgcttatgcccaaatgtcttgaataaagcaattcaagagagcttaagacttattttgattcataaatccagccacaaatcagcaccacaactcaatttcttcataggcatcatacaacaaacttagaaaacaaaacaaagtccaacaacaagactacttctaggaattgatttagaatatgttatgaactaaatagcatgcatgaattagattcaaaattcaaaagataggcttagaatgacaagaatacatgaacaaatgtatctagaattcaatcaacaaaatcaaaattcaacataaactttgaacataatgtgacaattattatgactaaacatgactctaagacaacatggaataagtgatttacacttagatttttgtggtttttttataatcaatattttggaagaaaantnagatctaaagggtcaacacaa

SEQ ID NO: 173515 - DNA, 396 bp, Glycine max
  unsure (1)..(396): unsure at all n locations
ttgatgatgccaagatgatgaccaaatgccccagagaatggattcaagaatgagtcaaccagcctcagaatcaggttaatttccaggttcctgagaagaaatcaagaagattccagaatcaagagaagtttgattacatgattccagagaagatgaattcaagattcaagagaagaaatcaagaagacttcataagggaagtattgaaaagatttttcaaaaaacaaacatagcaaagttttgtttttcaaagagtgtttctcanaattttctaagttaccaaagtttttactctccggtaatcgattaccagattcttgtaatcaattaccagtagcaaagtttgatttcaaagctttaactgaattgcaacgttccaattgttnttaaatggtg

SEQ ID NO: 173516 - DNA, 314 bp, Glycine max
ggtgagcttcctcaatagtccatggacctctcttcaattcaaccttatcacaacaaggctgtcttcccattttggaactcttaccttaatttgccaaatcaagaaattattatcccttgagagttaacaaagtgtgacaacataaaaaaggagctatttaaggttgaagcaaagatgctgccagttcattcagacatattaaaaaagcatggtgtcctatgataagggtgataaatgatcggatagaaagcactttattggaaagctatgaaagcaagaatgggttgtcattataaaatgatggtcaccaccac

SEQ ID NO: 173517 - DNA, 451 bp, Glycine max
  unsure (1)..(451): unsure at all n locations
tgtaggattatggggtacccatcacatgtggtactatgttgcggtcgggcgatggtgcacaacaagttttccacatccacaaagcgcgcataaacccaccatcccctgttgcccacctccaactgagctcacgtactcccacatagcccatatcctcgtttctctcaacaccaggtccccatcaatcctcccaagcttccccaacatcaaagtaatacaacattcaaacagcacaagctatcacagccaagtaaaacagagcaaaggcagaaaactctgccaaaacaccaaccaaaatcacagcttttctcactcaaagaccccagtaacaatgccttcgttccaattcgttaaccgttggatcgactccaaaattntactggaagtctctagtacatgagcctacantttgaccgttgggatctactagaaaacatccagaactcattct

SEQ ID NO: 173518 - DNA, 451 bp, Glycine max
  unsure (1)..(451): unsure at all n locations
gcaagcttatctattctttgtccaagtgtgtttcactatcaaattctcatagtattggagatgaggagcaatctgttatcttttgcaaaagctatcctctttccattgcttctgacacctctaatatgtctaagagcagtatgaaacattcaaatgctaacaagttaggggagcatatttcttcaatagaatttggatcttcttcaggtagaaacctctttgaattttttctatacatacgagtaattctattcatacaataattcataggtaatagtctacgggcacttctgaatagccaaggttcacagctttagattagttaattagcaaataatttttccctttntgttcctttgatctccactatgaatgaaaattgtaaaataagtgattagacctgagaggctaattaacttaattgttgcatttaaaagttaaaggggcagtc

SEQ ID NO: 173519 - DNA, 435 bp, Glycine max
  unsure (1)..(435): unsure at all n locations
tgtcgaaattgccatgtttgggtgagttagacatacccattctgttntagggttnttgtgatgatgtttgtgatgtttatatgctgaaattgctgatggaaatctgttagagacgaagggttgaactaacccaatgttagaaagtgagaatgtgatgttatgagtggaaaaaaaaaaaaaagtgagactttgagagttggaaggctaagtctgaattctgtggttaatggaggttagagtgagttaatactagcttgaaatgtcatttagaacatgtgagaaaggttaggctgagctagagagataaacaaatgaccaaagtgaacaaagagccattgctagggcanatttgggtgtcgaagagtcaatatttgattcggtgagattttatgtgtaaatccagttcgaacaagtctaaatggatgttatggactg

SEQ ID NO: 173520 - DNA, 368 bp, Glycine max
acttgtaatttaattcctctacgacttcagatactaccttagaatgattatagatgtaacatctgcttgataggtacttaccatggagcatattttgtcactcatggagatcttatactctctggatgctacaattatgagcatataaaaactatattatattggttttgctgcaacatgataaactactccatggtttagaaggaaatgcctaaataaatggaagggatgaatttctttattataagaggtggaacaatactgttcagactcttaaagttgctgctggatttcatattggaaacatgttacgggaggatgagactcggcacaactctaattatcttgtcaagttgctgacttgagat

SEQ ID NO: 173521 - DNA, 349 bp, Glycine max
tatctactgcgcgggctatccgttcgtatgagacgtggttttcttaacggcggtcagctgtgtcaccgccatgctgatagtaatgtgcttgctgcgctcgcataagatgaggaatgccccgtttgactttgacaaaggcatccttgaggttatcaaatatggaaaagaacgagccgaggccattggtggtggtctcccagctcatgccacagatgaagagctggcgctgggagacttccggtccgccacggtacacacaacatctaggacgttgaggtggctacaccagcgcatcctacaagatgtcgatgagctggttgggagtgaaacccttcatgatcttgttggc

SEQ ID NO: 173522 - DNA, 434 bp, Glycine max
ctgcagcttatattgtcaattggattggtttttattaataatatccttattggcaccttatagagtattttctctttactatttatcatacatgctattttgtttctatatttttttgttaatattatttgacattttttagttttatcattttctttttcaattttttcaatcagtttttttactttttctcttgcaacttttcaaaatgtgggccaagtttgttggatgcaaaccatgcaaaaatgtgattcatttaataagcggatcagtctgctctggtccatttaaatgcagaccgaaatggaccgagctagcctgtatatatatatcttgctgttataaattaaacacagctcttttaatttgagtaattcggggtatattttactcttaaagtttagcgggttatgatcatgatacttaaaatcaaa

SEQ ID NO: 173523 - DNA, 453 bp, Glycine max
  unsure (1)..(453): unsure at all n locations
tcaagcttgtactttgntctggatggtcatatttcttaattccttcttttgcgtcaaatatatgcatgtggcaagcgctaatagaggatgtgagtttaaacttcttaataatgaaaatgtaacgattgatttaataatgaaaagaataagaaaggaaatagaaattgcgaattagaattttctcactaatcagtctaacacaataattattaatatttactgataaaaagaaaacttcttaatttgttgtccatgaagaacttataataagaaggattaattccattgactagagcaccttgaaatacaagaaaagttctattctagaaaaaaaaaacagctaagatgcttgcatgggactgtttggagtgtaacgaatagaatataagaatatgctctgtttgtctgcatccttagtctgaaactattcagccccacatctgaaaattgaat

SEQ ID NO: 173524 - DNA, 430 bp, Glycine max
  unsure (1)..(430): unsure at all n locations
gcaagctncatgcaagatctcaatctgtctttcttatataagtactcgcaagcagatgtgttgttgcgttgtgctacaattttcgttgatgaatatagtgatgtcaatgaaaatgaagatgaacccttatnttttccattatgtttaaaaatttgtgcttattggggtttgtttccttatnttacataattttattctagtgtattgatgggaaagttggacctttgtttgtgtatgtatctcaaataagaagtttttcataaagggagttctgtgtgcctctnttcatcacagaggggtttcagagttagagtattgtatttacccagtcaaacatttcacttattgctgtcataaatggtttgcaacagcaattgtggatgcaattgtcaagatntttgggtagcantaactgcattgcgaccacaat

SEQ ID NO: 173525 - DNA, 446 bp, Glycine max
  unsure (1)..(446): unsure at all n locations
ggacacttgatactaagctaacatgctcctaccaaattatgagcaggacctaccactaactgttaccataaacatttacagacagagggatttcctaaaccaaatgcacttattgcaaattaatcatgaagtcaaaagtccgatatatgttacatctcaaaaattggatccaatctcatggtgtaacacattcacttacaaagcccttattccccacataaaagatgaagatcatacttgtgccattactttngcaaattaaaatctatctcccgatttgctattgcagaattactctacaagtgaattacatgcaactgattagcaaaaactctgccatatgaagacatgatttcataagtacgttgtatggagactggtaaacaaactgattcacatactagaagtggtcaactggtccaatgaaactgaatctaacatacttg

SEQ ID NO: 173526 - DNA, 376 bp, Glycine max
  unsure (1)..(376): unsure at all n locations
cgtcgatggggggtngctggtggtgcccggtggtggcgtaccaaagaaggcacatgtagacgatataaaccccgctcatgccaaggcacggcaagaaaaacgccagaaggaccgaatcgagcattntttggcctttgaaagtttcagtcgcagtggaacctttgtccgattccaatagaaaaacaattaatgcggcggtgggggttggtaaaggagtacccaagagattgggtcttggcgacaattacccagcatatcgcaaattcacacaggcctatgccttgtggtatatgggaaaccccgaaattgaagaagatcgaatcagagattgcggtgagggttaatanggggtggttgggttgagaattgtgagtgc

SEQ ID NO: 173527 - DNA, 423 bp, Glycine max
  unsure (1)..(423): unsure at all n locations
tgtgttgaanagggagttggtgaatatatcacttctctatggacagatagatgtggtgaatntatctcaaatgaatttgaagaattttgcaaagttcaaggcatatctagacaattgacaacagcttatactcctcagcaaaatggagttattgagagaaaaaaataggatgataatgaacatggtgcgctctatgttggctgctaaacaggttcccaaaatgttgttggcctgaagctgtaaaatggagtgtgcatatcctcaatagatgtcctactgtggctgtgcaaaacaaaactccagaagaggcatagagtggtgtgaagccaataattgattactnttcaagttttggatgtgtagctcatgcacatgtttcagactagaanagaagtaagtagatgatagagccagaatgtgtat

SEQ ID NO: 173528 - DNA, 408 bp, Glycine max
ccttcctccatggcttatttcctagtggatggcgctgcctcttacctcttctcctttgtcttccactgcatctcaatggtggaaaatcaccattaaaggacctcattgaagctcaaagatctaacctccatagaagctccacaagcaagcttccattaaacctacatgtattgtccatactcaaatagtttaatattctgctatgttaactatgtctaacatgctaaaaccaagagcgtccattcataatattaaccagtgttaaacattgcgtatcattatcactcgtgcctggtaagaacgacttgtatactcattcaaaatgtcaacactgtcgaaaaaaggctatgatagccgaaaagggaagtgtacatattctttctcttgcattatagatttcctctcttt

SEQ ID NO: 173529 - DNA, 396 bp, Glycine max
gtctactaccctatgttgctatgaatatgggatgaacttcttttataacgggtcagccccttaagcacttctctctctctcgaaataactgaggaaaaatagttccgagaagaaaatccaagccaatgcgcctccgtaacatttccgtgattaattactcgaagattctcgaccgttcttctagattcatcgctcgttctacgttttcttcagtcttcaacgggtaaatacctcaaaccaagctcttcaattcattctatgtacccgaggtggtccacatatggtctcatgtatcttattctcgtactcattacttttataacaccttttacgtgcttagccatttattaactatttctccttaataaataataaattaattccccgaccttgaat

SEQ ID NO: 173530 - DNA, 435 bp, Glycine max
gcttctacatcggttgaaaacgggtatctactttctggccccacaccgtctttgttccagatgtcgttgtatgtggacaacaacgacatcggtcatactaggacccatctttgtaatgttagaatacaacgtcagtgcctatataacaatagacgttataaaaaatgattcgacgatgcacatggtgaagaacccgtcgttgttgtggtccatttcaacgtcgggtacgcgaagacccatcgttgttgtggtccatttcaacgtcgggtacacgaaggctcgtcgttgttgtggtctagttcaacgtcgggtacgcctaacacttgtatttgttgggttttctttcaacatcggcggcgtgttcacccgtcgttgtttgatagtatgtcaacatcggtggtgagtacaccgtcgttgttcttcgaatttcaacga

SEQ ID NO: 173531 - DNA, 343 bp, Glycine max
  unsure (1)..(343): unsure at all n locations
tgacagattctctnntggattctcctaactcgctaagctagctgagtgcctcgcttagcggatgttgctcgctaagcgcataggcctcgcttagtgagacactagctgcttcaaccttcttattcttcatcttttcacctaaaactgaagttgaaccacattaattcacaatgaagggaatatctactgaataaaaactaaactaaacataaaaatatgtacaaacctacaaaaagaaccataaattggggaaaagacataattttataaagcttttcaatacaaaagtagtcataaatgacgactaacatgtacgtagccctgcgcccatctggaatattct

SEQ ID NO: 173532 - DNA, 393 bp, Glycine max
  unsure (1)..(393): unsure at all n locations
ggtttggcggccatgctcaacatagtactttcgacacctactgtacattgatttgatcaatgcttgtatgggaatgttgcgacaattcttcaaaaccttattgatacattctaagaggttggttgtcatgtgaccatattgacgtccttctctatcataagtcatcgtccatttttcctttgaaatgcgatcaatccatgttgctatggctggactcagttgacgaaacttgtctaaattttgataaaaaaaatgtgcttcgcaggagtgtatgttgcataaaattagttatcaataacaattttaagtatatataaaacttanataaacatgaccatcaaatatgaaatcttacccaatttcttcaacatttctttttgtttggcattattg

SEQ ID NO: 173533 - DNA, 413 bp, Glycine max
tattattgttagggtttcttctataatggctggctaatcaccctattttgggattcctaatgaaccgatgatgtaaatacttaatatctaattgattatgttttctatgtttaatgcttccttcaatgcttaatgtttgtatgcttttggtctgatcatctatttgtgtgcatagttaggtgactctagcattgggaaatgtactgttgccttataacttgactgaagcaggatcgaaacttactcttacaagagggatctgcggattaagttttggttttaattacgttgttacaatattgttgtttagtctaagcctaaccttacaagaaggatctgcggatgaagcttatgctaaattatgctaaccttctgtagctacttgcgctgagttagtcttacatgaaggatct

SEQ ID NO: 173534 - DNA, 442 bp, Glycine max
  unsure (1)..(442): unsure at all n locations
agctntgaagctagctgtaaaaggtttgttattttatttcttagtcctcatcactatcaattaccctagtttgagtgacatttgctctggtcttatagtagtggaatccgagagggattcatatctcctctttagccaagtattaacttaatcttaaagggaaatgaaagactagttgtcttttgtcaaatccaagtggttgagtatttgaagagatgtcttgccaacaattgtaatgtttagacacatttaatgctattgcacattttcgaaagagacacgatgcttatgtcctttgtatttcaaaaatgctctcaagatagacaaaggtcgcacccttctccaatcatctattcatgtatttgagaaaaagatctaacgatctgaataggtgcatcctttcatccctcgaaagcttcaaaaatctatatgagagcaaaag

SEQ ID NO: 173535 - DNA, 487 bp, Glycine max
  unsure (1)..(487): unsure at all n locations
ctgctttacggacactataaaactaagcttgtcataggcgctntgtggacccatatgttttatggtccaccggtgaacaaccttgattttataacttctcaagtggttcacctacgctccaacatttcaggactgttagatataattacaagaaaacaacggttaagatttgatatgttaatttgatttttgattattttttatagtgtaattatttaaattaaaaaatactatattagtgaatgtctaaaacacccttatttcgaatgtcaatttgcacatagtaattttggggttactgtatcaccatcattggctattgtttgtgattgtgtgacactattaagtgttaacctagaaggattcatcgttgtttcatgaagagatcgggtcanaacaagggttagcacacttagtttgtgggaacatgtttatttgatgtncttgacaatggttgtcttgttttgttaatcatgggtaattcttt

SEQ ID NO: 173536 - DNA, 343 bp, Glycine max
  unsure (1)..(343): unsure at all n locations
gggtcaagaaaactttgggacgtcagggggggtgctattgcccaaaacccaacttgacccatcccgacccaaccccggcatagtcggtcagtgagaacctgtgatgtacctaaacaagcgagctcctggcagtcaacagataaaaggaacaaagaccacaaagcaaggaggcttgtggtggctggccagctgtgaactttgattgatatgtgggttatggcctctggtaatcaattaccaagggtgggtaaacgattacaaggcttaaaaatgaagacaggaggctaagatggtctctggtaatcgnataccacgggatgtaatcgattaccaggcttgaaaa

SEQ ID NO: 173537 - DNA, 451 bp, Glycine max
tagaacacatattttgaattcttggtccccttagagattttgtaaagatgtctgctagttgatcattataactaattaatttagtaataacttacttagaaaggactttctcccggacaaaatgacaatcaatctcaatatgtttagttctctcatggaatactggattagaagttatatgcagggctgcctaattatcacaacatagcttcatttgttgagtatttccaaacttcaattcttgaagaagttgtttaatccaaatgagctcacatgtggctacaaccatagctctatatttagcctctgcactagaccttgcaacaacattttgctcttactctttcatgagacaagatttcctccaatagacacacaatatcctgaccgtgaatgcctataaatgggtgatcctgttcatctgcattgcaaaatcaactatttgagtgcg

SEQ ID NO: 173538 - DNA, 260 bp, Glycine max
tctcagcttgtgaaactaggaccttgattgtgactactcttgttgggagagaacggagccgactgatgattcttctccttcactcagataggagagtccagaaaatggaagagaacaaccgagctacatacattgttttacactttcaagttggtcattggtgtatttactctggttgctatccacatgtacacatatgctagtacaactaaggtcaatgacatgttggtcataacttgccacatgggcacacctttaag

SEQ ID NO: 173539 - DNA, 341 bp, Glycine max
aatacaaaacatttacaaccaaaaacatgaagatgtgagatgtttggtttttaccattgaacagttcatatggggtttctttaaaatgggtcttattaaagccctattcatgatatatcatgcagtattaacggcttcagcccaaatatattttggaagaggagtatcatttaataaggttctagcaatttcttccaaagacctatttttcctttgaacaactccattttgttgaggggttctaggtgcagaaaatttatgttcaatgccatgctttgcacagaataaatcaaattctttatttcaaactcaccctcatgatcattcctaatagatttaat

SEQ ID NO: 173540 - DNA, 392 bp, Glycine max
  unsure (1)..(392): unsure at all n locations
actcaagctntgcagcagaagccactctactctatatntgtgacagatatgttttcaaggtatcataaatatattcatcaggaaaacatcatactggaaggaaactgcagtgctgcgatccaaagaatccttccacccaaacataaagatcctgcgagtgtagctattccttgttcaggagtacaagacaataagggataagctggtattgacctgagagccagcataaattagatgccactctctatgtgcacaagattgggagagatggaaataatgcccactctcttattaacctgcgagctctcattgactttactattacgctgctgttccattaccaggccatatggagttattgtagatgtatggggcaaaataaaaaattttat

SEQ ID NO: 173541 - DNA, 331 bp, Glycine max
taatgaaactttctttttcaagacagatcttgctcctttgaattttagcccctttccaggaaactagttataaagggcatttacctataaggtgtaaacactattgtacaaagcataccattcagaaataatactttcagattattgatgtctgctacatctatcatacaatatgatattgtgctcttaggactggaaggattgtcatctaggcagagccacaatgcttgctagttgctatcttaccttccatgttaattgagattgtatcaactagtgcagcatagataatgttatttaaaaaccaaacatctgaagcataataccatga

SEQ ID NO: 173542 - DNA, 434 bp, Glycine max
  unsure (1)..(434): unsure at all n locations
ggaccttaaatactcagcttaataggcattcttaattgcaaaagtataattnttctgggataaaatagacacagccctagtatgaggtggtagatgcatccaatcaaaatgtgaaacttcataaatatatataaattgtgttgggatacattgttttgagttgtgtagagatatacattttttttttgtgaatctcataaataatgttgaaacttaaatttgaaagacaaatgaaatatagattgaaaaggaaaagtaattaagaccgtcaccatcaaagagttctttatggggtttctaaactcgagaactaattaatgtctctaaaattgttgtattatcaaaatataaatcaacatgtctgactgactgctactgtgctcacggattaacacaacatatagtacgagtgtcaatctgaatttgtagctcat

SEQ ID NO: 173543 - DNA, 430 bp, Glycine max
ctgcagctaatgcctcaacaaatacagtttgtttgaaaagctgtgaatatcatttctagcaggtaacattaaaaagagttaataccagtgccttagaaaatttgtacataaaggtataggtcatccattgccataagaactgggaatttcatatacattttattcatagtcggattgatctttctttctagcacgtgataaatttagctgcaagatgtatggtaaccaaagcttgtcatattaacatacaactcagcacccaaaatataaagaagtcaacatggaaggatttgagttgactatgataaaaaaaaaaaaaaatctagtcaaaatagaaaacgagtctaaccctaaatttcttgtactaattttaagaacaaaatcccagagagagtctcctcctacactaatcaatcagtctcgtaagaac

SEQ ID NO: 173544 - DNA, 413 bp, Glycine max
tgaaggcaaactggatgcattggttaacttggtaacccttctggccttgaatcagaaatctgtacctgtcgcaagggtttgtggtttgtgctcctctgctgaccaccatacagacctttgcccttccatgcagcaacctggagcaattaagcagcctgaagcttatgctgcaaatatttacaatagacctcctcaacctcagcagcaaaatcaaccacagcagaacaattatgacctttccagcaacagatacaaccctggatggaggaatcaccctaacctcagatggtccagccctcagcaacaacaacagcagcctgctccttccttccaaaatgctgctggcccaagcagaccatacattcctccaccaatccaacaacagcaacaaccccagaaacagccaacagttg

SEQ ID NO: 173545 - DNA, 378 bp, Glycine max
  unsure (1)..(378): unsure at all n locations
ttatggctccttggatactatttcaaacttgtggtttggtattatgatgattatgatatgatgaatagcattgttatattaaggtcttgctttaacttataagtttgttttgtggcctttcttgtttctcttcttcgcttagattttttttgatgtcgtgataaaaagggggaaatggaaaatgtggaatcgttttgctggtggaggagtttgtaaatgggtgattagggtttttctttcttgcanaaattataggcttaaggttttcgtggtgaacctgtttgcaatttagtgtgcttgattntgcaagcttgttgactacctttgaatgttgtcaacttaaccagtctctaggtcagtgttatcaatggaggacag

SEQ ID NO: 173546 - DNA, 440 bp, Glycine max
  unsure (1)..(440): unsure at all n locations
ntnntctgaatttttcactggtaatcgattacacagttatattttgaagggtcatgacttttgaatttgaatttcaagagttctgttgctggtaattgattacaaacatctggtaatcgattacatgttcaaaattcaaattcaaaacccttttaacagctatttttcaaaattgtcttctggtaatcgattacactgtctggtaatcaattaccagagccttggatgtcttggaaacactttgttttgaggaaaggcttaatcttgagttaattctgaagcaaggctttgtttgttgaagcaaccttgtattaatcttgaagcaatgtttctcctttgaagcaacctatgttgattctactttggcatcatcaaaatcatgtattcataaattcaaactaatttctttaggcagaacatgatgatattattatcatatt

SEQ ID NO: 173547 - DNA, 412 bp, Glycine max
  unsure (1)..(412): unsure at all n locations
catgnaggggtttcacctccaaggatggtggttgaatggtggaacgcaagggaaggttgatggtggatgaaagaggactaagaggatcataacctgtacctacattaaaatcaaagtgaattgcaataaagatctctgcacagatatagacaataacagactcattataagtttcacaagtacaatcaaaagaaccaagatcaacataagaaaataaaaaagttaatatgtacaaaactctacactatctactacatcatcaataatatctacaagaaaaaacaaaatgatcctttgtcgaatgtctcaaggcctcaaaaatgttgaaatgcataacatcatcaccaaactncatggaaaaagtccctgcatgcacatcaatcttggtcttgactattcataagaatggtct

SEQ ID NO: 173548 - DNA, 411 bp, Glycine max
  unsure (1)..(411): unsure at all n locations
tatccaaattctgttntagatattcgtgaattacaacctggctatgtgaaagtttttattcaatggcaaaacctccctccaagtgaaaatagttgggaatctgtggctaaattacaagaggtttttccgacttatcaccttgaggacaaggtgagtcttttaggaaggggtattgatatgcataagcataagccacacatcaccaaggtgtacactcgcaaacaacgagcaaaagaagcaataaccatggaccaccagcagcaaggcgcacaacacccaaggggtgcaaaccacccaatagttacaacccatccaaagggtgtaaaccacctaatagttacgattcacccaaagaatgcaaggtcagaagatgcgaatcaaggggacatgacccttgtgaacagtcacaat

SEQ ID NO: 173549 - DNA, 383 bp, Glycine max
  unsure (1)..(383): unsure at all n locations
ttaacagccacacatgatgtagctgagagcgttcttcttcacgcacccccctaaagactaaggcatcataactggcgctaaactgctgagagtaagaatccatattcacaataaaacattctggcttcaacaagagacatgtcttcaaaggccccaccactggcagcatataacacactgctctccatataactgagtccttcataaaaatattggagaagaagctgctcccaaatctgatggtgagggcaactggcacataatttttaaatcactcccagactcatacaagcgtctccactgagttgctaatacctgagaatctntcctgatggctgtgcgccctgaagcagggaacacgttttctaaaaaacctctcttaa

SEQ ID NO: 173550 - DNA, 315 bp, Glycine max
cggggcgcggatatataaccaataaacccaatttttttcgtaccaacatccacggatacccaaaagaaaccgagtactaaggatacaaaacttaattcaatgaaaacaaatgaaaaaaccatatttggacagtataataatgaagttgattgaactacaagttttgatgtgtgaaaatgtcataaaatgaagaattataaatgaatactcgaacaaataataaactgcatttcatttagtaaaatatccacttaattctacatgtgctaggttgcctctcatttttttcacctaacccaacttattctatctact

SEQ ID NO: 173551 - DNA, 290 bp, Glycine max
  unsure (1)..(290): unsure at all n locations
ccnaacaaatctgagctaattataatgttgcatgacaccactatattctctaaatttgacatgaagtgaaactattatcaaattttactggtagaggaggatagacacaaaaccgttttttgttggcccttttggactctttgagtaggttttctatgcccaaatgcttatagattgcgccagtgaatgcgcaaagtgaacatgtgaaatctcaccaggctatgaaattttgaaaaggtgtatataggattttctatatttttacaaatagaattatcaacttgtttgca

SEQ ID NO: 173552 - DNA, 254 bp, Glycine max
acgcataatgcaaggtaacacaatgataagcatttgaaagcttatatggacacatagaattacgatggcttgggcttttacaatagctgaggaaattctctcacttcctggattttctatccctttccacgttgccctaccctactaattttggtatcttattactagtgctgcttaattcctgcatttagttcctggattaaaattaacgtttaaattttgccaaaaatactaagtcactctcatttaaaata

SEQ ID NO: 173553 - DNA, 450 bp, Glycine max
  unsure (1)..(450): unsure at all n locations
gcatgcaagcttgtgaaagatctctaacatttatattgatattacttagnttactatattctaagtgaatggaagattaacaattgaaactcgaaagtgtcaaaatcaatatcaccgacatcacatgaagtattacttggacctcattatatcgcttatcatctatgtaaggatatttgattaactaatgaaccttcctaatccataaatgaattaaggcttgcggtataattaacttctgatattaaggtttttactntgaaatctcaaaattcttaaattcacacaagaatgcttcttggttagacttttgtaaatataatgaacaatcaaatattgaaaacaatcttcgctgttgtctaatgtatattaaggaaatttgttatcaaccaaaacggtatggattgaatgaaattctattccttaatggatgatatatagacaacacca

SEQ ID NO: 173554 - DNA, 396 bp, Glycine max
  unsure (1)..(396): unsure at all n locations
tagcaagttatttgagaaggtgaatataccttttctgtttataatanttatcccgccctgggatctctttataaagaaataaagtgcttacatcgattcaacttattacttttttgagaggttcattatcataagaaaaatgtaaaggcttaacaagttgttttgagaaggtgaatatacaatcttgattctcagcttagatcttttgtcatgatgtaaaaatttactttcgtttgactctctttctctcgctcacacatgcataatgtcccaatgtcgaattgtttgtgttctgtctaacgaccttgctcttcatccttgcctaacaacatgattctgatgttgtagcatccaattactatgtatatgtccatatcggaagtatgtgattctagt

SEQ ID NO: 173555 - DNA, 339 bp, Glycine max
  unsure (1)..(339): unsure at all n locations
cttaaaccttcattaattttcaaccttaccctctcctacattggtggttcttcaattttctccctggtatctctcacatggcttgggttgaaatgtgctaacataatttttaaaaattccactgattaagaattgctccaaagctagatttgattttatggttcaatttcttattcttgttctgaaccatgaattgtgttaagttaggttcctttgagtttggattgctatttttgggctgaacctaaccataaattctacaaataataaagtagaagaaaccttanaataggagtacatgtcacctattgattttgcataaagcatgtctagcggaac

SEQ ID NO: 173556 - DNA, 372 bp, Glycine max
tcggaagaaagtgatgaggtacaatctcttaaggctattcttgaaagagcccgggtagtcaaagagaagttcaagtccatagccatcaaagtctgaagagagtatgatgaactaagggacgtcaatatggccaccgatgaagccttggaatgagaaaccataaaagcccgaaaggaaaaacaccaccaaaacaagttttgaggggctttatagggcagcaatagtgagctcaagctccgaagaggtgaaaggaatcatcatgggtcacaggcatgatcttgaaggacgagctaaaggcttgccttacgtcgaaaagatatttgtcccaacagttaagcgagactggatggaatatgtgggccatcatcgatg

SEQ ID NO: 173557 - DNA, 326 bp, Glycine max
  unsure (1)..(326): unsure at all n locations
aaaataaagttatgctaaaccagcccaccaaaggagaaagaagggtgtcttccaaccccgagaatgggtttgggtgcacattaaaaaagaaagggttcccgaaccaaaggaatcaaagcttcaacccaggggaagatgaccctttcaagtgcttgaaaaaatcaatgacaatgcttacaaagttgagctggccggggagtataatgttagtttcacctttcatgtctctgatttatctctttttgatgcagatggagaaatccgattgaggacaaatcctctcaagaggagagatgatgangactgttcaaaacagggcaagatcc

SEQ ID NO: 173558 - DNA, 388 bp, Glycine max
  unsure (1)..(388): unsure at all n locations
tatgaccatttcaatttctcgagagcttccgttgttatttttctagcgtctcgatatgtgatgctcctgaatcgacccttcatgtgataacttatgacaatttgaatttctcgagagcttccgttgttcaatttcgagagtctcgatatatgatgcgcctgaatcggacctccgtgtgaaaagttatgaccatttgaatatctcgagatcttccgttgttcaatttcgggcgtccccatatgtgatgtgcttgaatcggacctccgtgtganaagttatgaccatttgaatttctcgagaggatccgttgtttaatttctagcgtctcgatatctgatgtgcctgaatcagacattcgagtgaaaagttatgaccattttgaattgta

SEQ ID NO: 173559 - DNA, 367 bp, Glycine max
  unsure (1)..(367): unsure at all n locations
tggtgcacaacattccatagtgcctattttgggaaaaaagccctagaagcagcanaaaggaacaacttgtgcattgaagcctaggttttgtcatttgagagagattattgagtaaagaatgagtgtgagatgctgagaagagaaggaatccccctttttgtgtaagaaactatcattctctgcttttaatctcatttattgttagggtttctttgcaatggctggctaaacaccctagttggggatttctaatgaacaattgatgtaaatacataatatctaattgattgtgttttctgtgttcaatgcttcattcaatgcttaatgtttgtatgctcttggttngatcacccaattgtgtgcacag

SEQ ID NO: 173560 - DNA, 457 bp, Glycine max
  unsure (1)..(457): unsure at all n locations
tattgagatgttatttatttatgctttaccatttaatattagtgactnttatattgtaaatagactttagacacgatgaatgaagataaaaagaattggaatgaaaaggctaagacaatgatggagattaacagaaaaacaaaggaaatgttcaacacaattcatattaaagatcaggttacgaatttcaagactattctcaaataaacatgacataatataacacattagtattgcttatattatttttctttaaatgtattcttatggtgaagtgagtaggacttttgctgtaagatagaaggatcaactagagcatacttggcatttgctagacagtaatgacaacatgcactctattacatacaaccaagtnctggtgaatccaactatactggctggatggacagaactcagagatctctatagactcataggaaatcattatgtgatcatg

SEQ ID NO: 173561 - DNA, 445 bp, Glycine max
  unsure (1)..(445): unsure at all n locations
gcttatgcgcatatttacttacgaacgttctcttgttcaagacattctttntaactaagaaaaatgcacccatatacaatcaaggcagcttcgtcacctaaattatttacctgtacttccaaagtgtatttggtacttacatcacacacatcttcttggctaatattacatacatgcatactcaaagcattttggggtaccaaatattgcacatgtgcacatcttggtatttctaatacctatacatacacaaacttcatgatgaatcttgactatctacacaataaggtgctacatttcatgcccttttcatgtttttgctacctaaagccgcatgcaaattcaagtatattttcctttgctgactaaaattgtattcaaattataagggatatatatattttttttgtaatgtattctctttacataacatgcaacatattta

SEQ ID NO: 173562 - DNA, 457 bp, Glycine max
  unsure (1)..(457): unsure at all n locations
ntntggagtagaaacatgggaccaactcagtttatntctaatttaaagaagtcgtatctagtcaaggtctgagagaccatacaagtttcctaacgatttctaattatgtgggccattaagtctatcatatgctgacaatagccgagaagcccatgaatctcttcgggggtggagtaggtgtctgccattgccttggccttggctaacaagcggggaagttcttgactcccgttcaaagtaagagcaaaccggtccatccacatggttgcctcttggtgtaaagagtcgatcacccttcctctagcctctttttccgcatatacttgagcatactcattcgcgattctatgcttgtgggccatggctagaactaactcttcttggtacttggcgatgatagctagcatggtggtctccgtctcgcataaatgctgagacaagcttctttgggacctga

SEQ ID NO: 173563 - DNA, 400 bp, Glycine max
  unsure (1)..(400): unsure at all n locations
gccccttgagcctatgttcccctttctttgttntgaagctcattacaagccttaagtgaaaaaccatgatatcaccttacccttaagaaattttggagctttggaattgttttgggaataagctgggaataagtgtgggggggtatgtttcattggaagatatgatttttggccatgcttaatgtnttattttggccatgcttgatgtttatatatattgcctagttctttctttaatcttcaatttcgtactgttcaataaaaaaaatcaaaataaatgagaaataaaaaaaatatcaaaaaaaaattcagttgctgcaaattctgcaatttcgtactatgcaaaaaaaaaaagaagaacaaaagaagtgaagtngaataaataagttcttgatatgag

SEQ ID NO: 173564 - DNA, 448 bp, Glycine max
  unsure (1)..(448): unsure at all n locations
tatntgaaggagaattccacttatgttatgcataattttaaagtggtgaagtttgatggtcaatttagagtgtgtgaacatgagtacaagttagtttttattggagtgactgttgttagagaagcttatttgcatgaactgccttttaaggaatttagatttgttgaatttggaaatgtccgtgctgggattttgtggctggcctgttggttggtgagcccagtcacaatttgtgctctcattttgatcataactttttttcctttttttaatgacctgtttttattttctggtgttttaagatattattggggttgttgatcaggtgctcttttggcatgtctcatcaaanaataccagggttgtttttagaatgaaggatttgagggtatggtttacaacaattcttcccnnctctatatatatttttgtattatcaatttatatt

SEQ ID NO: 173565 - DNA, 438 bp, Glycine max
  unsure (1)..(438): unsure at all n locations
tctagagtacttgtgaaagaaaatttattgatcttcttcataagctaaaaccagcttatgcataagctatatnggagaagttctcgtataagttttctaaaagatggtagccatgtgtgtgccccacagactttttcatatttgaaccagcaagctttagcaggcaggccacaataatccaacaaagttacaacttcaacaaacttaaagaatttaaaaaattggcagaattatgatcttttattgcaacatttcaatgtgatttttagaatggatgaactaagtaactagataatcttaccacagccttgcaacgcaagaaaagccaatcatgcgggcaattatccaataagtatatagagtcctttggttctgccactgggaagaaacatatgttggtgaaaaaaacataaaacttaatttcatcaagaaaacatg

SEQ ID NO: 173566 - DNA, 444 bp, Glycine max
gaccttaaatctcagcttattaagaggcttctagcacactgcagacatctactctaagtttccaacggtcagatcatggaaaattgtcttgtgaagttgcagaccaaatttcgagaagatccaacggttaatgaaggctgggcagcttttttaccgaggcagcttcatgtagctttctctagaagcttcatttagaggcttcctccaaaagcttcctcgtggcttctttgagaagctttctcaagaggcttctttgagaagctagatccttatctatccacacccctctattaactaaattaaattccttaaaaataattacggatgaaaataacgtaacaaataatcaaacatcaaacataattactaataatatatagatatatatatcagggtgttacactaaacactcaatcaatccaaggatccactccaagtgatgga

SEQ ID NO: 173567 - DNA, 304 bp, Glycine max
taaataaaatgttgctacttatcttcttaagagattcgatcaggattctctttaacttatattgacacactttatcccacaagtgttatcttacaaaatcattgtgtgataattgttttatcgattagtggacgaccaatgtgttggtttcattaaaactggttttagtcattgaatgacactaatactaacatgcgttattgcatatcttattgagaacaacacttgtgaaagggagttcaatttatctaacacggctttcacctctttctacctgaatctattattcttatgaattcaatta

SEQ ID NO: 173568 - DNA, 366 bp, Glycine max
  unsure (1)..(366): unsure at all n locations
tctccccaatttctataatagggggagaagtgaagtgtatattggttctaaaatccaagccgaggcgcttccgaaacgtttccgtgaggaatttcgcgaaggtttcgaccgttcttcgacgttcttcattcgttctttatcgttcttcgatcttcaacgggtaagtaccttgaaccaagcttttcgattcattctatgtacccgtggtggtccacattgtgtatcgtgtatttntattctcgtttcagttactttttataccctcttttgatgtgcttaagccattttatttaagtcatttctcgcttaacctataaataaaataaattatcaccgatcgtttgaattgattatcccgtaacttcg

SEQ ID NO: 173569 - DNA, 363 bp, Glycine max
ttatgacatatattatggaatcctataaaaatagtatcgtaatgttatttaaaaaaaataaagggtgcagtctgtagtgccgcaccgtacgatctcacgcgctatcctgcatgcaaaatcagggatctgtgtggtgcgcgtgacagttccggcactggtggcgaggaaatgtccttatcatccacacgcaagagggagcgcttataaaacacagaccgtctaagtggcgcgtgttaggaacgcgcacgtagtaatttacaccagacactatttgaagttgagaaattaataatgtaataaaatatagggacggaggggatctagcctcgattcgagtgggctaccaattaaatatcgcttttc

SEQ ID NO: 173570 - DNA, 333 bp, Glycine max
  unsure (1)..(333): unsure at all n locations
tattaatgcttangagattaacaaagcttacaacgatttttttccgttgttgngcatatagacactaatcaacaagcttagatcaaaatgattgaaaactagtgcgtgtcaggcacatcttggctgactagagatatgggggaaccaataatcttagtgtatttaaagcttgaccttcattgaataagcctcttttaaagaataatttacgaggaccattcgtgaaaaataatactctctacaatcttggatatcggaacttaagctacataggactaagacaagattagaatcatatgacagaaagctatgagattattaacattgacaaaa

SEQ ID NO: 173571 - DNA, 438 bp, Glycine max
  unsure (1)..(438): unsure at all n locations
catgcaagcttctcccctaatattctataaatattggttataagngaagnagaaaagggtcagcccttttggttattcagaatcacttaaaattagtgagaaaaattggttccgtgaagaaaatccaagccgaagcgcttccgtaacgtttccgtgggtgatttcgtgatagttttctaccgttcctcgacgttcttcattcgttcttcgccgttcttcggtcttcaaccggtaagttccctaaattgaacttttcaattcattctatgcacccttagtggtcctcatttgtttttacgtgctttcatttacatttcatttactattcgtacccccttttgacatgcttaagtcattttatttaagtcatttctcgcctaatctaaaaataaaataaatttccaccgatcgtttgaattgtatcatccgttaatttcg

SEQ ID NO: 173572 - DNA, 369 bp, Glycine max
  unsure (1)..(369): unsure at all n locations
tcgattatcctatgtgaattggagaagatntttccttttctatttttgacatcatgattcacttaattgttcatctagttcgtgagatttgattgtgtgggcctatttatttacgttggatgtatccgattgagcgctacatgaaggtgttgaaaggatatacaaagaatcaatattgactagaagcaagcattgttgaaagatacgttgctgaagaagcaattgaattttgctcagagtatataaatactacatcaccagtcggggtttctcanagtcgtcatgactccacgactcaatgtagggaggggtacacggngatttaatgtcgtaacgatggatcagcaacacctatcacaagctcattta

SEQ ID NO: 173573 - DNA, 288 bp, Glycine max
cattaccctcgaatatattagtggaagatcgcgaacataggaaccatatgggaaaacgatcaaagtatgtatggcgccgctggccgggatcagcattcattataaggggtcagcacagtttacaacattgcattatattattctctatgatacattgatccttttagctcatattatagtcactgcacattctattgttcttttgactacatgaacgctgatctggctctcttgcatgcaaagaagatctactacaggtgagttgatcccctccttttggagaataac

SEQ ID NO: 173574 - DNA, 427 bp, Glycine max
  unsure (1)..(427): unsure at all n locations
agctngtctacattcattngttaagtgcttatataagcaggtctgagaacagatgttacaagaagtgaacaaactttctttctctccttgtgctatgaacctatcattctttggacaaaacttatcaaacttaaatagttgatcctttcttatttataagatcatattggtttttttttctttcaaaattaacatggaagaatccttgtttgtaatcataattggttagtggaaccattcgtgttgaaggagaattgggcgtagtttaaattaacttaacccatgtataacttgtgttcttttttgcttatgtttcccctcccatttttacttagtttatcttggtaaaaacatagttttgcaaaaggttttctcaaaatcatatacagattattcaaccctccttctaatgtgtgtcttggttttt

SEQ ID NO: 173575 - DNA, 464 bp, Glycine max
  unsure (1)..(464): unsure at all n locations
tccttttagtgcgtcacgtttaataccgagctctatggtggtgcgagcctttgacggtactcggcgggaagtgatgggggaaatcgacattcccattcagataggcccccacacttgtaatgtggtgtttcaagtaatggatataaatcccgcctatagctgcctcttgggaagaccttggattcatgcgctgggaatggtcccttcaatgcttcaccagaaattgaagttcgcagtgggtggacttttagtgatagtgtcgggtgaagaggatatgttagtgagcttcccctcctccgcaccatacgtagaagcgacggaagaatcattggaaacggctttctaatccttcgaggtggtgagctgcgcctctgtggaaccaagtccgttgctaccttctctcttcaacacgaccataatggtggcaccgtgtatgctcangaaccgatttgagcccgaatggg

SEQ ID NO: 173576 - DNA, 383 bp, Glycine max
aaccttatgattgttgaccctttgaccaagggaatggcgctcaagacatttatagaacatggtggaaatatttggtattgatgaacaataagtggaaattaccttatttattttactgacactcttaggtcatttatgatatgtttctaaatattggtctctatggttgcatgaatatttgtattagaataatgttagcaggttttgttttgaaaaagacattatgttgtatcaattatgtactcctaactaatgatcatatttaggagaagactaatttgtaatacatggaaggaactatgtagattaagtgatgtacaaccgccacgacttgaattggtttctatttttaataatgaaattatgatgtatccaatgtatag

SEQ ID NO: 173577 - DNA, 435 bp, Glycine max
  unsure (1)..(435): unsure at all n locations
ntatagcagagaaccgtcttagaatgtctacattctattatggtcttttggaaaactattttagaatcataaatttatttatttttttaaatatatattctaagacagttcttgaaaaactgtcttagaaaagttgcacattctaagacggttttcaggaaaataaccgccttagaatgtgcagtttttctaagacaatttttcaagaaccttcgtagaaagtttttactttctacgatgttggttacaaagacagttcaaaatcgtcattaaaagtgccttagaaccgatgtagaatcatctttttgtagcagtgcaggaagcttctttcgatagaagttggttttgacaattaattatgcacgtgcgttcaaaagccatcaaaagaaaatggaagaaagtcgtgcttacccatcatatatcttaatctaatat

SEQ ID NO: 173578 - DNA, 441 bp, Glycine max
  unsure (1)..(441): unsure at all n locations
tccatcanaactgtagatgtcaatataaagacgcgttatctctnttacgaagttggtcctggatgcttaacaacaactcatgaaatcatcaataatttatacttttgtaaacatcaaaattcaaggtatggtaggtcgtccaatgatgagtggatcatcctaacctaacatgatttagttttcttatttttgtgttntgtgattctgaattttgtaattccttattgattttgctttatgattatccctaatttgctgcttgaaaattgaaaatgtagagttgaactaaattactgtatacccccttattgattctacaagattgacatttagtgttgtgaggattacttggctcttttctgcctttgagcatatgcattcatgatcaactcttaagcatttatttatttgattatgaatatattatcaacctgatcaaat

SEQ ID NO: 173579 - DNA, 435 bp, Glycine max
  unsure (1)..(435): unsure at all n locations
gctntgatgatatggtcttcaccgaagttttgatctttggggtctaaaaagaggccaatctgatcatcatgctttgataaatgcccaaaaaaaactagggcaaatgaagagggtgagaatgagggaaaagcccatgctgtgactgccattcctatacaaccaattttcccaccaacccaacaatgtcattactcagccaataacaaaccttctccttacccaccgcccagttatccacaaaggcaatccctaaatcaaccacaaagtctgtctaccgcacttccaatgacgaacaccacctttagcacaaaccaaaaacaccaaccaagaaatgaattttgcagcgagaaagcctgtagaattcaccccaattccagtgtcctatgctgacttgctcccatatctacttgataattcaattgtagccataaccct

SEQ ID NO: 173580 - DNA, 353 bp, Glycine max
  unsure (1)..(353): unsure at all n locations
tcanattcagagaggtagttatttaccatggttcgctgcaacaatttgcattgtaatcctgttggatcttcgtatgtggttgatgcgaatcgtgaatgaagagcatgaagaaatgctggccaagacgataactaaccatttcggtgcatccattgaaaccatgctaatgcctgaccttccatatagaatgatgcaatcatgagtctttcatgatttggagttgtgtgatactcgaagaactgcattatcttgaagatctagcctgtggcgtcggagccatcgaatcttggcacatcgagcttcatacgatgcggtgctgtgtgtgatcctgatgctgataacgaagatgcctc

SEQ ID NO: 173581 - DNA, 290 bp, Glycine max
acattcctttcatcccttttccctttgctaaagaagaattcgccaaggactaaccacctgaattctttttggatccctctttctctttttcccaaaagaacaagggcttaccggcttaattcttttggggctcccctcttccttgtcaaaaaaattaaaaatgacacagttctgagaaatttcttttgattctttcctttcccattttccaaaaaattcataagacttaccgactgatatttttttgtttcccccttccaaaagtcatagggtttactggctgagaactt

SEQ ID NO: 173582 - DNA, 335 bp, Glycine max
ctttattacctttaagaattaaaaaaatcttggttgaaaagagacgagttctgataagcataagcataagccacacatcaccaaggtatacacccgtaaacagcgagcaagagaagaaataaccatggaccaccagcagcagggcacacaacacccaaggggtgcaaaccacccaacagttacgacccacccaaagggtgaagggtcagaagatgtgaatcaatgggacatgacacaacaccaaggggtgcaaaccacccaatagttacaaaccacccaaagggtgcagggtcagaagatatgaatcaaggggacatgacctttgtgaacagtca

SEQ ID NO: 173583 - DNA, 423 bp, Glycine max
  unsure (1)..(423): unsure at all n locations
taagctggatccatcatacaattgttaattgtatcaggtatttaaagcctacaaaaatggtgagttgcaatgaagttgtaattgcaagttgagagacagactaagtaacagcgagttagtgatatacaaatgctaatatatcaattatggtcaataattcgtctttagtcctttaaaagtgaaaatactataatatagtagatgtatcttgttgtcccttaaatttatacaaatcaaacaaatcctaattgtcttattcttactggtttctaaactttatttaggtttgtggttgcattcagagaggaattctataagttgtagttgccgactntgggtgacatcaaggaaagggtaagatttaagctaggattgcctattttgagcattattntaactttttatgcactttaagtatattcc

SEQ ID NO: 173584 - DNA, 332 bp, Glycine max
  unsure (1)..(332): unsure at all n locations
taacagcattatcatcgcgtttttttaatanaaggaaaccccacaatccatccccggtaatgtgantatttagtcttgcttctatcaagttctaaggcaacaatgcatttcctaatgctaaagtcacctaacaatacacataaatgggtgaacagaccaggggatttaagaattatacattgaagaagcattgaacaccaaaaacatttattagattgaaaagaatttaactagggtttagctaccatcacattaccctacacaaatgaaatgaagtcgaatattgtgctacacaaaagggaccctcttctttttgcacttataattcttaa

SEQ ID NO: 173585 - DNA, 457 bp, Glycine max
  unsure (1)..(457): unsure at all n locations
tgtttaccccatggttgaattgcttacaatagagncgtttatttctccactaattggcctccttttgaagttgcttatggttttaacccactaactcctcttgatcttttgcctatgcctaatgtttctgtttttaagcataaagaaggtcaagcaaaggttgactatgtgaagaagcttcatgagagagtcaaagatcaaattgagaggaaaaataaaagctatgctaaacaagccaacaaagggagaaagaacgttgtcttctaacccggagattgggtttgggtgcacatgaganaagaaaggtttccggaacaaaggaaatcaaagcttcaaccaaggggagatggaccatntcaagtgtttgaaagaatcaatgacatgcttccaaagttgagctgcccggtgagtataatgttagttccaccttcaatgtctctgattatctctttttatg

SEQ ID NO: 173586 - DNA, 409 bp, Glycine max
  unsure (1)..(409): unsure at all n locations
tagtctacaacttcaagttttgctagcatagtctagaatcacacataaaaaacaaatgagtggccagcgcaaggactctattttcgctgcataatacatacccgaatcactggttacgcccagtcatcactagctgcaatgagtntcttctacccatgccagccaagaccagcgtgcttccctataagctgaacccataattgtcattccttcctcaaagaatcccacctattgttgaattgtttatattcatatttcagatatgctgccttattgaacttttttgcaatattttcccaaccaagcttagcgaagaggctatgacgtttatttccagaattcacctcttctatgcacactttcaacataagctcagcatttttataacaccattctgctttctttcttt

SEQ ID NO: 173587 - DNA, 189 bp, Glycine max
tagagagaggatgacttgagaattggatcacgtaaagtgtgtttaagatgaatatggcaaagtcttatggcatgaaaagatatcaatgaatggtggaaggtgtatctccacagctcttttattgatggatactgatattacttttacagtccagacaaagaaataaagaccttaacttttagtttaatc

SEQ ID NO: 173588 - DNA, 430 bp, Glycine max
  unsure (1)..(430): unsure at all n locations
tcctgctttacggacctatgaaactcagcttaataaaggtatgccaagtgggtggaattcctatagctattcccttatgttatcaaacataaaaagggaaaaggtaatattgtggctgatgctctttctcgccgtcatgcactactttctatgcttgaaacaaaattgattggtcttgaatgtttgaaaagaatgtatgaaagtgatgaaacttttggtgaaatttttaaaaattgtgaaattttttcagaaaatggtttctttagacatgaaggctttcttttcaaagaaaacaaattgtgtgtgcctaaatgttctacaagaaacttgcttgtttgtgaagcacatgaaagaggtttaatgggggcatttggggtccaaaagactctataaacattacaagaacattnttatcggccttatatgaaaa

SEQ ID NO: 173589 - DNA, 330 bp, Glycine max
ttactagcaaatctattcaagtcaccccttatattcttcattctcagcattcctcgccagctaagggatagaccctcttttaattcgaattaatgttacatgaatcatttctgcaagtcaatgtcttattataatgcacacctccaaatatatatccatgattgttgataatctgggttcgctttgctggctaagctatggatgatggatttgatagaatctttttgtggcaggtcaaggttttaattgaattaatgtacattaatcattctgcaggcaaggctatataagcatcctccaaatttatccatgatgtgatatcaggtggcc

SEQ ID NO: 173590 - DNA, 384 bp, Glycine max
  unsure (1)..(384): unsure at all n locations
tgtcgtgccatcatcgttccggcctaaacccattcctgtctcatacccatcccttaacataactcgagccaccatcaagaggcaccagataaatatggttacaccagaagagactccacataagcaccgttcacaatttccagtgcttgaaatgacatttccagtgactcttccgcagcctcaacataaggcgtagaagacggacaactcaccagtatgtcttccttgcccgacactataaccaactacccctccaccacaaacttcaatctctagtgcaatgttgatgggaccaccccaaccgaatggatccaaggccgacctaacaagaaactataggtggggtttatgtccatcacttggaaagntatctgacacgcgtgt

SEQ ID NO: 173591 - DNA, 442 bp, Glycine max
tagattggattgtacatctccctagaagagaggtttagatataattttcatgcctccacttacttagacctacgattttagtcctatcttttaattaaagacattttttctatacttttagaaaattcataattttagtcctttacttttgaattgagatattttgtctcccattatataaaaaaatatgatttaagttcccataagcaatttcaaatgctgattataatactaaaatttagatcttacaattaaaaattatacaaaattgtatcattaatgaaaatatatcactccgtgaatatttggttgaaatttaatcacaagaagatatctattgatttattgtaaaaaagcttctttcagatgacattgtttacgaaaaatattaattaatattataattcatataccatttattaataatattttatcatctaaa

SEQ ID NO: 173592 - DNA, 379 bp, Glycine max
  unsure (1)..(379): unsure at all n locations
tcttgcaatttatattctatgtatttgctaaaggctaacaccctancacaatatggcaatagacgagttgactctagaaatataaacagagactaaataagactgatcatggtatcacaatttttacatctatctcccccttcctttaccaagaacacgaatgaaagtaaaaatgatagaatctttctttttcaaaagaataaaataaagagatgtaagatggaaatctataaataattgaaaaaaaaaaaccctacactctacccatcacattncaaattgtcaatgggtgttaattaaacaataagaanaatcaaggacatctttccttcaaaaaactgttatttttctttcatttccaattttttcaaatacttac

SEQ ID NO: 173593 - DNA, 301 bp, Glycine max
  unsure (1)..(301): unsure at all n locations
taatataataaaactacttttggcggtaaaaaccacctgggtgacataaatctttgatatgatactcaccaattacccaggctgcgggtaaagaggaaaacaatttatttatttatttttaanaggaaagatttcatgaatagtgctatattagcatcttaggatgaaaaatcattgttataaatctgatttttaatggttctgagaggataactcggataattgttagattaatccaacggctgagatcctattacanattgaaagactgctacagagtacagactacaaaggactcaac

SEQ ID NO: 173594 - DNA, 438 bp, Glycine max
  unsure (1)..(438): unsure at all n locations
ttagatgcaaattgtgacgcgcactcacactcacacaatctttatanaaagtggaattaaaagcttaactttaagctagattgggtaactatctaactgatagagatatctaggattagaaagggagacaagaattagatgaggttcagctgtctatcaatttgtgtaagcatgtaagttggtgttgtttccaacaacccacaactaggttgcttagataaaatgtgttttcttgttaaatatgtaggacatagtattttgaagagtgaagataacccaaagctttgaatatgagctgtgaaactcctcaaataacacgctaaccttatctagaaagaagtaatttacattctatttcaagtacatgcaaccaacacaatatatagtgactaatagtcaaaattttgtactcaacaaccatttctaaattatgttttg

SEQ ID NO: 173595 - DNA, 343 bp, Glycine max
cacatgcttctggaggaatattctggacggccccactagaccaggttgctatctgcacacgcatatttactaaagacaccccctgcctattatggtgattcttttgttaataaagatactgaaacttacgaacttccgcacaacactagttatcgttacgaaatgctacggaaccttagcgattacataatcatccactctattgacttacagaatgttactgaacctcactagttgagcaacgatgctttcatttgatttccggtgtgtcacggcaccgtacgcgatgtgcataatattctttttgatttccggatgtacagaactcacaaagtgcttatga

SEQ ID NO: 173596 - DNA, 428 bp, Glycine max
  unsure (1)..(428): unsure at all n locations
gcttgaagatgttttgatntttacatgcccaactccttngagtggcatttntattggctgttatattgaattttgcatcttagtccatatcatctcctttgaacattgaacatgcatcatttcatgagcttagctatttggtaagtaagatagatgattcttagttatggcatcgtaggattgcacaaataaacatgtctcatgtcaatcatctagttaggaaagacttattaattggtcttccaaaactcaagtttgagaaaaataagttgtgtgaagcttgtcaaaaagggaagccagttaaaaaaactcttcaaagtaaaaatgttgtttctacttcaaaaccttttgaacttcttcacattgatttatttggtccctctagaactatgaggtttgggtggtaattactatgtgtcgcatcctac

SEQ ID NO: 173597 - DNA, 411 bp, Glycine max
  unsure (1)..(411): unsure at all n locations
ntgcagcatatgtcactctactctaaatntgtgaaagatatgtttacaaggtttcataaatatattcatcaggaaaacatcatattggaaggaaattgtactgctgtgatccaaaagatccttccacccaagcatacagatccagggagtgtaactattccttgctcaataggggaagtcaatgtgcgataagctcttattgacctggtagccagtattaatttgatgccactctccatctgcagaagattgggagagtgggaaataatgccccctcgaatgactttacaattagctgaccgctccattaccaaaccatatggagtaattgaagatgttttggtcagagtaaaacattttatcttctcagtagactttgtggcaatggatatctctgaagatactgacatc

SEQ ID NO: 173598 - DNA, 438 bp, Glycine max
  unsure (1)..(438): unsure at all n locations
gcttataagcgcaggtttgggagacaattgttaagtggtcgcgatatacgaagatgacgttccaagtacatcggatttggtacgaccatgccctcctgatttccagctgggaaattggcgagtggaggaacgccccggcatttacgcaacgagcataatgtaaacctttacggttntaaaagctctatagttgggcctaggctttaaagtttttcttttgtaaggctctgtgtcttttgtttttgaatttataatacaaggatctttcttcatctgttcctatgtctctacccattctcatccatttgcatgtttatttctttatttctgaaacggcagatctgatgacgagtcccccgaaggtactaatacctgtgacccgtctatcaacttcaagcaagaaatgaatcaaacggaagatgaatgaaacgaggatgt

SEQ ID NO: 173599 - DNA, 440 bp, Glycine max
tgtgtgcatggttactttcgtgaaacatcaattattaactttttattgtttaaagacaaataagagcaagggtagacaacatgcaaaccattttgaccttttattgaaatttaacttatgagtaattgaggaagcaaagatcaaacacttaattacttagccataaagattatattttctttttaataatcagtgaccaactctcctaaaatctctagttattagatgatgtcaggggaatgttatgagttttcagcatttattgaatctgttgagctgtaaatatgtaagtatttgctgtaaatataattattagaagacaatttgctgaaaatataattattacgatagtcaactcacaattccttaaatcaggggatgtatttagataactaattggcaattatttcatttgttgagaaactgatattgttgatatc

SEQ ID NO: 173600 - DNA, 334 bp, Glycine max
  unsure (1)..(334): unsure at all n locations
gatttaactctccaatgaaacaaccgagggaaacaagtgaaggctcaaattgaagcccatcaaatgtaaaactctctcttgctccatatttagtntgaaagttntatatacactagttagacatgcagcacacaaggtgcattaaattaggaaaagccttaaaaatttaaaacacaaagggaggagggtttttgatacataagtatctttttaagagacaatcttattaaatgtatggcacatatatatgggatccaaagtttaaagttggttgggataagtttttctaagattttgttgaagaaaaaaaaggaaataaattttccattattta

SEQ ID NO: 173601 - DNA, 467 bp, Glycine max
  unsure (1)..(467): unsure at all n locations
tactaagctttgaacctcagggacttatgagagtgagtgcttgtataatggttcccgtagaagctttgaaggaggagtcattggagtcaatatctggtcaggattntgagaagactgaaaagcaaaatgcaggaaatgggtttatgaaaaatgctttagagcataaactggaaaattcccgcaagggataatttacagaccctatgaataataacatgcgtaatactttcatgaataagtttgaatctgatgcagtaaaacacaaggtagatcataagtatgagaaccatcagaaagtaaaggccgtgtctgagcggaagactaagtcaaagggtgatctgagtcctggaaaagctgatgctgttggaagaaaagatagctttggtggtactaataatgcaatggtaattgataaagggattgctggcttttgacatacttgtaaaagtaaatgaataagtcaatgt

SEQ ID NO: 173602 - DNA, 308 bp, Glycine max
gcatgcaagcttatgcgcctatttacttacaacattctcttgcacaagacatttaaccgaaaaatgcacccatatacaatcaaggcagcttcgttacctagattatttacacgtacctccaaggtgtatttgttacttacatcacacacatcttcttggctaaactcacatacatgcatactcaagcattttggggcaccaaaaattgcacatgtgcacatcttggcatttctaatacctacatacgccaacttcatgatgaatcttgactatctacacaataaggtgctacatttcattgctctttt

SEQ ID NO: 173603 - DNA, 423 bp, Glycine max
  unsure (1)..(423): unsure at all n locations
ntatagcagatgccactctactccaagttnttaaaggatatgtttacaaggaaacacaagaatattcaccaggaaaatgttgctgtggaaggaaattgtactgctgtgattcaaaagatccttccacccaagcataaagaccttgggagtgtaatcattccttgttcaattggagaagtcatagtgggaaaggctcttattaacctgggagccaccaagaataaagaccctgngagtgtaatcgctacaacttgatgaccgctccattaccagaccatatggagtaattgaagatgtgttggtcagagtaaaacattntatcttcctggaagactttgtggtaatggatatctgtgaagataatgacattcctgtaattttgggaagtccattcatgggtaactgcagctacatagtggatat

SEQ ID NO: 173604 - DNA, 394 bp, Glycine max
  unsure (1)..(394): unsure at all n locations
attcctggggaatctttaaccgaccaaaaacccggccaaaacttatcttcttctttttgggcaaagtatggcaagccgggggctaataaatttttcttccaatcagacctttggatgcaattggggatcgattcccctttcaactatattttgacggggatttaagcccatccttcgcttgccttgaatggtaaggaacatcccaatacactgtcacaaaacattttcttcacatgcataacatcaatacaatgtctaacgtcaagatcacaccagtacggaagatcaaagaaaatggaccttttcttccatatgcaacttttacttttatcctttttggngtcttcccaaatacagtattcaggtgttgaacccgctcatatacctgctcact

SEQ ID NO: 173605 - DNA, 375 bp, Glycine max
ctcagctgactaaaatcaccacgccatatttgtcattatgtgcagtaactatcgagataaagaaaaacagaggctattgctcgagaagaaaagaggaaaagcttatgaacaagaaagcgaagaaattgagcaagatgatcaaaacaagcttttgttattcattgagcaaaaggaacttatatacagaatgagaatagatccagaaactaacacaaaagcagttacaaagtttgtgacggatctgttagagttccaaatgaatttggcgggacatgacagcttgattaacaaacacaaggaaggagaaaacagtgcatggaatttaaatcactaggtcacaatataattataaattggcctctatcctacatatac

SEQ ID NO: 173606 - DNA, 435 bp, Glycine max
ctgcaagcttaatctcctttaactgcacattgttttttatttgaagagtatccttgtggaaccttcacccgacgaagacactgacaaaaacttatcttctccttcttggacaaagtatggcaggctgggggctagtaatatttcttcccatcaaaccttggatgcaattgtgatcgtatgcccatttcagctatattttgacgggtattcaaaccatccttcgtctagccttgaatgttaggagcatcccaatcacactgtcacaaacatttttctccacatgcataacatcaatacaatgtctaacgtcaagatcagaccaagtcggaagatcaaagaaaatggacctcttcttcatatgcaacatttactcttatcctttttgggtcttccaaaacaggattcatgtgttgaaccgctatatacctgctcact

SEQ ID NO: 173607 - DNA, 391 bp, Glycine max
  unsure (1)..(391): unsure at all n locations
tgaactagaaaatcaccacgcacagatttgcactttatgtgcagnagctatcgagataaagaaaaacagaggctattgctcgagaagaaaagaggaaaagcttatgaacaagaaagctaagaaattgagcaagatgatcaaaacaagcttttgttattcattgagcaaaaggaacttatatacagattgagaatagatccagaaactaacacaaaagcagttacaaagtttgttacaaatctgttagagttccaaatgaatttggcgggaaatgacagctcgattaagaaacacaaggaaggagaaaacagtgcatggaatttaaatcactagttcacaatataattataattggcctctatcctacatatacttgtgcatatatgtccat

SEQ ID NO: 173608 - DNA, 436 bp, Glycine max
  unsure (1)..(436): unsure at all n locations
gcaagctnccttatgcctgtatgatgtttttttttcctncatgttggctactttgcagtgacatgttcatccattgaagatgctcattcttctcaatatgcacattggatattcccatcattgccactggggaattaaagaaatttgtctgcttcagctttccttgtaatgcttgcttcaattggtttcaagtgttggtggtttagaaacttgaagtgtatagacttgaacgtttatattttaagagaattggactaatcatataagaagatgtttaaaggggtgctgtttctctctttctcttattactatgttactaatacaaaatattcactgactttactgatcattaatctccctctgaaaatttgattgactacacttactgatggtctttttattaaatacattttcttcactcataatgcttaaattc

SEQ ID NO: 173609 - DNA, 377 bp, Glycine max
ttataaaccgaatgaaaattgactaagaaacgcctacttataattattagttgcttgatagtagaaagtggatgtaaggtggcctactcataaagctgtaataggacttgtttttaatctatttttcatagcatatgctatttcctgagattttgttaataaagttggatacaccaagtggatggaatgtcaatataaacgatgaagagttgagctaagttgtagcctaaaagttacaactgtgatattcaatttgtttgtgttttttgtcaagttgatataacagttaagatttagtttatccagatttgcattgatttcattttgaagaattgtctgctgaaagtttaattctgtttaattccggagtcaggtgt

SEQ ID NO: 173610 - DNA, 405 bp, Glycine max
  unsure (1)..(405): unsure at all n locations
agctttaagcaaattcgaatgacaatatcttttgactncggatgtccgatgagtcattttataatttgagacgctcaaaattgaatgcaggagctcttaccaaattcaaatgccaataactttttactcggatgtccgattgagtcccgtaatatatctagatgctcaaaattgaaaacagaagctctgagcaaattcaaacgacaatagcttttgactcggatatccgattgagtcatttaataattcgagacgctcaaaattgaatacagaatctcttagcaaattcaaatgacaataacntttgaatcgtatgtccgattgagtcatgttataatttgagacgctcaaaattgaatgcaggagctcttaccaaattcaaatgccagtaactttctactcgga

SEQ ID NO: 173611 - DNA, 456 bp, Glycine max
  unsure (1)..(456): unsure at all n locations
tctgtnttccattaccaacgtctcgatatgttactgtactcaatcggacatatgttttaatagttattattgttttcattntttacgagctttcattttcaatttcgaccatctcgatatattacgggactcaataaaaaatccgagtcaatacttattgtcatttgaatttctcagagcttctacattcaatttcgagcgtctcgatatataacgagactcaatcgaacatctaaggaaaaagttattgtcatttgaatttgctcgaagcttctgttttcaatttcgagcatcttgatatatgacgggactcaatcggacattcgagtaaaaacttattgtcgtttgaatttccgcagagtttntgttttcaattttgtgagtctcgatatactaaatgattcaatcggacatcccagtaaaaaattattatcanttgaattttttagagcttct

SEQ ID NO: 173612 - DNA, 210 bp, Glycine max
  unsure (1)..(210): unsure at all n locations
gattcatcggtcattcttcgttttcttcagtcttcaacgggtaagtacttcaaaccgagcttttcaattcattctatgtacccatgggtggccacattntgtttcatgtatnntttattctcgtttcattcgctttttatacccccttttgacgtgcttcagtcatttatttaagtcatttcgcgcctattctaaaaaaaaataaatccc

SEQ ID NO: 173613 - DNA, 432 bp, Glycine max
  unsure (1)..(432): unsure at all n locations
tgtccacaaaaataggtttttgaaagtttatcatttcattttcttaccaagtaaaatggatcatttttaaggtctaactccttaagatgatcacccctcaagtaaaaaagaataacttgattcacgcatgtgaaagaactacgtaggtctgatttcttctccaaaggagggtacgtaggagcaaaagccccgcttttgcgacctcgaaaaattaaaagaaataaagttaggtaacacaatttccacaattctaaaaaataggctggtgtcctttgagacaaacgtgagaggtgctaataccttcctcaagcgtaaatacaacttacgaacatagaattttcattttgaccggnttccttcggtttcccgacgtttccacaaatatacgtggtggcgactccgcgcatctttcttctttgaaaacacacccgg

SEQ ID NO: 173614 - DNA, 247 bp, Glycine max
gcacgacattgtcgcacgaaggacggaaacaagtggtacttgtgtaagattcttataggactttccttcttcaaagctatcactagtgttgcacatgcttctatttatatactaagtagctcccttgagaagcattcttgagaacacttgctcgagaagcttatgagagaaaacatgcttgtgaagctcgagcttaccttctgacacccctataataaataaacttgactccttgacaagcttacct

SEQ ID NO: 173615 - DNA, 336 bp, Glycine max
  unsure (1)..(336): unsure at all n locations
ttgagccanaatcctgactcaccatataccttgacccattgtgagaatgtcaatccttaccctcggaagcaaagaataaaggagagaaggaaanattccaatcaaaggaaaaaaggagaggaaaggaaattcccaatcaaagagtgggagaaagcaaaaagaaaagaaagaaaattcccaatcaaagaatgggagaaagaaaaagagaaggagaagaaggaaggaaagctcctgatcaaggatcgaaagaaaacagaagatatgtgcagaggggatctctggaccagacaatatctaaacaaatacagaattgtcaccanatgaacaaaagaaaga

SEQ ID NO: 173616 - DNA, 112 bp, Glycine max
catcttgctcctctctttgtcatttaacttttggtcttttcttccttctccttttttatatggattgggggataataattcatatatgtatgtttgtgtcggaacctaccct

SEQ ID NO: 173617 - DNA, 401 bp, Glycine max
actcagcttacaatgaactatctagtatcaaaatgaagctacatcagaatgatgaagaacttcaatttaaagactgagccttattatgtagttcgtaatggtatagaatgcaccataaagacaacattatgtcttccatatgatgtcgcacatatagaggtcacatgaaaagactgtggttgataacatttcaatttccatatactgctacatatatagacggcacattagacagtgaatgctgactacattagaagaaacaaacaagtgtaaagctaaaagtgtccatgtgaagtgtaacatccataatgtgtggcttctcagtggatctcacacaatgacacttcactcaacatccttgttaatctgaaccctacataggtagccctgatgcaatgcta

SEQ ID NO: 173618 - DNA, 332 bp, Glycine max
cctgcggcatgcaagcttctataatatcactgagggcgcgagcttttctctttaatctattcccaaacttttacacgagactctgaacgtaagttcacaacacgaggacctcctccatccaaatcaatggtttgcactatcgaataggtgaatggtctttaaaaaaaaacccgaatattctgtgaggggatggctcttgcacaattcttccaactttaatagcctgttaagactccttgataccatactccacctaaacagtgatacaattacctcgacgattggcctacccactggttccttacaacattcgaaggacatgcagacatttt

SEQ ID NO: 173619 - DNA, 430 bp, Glycine max
agcttctaaactttatacaagaatgaagctctgataccacttgttatacaagtggcctcagatatcttaagaaggggggtttgaattaagatatcccaaattacttccccaattaaaaatttatttcactttcttttcaagttatagattcctttaacaatgaacttcttaaatattaattcaaataaaacaatttgaatatgaatgtaaagcaataataaacaaaggagattaagggaagagaaagtgcaaactcatatttatactggttcggccacacccttgtgcctacgtccagtccccaagcaacccgcttgagagttccactatcttgtaaattccttttacaagttctaaacacacaaggacaatcattcctttgtatttagaattcatttacaacaagagacccatagtctcttaatccctt

SEQ ID NO: 173620 - DNA, 354 bp, Glycine max
  unsure (1)..(354): unsure at all n locations
ctcgccctaaaccttgactcgagatgagaatnttcatcctcgccctcggaagaaaacaaaaaagaaaagaaagttctcgatcaaagatcgaaagaaaacaaaaggaaaaaagaaggttcccgatcaaagatcggaagaaaacaaaggaaaaaagaatatctccaatcaaagatcagaataaaatgaaagaatatacagaagggtcttcggaccagacaaatatccaaacagtacagaatagtcacaaccaaataagaaaataaaggataccacgattgaagtggtcctctcccttttgatgccaaccaaaatcttgtgcgctgacgactttctcgccccgcattaaacaaaaat

SEQ ID NO: 173621 - DNA, 424 bp, Glycine max
  unsure (1)..(424): unsure at all n locations
gcatgcaagcttgcttctacaaagggcttctttgaatcagttttgcaatgnatcatagatagggacatgctcttactgaaaaaactcttgtccaagatcatgaatcatatcctctaagctatctcccatttctacatcaaatagttcagatttgttgcctcccgttcaaactatttatacaaggacaaaaatatttttcgtccccatcgggtcgacttctttcggaagcaaattgcaagaactctttgacaccttcctcatatgcagggcccatgtgactttcgtgtagaagcatatatgatatgaagttttgatgatgccaaagatgagcgcgattcaagtcaagaattcagaaatacaagaagaacgatgtacttagntgataggatcttagaaagaatccttaattgatgttgcacaagtt

SEQ ID NO: 173622 - DNA, 371 bp, Glycine max
  unsure (1)..(371): unsure at all n locations
acgtgagatcaanaagactcttctttgttagcatataatctcaatcacaaatgatggcatggttattggttgtcattgttttcaattaactccataactctatcaagtgtcctcaattagatcttcccaccaaccgaagcattaaacacctgctcagaatgggattgcgttacattaatgaatatattttgctgaaccggctcgctaaactcatgggttgaagtctttagagtaaaccttggaagttgtctataacatcactcaatgaatcaccagggtattgctatattaaaaaaagttcactttcctcaatggcttgactcttgaaaaattcttcaaaaatttcacacccttcttagtacaactatttt

SEQ ID NO: 173623 - DNA, 312 bp, Glycine max
aaaacaaccctcacaaattttaatttaaatttcaacagcaatgtaaatcggatacagcaagttggtaatcgattactagtgtttaaaaatttaaatttcaaatgtgaagagtcataactcttcataagtaattgcgtaattgattacaccattatggtaatcgattacacaattatggtataatcgattaccattaaggatttttgaaaataatttccaacatgtcacatcttttcatttaagttttgaatggccatcgaaggcctatatatatgtgacttggacatgaaattttcttagattttttactaa

SEQ ID NO: 173624 - DNA, 394 bp, Glycine max
agcctaacgacataactgttttgtacaatcaagtattgccgcccaccaactccttacaaaagacaatccctacagatgaacaccatcacatcacgacaaggtccgaagttttctgacatcctgcacataatctaaaatactaaatggctcaaacctatctaacctcaatctgtacacacttatctattcatcatgcataaaataacctatcggtcaaaaacactccagattcgccaaatatcttacgaacaatgatgattcaatgaacatcgggaggaatatgtctattagcatgttactcccatgattatcacaatcatatgctctaaatgcctctaaaacaaacatatggagctgacaatatatgtatgcacgtataactaaaagccaacaa

SEQ ID NO: 173625 - DNA, 419 bp, Glycine max
agctagtttggtgcattgtgtcttatcaacaatgtatttgaaatatgatactttccatttatattaccaaatccgctatgttatgtttttgcattcttgaagttgtttatagatctatattatttgtaatctggtcgatttattcatattttaattgagagacatgtttaaatctctctccattgcctccatcttagaatttcttatgtactcttctaagcattttttttcctttactctttattcacatctcctatatttctagatgcacaaacatataaaattgattattattgttaaaatgagcattgttaattttattcttctatttaaaggtaaagatgcctttaaacataaaataaataacaaatttcactcgccacagatgttcatccactgttgaggatattttgcatgct

SEQ ID NO: 173626 - DNA, 299 bp, Glycine max
  unsure (1)..(299): unsure at all n locations
ntcacaacatatagacctgacaattcaatatattcaaccttttatacataatttcaatcaccaagttccatgtcacaaagtgctgtaacaggatataaaaggggccagtgtccctgttggtgtccccaagaaagtggggaatgagaaaataaaacaccatccaacatgaaatacaattcaagcttaaaatgaatatttcattgactgtatgattagctattggtaagattggtggtttgatatctaaccagtgtcacaattccaagccaggtaggtacgagcaaaacaaagagctttat

SEQ ID NO: 173627 - DNA, 417 bp, Glycine max
agcttaagcaagtctagagagttcaaaattcttttatagacaactagcggaggctagcccataaatagatagtgcatagttattaaacacttttaagttttacaaaactatttttatgttaccataacattggtgagaagtatctatcgactttgtcaatgactaatttccaccaaagaatctatttggtcaacttaaatagagtctttcttgtcaaccatattttttcacccacaagtcgaacttgaaaccttggttatgacattcgaattcaatatcactcaaaccaacaacttgatgtgaaaatgttgtgaatcatgcaaggtttgatgatgccaaaaagaatttacttgataatggttgttatcataaaaaagggagaatatgaatatatgaatacaagattttgatgatgcc

SEQ ID NO: 173628 - DNA, 275 bp, Glycine max
  unsure (1)..(275): unsure at all n locations
cctggaaaccactcaacaacaacagcaatccccaccacactcttcttcaccttcttcttcatctgtgaaccagtcccattcctcatcacatcttctgcgagtgaagttggaagttccacgaattgatggaacgaacccctctggctagattntcaagatactcaatttttgaagaccatgccacaccagaccacgagcgtctcactattgccttcttctatatggaggaccctgccttggcgtggntccaattgatgacccggaatgggccaatc

SEQ ID NO: 173629 - DNA, 251 bp, Glycine max
attcaaaaatttagattttttttttttcgggcactcttataggtaaggacctctttacccgaggcccccctggttaccaaatggattaatatcctatgcaagtcgacaaacacaattggcttttctgggctttttctaattaactgtcctaaaaacaaccctgaccatttgccccaatactttcattttaattttttagatttttcctttcaaatttcttaagccgaattttttttacttgtataaattca

SEQ ID NO: 173630 - DNA, 422 bp, Glycine max
  unsure (1)..(422): unsure at all n locations
agctttntgaaaacaatctttgctactggtaatctattacaataaattggtaattttttactagagagtaaaaactctttggtaaaaggttttgtgaaaaattcatgtgctactcaatgttttgaaaaactttttagtacttatcttgattgagtcttttcttgattcttgaatcttgttcttgattattcttgattcttgattcttgaaaacttgaaacttgaaacttctcttgattcttgaattgttcttgactcaatcttgaaatcattgtcatgggctttttctcatcatctttgttatcatcaaaacaccttgaataaatcttgattcatcatcatgaatcaatcttgattcatcatcatgaagcaatgaagcttgcttctacacttatggtgtctcctgagatactaaacaccgat

SEQ ID NO: 173631 - DNA, 255 bp, Glycine max
  unsure (1)..(255): unsure at all n locations
tcctcttatactagctatttngaaacctttagttcctaaatgtaccaccttccaattgttgctcgtatccctctgtcttttctgcaaacagaaaatcatatgttgggaaaacatggatgaagtcctaagaacatcaatataacagaaaacatggatgaaatcacaattaaaaagcacaactacctatctttcagagcctttcggtaatttgtcttgtctccttatgtggtggngttgtggttaataatgatatac

SEQ ID NO: 173632 - DNA, 441 bp, Glycine max
  unsure (1)..(441): unsure at all n locations
acctgtggcatgcaagcttcttgaagctggaatgatatatgccatttttgaaagttcatttgtaagccttgngcaagtagaccccaaaaaaggttgaataacagtgataaaaaaaatgacaacaattagttgattcctacaaggatcatggccagttggagaatgtgtattgattacctccttcttaacaatgcaacaaggaaatagcactttcctcttcccttcatggatcaaatgcttgagaggttagccagtcaagccttctattgctatctagatggatactcggggtataatcaaattcttgttaagttaggggatcaagagaaaaaacacttcacttgcctctttggactttgcaatgcaccagccacattccaaaggtgtatgaatgccatcctctttgacatggtagaaaaatgcatagaggtatttatgcat

SEQ ID NO: 173633 - DNA, 431 bp, Glycine max
agctttgcggatttggtcatcacccgggaaagtgtatcgaagcgggtctgaaaagaggcaaatttgatcatcctgcttggatgaatgagaaaattggggcaaataaagtggatgagaaggagggagaaacccatgctgtgactgccattcctatacggccaagtttcccaccaacccaacaatgtcattactcagccaataacaaccttctccttactcaccacctagttatccacaaaggtcatccctaaatcaaccacaaagcctgtctaccacacttccaatgacgaacaccacctttagcacaaaccaaaacaccaaccaagaaatgaattttgcagcgaaaaaacctgtagaattcaccccaattccggtgtcctatgctgacttgctcccatatctacttgataattcaatggtagccataaccc

SEQ ID NO: 173634 - DNA, 365 bp, Glycine max
  unsure (1)..(365): unsure at all n locations
aggagagaagtggaactttgaagtgtatctcataagactttcattcatcaaagtcccaacaagtggtacacatgcttctatttatagattaggtagcttccttgagaagctttcttaagaanactttctttgaaaacttctttgagaaaaattccttaagaagctagagcttagctacacatacccatctaaaaactaagctcacctccttgagaagcttctttgagaagctagagcttagctacacacactcctctaataactaagctctccttcttgagaagacaagctagagcttagctacacacnccntatataattaagctcacccncatgacanaatacatgaaaataccaaaagaatc

SEQ ID NO: 173635 - DNA, 424 bp, Glycine max
agctttaagagcaattccttgctttttcttatcattctcctcatgttgattcaatctcatcaattccatttcatgttcctgtaactttccaaacaaagtagcaatagacatgttagatagatctcgtgattcagtaatggctgttaccttaggttgccattccctgcttaagcatctcaaaactttattgataagatcttcatttggaaatgtttttgctaaatatgcaagatgattaattatgtgtgtaaacctcttttgcatgtcttgtatggttttatttggattcattctaaataattcatattcatgagtcaaagtatttatcctagatcttttcacatctgttgttccttcatgggttacctataaggtatcccacatatctcttgcattcttacaatgtgatatcctaaagtattca

SEQ ID NO: 173636 - DNA, 366 bp, Glycine max
  unsure (1)..(366): unsure at all n locations
tgaagagatngaagganatatattgatgtcatggcaagcatccaagcaaaacttgctataattgaccagaattaggaagtctaggggaaaaaacattctcggcgatttatctaaaagaatgaaatagattaataagaagttggattggatggtttccacaagctaccaaaaaccatgaagtgatttcaaaatcgaagaagaccagaatggagctgaacaagcttctctctagaaaagagatcagtggagtcagaggtctagagtttattggctctctcaaagaaaaactcgtaatgtcattgaaagaatcaagatgatgatggaacacctaacatgactatttacttctctctgcttcactaatat

SEQ ID NO: 173637 - DNA, 407 bp, Glycine max
  unsure (1)..(407): unsure at all n locations
atgctaaataagtatgttaaatgttgtgtatcactgagcttatacctatttaaaattgcagctcagcggtataattatgaaatataatttgtctaaaagatcaaatagcttctcttgattaaattattttataactaaatgttgttttcctgtaggctgtccttgataaaaagaaacacattgtcatagtggacataaaggttgatgatggtattgaaattgtgtctgaacttatcaacattacataataatgtgtgtcatattcttttaagaattttgtatccaccctacctatatttttaacaagttttgccatttngtacttgtacttgctctttcttgggcatatctttattacatggtgttgacctaagatgtatntaattttccgttctctatttaaattt

SEQ ID NO: 173638 - DNA, 267 bp, Glycine max
  unsure (1)..(267): unsure at all n locations
tcatgatcaaacaattcttccatggcatatataattgctcaaaacttgcttggttagtggataactttagtagcattcagtttcctccttcatattctagtatcattaccccttcatgcaacaaagtttgtggctctttcagcacactcacttttcctagaactcgatccttgtacgacaatatctgaacaacctctcctccttcgccatctggtgacttttcanggatgcccgctctctcactcacttgattgcttttctcttccg

SEQ ID NO: 173639 - DNA, 390 bp, Glycine max
agcttagctagggtccttagtgggcttaatatgtaagtgagggacaaggttgaactccttccatatagggacctagatgagctaatccaactttgtataagagtagagcaacaaattaaaagaaaaccttcttcaaaatcttacggctttcacttttatccacggaaggaccaagcccaaggaattttgggggctgcaccttcaaaacccaaggaagataaaggtaagacaatagagaaactcacccctaagactagttcccaagcaaggactagaaacattaaatgcttcaaatgtcttgggagaggtcacattgtctctcaatgccccacaaagaaaatcatgattatgaggggtcaagatatttatagtagtcaagaggagactact

SEQ ID NO: 173640 - DNA, 193 bp, Glycine max
  unsure (1)..(193): unsure at all n locations
gatcgactaagctctggataccctcatagagtatttagtctaagagaattgtgagagagagagagagagattgaagaagttatatatcatttacttactcgatgaacttcanggttaaaaatagtatatatagacaattcttgttagagaggcgaacagaattcgcttactaactacttacaactaactagct

SEQ ID NO: 173641 - DNA, 415 bp, Glycine max
tagcttgatgtgagatatatttttcttgaatgtttttggccggcaagccaccacctgcagataacatgaatctcacggaaaatgactctcatctagagcctgctcaccaatgaaacccttttgagcctcttacgattcagaagagggatgctattattcacctccatcaagagcaccaagccaaagttcacaattccttagaagacattatgactaggcttgagaacatagaaactaggctaacccttagtaaccttcccaacccggatgaggatgaagtgtagctatgttcttctccttgattacgatgtgtgataatttttttgctatgccatgttctttctgtctatgtgttaagatgatagctaagtttgtttgttcttgattaacggcatgctatgttctatgattaatg

SEQ ID NO: 173642 - DNA, 417 bp, Glycine max
agcttgaagtgagaaagtgtggaagagtcagtcttctctacttttattcgttgaccatagagtggtacctgaagatatgtcacgggggtcaggagaccttggggacgtcaggtggggtgctattgcccaaaaccaagcttgaccaatcccgacccaacccgggcatcgattacacagtgtaaattgcaggtttccatgttctgaagctgtgtaactcgagtttggcctctggtaatcgattaccaatgttgtgtaatcgattaccagagaagaaaacccttgaggcataccttttaactacatgtagcggttatgggactcattgtgttgtacacgtagttagatttctcatgaaagagtctacccctttttctcttatttcttgtagatcgcgatggcagcgcaattaatccatga

SEQ ID NO: 173643 - DNA, 341 bp, Glycine max
  unsure (1)..(341): unsure at all n locations
tggaggggttgatggggacccgatgctgttatgtacgatgttatnggcttcgtatgagtgcgtgagctcagttgaaaggtgggcaactggcgatggtgtctttatgtttgattttgtgaagtgggagagttgatttgcttcatctccgatcgccacctaataccacatatgacgggtgccccatactccaacaagcttgatgtaagatagcgtggaagagtcagtcttcctacttttgttttgtgatcacagagtggtacctgaagatatgtcgcgggggtcaggagaccctgtggacgcaagtggggtgtattttccaaaaccagcttgaccattccgac

SEQ ID NO: 173644 - DNA, 397 bp, Glycine max
agcttgaccctcaaaccatttgtgacagacattctggtcctgtcaatggggctcccttctttgtaggattctgacaaactacgattgtctatgttggattggtcaaaaacctcgagcattgccttgatgatcagtgccttgcgaagcacggcaaccatgtctgactccatcctgtcccttaggccgcggagaactttggcaccgcgggtgcactttgtctcttcattcagttgctgaagatcaaataagagattggtgatctcttccatttcaaacttgattgcttcaacttcttggaagaactgagagaggctgcggtcttccgtggggtagagtttccctgcttcaatgtcaagatcgtcgtcttcaaggtccttccgagcctggttcttcagtt

SEQ ID NO: 173645 - DNA, 364 bp, Glycine max
  unsure (1)..(364): unsure at all n locations
ngaaggtcacacctggtatctctgcaatgtctctacaggtgctgattatatactcgcgttggacaacgaaaaggctttgaaaaagttgcgtatcacaaaacactatgaacacagggaaaggcattgtcctgaggaccctcctacttgccttgtgccaatccctaaaggttacaaaacacccatcgagtggcctaacagcagagataaggtcatcttttattctattttatccgcaaatgttaattgttaaggggaaaaattaaacttaccatctttcccttggttcttcttgtgtcactaagccaaccttataagttataactcacatgtcaacacactttagcgggctttttatatatctcat

SEQ ID NO: 173646 - DNA, 360 bp, Glycine max
cctttgactgatcggttactaagaactgttgccttaccgaaagaaattctttacaaagaccacaataattatcttcttctaacaaattgcattgtgaagagtacacaatgagatatgttccacatatgttgccaacaagcaggtgcattaataaacatttctataggaattaataagttcaaggcatatatttcaatctcttaacaatttagtgtaagtaaccaatatttctcacataattaattaaaccctctggttattgtctttgaacacaccattaaccacccgtagagcctgcaatccagtggtacttgtttctttcatcagagcacagttaagtgataagaataattgagggta

SEQ ID NO: 173647 - DNA, 408 bp, Glycine max
agcttctctatatgaagaatattgttggccatttactgtaagaatttgttcataagtggttggtcctttaaccacaaccaaaattatcctaagacaatacgattctttggtatttggaggcaccaagttaagccttccaattgtataacctcttttacgtggcttccaacatctatcattggcgacgtatgtaaactttgttatgaattacaaatatgttagatattttccttcatggaaaatcttgttagcttttagccaagaagtaaacatggactccttaattgttggcttggacagcaaaacatcaatgtcatcatcatcttcaaatattactgaattttcactaggtaaatgaaagtacaacctttcagcaacaggtgatctcttgtgaatctggaatgaaaa

SEQ ID NO: 173648 - DNA, 438 bp, Glycine max
agcttgtaatcgattaaactgatatgagacatttctctgcaagcttcaaacacttgtgtaattggttacaatcagtctgtaatcgattaaaacagaagagttttaactatagaggaaattttctaactttagaacttttcttctaactccaacatgatgatgcatgatacacatatgaaatgatagagacaaagatgcaacacacaatacaataatcaatacaaatgtcattcaagagagttgggcatgtaaaagacaatttcttcaagctcttctttaagctttaaggctaagtcttcatgttgcttcccctatctctaacatgcaatagtttcaactagtccgctaatcatcttaggatttcttcgtcttgttactacaaccggtgtggattatcaggtggaaatattgtcattgggattcttagaaagttcggcg

SEQ ID NO: 173649 - DNA, 456 bp, Glycine max
  unsure (1)..(456): unsure at all n locations
agcccttgaacatttcaaatatagtcatggggatgtgatgttgtacacanggtttctactgnnatattctagataagttcttcccttcaaagttatgaaaaaagtatgcattcttagaagggcttttctctgaccaaaatnattccaagaacgcctagcacaactactctgaagggatttacacnaactaaatataacacggaggaaaactgaaaagtttggatgatggagaaaacgataatattttttggcatatgcagatcgtgcgtctcaagtagctaaagcttttggatattaacttgacaaatttacaagagttgtttcctttgctaaggtatgcagaaataaaacaaatcctaaaccagtatatttcatttacgagtataattcattatgccacacatatataaatgtgtacaaacattatgtacatcactatttgtataataaattgaa

SEQ ID NO: 173650 - DNA, 330 bp, Glycine max
attctctctggatcttcaatgaaatttttataaggtcctggtgataattgggtactcattaaaattatgtagttaaaggctattgatatgaactggagtaaaacatgttactaagaacacatattaaattttcatagccaccgtggtccccagcaacacaattagatggcttcatatgtcaaatcctgttgaatggaagacagaagagaaatatcttttatgccaccaagccttaacatctagatgataatattctgatactataatatacagacctaatctatctaatactaatctattctatcctattacgatgtatttttctttttc

SEQ ID NO: 173651 - DNA, 417 bp, Glycine max
agcttctagccaaatggacttaccttgaattatttctctttgatagtccttttgagccttgtttccctttccttgttttgaagctcactacaagccttaaatgaaaaaccatgatatcaccatatctttaaggaattttggagctttggaattgttttgggaataagtgtggggggtttttttgtttcattggataacttgttttgttggctatgcttcgtgatgtattttgggccatacttgatgtacattgtatattggttaaatgttggacatgctgaatgaaatgttgtttctcaaaggctataaaaaaaaattcgaaaaagaagaagaagaagaaaagccataaagttgagtgaataagatcttaaatggcacaagaatgatgaaactctgggttctactctttatgtttaa

SEQ ID NO: 173652 - DNA, 345 bp, Glycine max
  unsure (1)..(345): unsure at all n locations
gaacaaactctcacctcacacaagtctataacattaatttaaacttggtcaaactggatttacgcctaaaatttcactgaatcaaaatttgactccttaacacccaaatttaccctaaaaatgactctntgttcactttggtcatttgtttttctctctagcacagcctaacctttctcataagtctaatggcatttaagctaggataactactcaacctctaatacaccaatccagattggccttncactctcaaattcactcttgttcactcatacaccatatctcacctctaccctangtattctcccttctctctacagtttcataagcatttcgccataa

SEQ ID NO: 173653 - DNA, 434 bp, Glycine max
  unsure (1)..(434): unsure at all n locations
gcatgcaagctntttatctgccattttctgtttagagccttttgatgcaagtgtattatttatttcctgcactatgtttttaacattatttccaattatatagaaactcttccggacatcaagatgctaaggcaacatggaccaagagaagactcaagtctttcagaattccaagtggagttaatccagcttgcatctcagctcaatggtgattatgtactcaactcttatccaaacattggtaaaactatgacagtgaaagaagcaaacaggtacgcagaagatgcggtgaagagattcctggaagctgcaaaggctgctcttaaagctggggctaatgaatcagccattgtcacaatgaggccttccctcacaagcagagtcgctgatggagataaccacaaacttgtagaatcttactgattctttcacac

SEQ ID NO: 173654 - DNA, 271 bp, Glycine max
  unsure (1)..(271): unsure at all n locations
ttctacacctagaccactccttgaaacactccctttttactctaactttggtttgaacacttttattccaccaccacgattctttacccctatggcccaaacctctagattcacccaacgtccttttagccaccttaataattctccgggacgtcttgttccacatatcatttgcactctcttgtgatcgtccacaccatccctcccatatcttttgnggaagaatccttgttctcacccttaagtgcctcatttgttcttgggctacata

SEQ ID NO: 173655 - DNA, 325 bp, Glycine max
  unsure (1)..(325): unsure at all n locations
ttcctttttancaacttttttctggaggaattttctataaggcccaagattaacctagttatttattctcacctatatatttattaaatactcacccttgctatttgttggagatcctttctctataacgatacaaaattttatgatattcataaccatgcttgttatctttccgaatgtacaaaaccttacggattacgtaatcgtaccttttttgcctctcgggacgttacggaactttacggatagcacactaacactcctcttttatattccggcatgtcactggaatttcacagatagtgctacaatgcctttttttgac

SEQ ID NO: 173656 - DNA, 322 bp, Glycine max
  unsure (1)..(322): unsure at all n locations
agcttgtgggataangcggtttttcttgntatagtcttactagcgcggcaaccctgtgatgtggcctcataaatgctcctccatacctaaaaaatattctatgacggcgttccaaatcgtccagattggactaaccttacgagggtgtacgtgaaacccatcctcattactgtgagaggcgctttcaatgagccattcctgccctcccaatgttgaactcattggatttagtgtatttattacctactctagtgaataaggatgcggccaattgcatggattcttgtcactcccatctcactggtgacaacatctcattctg

SEQ ID NO: 173657 - DNA, 353 bp, Glycine max
ttaatccgtacaaatttaatcctattttttctcttacatgaactataagtagacataaaaaatgtaacgagtgttactaataaaaatattcaacactaaaaacttaattttataagttcagaataacaaatagtaactcatattaatttgaaaaataacattagtttagtaataagtctacgccattattttcaagagtaatttgattgataaacaactaattgataacatgtctttagagcggaatggtagttataggttgctaaggtatctactaaaaaggctaatgataagtgaattgggcatttctttatccaataacacccgtatgcaatattggtttcggttaaaaa

SEQ ID NO: 173658 - DNA, 385 bp, Glycine max
  unsure (1)..(385): unsure at all n locations
cgctagtgaggatatggtgtacccgacatatgtgttactaggatgctatctggcganggtgcaaatcaactctcccacatccacaaacaaacatgaacctaccatgcccagttgcccaccttcaactgagctcacgtactcctacgtagcccttatcctcgttcctctcagcaccgggtccccatcaaccccttcaagcttccacaatatccaagcaattcaatttccaaaattcatgaacaaccctaaaccaagaaaacaaggcagaggcagaaaactctgcccaaaacacattcacatattacaacatttcttactcaaatatcccagaaacattctctttgttccggttcgctaaccattggaacgacttggaaaatttact

SEQ ID NO: 173659 - DNA, 420 bp, Glycine max
  unsure (1)..(420): unsure at all n locations
agcttgtaggatcatggtgttctctcatcacatgtggttctaggtggcggncgggcgatggtgcaaaacgattctccacatccacaaatcacgtataacccaccatcccctgttgcccacctccaactgagctcatgtactcccacgtagcccttatcctcgttcctctcaacgtcgggtccccatcaatcctcccaagcttccacaacatccaggtaattccacatccaatcatcatggactaacaaaaccaagcaaaacagggcaaaggcagaaaactttgcccaaaacacaactcaaaatcatagcttttcacatacaaataccccagtaacatttccttcgttccaattcgttaaccgttggatcgactcaaatattttactggaagtctctagtacataacgatacattgtgacc

SEQ ID NO: 173660 - DNA, 357 bp, Glycine max
  unsure (1)..(357): unsure at all n locations
tccatcagttaggtaaaatattctttgaagtttcataggcattttacaatcacaaattacaaccgaagcatttggccacttcatccactaacttcaatccatgtacatccctatcaatctccccattacctatggtggtcatggtttggattgtccaaaaattgaaaccaaagctaaaccaaaccagaaactggttggagttaaaaaccaaacaatctttttttggaaaattggttctggatntttgtcaaccagttgaaaccggttntaaaccatttaagcatctatattaaatgaatctacactaaaattgtaatgctgtcttgcaaatcatgaatatggctcacagaaagactt

SEQ ID NO: 173661 - DNA, 413 bp, Glycine max
  unsure (1)..(413): unsure at all n locations
agctagaggccctnantgtttttataatatgttatgctgaagtttggaatagttggttgattataagattcctgatatttttattttattttattttggcgttccattttacaagacttttctttttcaattggcgtttataattatacgacgagacaatagagatgttgtgatctgttggatatatttggaaaacaaggagtgtttattcataaacaacttacctaaatcaatcaagaaaaattgagtcggattcgaattaaggtttgatgagatcaaaactgaaccatagactcgatatattaaccgatgaacacgatcttccttttatgttgataatgtgttgcacatccatgaggtatacaatgcctctgaatnttgtaccgtttgacaccctataagtaatataaaat

SEQ ID NO: 173662 - DNA, 329 bp, Glycine max
tatccctctcttgatgtgtggattagtgttgataaaacctttcttatcgtatatatgccttggatgagtgtgtctctcttgatgtgtaggcacatgactacttaactcccttcttttgtatgtagtcatgaatgtagttggttaagtttgcgattccttaatacatccttattgattgtgaattcttacctcttatatgtacgttatatcccttgtatatgaaccttataaatctatgtatgctagattgatagtgttcttgcctaattgcctagatattatgggtgggtgtgatttcctgtgtgttccgatgttaatccttattagtc

SEQ ID NO: 173663 - DNA, 312 bp, Glycine max
gaattatatctaaaatcaaccgaatgaaacagacacttgcaaagacggtatggaagctgctgccctccccatctagctacacagcataaactaatggaaaaaccaatcaacgggcgagaacaaaaaatggggtgcgtaaatataaggagccaacatatagacaattctactaacacacccgaaacacaggattttaacacgcactaattggggaaacaatcattcacacagatctgaaagaaaaacactaataacattaaaaagaatcaatctttacttctcaaacaacctaaaggacaaatggtgttacct

SEQ ID NO: 173664 - DNA, 443 bp, Glycine max
ggaacttcatctaactgaacactgataatctaggtttcttctattaagataaaaactaatttattataaattcattctaaataaaaatcaacgtgattattttgtgctaccttgcgttaattattaaacaactataattagagtaatctattaacttttctaccaactattaattggttattatttctctcaatccgtgcaaaacttcattttttggggacattagttgcactgaaattagaatatatgaactcaaacaattactcaaagatatcaaatgtattctatcaatatgacattttcaatacttgtaattgaaacactttttaaattctgcatgatcgaagtttgctacattatatttatccaaattatctaatacgaagtattactacccctcttacataaatggcataaataattttaaaaatttaaattacatg

SEQ ID NO: 173665 - DNA, 404 bp, Glycine max
agcttattattgttagggtttcttctgtactatttggctaaacaccctagggtaagccggagaataggactaacttttgtgaataaaacttgtgtaaattgtatcaaactcttccaatttatggttattttgtagtgttataagtattttctgttaagtataggtaataaatactaagtacttccattttgcgtgtttaataaccattttctctcaattttaggttaattaggcaagctttgaaaagagttgtttttcaccttctcgctaagccaatctgttggcttagcgagcgtccgctaagcgcaacactcatggactaagtgcgaggaagactttggaagaagatgagctgtacgggttcgctaaccgcaccgtttatcttactaagctcaccgcttcag

SEQ ID NO: 173666 - DNA, 303 bp, Glycine max
ctaagcttctgagaaactccttggaagctgtgtgtggaacttctctgagaagctagagcttagctacacacacccctctaataactaagctctcctctgttagaatctttctagtgaagattccaaaagaagctagagcgtagctacacacacctctctaatagttaagctcacatccttgagatgagaagctagagcttagctacgcaccccctataatagctaagccaacccccattccataaatacatgaaaaacaaaatagagtccctactacaaagaccattcaaatgccctgaatac

SEQ ID NO: 173667 - DNA, 437 bp, Glycine max
  unsure (1)..(437): unsure at all n locations
acccgcaggcatgcaagcttgcaatgactgaagacattgntgtcgcattctacccttcgttatagggcgacgcggggctcatgggtgcattttccaagggaggaaaacgcgcggagtcgctaccaatgtatatttgaggaaaacgtcgaaaaaaccagaaaggtgtggtctacgaactttaagtgtgaaaggttcgggtgttgtttttacgcacggggaaggtattagcactccacgcgtccgtcataagggacgaaaaccttttaatcaaatgtgcaatatcatgtctttaatttgttttatttccccttttttatgtttttatgctttttatgggtcttttgtattttttatctctttttgcaagatatattttaaccgaacaaaaaatcatctaaggccgtgaaccattaaacgatcttttgattttgaaagga

SEQ ID NO: 173668 - DNA, 254 bp, Glycine max
  unsure (1)..(254): unsure at all n locations
agattgagatgatccataaaggagaaacatttgttattctatatgtgtggtgaatggaaagggttggtctctaatcattgatggtggaagctggaccaatgttgcaagcactagatcaatggagaagctggggttaaaaatcacccctcaccctaagccttattaattgccatggttgagtgacaatggtgagttggttgtggatcanccagtgttacttacattctacattggaaaagatgttgatgaagtgc

SEQ ID NO: 173669 - DNA, 394 bp, Glycine max
agctttaaaatttcaattaaaatgttcagaaactgctggtaatcaattaccatatatgtgtaatcgattacacagtgcaaactttgaattcaaattttaataactgttgtaaatcagttttggccactggtaatcgattacatcctctggtaatcgattactagagagtaaatttgttgaaaaagactttttaacttaaaattattgaccaaaccttttgctacttcaattgtaattcccttcctatttaatataccctttctaagtctctaaagactttcttgatcatccatcttgaatatctttaatttctttgtcttgaataaagctttgagacgcatgtgatcctttggcttcatcaaaacatcagcttgatcctttgtctacaaggctg

SEQ ID NO: 173670 - DNA, 426 bp, Glycine max
  unsure (1)..(426): unsure at all n locations
agcttgagctatccattntttttaaaagccattttaaaaactctattgttcagctcatcttgactcatttatatcctatgtacttatgtataggtatctcacatccgctaagtctcctatcgttgagattggtattttttgtaaaggattttaactatagatgccatggaatgtataaaatctaacatcttgatgatcccttcactttaaacaaaaacaaaattcttcaacacaaaatgttttctacaaaagaactatgtaagtatgattcaccattatccagagatatgtaggaataagaaccaacccttgttgattcaaaaagaccaattaaaaaaaaaaaaacagataataataaacctcgctagccttttgcctaaaaaaaaagaagagaatntgttcattaaaaaatatatataaatattc

SEQ ID NO: 173671 - DNA, 226 bp, Glycine max
  unsure (1)..(226): unsure at all n locations
gctgatagttctgtatttgtcttcaggcgttgattcctttgtgagtgtcattatttgctgatatcgataacgtttgagtantggatttggtggggtgtagctttttcgcatagtcaaatgtctaggccaggcctgaccatgattgagattattgcggtangggaatgtatcncatacatttattcaggggcatcctcatcctcgcgtagcttgtggactagctatc

SEQ ID NO: 173672 - DNA, 389 bp, Glycine max
agctttggtctttgcaaatattcacacagcatattctctgaaaactctctagaacttggacctttctctctctagaaaccctaaacatgcaaagctcggaatcctagtccaaactctctttctgaaatctgatttcaggcttaaataggggccttgttcgtgctcgtgcgcttagcagaattattgaccacttagcgcacattagtgaatttcggcttagcgcgtgcctttctcgcttagcggatgaactgaagcggtgcacttaatgagatgaagtggtcgcttagagaacctatacagctcatcttcttctaaagtcttccttgcacttagcccatgagtgttgcacttagcggacgctcgctaagccagcagattggcttaccgag

SEQ ID NO: 173673 - DNA, 325 bp, Glycine max
  unsure (1)..(325): unsure at all n locations
agaagtgacaatgaaaatggcgttaatttggagcaaagtgtcacctcacacaagcctataaccttaatctaaacttgctcaaactggttttacgcctaatattccaccaaatcaagatgtgactcctcaacacccaatttaccctagaaatggctcttgccttcactatggtcattngtttttctctcttgcacagcccaagctntctcataagtcttaaatgacatttcaaactaggattatactcgctttacctccaaataccactaaatcccgatttggctttcaactctcaatgctcactttttttcattctaacactaca

SEQ ID NO: 173674 - DNA, 418 bp, Glycine max
  unsure (1)..(418): unsure at all n locations
agcttgtagggttaaagtcttatgattgncacttgctcatgcaacaatggttagccgtggctatatgagacatcttgccaaacaaagtcaggttagccataactcacttgtgctttttcttccatgctatatgtagcaaagtcattgatcatgtcaagtttgatgagctggaaaatgaggtcgcaattatagtgtgccagttggagatgtattttccccttgctttctttgacatcatgattcacttgattgtgcatttggtaagagaaatcaaatgttctggtcctgtttatctacaatggatgtacccggttgagcgatacatgaagatcttaaaagggtatacaaagaatctatatcgtttagaagcatctattgttgagaggtacattgcagaagaagccattgaattttgttc

SEQ ID NO: 173675 - DNA, 105 bp, Glycine max
tttttgggaaaaaggctgagaactgtttaatgttgtctgaaatatcatcccgtctaactgcaaattatgctattaacaaccgaataaggatcacttcctcgcttg

SEQ ID NO: 173676 - DNA, 425 bp, Glycine max
agctttacaatccctctcgtcattaaaatatttttactacaatgcgtccatctatagctgtgtaattttagaacatcctactaacataacatgatattgtcacatggttaatatgtaagataattttattttttaaatatatgatcaaaggtttgatttctagttcgtgcgtatgaaaaattaccagtacctcaagtgattaatatctgaattcaccccaaaaataaagaacactcatcaaatatatctcatttaaaatatattatattcatatgttatattttcgaagaaaatatcttaaaacaaaataaaatcaatgagaaaattatcatttatatcaataaaaatattttcatttgcaatttagttacatattctaatattaggaattcatattttataattctaataatatcgtgacaaac

SEQ ID NO: 173677 - DNA, 410 bp, Glycine max
agcttatagtcttacattttatcaataacttattatctaaatacctcatgccttccaagagtattaatttaaccatttatatttttttatattattataaaattttaatatatttaactattatattttgattaataaaaatttatgttagtagatacatattttaatatatagacagaaaatagttgtcaatattaattaacatataataaaattatatatttatagatattttttgaaaaataatcactttttagattaatgttttcttaaaaaaaattctttagtatgctatcaattttgaaataaatatcgatttgaatgtttaaattatcaatatcaccatcaacacatcaatagtaatacatattaccgagtatttctcccctaaaaatatgataaattaataa

SEQ ID NO: 173678 - DNA, 400 bp, Glycine max
  unsure (1)..(400): unsure at all n locations
gacactatgatactaagcttgtttaggttcattaataaaaatatatgtattatcggttttntttnctncnncangncncatgtgtcnccccnnntttcatatatgttgataaaaagaaccaacataaaaattttcttttnnaaataaattttttttctttaaatttgttttnngtccccctccttattgtactggcccatgcatatatatatatatatatatatatatatatatatatatatatatatatatatatatatatataacactgtgtaataaaaaatagtataaaattacagagggtagagtttttttcttcaaatataataacatgtcctagctcataattatgcaaataggggatggggaaaatcacatgatgaagagagcggccttttgc

SEQ ID NO: 173679 - DNA, 97 bp, Glycine max
agcttgctaaccacattatgtctcacgatatttctggtcataacatgaatttttctgggttttgatgaacttgctaatcgccccatggcgcgttacc

SEQ ID NO: 173680 - DNA, 226 bp, Glycine max
ataaatattaacaaagtatatatgaataaagacatcatatgagcgattgtatctaactcttgaaaagtttttttttaagagaataagcaatttctagtgttcttattttataatgagaatagatatcttgggtcagattgagcgaaggtgaattgagtgagaatatgtcatcaaatgttgtcattaaatagatattaagcgtccaccgaacataatggagcttatc

SEQ ID NO: 173681 - DNA, 412 bp, Glycine max
agcttaaagtatgcccgagtctattatccctattatatgttgctgaagtattggcgatcagaattgccattccttggattatagggctgaaccaagctcatgcttttacaaaaaggttcgtcaagttaagtcgaaatatggaagtaaccgtcttgcaaaattggggcaaaagatgagtcgagtcacatcactgcttcgtctactgccaaacatatttaggattattgatgtccttgttacttccagtttcaccttgacaaagatgtcatggaccatgttgaaaatctaaattgattcaaccccatatcctgtgtaagaattcgcaatacttcaactgtacaccattcgcatacatacatgcttttcattgcttgcattgctcattccttgaaaactaaaataaaataaaaaa

SEQ ID NO: 173682 - DNA, 224 bp, Glycine max
ggtagagctatatcacatgatgttatggacaaattttgcttctagcaactgagatttaacagaaacactcggtaagctgccaactaaattgtttattggtcaacctacacactcttctattttgcaagttacaagttgtaccatctgtggtgaggatcatgaaacaggccaatgtattcccattgaagaaaacactcaagaaattcattatatgggaaatcaat

SEQ ID NO: 173683 - DNA, 409 bp, Glycine max
agcttatttgtatatactaaataatagtaatgtatttctgtcatacatagttcattaggaagcttttgttagggaaagtaaaccataaatgaccaagaatatggtgttgaaagaacataataagactttcctaaattggtttaaagatacaatctttggtggtgataaattggtttaaagatacaatcttttgcaatgataatgcttctaaaatgataaggaaaagcatatgagcctaaaataaatgttagaagttggcagggatacgatatcaacaagtatttgttctacaccaaatcacaagtcgataaaagtacaatgcaaaacagtgggggtggtcttagggcggaatcccaacactttgctattgtacataatgataatccttgtctagcatccatgccaaact

SEQ ID NO: 173684 - DNA, 275 bp, Glycine max
gtattgaaatctgcatattgttggatcaagtgttctcggtataattaagaagggggggttgaattaattatgaacgtgttttgactaattaaaaatctatccttcttaatgttactagattcaattacgcttttactactaagttaagaaaagtaagaaaagaaatagaaatttaaccaaaagtcaaagcaataattaaaagtacacggcggaaattaaagagtgtatggaagaagacgaccaacacaagatttatactgattcggccacaaact

SEQ ID NO: 173685 - DNA, 425 bp, Glycine max
agcttggagaggatgcttcaatggaggaaatgtattagggagagatttacagaggttggagcaccaacttgaaggatgaaaaagggagagtagtcgaactttgagttgtgtctcacaagactcttattcatcaaagttacaacaagtgttacacatgtttctatttatagactaggtaccttccttgagaagctttcttgagaaaacttccttaagaagctagagcttagctacacacacccctctaataactaagctcacctccttgagaaactttcttgaaaagattcctaaagaagctagagcttagctacacatacctttttaatagctaagctcaccttcttgagatgagaagctagaacttaactactcaccctctataataattaagctcaccttcatgaagaaatacatgagaatac

SEQ ID NO: 173686 - DNA, 389 bp, Glycine max
agcttaagctcgctgttactgccccacaaagtttctcggaatttgtttcggccatgttcttccctacaggcccttttggtctcttgttccaaggcctctggtggggctatatttatgtctctcagtttgacattctcctttcggaacctaagagctgttgatttgaacttttctttgacagattgggctttctccagttcttgcctgagggcctgcaccttttcgtcctcctccggagcttcaacttccacccccttagtggttctcaaattcgggagccaatccagaccttgcatgtaagctttcaaccacctatggtagccaccaatgggcccgctgctactgcctctgaattccttgtccttcttatgcaccatctcccatgcctt

SEQ ID NO: 173687 - DNA, 417 bp, Glycine max
  unsure (1)..(417): unsure at all n locations
gcaagcttgtattggttncttcttgttatatttttgtgtggttttagactcccgcgccttttattggctcgctatggataactatttgcaaacttgtgttttgttattatgaagattatgatatgatgaatagcattgttatattaaggtcttgctttaacttataagtttgttttgtggcctttcttgtttctcttcttccctaaaaatttttttgatgtcgtgataaaaagggggaaatggaaaatgtggaatcgttttgctggtggaggagtttgtaaatgggtgattagggtttttctttcttgcacaaattataggcttaaggttttcgtggtgaacctgtttgcaatttagtgtgcttgattttgcaagcttgttgactacctttgaatgttgtcaacttaaccagtctct

SEQ ID NO: 173688 - DNA, 144 bp, Glycine max
ttgattacaaacatctggttatccgatacatgttcaaaaatcaaatacaaaacccttttaacagctatttatcaaaattgtcttctggtaatcgattacactgtctggtaatcaataaccagagccttggatgtcttggaaaca

SEQ ID NO: 173689 - DNA, 439 bp, Glycine max
cggcatgcaacctagaggaaataaaaacgtgcctccagactataactggttgttttgtcaagaacaaagacagcatggaaaaggtttttaccgatgtaacgtaactgcctagagaatactggcttcaagatcaaagctaaacaaatgtaaaatatgtcaggtcgggctaaatattcaccgtttttcaaccagaaaaatctcctgaacactttgattataatattctttaatacaaaaaataaagctaatccaaacacactaattcaccttatccaaattggtcctccactgtttatatttagcatcttcttccaagttgttgaaataatgaacatggctagaacgacaatcaactccaggtatactggactctgaaggaggtgaagttgaaaacaatctcttcaaagtgccttgaggaatcttgcaatagtgagaaaat

SEQ ID NO: 173690 - DNA, 420 bp, Glycine max
  unsure (1)..(420): unsure at all n locations
ncagcttgtgataggtaaaatttataatgactatttcttttctatgtaaactgattgatactcaataattgaatttatctaaaattgaattcgttgcaggatggaaacaattggttccccgagtgttaaagttctccattagttgctatcccacgtggtttctagttgttaatgtcgtttcctaacccataaaatagaagaaaattaatttttgttcatggatcaacatttactatgtgtacagaactagtcgggaatccgtggaatgcacggggacaataaaatttatttacccaaatttcatgtattccatttttcatgtatacacctttaaggttatatatatgaatctaatttatatgaactaacaaatattttttatgttgtgaattcaatcacatcgatttgtatagtaaattt

SEQ ID NO: 173691 - DNA, 400 bp, Glycine max
agcttatcataatcgattatgtaacaccctgatttattattattaattataattgatgtttaattttatttattgcgtcttttaatcatgttttatttcaaggaggtgagtagttattacaagggtatgggtagttaaaactttagcttctcaaagaagcctcatgaggaagctcttcaaggaagtcttacgagagcttctcaaggaagctgtctgagctgtctcggtaaaagcgccctcctgcattcgttaaccgttggatcttctcgaaatgtggtctggaggttcataggataaatgtccacaatctgaccgttgcgatcttggatatatcttctggtgtgtgagaaacgcattttttcccgagagcagaaacacttgagtgtttcaagccttattt

SEQ ID NO: 173692 - DNA, 439 bp, Glycine max
tctaatcacctgcaggctgcagctgaggagatgagttttttgtttcaatttttcctgacgatgcccaaaagcccaagtgaatgatcttcagcactgaatcacgccagctcaagagcatgattaactcaagattaattccaagattcatgcaaatgacatctagaagaatcctgattctcgagaagatgatttctcaagggaagtattgaaaagaatcttttcaaaaaccatacatagcacaattttgttttacaagaaaagtgtttctcaaaattttctaagttaccagagcttttactctttggtaatcgattatcagttttgtcgtaatcgattaccagcggcaaagtctgatttcaaaagctcttaactgaatctgcaacgttccaattgattattaaatggcgtaatcaagtacaacttattggttatcaattac

SEQ ID NO: 173693 - DNA, 417 bp, Glycine max
agcttcttatccaaggctcatcttggtggtgattctccttcttccatggcttattccctagtggatggcgcctcctctcacctcttctcctttgtcttccgctacatctccatggtggaaaatcaccattaaaggacctcattgaagctcaaagatccagcctccatagaagccccacaagcaagcttccatcaagtggtatcagagcacaagagcttcacgtaggtgctccttaaacctccattaatttttttttctttaccttctcttccatgtgtgttccttcatttttctccatgtatctcctcatatgccttgttctaaatggattcaacatgattctttagagttttcactgattaaacttgctatagaaactagatttgactttctatggctcaaatttcttggtcttgt

SEQ ID NO: 173694 - DNA, 319 bp, Glycine max
  unsure (1)..(319): unsure at all n locations
ngcaatacttcaacaatataccatgcacatacatccattcttattttttcttttcacatttggatgcattgctcattgcattctttccttgaaatcagaaccgtaatcattgtaatcaaaaggaaacaacacgctctatggtgcccttacggaacgcatgccagagctagagtaaggagtgaaatagaggaggtgcaagagcacatgaaggttgacatggaggccatgaaagagaanatgaccacaatgatggaagccatgatgagtatgagaaggatgatggatgttaatgccgctacagttgtgccacaagtaccac

SEQ ID NO: 173695 - DNA, 409 bp, Glycine max
agcttatatgacgtgaggccttgctggaacttttttctgagattgtaaaactctatgaggagattgaaatcttcaagaataacctaggaaagtttattggtggtcatgatacctttaaaaaattgttaaggtgccaaggaacccagagacaacatctgccatggtttcaaaggataaatggttgtgcatggcgaaaaagttattgtttgctattttcggggaaaggtgtatcatgagactcataaatgcatggaccttcttgaaaaggagaacccatcatagggtcagtcctgtgctttgccacacccccaagctaacaaggaataaggacccataaagatttgcgacctaaacataaaataattcctatcgcagatctccttcatagaaggatagaaacaccactcat

SEQ ID NO: 173696 - DNA, 296 bp, Glycine max
  unsure (1)..(296): unsure at all n locations
gacacatcatactaagctatgtgctgctgaaccctgggaccggagaactctttcatctttgccgacanggcaaaggcggacttgttgtcaagaacatatacacctatgctcccttcttaaccatgtggcagagtactgatcgaagtctttggcgaccatatttgaaatcttgtgcaggtccataaattgaatataacaaacgaaaatcacctcacaattatggcaagaagtcaggctacaaggcctgaattcattcccctcccatattgatacactggaaaggatgatgggactcc

SEQ ID NO: 173697 - DNA, 361 bp, Glycine max
gccacaccttttgaaacttgagtctttatcttttaaggcacaggcgcacaacataccataccgcctattgcgggaaaagagccctagaagcatcaaataggaacaactcgtgcattgaagcctaggatgtgtcatcggagagagattatcgagtaaagaatgagcgtgagatgctgaaaaaagaaggaatcccccttttcgagaagaaactttcatcctctgctttcaatgacattaattgctagggtttttttgccatggctggctaaacaccctagttggggatatctaatgaacacatgatgaaaatacttagtatccacttgattgtgttttctgttgacaatgcatcattccatgc

SEQ ID NO: 173698 - DNA, 270 bp, Glycine max
  unsure (1)..(270): unsure at all n locations
attatgccataccatttaacaatttttacttttatatngtaaatttactttagacaccagaatgaagataaaacgaatggtatgaaaaggcttatacaatgatggagattaacagaaaaccaacgaaatgttccacacaattcatattaaacatcacgttacgaatttcaagactattctcaaataaacacgacctaatatcacacattaatattgctgatatgattattctctaaatgtattcttatggcgaagagagtatgacttttg

SEQ ID NO: 173699 - DNA, 440 bp, Glycine max
acccgttgcatgcaagctcggagaggatgctttaatggaggaaaagtatgaggagagatatatagaggggggagcacgaaattgaaggaagataaagggagagaatctgaactttgagttgtgtctcacaagactctcattcatcaaagttactacaagtattacacatacttctatttatagactaggtagcttccttgagaagctttcttgagaaaacttccttgagaagcttctttgagaaaacttccttgagaagctagagcttagctacacacacccctctcataactaagctcacctccttgagaagcttccttaagaagattcctaaagaagctagagcttagctacacaccccctataatagctaagctcacccccatgacaaaatatatgaaaatacaaaaaaaatctctactacaaagactactcaaaat

SEQ ID NO: 173700 - DNA, 234 bp, Glycine max
  unsure (1)..(234): unsure at all n locations
aacatttaccttggattaaatcctttgaattcgaagctttcacaccgttaagaagtaagaccctttccgtggcctttgaatgttcagttggtatttagaaccccccattctgctcctctctgggatatgggcaatntctctgaatatgcccggtctttctattagttgaagcagatcctatccttattggtataatttgaggagatgtggcttggctaccacacctgaaacaaa

SEQ ID NO: 173701 - DNA, 377 bp, Glycine max
  unsure (1)..(377): unsure at all n locations
gattcggtcttcgccagtgaaagtgtatctaatggatctgaaaagatgcaaatttaatcatcctgcttggacgaatgataaaactgtggcaaatgacaagggtgagaaagagggagaaacccatgctgtggctgccattcctatacggccaagtttcccaccaacccaacaatgtcattactcagccaataacaaacctcctccttacccaccacccatttatccacaaaggccatccctaaatcaaccacaaagtctgtctaccgcacttccaatgacgaagaccacctttagcacaaaccaaaaaacaccaacaaaaaggaattttgcagcanaaagcctgtagggttcaccccaaattccgttgtcatatgcta

SEQ ID NO: 173702 - DNA, 358 bp, Glycine max
cacctgtggctgcaactttggagaagcctcttaatgagcttctatagaagctcatgattctgcctcggaaaaacgctgcccagccttcgttaccgttggatcttctcgaaattggtctgcaacttcacaagacacttgtccatgatctgaccgttgggatctatgagaagatgtctggagtgtgctaaaagcctcttaatgaagctcatggaggaagcctcctaatgaagctactagagaaagctacatgaagctacctcggtaaaaacgctgcccagccttcgttaaccgttggatcttctcgaaatttggtctgcaacttcacaagacacttgtccatgatctgaccgttgggata

SEQ ID NO: 173703 - DNA, 426 bp, Glycine max
  unsure (1)..(426): unsure at all n locations
agctggatataaatatttttggagtttggattttttctattntattttaaaattataacattatcctcttaccataaattttttgtacaaaaaataaaggcattcttcctaataaaaagacattgtctttctgaaaatagcaaagtgattctactcaaattattttctcccaagttgcgggagctattctcttgttactattcccttccattcatttgtatgataattttttactgttcatnttaaaaaaaaaaaccttcatttttcattcatattaaagcatcacgattgtgtggatatttttttaatttatatataaaatataagttactttagttcaagttttatacaaaaaaacacaaataatttaaaatatgagttattattatccaacatgaaagggaaatttaacataaaagaaaaata

SEQ ID NO: 173704 - DNA, 315 bp, Glycine max
  unsure (1)..(315): unsure at all n locations
gcttcaatggaggaaaagagagagggagagatttatagagggttgagcacaatattgaagganaaatacggagagaagttgaactttgagttgtgtctcacaagactctcattcatcaaagttacaactagtgttacacatgcctctatatatagactaagtaacctccttgagaagctctcttgagaaaacttccttgagaaacttctttgagaaaattcctcgagaagctagagcttagctacacacacgcctctcataactaaactcaccttcttgagaacttcctttagaagattcttaagaagctcgaga

SEQ ID NO: 173705 - DNA, 417 bp, Glycine max
  unsure (1)..(417): unsure at all n locations
agcttagtgcgcacttacacgctaagccttattgnttttcaatgttngnatttttgtgtggggctaagcgccagttgcacgctaagcctaataagcttactgttcttttttgttgtcaattgggctacattttggttaacttttatagttaacacattttgaggcatgttttggttgaattgattgcatgaccgagacattgtgtactggttattaatgttgtgaaatttctgatttttgagtgagcacgcgttgttgttgggtgatggttttgtgaattaaatgcgtgtgagtgagttggttagcttgcatgacaggaaattgtggatgaaaaactaaatgcttcacattaccgtgtgagttgtgtgcaccttaatggcatgagaacaactgatttcattttcttgattttgcatg

SEQ ID NO: 173706 - DNA, 276 bp, Glycine max
acgcatcaacaagaatcatgccgaggctattgtgccagccatcaatggggcaaaacacaccaaatgattataatgatggatggctcacattctcacaaagggtaaatcatcactttcaaattgagctttcacaactatcatgacatgtagagaagaataaagatttcaagtcacaaaattgtcagaactcttattttcaaaacaattacccatttcttgaacatatgctataattcaaagaaaaacatgcaaagtcgtacgtgcacacaatattga

SEQ ID NO: 173707 - DNA, 383 bp, Glycine max
agcttgttacagaacttatgttaaacagattttcttgttcttacatcgttcgcgtgtatgatatccactcgacaaggtttgaagtagaggagaccttcaatcctataacgcaacatggcggacaaaaatgggcagttaacttgaatggccattattgtcaatgcggaaggtattttgcgcttcactatccatgttcacacattattgcagcttgtggttacgtgagcatgaactactaccaatatatagatgttgtttacaccaatgagcacatcttaaaagcatactccgcacagtggtggcctcttgggaatgaagcggcaattcctccttctgatgaggcatggacactaatccctgacctaactacaattcgtgcaaaa

SEQ ID NO: 173708 - DNA, 358 bp, Glycine max
agcttaacaaaaggcatgctatatagggtggaattcctatagcaattcccttatgttatcagacataaaaagggaaaaggtaatattgtttccgatgctctttctcggcgtcatgcattactttctatgcttgaaacaaaattgattggtcttgaatgttcgaaaagcatgtatgaatatgatgaaacttttggagaaatttttaaaaattgagaaaaattttcagaaaatggtttctttagacatgaaggctttcttttcaaagaaaacaaattgtgtgtgcctaaatgttctactaaaaatttgctagtttgtgaagcacttgaacgaggtttaatggggcattttgtggtcccaa

SEQ ID NO: 173709 - DNA, 411 bp, Glycine max
agctttgagggatgaagctttaaggacaatggattgtattcttttaagaagaagaagaagaagaaattggactcctctccctcccttgaagaactcatgaacaacaatggagaatgaaggttccaagtttgatatttttggaggagtgaagaaataaggctttaaggcttggtccaaatgaaacttggttaggcttaatgttgataagatcaaattgacaaaatgaatgaccatttgatagccatggtggaagtgctaaatgcggccatatatgggtattttgccttttgaatttttaaccagaaatggctaaagtagacttaagcaaaaatggtaaagtaaaaattatttttgctaaaactggtaaatcttatcctaatcttctatattagtgtgctaacttcctagata

SEQ ID NO: 173710 - DNA, 365 bp, Glycine max
aaactcagctggctgatttagctaagtccgaacttctttgacttttacttttctcccgcaacatatttaggctggaggacaccccacataaacttccacaccgactgacttgattgaccaagccgtattgaatgtgcgacattccttagaccttttgaacatatgaaaggtggtatatgtgcctatcactacttcctacataaccctggccatttgcttgaagcgaccatcctgtgtatgctgactcgtcacaaatttctaaatttacaaatggtctcaggaggaggtcaatattatatgatacaattagataatgagttataacgtccctacttatatttccccttctcacttctttgtggact

SEQ ID NO: 173711 - DNA, 393 bp, Glycine max
  unsure (1)..(393): unsure at all n locations
agcttgcgcgaaatnaaatttgttgttngtgataatgggaggaggttatatgccatttttgctttaagagtagtgtcccactggtaaaattaactttccaaatgtttgccttcgcaggaatggccccgaggaagcttgcctcaaagaggtccaggatggacaaggccggccgaatgaactatttccgctccggagttcgacattcaccgttttaagagcgctgtcaccagcagcgcttctaaaccatcaaggtatgggcgcttttccgggagcgacgcgttcatctcacggacgactagtatacttgatttcatgaggaaatagggcgccggcggtgggcaccactggttactcctatgcccaagtttgatccagaaatagtccttgagttta

SEQ ID NO: 173712 - DNA, 408 bp, Glycine max
acgctatttatataagggggcttagaaccttataatattgaataaaggaactcggcattgggccaatgttttggaaccaaaccaaaccaatccaccactattagctccaagcaagcttattctatttttgaagccaaacaggggttcgaagttattgtacccaaaacagcctttctcattaggggtaactagattcttgaactcaaagtgccatctcttatgtcattgcaaaggtctctccaaaccttctcgaaagtgcaaaatgcttgcactatgccttaggcaaaagctgaggaaataaactctacgcgatcagagaaaaagagcctaagaaggaggtggcataccttgattgtttatagtcccccccaaatataacctcataggggctgcaactgaatgcctttg

SEQ ID NO: 173713 - DNA, 404 bp, Glycine max
  unsure (1)..(404): unsure at all n locations
agctaaatagttgaatgctngtcacagagagttttattggaactaagngtgacggatgtatccaccatttcatctgacaacatatagttaatatctattttcctgtctgtacatgctatatatgtttttgtttatgaatttccttgaaatttatttccctctccactgttttgcagggtttggcatttcaattgataaatgatgttcttgatttcacaggcacatcagcttcccttggaaagggttctttatcaaacattcgtcatgtaatttcataattgattcttattttaaatttcatccactcttgattttgattttcagttatgatttaaatattttgatgaaagcctatgaaacatgaatccttgatggtgaaatttgtaaaaaaatggtacactgta

SEQ ID NO: 173714 - DNA, 425 bp, Glycine max
  unsure (1)..(425): unsure at all n locations
gcaagctnnactcttttcttccattggctacgcgtcttatttaattggatctgctaaattttttcaaantttgtaagctagacggaatgattatttacgccaataacgaattgtctagtttgtatgcatagaacttggctaattgtagggatctgcactcaaaaacaatagactcaagctcggaaaatatagctttggggtcactagttctatccattacccccttacaatcgatataaaaaataacatgattcatatcccaaaaaatagcccactggatagtatacataaagtttgatcttccaaacactaagacaaggagtttgcgaacctatattagccaaaatgaactcgccattcctgtctaacacaagctccctagctaaataagttctaagaaatgatgcatgctgcatccacataat

SEQ ID NO: 173715 - DNA, 426 bp, Glycine max
acctgctgcatcaagctcactctttcttcattggctacggattataaattattttgcaaattgcccaaattttgattgtagacggaatgattatttacccccataacgaattgtctagttagtatgcattgaacttggctaattgtagggatctgcactcagaaacaatagactcaagctcggaaaaattagctttggggtcactagttctatccattacccccttacaatcgatataaaaaataacatgagtcatatcccaaaaaatagcccactggatagtatacataaagtttgatcttccaaacactaagacaaggagtttgcgaacctatattatccaaaatgaactcgccatttctgtctaacacaagctccctatctaaataagttctaagaattgatgcatgctgcatccacaataat

SEQ ID NO: 173716 - DNA, 304 bp, Glycine max
ttttcaaaatgggttctaagttttctaaaaggtataactcttctaaatgggcctcttggccatacatgaagagtctataaaagccaggctttgttttgcatttcaatcatcctgaacacttattcattcatccttacagccttgatctcttgagctctttttttctttgaccaaagctttcaagtttctggttctaaccttgaactgtgtattatctttattctcttcccttgccaaagaatgccaagctaccgctaatcttttggtcttttttcccttcaacaacaagactactgcgaatctt

SEQ ID NO: 173717 - DNA, 416 bp, Glycine max
  unsure (1)..(416): unsure at all n locations
tgcaagcttntagccaactggacttaccttgaattatttccttagatagcccttttgattcttgnttccctttccttgttttgaagctcactacaagccttaaatgaaaaaccatgatatcaccatatccttaaggaattttggagctttggaattgttttgggaataagtatggggggttttttgttcataggataacttgttttgttggctatgcttcatgatgtattttgggccatacttgatgtacattgtatcttggttaaatgttggacatgctgaatgaaatgctatttctcaacggctatagagtaaaataaatcgaaatagaaaagacaaccataaagttgaggaataagatcttattgacaaagaatgagaaacccttgctcactcttatgttgaatttattttac

SEQ ID NO: 173718 - DNA, 234 bp, Glycine max
cttcatagtcatccacctattcatctgctccccccaacacaaattcaagatcatcacaggatcccaacacaacaacacacaggggagtgagttatcacatttctagcttattgagaaaccagacaatttaatattcatattatataaatgagataccacttgcttaaacatagctcacgtaacttcaccacttcgtcattcaaaattcactttcaattatcaatcacattacac

SEQ ID NO: 173719 - DNA, 430 bp, Glycine max
  unsure (1)..(430): unsure at all n locations
agctntntcctctccaccgccaccacccatctcttcttcttacctcttcggcgagtccaagctttttcctctcccaatcccaccccctcccctttctcgccgcgcctcgcctacctcatccccaactcctccgccgacactgccgccatcctccgcacacttttcgccctctaccaccctcgcaaccgctatgtcctccaccttgaccgcgactcctccccggaagaccaccgcgacacctcaagcgaagtgcttctcgggacaaatggcagaagggaaggttgcttgttattctcaacttcaacaatttcgctgtaacacttcttctctcattctcgcagtttcacatttttacaacatttctccatattttatgttntaatttatgggatatggagattgtctcatacaacattntctccaaatttat

SEQ ID NO: 173720 - DNA, 312 bp, Glycine max
  unsure (1)..(312): unsure at all n locations
gcttccttcagacgactgcaacaactgaatgtgcatataccatttatgttaggctctttatttttatgcctngcggactctggaactaagttccaattagcagtatacaagccaagactgatccctaatgaagatngctacataaggaaggataagatgcttcaaaattatgaagaccaccctcatgctatgtgaaagcaaggctatgcaaactctccagacataaagtagttgcactgcatcagaagaatgaactcacaaacaaggataggcaagctcgcaaaggtattacagactangagctcactactc

SEQ ID NO: 173721 - DNA, 376 bp, Glycine max
  unsure (1)..(376): unsure at all n locations
agcttgttgaaattgccatgtttggatgagtttatcatacccattctgctntagggtttttatgaggatgcttgtgatgttcatgtcctgaaattgcttatggaaaactgttagagatgaatggtagaattaacctagggttagaaagtgaaaatgtggtgttttgagtggaaaaagagtgaatttttgagggctggaaggccaactctggaattggttgtatttagaggttagagtgagttaatcttatcttgaaatgccatttacgacttttgagaaaggttaggctgtgctttaaagaaaaacacaaatgaccatagtgaaccacgagccatttttagggcaaacttgagtgtgaggagtcaaatattgattt

SEQ ID NO: 173722 - DNA, 411 bp, Glycine max
agcttgcttgtggggcttttatggaggctgtatctttgaactttaatgggatcctttaatggtgattttccaccatggagatgcagcggaagacaaaggaaaatatgtgagaggaggcgccatccattaaggaataagccatggaagaaggagcttcacaaccaagatgagccttggataagaagcttggagaggatgcttcattggaggaaaagaatgagggagagaaagagagaggggggagcacgaaattgaaggaataaaagaggtagagaagtggaactttgaagtatgtctcacaagactctcattcatcaaagtcacaacaagtgttacacatgcttctatttataaactatgaagcttccttgagaagccttcttaagaaaacttccttgagaagctttctta

SEQ ID NO: 173723 - DNA, 391 bp, Glycine max
  unsure (1)..(391): unsure at all n locations
agctgtggaaganagtgatgttggtcacgccttattggcaaatcttgaaagagcccgagtagtcaaagagaagttcaagtccatagccatcaaagtctgaaaagagtatgatgaacatagggacgtcaatatggccaccgatgaagccttggaatgagaaaccaagaaggtcctaaaggaataacacgaccaaaacaagttttgaggggctttatagggcagcaatagtgagctcaaactccgaagaggtgaaaggaatcatcacgggtcaaaggcatgatctggaaggacgagctaaaggcttgccttatgtcgaaaagatatttgtctccacagtttaagtgagactgacgggaatatgtgggccatcattgatgagtgaaagagaact

SEQ ID NO: 173724 - DNA, 385 bp, Glycine max
agctatggaagtggtaagcaatgcttatgtcgtttctccccctttgcaaccccgctcatccgatgttgtattaatggtagccctgtaatgttgggacatgggtaccagcccaaaatgggtttgggtcaaaacgacgacggcgtggcaagcttggtagagttcaaggagaaccacgaaaggttcgggctaggatataagcctacacgtgccaatgtgaggagaagtgccttaaaaagaaggggtaaaagcatgggccagtagcaaggacaacaagtgaaagggattcccttatgtcacatcagcggaagctttgttagcgcatcctatatatgtgaagggtgggtcaccatgatccatgatgaagtccctcaagagcaatcaaact

SEQ ID NO: 173725 - DNA, 306 bp, Glycine max
  unsure (1)..(306): unsure at all n locations
atcacgtgacacttagaaactaagctgccaccatggagctcctaaatctccacacttntttgtggggccattcttggatgtccttgattttctcaaggtccactttgaccccatttctaccaactacaaaccctaagaaaactatattatctatcacaaaagtacacttctctatagttgcatagagggtagttttcctaatgacttgaagacctgcctgagatgtcctaaatgatcatctatgctcctactgtacactaaaatatcatcaaattaacaactacaaatctacctatgaaatccctt

SEQ ID NO: 173726 - DNA, 249 bp, Glycine max
  unsure (1)..(249): unsure at all n locations
agctagctctatctgagcagtttattcgnttgtatgctcaatatcagnagnacactagcacatgctgacatgtttggagttctctaataagataaatttttacgttacatttgtttcaaagatgaaaagggaaccgagaaagggagtagggaagaagtcaatggtgaaggtccctaataaatacttactccatgactatgtgaggatttttgttggggaggaactgtaatccatcactccacttttatt

SEQ ID NO: 173727 - DNA, 321 bp, Glycine max
  unsure (1)..(321): unsure at all n locations
catccacgaattttcaagacaaggctacaactagcttgctcactctgtacgacaatacaaaaccactcaccaattatcattaacaaagntgctataatagaagaaaagaagaattccggtggaagatttagaagctcatgcatttttttactgtctgcgacatataggaaacctggctctcacctgtctataattttcttatgagcaataccatcgatttggattaaaatggaaaattagttaaattcagctcatttgtattattcatttatttataaaaatggagactggaatcattaaggcaattatattttttatttc

SEQ ID NO: 173728 - DNA, 403 bp, Glycine max
  unsure (1)..(403): unsure at all n locations
agctnttattttagtagatgaagatgaattcttggccacctcatggactcctcataggacaatagcattatttcttgcactgaattgatgggagttggaagccatcttctcaatcaaattcctagcctaggtaggggtcatatcaccaagagctctaccactggcagcatcaatcatactcctctccatgttgctaagtccctcatagaaatattgaagaaggagttgctcacacatctggtggtgaggatagcttgcacacaatttcttgaatctttcccaatactcatacaagctctctcgactaagttgcctgatgcctgaaatgtctttttctgatggcagtggtccttgatgcagggaagaatttcttcaagaacaccctcttaaggtcatcccagct

SEQ ID NO: 173729 - DNA, 301 bp, Glycine max
aatattttgtaaaaaaaaaacagtttttgttttcaaaatattcgcatttttatagatgaggcgttatatgatttcgaaatccgattattatattcctaacccgaagtgctccttggtgtattcataaaaagtaataatttttcttcgaatcttagcaattgatatcctttcgaaacaccatttttttcttcatttgaattgacagtgaattctctcacttcttatgcgatttatggattctcttttctaaataaaaccaggcaaggactaactcccgcactgctagttaaaaaaatgattg

SEQ ID NO: 173730 - DNA, 428 bp, Glycine max
agctcatcttacctatctatctcccaaatgtctttgcaaagattcaatggataaaaaacatgaagttctaattcaagatgttttctttgttgcatgggcataatgcaatcactctatgtctagcaatgattttattaagatgtccctacctttgagttctactaaaaattatcctctctcgagcgactaatccctaaaactgatgcatataaaaccttcaatgtatttctactaaggattaccctctttcaagcgccaaacccctaaagatgatgcaaggatgaagcatataatacatttgttggcattttaggcctgccaagccctaactaaacgggtttagcctttcattgtcatgagagactattacactttagggggttgatatgaatggaacacgatggatggatagaggaagaaaagaagat

SEQ ID NO: 173731 - DNA, 389 bp, Glycine max
  unsure (1)..(389): unsure at all n locations
gtgcacaccatatntactatactntgatcaactgatacaatcttattgatttaaaagataatttatgctactctctcaatgtaggggacaacttaaattaaaattatatcatagaaaatactgctaaagccattcaaatctaagaatcttgaatctcaccagtactatcacgcatgtcaaagagaatgtagatcagacatcgtcatgcattacacaacgaaacattaagagaaacatgcttccctaagccaaccaatggaaatatgtattcatatttcgcgagcttgttcaaatctatagacacatataccctgtgtaaaacatggggacaatctgccactgccaaccagacacacattttataaatgattgaagaaaaaatatgcctg

SEQ ID NO: 173732 - DNA, 425 bp, Glycine max
agctttctaggacattagttaaaaaattatatatatatatatatatatatatatatattaattattactgacaaagtcattattacttgtaattttaatattaagtcatttttaatgaattaattaattaaatgtctaagtctactgacttttaatttctaaaaataacttttgatcggttaatgcgtaaaaaagttttatattaattaagttcaaatttagtatgatacttgatagaacattatggcggaaattgatcatgtaatcgattcacctagtgggataagacgttattgttgtaagttcaaattgagtttatatctcttaaataatatttgagttttgtgaatataaaatcataagttaaaaaaagagatcccctgaaagataattagttaattcttttatagacattaatttttata

SEQ ID NO: 173733 - DNA, 378 bp, Glycine max
caatctgaaggctgccataaaatatggattcggaatttttttttaccacttgtgccccactaaaatgatccgtctctggaatgaaggcgctttaaacgcttcttaacttttgatgattaccgtagcacgttgataatatttctttggattcaaaagtcaatccttagtagtatactgaaatataattcatattacagggtaacagacagaggactacaacatatagtgaagaactgcaaacacataattgacttgaacataagtggatgtaaggcacatgctgccttggatttgtaattctatctttcagtattattaattcaatattgagctgaaagaattgtatcccatgtatgtccatttaattgatgcatccct

SEQ ID NO: 173734 - DNA, 420 bp, Glycine max
  unsure (1)..(420): unsure at all n locations
agctctatgctcaagtgctattgcattttgtcttggattagatgtttatnttccttgctctctttatgtctttgtttactcttaaatggttgtgccattttttgtttattaggttagatggggaagtcagactactcaacaaatatgatacactggttagcacatggtttactaggtgagttttgtattagtattgttgctgctttagccttaattggtttaaagatattttgttttgtacttaatttatgattcttagttagctcaatgaaagccaaggaaaaataaaattaaagaaggcaagtctcgaggatttaatcctctttttaattggtctcatattctttcattattnttctttgatcctggcttggaagatttaatcatgttaaattatataaaactatagcctcctaatat

SEQ ID NO: 173735 - DNA, 395 bp, Glycine max
agctagttattgggcaatagctccccacctgacgtccccaaggtctcctgacccccgcgacatatctccaggtaccactctgtggtcaacaataaaagcaggaagtttcacccttcaacacttcctcatctcaagcttgtaggattatggggtacccatcacatgtggtactaggtggcggtcgggcgatggtgcacaacaagctttccttattcccaatgcgcgcataaacccaccattccctgatggccaccatctggtgcgctcacgtactccaacgaagcccataatctcgtttctttcaacaccaggtccccatcaatcctctcaagcttccacaacatccaagcaaaacaacattcaaacagcacatgctatcacagccaagcaataca

SEQ ID NO: 173736 - DNA, 439 bp, Glycine max
actcactgcatgagtggaacattttataacttttatttttgctcctaaccctccattgatcttaatatctttacgctcctctttcactggtgggtcttcatttcgctacatgtatctcctcatatgtctagtctaaatgtgttaacatgattctatagagttctcactgatttaacttgccttaaaaactaaatttgattttctatggttcaaatttctttgtcttgttcgtgaaccaataattgtgttggagttaagttcctttgagttctatcttggtctttttgcggctgaaaccatacccattaatctttctcaaattttatgtagagaaacctctaaatctatatgacttgttacctttgtcgtttgtactcagcatgtctatcctgaaattatcacatagactcttatgtggccgacatattatctgtctcgt

SEQ ID NO: 173737 - DNA, 399 bp, Glycine max
  unsure (1)..(399): unsure at all n locations
agcttgatgcacttattgattagtncatacctttgctngaaggagagaatgggatctgttatactcttccagaaaagctttcaggtgtttgatattatatttttgttttcaattttttttattgttaatttcgacatgctattggtatttttggaaacgggttttagattacagttatgataataattggaaacttatcatctatctcacttccatcatattcccttctttatatatatatatcatctccttttccgtcgacgtcatatattacatttatatttctttctctttacctattccttttcttttctcactatcacacacttctttctactctcaatccagatgaatataattactcataataattttatgtgtaacctttgactttatgaa

SEQ ID NO: 173738 - DNA, 429 bp, Glycine max
gatccttaagtcacctgagggctgcaagcttgggatctgaatggtatagttagtttattcattttaaaaaaacaaactagaacctccctccttactaaatacttcacaacatccaatggttcttaaaaccaacactattccaattaaacgctcaatacttcaaaactgttttttttttaagaaagtgttgaatgtcgtaattctgctaatgtaaataatttatctataagtttttaggtaattattataaaaagtaatcactctataatacatataaatatatatgtgaacgggtaactataataacttttatacacaatcaattaatttcatccaaattctaaaagaattgtgcattttcttactgggcacattatctttatacaaagataatggattttttctacaaatacataaaagagaaaaaga

SEQ ID NO: 173739 - DNA, 353 bp, Glycine max
gagacgacctcgcggcatgcgagctatagtgtttgagcaatatgttcctacgcatatcttagacgtacgtgaaacagatggcaccttacctcacgttatggacatttaactgctggaccgtagctgtaatagttagtaatgcggactcacagcctgatctactacatacctccctaataatgaagctgcttaactcttaaaattaaacatcctacaaatgtccttggagcacacttatctctacacaatctctatagaaattacctatattagcaatcattatcaccaaagctgcttacgtatcacaaaatctgttttaagctaaaatgactgcttcgcgtccgccataacat

SEQ ID NO: 173740 - DNA, 357 bp, Glycine max
  unsure (1)..(357): unsure at all n locations
agctntcttacgcttcttgatggcaagaggattcttcttccatagacaagnccnccaaacacagagctaacccttcaacaaaacctgaagtgctgactccaaatccattagctacttgcaaatcagcaagaacatcatctcttcgccggaagaactcggcatcatttgccactgctttactgcacctcttgtaccaaagacttgtgtcaggcttgccaaggaaatcaacatgctcatatcttatgtaacagccttcaagttgcaaagatgctccaaaagccaagggacaaatcaagcctatttggtcaacacaactttaacacatcttgagcactcatctggcctcaaatcagccct

SEQ ID NO: 173741 - DNA, 301 bp, Glycine max
  unsure (1)..(301): unsure at all n locations
tacacatgataagatttctatgcgctcctcctctgtccctgctttaaaactgcaagaccacgtgtcctgattctgattctccataaatagtatgaaaccagcttcttgatggggtttttagctntatatcttccaagaacaatgcaactcttcaatgtgcaaaaccaaatggagccactcttgctgactatacctttcctgtttgacatacaagattgccatctaatactccataattattcacttttttgttacacacaccagtgtaagtattttttacgagattataagtattttttac

SEQ ID NO: 173742 - DNA, 403 bp, Glycine max
gagctcccacagtatacaagcattttattatccattacaggggaactatcctaaactaagacaacagggcagaggcataaaactctgcccaaaacacattccaataccacaactttccctactcaaataccccagtaacattctcttcgttccgattcgttaaccgttggatcgactcgacagttttactggaggcccctagaaaataagtctacatttttaccgttgggatctgctagaaaatgtccagaacccaatatttactaccctttccacaaccagcaatacacaaacatttttggcacaagagccaaattctgctgcacaaaatttgacagctttttgctacacaaattgggcagaattcgaaatccctcttgcgctcatccaattttgctcaaat

SEQ ID NO: 173743 - DNA, 308 bp, Glycine max
  unsure (1)..(308): unsure at all n locations
taagcactcatatgggacatcttatgtntgtcatactntttggtaggaataatcaatatgaaaatacagaaaaaggtatgttttattgcattacttttcttaattnttcaaatagtgatcaaggggttcccatgaaccctaagagaataaaggtcattcctaagtggcctactccaccaagtataagaaaaatttggggcttccatgacttaacaaacttttacaaaaggtttgtcccatanttttctatacttgtggcaccactcattgagttggtgagaaaccactgttcttcatgggaagatgcc

SEQ ID NO: 173744 - DNA, 401 bp, Glycine max
  unsure (1)..(401): unsure at all n locations
agcttatcaattagaggaactaggtaactgtatgttttaccactcccagtctcctcagcaataataacatccttccctaacagcacagacgggacagaagaagcctgaacacacataaataatgctcacaacataagacccagcaccccaaaaaatgaaaaggactgaacttagaattgtacttttcatgatattctccattcagaatcacagttttaccttgccaacctaactgacctttaatataaacctgattggatgatagtatcaaaagcacttaaagacctacatctaggacctatctggaaaaactnttccataaacacctataggagaagaaaataagaaggtaaaatgaattgagttttcccataagctgtatcaacttatgcacttcagct

SEQ ID NO: 173745 - DNA, 425 bp, Glycine max
  unsure (1)..(425): unsure at all n locations
cttttacaacangaaagaagtatatatttctattatagccttaccacatgcacacctgtaaactatcttagaagagagaaaataatngttcactataaaactgacaaaaatgagaaatgaagcatataaaacagataaaaatgcaataaggtaatgttttctgtaacctcttaaaggtgtgatttcctcctacaagattattgtgtgtgtgaaacacaaataatatgtatgaacatgttcaaccctaagggccatcccattaattatttaacactaaaagaattcaatgaaagaaggattgtttattgctctgttatggtacagaacttttggattgaattctatatatgcaccatcacctctctagttgagtatgttgtttctatatcaatatggtgatgacttgatgagaatattttcttgat

SEQ ID NO: 173746 - DNA, 342 bp, Glycine max
tttataaatctacacctgttgtaagagtctgtggtctatgttcttctgcagatcaccatacagatctctgtccttctttacagcaatctggagtcaatgagcaacttgaagcttatgctgtaaacatttataatagacctcctcagcagcaaaaccaacaacagtagaataattatgaccttttgagcaatagatacaatccaggttggaggaatcatccaaatctgagatggacaagtcctccacaacaacaacagcatgtccctcctttccagaatgttgctggtccaagcaagccatatgttcctcctccaatacagcaacagtcacaacaaagacaac

SEQ ID NO: 173747 - DNA, 452 bp, Glycine max
  unsure (1)..(452): unsure at all n locations
catactcagctagtcttggcagaatanggtagagaatagcctgacacatanttttccatcattccagagcacaccatagtgccacatttgggaaaagggctctagaggcagcaagaggagcaatttttgtagagatccctatggttcgtcatctcattattgttagggtttcttctataatggttggttaaacactcttgttggggatttctaaagaacaactgatgtaattattttaatatctaattgattgtgtttcttgtgttcaatgcttctttcagtgcttaaattatgtatgctcttggtctgatcacccatctgtgtgcatagatacgagactctagcattgggaaatgtattggtgccttataactttgatgaagcagaattgatacttattcttacaagagggatctgcagattaagttttggtgtaattatactatcacaat

SEQ ID NO: 173748 - DNA, 392 bp, Glycine max
tagcttgcttataacggccgagaataaaaccgaatatgaacgaaatgaagacgaaagctaaaaaacaagaaaggaattaaaagtctcggattcgaaaacttacctgttgaagaacgaagaacgaacgaagaacgaatgaagaacgacgaaaaaccttcacggattcgctcacagaaacatctcggaaacgttacggaagcacctcggcttggattttcttcacggaaacaatttttttcacccaaaatagctgaaatgcatagctaggcggatctgggatccttaccctttcgcctatttataggaaaaagggggaggaggttgtcgcccagctcgcccaggcgagctgcattgcttcctctagaagcaaccctgcttccaaaatactctag

SEQ ID NO: 173749 - DNA, 304 bp, Glycine max
  unsure (1)..(304): unsure at all n locations
atgttagtcagtttgccagattgattatgaaggaatgcattaaccgtatcccggtgagagtgtgatccttaaattttgagagaaacgactatcatttagtactggattttgcgggaatctctgaattatggactgaatgcatgaaattgaggatgatgaaggccatgtntgattgtgatagccacttagccaaaaagctgaccacgcgcttgaatganttatcctttgcacccagtttgagcataatgaattattgattgattgaaccctgagcctgtacagtgttatctcctgctaccttgac

SEQ ID NO: 173750 - DNA, 393 bp, Glycine max
agtcttaagttgctcattgactctagattgctataaagaaggacagagatctgtatggtgatctgcagaagaacatataccacagactcttgcaaaaggtgtagattttttattcatggcaagctgagttactaggttgaccaaggcatcaagctttttatttccagtagatgaagatgaattcgtggccacctcatggactcctctaagaacaatagcatcatttcttgtactaaattgttaggagttagaagccatcttctcaatcaaattcctagcctcaacaggggtcatatcaccaagagctccaccactggcagcatcaatcatactcctctccatgttgctaagtccctcatagaaatattgaagaaggagttgctcacaaatctg

SEQ ID NO: 173751 - DNA, 341 bp, Glycine max
  unsure (1)..(341): unsure at all n locations
tgccttaatcatttccaaatatgcatgtgaattangacgcatcaacaagaatcaagccgaggctattgtgcaagcaatcaatggggcaaaacacaccaaatgattataatgatggatggctcanattctcacaaaggtaaaatcatcactttcaaattgagctttcataactatcatgacatgtagagaagaatcaaggatttcaagtcacanaatgtcaagaactttttatttcaaaacaattacccatttcttgaacatatcctataattcaaagaanaacatgcaaagtcgtacgtgcacacaaaattgacccataatattataactgaaatccgacg

SEQ ID NO: 173752 - DNA, 400 bp, Glycine max
  unsure (1)..(400): unsure at all n locations
tatcttgcatgtccaagtctcttgtgtcatacccagtgatttcctttgatggattttatacatactacattttgttttgatagctcactaatattaatcttataaagatttcctttcctcttagcaattaaaagttaggtcttatttttgtgttggacaacacactcttctttgctaaaggaaacataaagtccgttgtcacataattgacttttgctaagcagattgtgtttaagtcttttaacaaaaaataccttatcaatgtgaggatagggattaatagtcatctttcctactcctactatcttccttttttgatttcccctgaaagtaactatntcacgatgcatgggagtcgtgcatttgaacatacatttttctcctgttatgtgacatgacc

SEQ ID NO: 173753 - DNA, 430 bp, Glycine max
cttgtctaattaacctaagattgagagagaatgattattaaatcacacaaaatggaagtactaagtatttattacctatacataacagaaaatacttataacactacaaaataaccataaattggaagagtttgatacaatttacacaagttttatacacaaaagttagtcgtattaaccgactaacaactcccccaaatttacaattttgcttgtcctcaaggaaaaagagaacaactcacttgccctcaagtgacaataacatgcagtgactatgtacaaaggtgtatgcaacaaaagttactgattgcatgataagagaaagaagcattatgtactcatcacttgtctttcacaaaatatgcagctattcaaagtgaagaatataatgtaagctgtactattagatggaagtaatcataagacagat

SEQ ID NO: 173754 - DNA, 379 bp, Glycine max
agcttgtataatggctggacatgatatatgttatggtgttggtttggccggcggttcagggataaaggaatgtcccacattatttccatgacacacgtgcaacaatgatgattcaaagattttatgcaaaactggtcatgcatgcacctatgtggacactcaagcatcaagttttgcggtcatgtgacactaaggcttacaattcatttttcctatttaagtcaacccagtgtttccaaaacatgctctttcattaattcatgcattcattcaagcccattttgggtgttcggaaaaattttcacagcattcacccttcaggtgtatacacattttttcaacaaaaactcttttgtgttttgattggtgaatctttttc

SEQ ID NO: 173755 - DNA, 332 bp, Glycine max
  unsure (1)..(332): unsure at all n locations
ctaagcttacctggaagcctacgaattaatgctttataataccatncactcatagaatgcacagcatggaaagagaaagactgagtagaatagactgggagagatgcagtagacccctcaaattgttcttccttttttgccttctcaggattcctctttaactctaggtgctacagatctctatttattgccatactaaaccaacaatatggaagtaatctgttttatttctagtatcccatcaagcaaaaagtgaaaaaataataccatcccaacatacaattgtacttaccacctacaccaaaataatagaacctacacatttaaaaata

SEQ ID NO: 173756 - DNA, 391 bp, Glycine max
tgcaagcttgtatttctttgcattagaataaaagttagtgtattacagaagattgtaaagggtagacattgtgtaccttgagtttccatggagatgggacttagtaaaagaaagggctcaccaaaggtgaaccttgggtttgttgagccttggaccaggggcgtgtttgccttgggttttatcaagcctatggagttgcgtcaaggcttaccaaggacgagccttgggttttgtggacatgtaaggatcagcaagcacagagcttgagtttgacgagtcttgtgtgcaatgtaagtgttgtgctcttgcatacatgacactcgccgtatgtgtcatgtattggagacgaactagcatgctcttgcatacgtgcctcttacaaagaggcatg

SEQ ID NO: 173757 - DNA, 385 bp, Glycine max
  unsure (1)..(385): unsure at all n locations
atactcagcttatgaattataataagagaacaatgtcttttgaagaatcaattcatgtttcatttgatgagtctaatgttatttctccaagaagtgatattntagatgatattacagaatctttagaaaaaatgcacattcatggacaagattctaaaggaaaaggagaaggaagcaataaagatcctgcagtagaagtcaaagcaaataatgatcttccaagagagtgaaaagtttcaagagatcatccccttgacaacattcttggtgacatctcanaagggataacaaatagacattctcttatagattnttgcaagagtatgactttngtgtctatggttgaacctaanaatataaatgaagtcataatagatgatcattg

SEQ ID NO: 173758 - DNA, 382 bp, Glycine max
agcttcaagaaaaagatggcctcagcaaattctcttatttccagaagggaattctatcaatagacctccaatctttaatggagagggttaccactactggaaaacccgaatgcaaatttttatcgaggcaatagatctaaatatctgggaagccattgaaatagggccttatatacccaccacagtagaaagagtttcaatagatggtagttcatcaagtgaaagcataaccatagaaaaacctagagatagatggtctgaagaggatagaaaacgagtacaatacaacctaaaagccaaaaacataataacatctgccctaggaatggatgaatatttcagagtttcaaattgcaagagtgctaaggaaatgtgggacact

SEQ ID NO: 173759 - DNA, 285 bp, Glycine max
aacatgttttattacaaataagtaaatttcactagatgagtttataacaaataaaatgtttaagatgagacattagtccattctcgagtggtaggtctttttaatctaacaaattaagtcatactttttcacttatcaaaagattggctaatcctaatatatatataataggaattcgataaagatttctagataatatggagatcggttaacagttggaaatacttgtaagacatttttgataggtttcataaaaagaaatttaacaatgttacttgggtgatt

SEQ ID NO: 173760 - DNA, 384 bp, Glycine max
agcttggtagacaaaaagaaaaacaatagaattcaaataaaaacaattggtattttatctcatcgctaacgtacatttcatcaaattacatcgtcaaacaaatgtttgtacaaatttagacaatctctgggccatacaagacgcttgcatgcttgaccatgccattatggttttctttggcaaagtagacatctttgatttttttaaagatgtgcatggtgagtaagctgtctgatccagattgatggtttttcccaactctgcgttccaagttcagagaccgagaaactcgatctaaagctccgtagaggttacgaaagaacttcatcaaatgtttcacatcatatactctgtgtccgaagaaacaagctgcagaaaatggcg

SEQ ID NO: 173761 - DNA, 311 bp, Glycine max
  unsure (1)..(311): unsure at all n locations
ntctggtgatgagaagcacgttattctgttgttttccatatcggttccttcgccaagtatgtgtatatgtgtatatgtgtattatatntcgttgntctagttgttgtttgtattttggtttgcgcaggagaaaaaaagaagaattagagatgagagtcgtcatcacataaagggcatgacggacgaaatcagtgtcctatctttgctttcctcttatctncgatgagaggtaagtaaagagggtttacttgtataccctctatttcgtccgggattattacttgatgacgttcaataaattgaagtccgat

SEQ ID NO: 173762 - DNA, 386 bp, Glycine max
agctttgttgatgtcgagaagaaatttgctttatattgagcgtgatgatcaaaaagggggagaatgtggatcatgcattgttttgatgatgttgaaacaaaatcacttgattgtcatcatcaaaaagtgggagaatgtgaatgtatgaatacatgaattttgatgatgccaaagaagaatcaaacaaggccacttcaaaggataagcatttgcttcaagattaattcaagattgcttcaacaaacaaagccttgtttcaagattcactaaagttcaagccttgcctcaaaacaaagggtttcaaggtcatgcaaggctctggtaattgattaccaggaagtgtaatcgattaccagaagggaagaatgaaaaagagctgttgaaaa

SEQ ID NO: 173763 - DNA, 447 bp, Glycine max
  unsure (1)..(447): unsure at all n locations
tcttgaggaagtctcttaatgaggcttctcaaggtagctacatgaaagctgtcttggtaaaaatgcttcccagcttttgttaaccgttggatcttctcaaaatttggtctccagcttcccaagacacttgtccacgctctgaccgttgggatctttaagagatatcttgagtgtgcgcgatgttntccgtcccgagagcattgctcacttgtgcgttttgagccttgtagtccaagtagcttaggaaaaatgccatttcttctcctttctttcttccaaaaccatttccaacgttccaagttctttctccatcacccacaaccaccattatccaccacataccgccgttgttctccgtggaaaccccacaccgatagaaacccttcaatcaaagcggaatcttccaacttggctttgcggttcggtagagaatgaaaccctaatctg

SEQ ID NO: 173764 - DNA, 296 bp, Glycine max
  unsure (1)..(296): unsure at all n locations
tactgtcttgtcaccttcaataaagtccagtagagtaatgccacggcgtgatgggtctaaagaaatctttgcaatgagataagtttgatgaccgtgttgttagtgtcagacatgcaactggtgataatatgggaaataatgagccaactcctatgtcactagattcttcttcttttggatataaacctccaaatagacctaccataccgangaaacacatgttgaccttccttcattcaagtgggttatagttgcattttactcttcacctaaaaagttaatgcgcctttcccttg

SEQ ID NO: 173765 - DNA, 364 bp, Glycine max
  unsure (1)..(364): unsure at all n locations
agctttctgaagttttctggttttccaaactttgaaaacttgngctattcatcttttcattctcttctccctttgccaaaaagaattcgccaaggactaactgcctaaattctttttgtgtctctcttctcccttttccaaaagaaaaaaggactaaccgcctgaattctttagtgtctcccttctcccttgtcaaagaattcaaaacgacacagtctgagaattcttttgattcttctcattccctaatacaaaagtgttcaaaggactaaccgcctgagaattcttttgtatccccattcacaaagtatcaaaggtttaacagcctgagatctttgtcttaacacattagagggtacatcct

SEQ ID NO: 173766 - DNA, 315 bp, Glycine max
  unsure (1)..(315): unsure at all n locations
ntggcattagttcccattccatcatgtatncatcaagaattcaaagatctcattcctctgtttcaatcactttatccctttttatttgattcttccaacaaaattcatgactctttgctcaattgtccttgagacgtatgtgatcgtgatgcttcccaaaatgggtttgacctttttcatttcatttggtcaatcaagaattaatctttaagtaaataaagcanagtgaaatgtcgttcaatttcaattattattgtgttnttttattgtgtctaatgaaaggtctagtgctcatcccaagtacactatataatt

SEQ ID NO: 173767 - DNA, 337 bp, Glycine max
gactccagattgctttatagaaggacagagatatgtgtggtgatctgcagaagatcatagaccacaaaatcttgcaacaggtgtagatttctgattcatggtaagctaagttactaggttgaccaaggcatcaagttttccctcaagctttttattttagtacatgaagagaaatccgggcgtaacttaaggacctctcctaaggacaataccatcatttcttacactgaattgttgggagttggaagccatcttctcaatcaaattcctagcctcagcaggggtcatatcaccaagagctccaccactagcaggatcaatcatacttctctccatg

SEQ ID NO: 173768 - DNA, 436 bp, Glycine max
tctagctatactatggtcctgtttggatatatatttcattaagtactgttagctgacgaagatatcacactattgttacaagttaaaattagctgatgcattaggctgaatattgaagttttctcattataactctgtcaaaagcttatattaacttatgcataaactaatttatttaacttataggatgagaaattcaattcattttacagtctaatttcttcttatgcaagcacggcttataatattttaaactaacgccagctattctagttatttcatgtataataagtctccaacacttccaccaatagaagaattcacgactagccactaatgctttcagactcgtggattatcactaatgatattcctgctttaatttcctatcaaaaattagcacttatacaatatctcttttatcttttatacacat

SEQ ID NO: 173769 - DNA, 397 bp, Glycine max
ttcttagcaagagactaaattctctcatggaggatagagaagaagaagcaaatcttatttgttttagccaacttttagaataagatttattttcgcttttaattatattttttagcctatttttaaacttgtaatgggcttctacctttttttgttatttttaagtcttttaattattaaattagttattgggccttgggccaatttaggattattagtaggagttataaatagactccttaaacactttgttggcagtttttttttataaaatttcatattagacacggttaaaccttaggttcttatcatagaattttattttttatggcgaatcatcctcaacttattaatgtcccaagattgtggcattgttcttttcatctccctttctaat

SEQ ID NO: 173770 - DNA, 182 bp, Glycine max
atgaactcgctatgacactcatcatctagcttatcgcgacatgcgctaattgcaccatgtattggactcacagtgggacaattctggaccatagatgagttgtatataagtgtcgcgcgtgcacaactcgctctatgcactcttgttcgactcacaactgagcgagtgtgactggttctaac

SEQ ID NO: 173771 - DNA, 336 bp, Glycine max
ttgcttccattggaaaacgcgcgaaataatgttaatgggtggaataagaatcaacaatgcattagccttggggtttatataattaggctgagataaagcgcacaaacttatctttagaaagaaaacactcccagggcagagggcaaaatacactccgcgcccaagatatgacaactcatcagacaaaaagactccgaaccttccaaacagactgggctatcaaaaatttgttcttataagagaaagaagaacaactcggaaagagaaagaaaatccaaatatcgctatgcacaaggggtttcaacgacaggggagacgataaatcttatggacccc

SEQ ID NO: 173772 - DNA, 416 bp, Glycine max
tcgggataggtatccttcgcactaatttcctgagtttcatttccagtacttccgtagctgtggatttcagtcttgcagatactgctcagaagcataagccagcgcttggatacagaagcacagacactcctatcttggcctgcaagcagccttctaaggaactcaaagaggcattcatctggcgaagattcaatagatgtctttggcttctgcttctgctcaaaccattcttcgctgatatcaaatggaacactgaagcgagacctcttctgaagaggaaggtaaacatcaacttgacggccaagagacatgaagagacatggttccttcggttatgataatatggccccatggtaaaatcacatttctgaaaaccaacatgtcaggtcatatcgcgacaaaatgatataaaataa

SEQ ID NO: 173773 - DNA, 410 bp, Glycine max
  unsure (1)..(410): unsure at all n locations
cgctgcatgcttaacacctctcattcttattactntgttttattgaagaagtaataagattgaaaaatgaaaaggtcgtcttattcaaaaccccaaccaattatgaaatcccctatctcccacttcacacctcggaacgcaccgttcttatagagagaggcgctttcacatcttcttaggctggggagaggaaatgttcccattttttaggatactccggggaacagatatccagtggagatgacggggtggggcctgtatctcagaggattagagcacgtggctacgaaccacggtgtcgggggttcgaatccctcctcgcccacaaccggccaaaaaagggaaggatttttccctctgggggtaggaaaatcatgatcgggctagcggacccacagctatggaacttg

SEQ ID NO: 173774 - DNA, 412 bp, Glycine max
  unsure (1)..(412): unsure at all n locations
ctaagctnttatatcctgcgccggctatatgccgatgatctctctcagttcgtaccgcagaagtttaccaccatgttcgggatggattggtgtggtttctctacgcctaggacaccagaatatcgaaccatgaacgaagaaaggcatgaaataatagcaaatatattggctattcattgtgaggccctaattctcgactggaggggacaccaaaggcctctgcccttccatcccttggatagatagagaggaggngcagagtttttgggtttttcatggttgtcaagagttgaacaatgaaaatggatgactagtgcctgatcgaattgatcggatcatgtcggaacaaggtccanatctaccggtctgttacgatgcctaacttgatacatcactgcactttcacttgaca

SEQ ID NO: 173775 - DNA, 428 bp, Glycine max
acccggatccttaagcaccgcggctgctgcttgcagtgtgtaccccaccattttccatagtagaatactgctaatgtgtctactatcattgtcatcatttttcgtcattgaggtgccacttgagctgccaggttctccacctttgggcgtattctttgaaagatctgtgccccctttttttgcacatgttttgtagttgcatcctatccgaagccattatgccgacactgcctaacgaaggcaaccattatgtcctcccgggaatggactcgggaaggttccaagttagtgtaccaggtaacaactaccccagtaagactttcttggaaggaatgtatcaacaattcctcatcttttgcgtatgcccccatcttccgacaatacatctttagatggttcttggggcaagtagtccccttgtacttgtc

SEQ ID NO: 173776 - DNA, 459 bp, Glycine max
  unsure (1)..(459): unsure at all n locations
gtacgaatataagaaacatcttcttcgaccttggtgattcttgactccatctcattgaagcgcatgtccacttgtaattccaaagtatcaaacctttcaccaacaaaagtttgaagacgatcgaacctatccaaaatcttttgaagaagagaggaatcttctccaccatgtccttcttcatcaataggtcgagcaccctttttcacccaagagccatcatgctctttttgataatcaaaggatgcaatgacagccgcgcctattagaaaggatctcttgattggaacataaggttcataatcaagagggatgttaaagtgttgaaggaagagggtgactagatgtggatatggcaatggagaatntaattgcaatgccttatgcatgcgatatcgaactaagtgtgcccaatcaatttgggtggcctttatgaaaagcccacataacaataagatcctc

SEQ ID NO: 173777 - DNA, 385 bp, Glycine max
  unsure (1)..(385): unsure at all n locations
agctntgatggtcttaaactcactcaaagaggatctcatacagcttgaagtaagataaccggcccacaagcaaaatatgagcaaacataaggatcattgcttgctgctatgagacaaaaagattatgaaagcaggcttgattgtggcaacttaagatcgcccaaaccacaaagataaaactagcaagaacaacatctttagcttgcaggtgaacaactaatttgccaacaaccaagataagatccataggagaagcaagattaaaaccctgaccagttaagttatagatgataaccaagaccaaatctaatctccaacccaacttcttctaaaagagagcatactttgtgcaaagcaagaatggccaaaattctttgtaacattt

SEQ ID NO: 173778 - DNA, 338 bp, Glycine max
  unsure (1)..(338): unsure at all n locations
tactntctagtagtgattactgaaagttatcttacattgttcgctgtacattcttacaaaacaacttacacacaatctaaatcaacatcttgaggaatatgaacactttgggaggagtggatgacatctactatgccgccctcatcaacaaagttcttttggaatactaagtcttccatgtcttcaaaggaatggatgatgactcctagcagtccattatcaacaagggtagcttcatcactagataacaacactctagtgttgtaaacctgaaggtaatgaaggttgacatcaagaggaacatacttattcctctagtgaactangatgacattcag

SEQ ID NO: 173779 - DNA, 377 bp, Glycine max
  unsure (1)..(377): unsure at all n locations
agcttcaaaccacagcaacacaaaatctatgtatctcaaacccctcaatntattggattttcaaggtttgagaagtgaaattgagaatggggtaaatttggaacaaactctcacctcacacaagtctataacatcaatttaaacttgctcaaactgggtttacacctaaaattccactgaatcaaaatttgactcctcaacacccaattttaccctagaaatggctctttgttcactttggtcatttgtttttctctcttgcacagcccaagctttctcataagccctaaatgacatttcaaactaggattaactcactttaacctccaaatacccctaaatccagatttggccttccaactctcaaagactcactc

SEQ ID NO: 173780 - DNA, 397 bp, Glycine max
  unsure (1)..(397): unsure at all n locations
ggagaggttccatcaaccgccctaattccttgatgctggtggtatctaggctnttgaccttgacttggtagaacctcttgccggtttgatttgttcccatgcttactaaagtgagacaaaagctggtgcaaatcaaaactccgatatctcatgggtgggatggatgaatgcatgatggaatgcatatgacacagatgcaatctatgagtgcggnggtccgaggaatttgtccccttcttagatacgacgtctaggggtagcgaaatgccccaacgcacgtttttaagaaggcgacacggaccctccgttggtttggttacagtagggatcaagacagaacccatatgcaatgcctatgcataagacacaatgcgggaatgtgcacagtatgacaata

SEQ ID NO: 173781 - DNA, 380 bp, Glycine max
agcttgatgtttatgcaaacaaaaaagtatggccaagttggggtacacgcacgtcaatttacacgtgtcacactttggtgcacatggtgccaatagatagaccagatatcacatccatcacctttgatcactttcgacattgctatgttccttggggattaacatctcacctgcaactggagtggttcaaagacatcaatttttatctgggcatggaagtgccgcatgacgctcaagaattcatagtgaccccaatgaggtttgatgtgagaggtaatgtgttgagttggagattcaagttagtacgttccatgcaggtcattgaggatcggggagatcacaccaatatgatgccaaaggaggaggaagagtatcgtgag

SEQ ID NO: 173782 - DNA, 179 bp, Glycine max
gatggaatacttacttggtggtgatgaacaaaagctgcaaacggaatcaaaaaatgcgaataaggatgaccctatggctgcaaattcgtcaatcccgtgggtattgcttttgaaaggggggaaaagaagtttttgaatggtaaaacgccccccctttcgtcatttttataatttggtgc

SEQ ID NO: 173783 - DNA, 359 bp, Glycine max
agcttggttcgaggtacttacccgttgaatatcgaaaaacgatgaagaacgattgaagaacgtcgaagaacggtcaaaacctttgcgaaattcctcacggaaaacgttacggaaatgtttcggaagcgcctcggcttatattttcttcacgaaaacaatttttccaagcaaattcgaaagagagagaagtgcctaaggggctgaacccttttcttcttcacttcctcccctatttatagcaaaataggggagatggttgccgcccagctcgcccaggcgagctcagctcgcccaggtgagccaggttgcttcctccagaagcaacagccttctggagggatcttctggagggcccaagt

SEQ ID NO: 173784 - DNA, 306 bp, Glycine max
tcctacttcttgtcgaataactgtgcactcttctttggtattctgctcagtattcactccaaagctactagatgacttctcagctatctgcttagccagttgacccacctggatctcaatatttttagggctgactcaatgctcttatgattggacatggtcacttgcatgaactgagccagagtcttctccaatttagtagtcctctgaaaaagatttggcccatgttgacgtggcatgttggaatgtccaccctggtgcttattgaattgattgccacggtgtgatttccattgcccttgctga

SEQ ID NO: 173785 - DNA, 404 bp, Glycine max
  unsure (1)..(404): unsure at all n locations
gatcttaagcgactgagcagcagctttttttatgattcctaaagaagctagagcttagctacacatacctctctaatagctgagctcacctccttgagatgagaagctagaacttagctacacaccccctataatagctaagctcacccccatgacaaaaaacatgaaaatacaaaaaaaagtccttactacaaagactactcaaaatgccccaaaatacaaggctaaaaccctatactactagaatggccaaaatacaaggctcaaacgaaggaaaaacctattctaatatttacaaagataagcgggctcatacttagcccatgggctcgaaatctaccctaaggctcatgagaaccctanggccttcccttggatctctagcccaatctacttggagtctt

SEQ ID NO: 173786 - DNA, 432 bp, Glycine max
  unsure (1)..(432): unsure at all n locations
tactccgcacaatagtggcctcttgtgaatgaagtggctattcctccttctaatgacacatggacacttatccctgacccaactacaatttgtgcgaaaggtcggccaaaatcaacaaggataaggaatgagatggattgngtcgaaccatctgagcaccgacaaaaatatagtagatgtggagccgaaaggcataacaggcgtcactgtccaatgcaatctgagcatgggattngttcaaatcattaatttatcgtatgtagtgaagtgacttgtatttgttaaaagtctattaaatgaattgaatttgtcgggttgaatgaaattgttagttaataacattacttaattttggtttgtgacattacttattctggcttgatacattacttatttgtggagtcaatgaatcattaataaaaagacaccata

SEQ ID NO: 173787 - DNA, 291 bp, Glycine max
  unsure (1)..(291): unsure at all n locations
tctggggaagggtgtatttgaantttgaagtactacattgttctaaataaagcgtgagaaataaaaataaaacaacaaactgggagttttagccaccaaatgtgatattctatgttaccccacactgcttgtctgaaaaagaggaaagttaaaaaaatacaaacaattccttcttataaaacaacataactcaagcaaggtgacaatggaagaatcaaactaatttttatgggccatggccacctacataacctcggatcatcatgattaattgagtgaaaactgaaatat

SEQ ID NO: 173788 - DNA, 439 bp, Glycine max
tgtgtaatagttgtgccaaaaatgcctttctatatgtgtacagaaaaagcaatagatatttgatatatacgatctctactattgtctggtggaaagtccaataacattttaaacatgatatttgtgtgtgtgtgagggtcatgatattaatgtaaactaagagactattaatagtctgtattgtgactttgtttgtacacttttcaagacaaacagagtgtggtcatggctttgaccctcatattcgtgtataaaacatatttattgtgagagattagtcccttatatgaaatttagtatctcaactataagggagagaaccctgttaaaattggtaaatagataggacataaagtgtaaaaattatgcaatgctcccaaaacatattgtctgtattggaagcccaatatttattaacttacaaccttattaacttcac

SEQ ID NO: 173789 - DNA, 362 bp, Glycine max
  unsure (1)..(362): unsure at all n locations
agcttcanaaccactaacacttttcacatttctctgctaacgcagcgctattaactacttaacttagattaaagcatgtagttgtaagatataaccaacccgtaaccggtggccatcaaaatcatagccatcacgaccacgaattgcatcctcagcatcttgagcatcttcaaactgcaataatcagtcatcaatcaggatagagggtggaaaaaatggaattttatgacaaactgaatggctccaaactcacctctacaaatgcataaccaggtggtcttgggggaacctttangtcgatgtgtgttatgtgtccgtactacaaagtgaaatttatgcataaacaacaaccaacttcataa

SEQ ID NO: 173790 - DNA, 267 bp, Glycine max
  unsure (1)..(267): unsure at all n locations
ggcacatgatacactctattcgagtttgatatgcgtatgttctgttgaaaatgggttacatgtcttcactttgcagtacgaatgatgtgagaattttgtaggacattttagtttaattntttttcctttgactattttctgaatgtagattgcaaggaatgggttttgagagaagttggggtgatactgctgaacgggtattggaaatgatgcatctgctattggatattcttcaggctcctgatccttctacactagagacttttc

SEQ ID NO: 173791 - DNA, 165 bp, Glycine max
caaggagcccgctgaggatctacactaacaaggaaccacaatggatagacgatagactcgaagggaatcccttgcagaagacaagggatagggtcagagtgaccagtaacacaaaggcgtgttatggatggaagcccaaacgcggctggcaaagtacaaagcgac

SEQ ID NO: 173792 - DNA, 367 bp, Glycine max
  unsure (1)..(367): unsure at all n locations
tgcaagcttctaaggaagttttctcaacaaagcttctatggaagttacctagtctatttatagaagcatgtgtaacacttgttgtaactttgatgaatgaaagtcttatgagacacacttcaaagttccacttctctccctcttttattccttcaatttcgtgctgcccccttctcatagtggtgaagctccttcttccatggcttattccctagtggatggcgcctcctctgaacaacaccataaaatcatgaaaagatagcacaaaaattttcaaacaaaaattcaaattcaaactatggaaactgcctaaggaaagtttanaaaaataaaacaataaacttgaaaataaataaaaactagtata

SEQ ID NO: 173793 - DNA, 391 bp, Glycine max
  unsure (1)..(391): unsure at all n locations
attctgtgttgtaccaagtcattattatctctatatttatcanaagattcgtatttgattggctcactgactaattattaatcgtcttacaaatgaatatacaatctaagtacttagtattttctctagggtgtttaaggtagtttgagagctctacaatctttactataatacacaaagaactttntacaaaaagaatttgaatgttagtgcgtaggttcgtaactcatatcttcaaagcttctagtatttataggtcttcttcttcaagtgttctttgtctctaaatgaatataattcttctcttgagctaatgtctaatgtatatggtcgttggagcatataatgcttacattanatgcatgtattatttcatgttgaaacaccattc

SEQ ID NO: 173794 - DNA, 403 bp, Glycine max
tgctttcttttgaaaacaaatgtcataggtagtttttaagaataggatgggtcatggtgagtttgagtctccattttatccttgcaaaagactgagagtcgggtttatttgtttaaaggtggggaaaagaatgaaacccaatctcatctccatccacatttatcaagttcaggaaagctcacaaaaaaatcatctcacatttttaaaaaaaattattttttatataatataataaatcacatgttattagttatttttaattcaaaaagatttttgtgaaatttaataaagaatcaatactgtaaaaaaaaattaaaaattaaatcatatttttatttcaatgtataattttgaactttgttatttaattagtatgggcattataatattatttatataccta

SEQ ID NO: 173795 - DNA, 381 bp, Glycine max
gacggactataccaagctctatgaagccagggacggatataagatctatatataggcttgctattggtagagagaggaagactagagatttggatcaagtaaagtgtgttaaggatgaagaaggcaaagtcttagtgcatgataaagatatcaaggaaaggtggaaggcgtatctccacaacttatttaatgatggatatggatatgactctagcagtctatacacaagagaagaggaccggaactataagtactatcgtcggattcagaaacaggaagtaaatgaagcgttgaaaagaatgagtaatggttatgcggtggtgccagacaacatacctattgaagtgtggaaaactcttggagatagaggtcttgagtggc

SEQ ID NO: 173796 - DNA, 401 bp, Glycine max
ttcttgacaactatatctataatttgtaaaatttatttaaaatttagtgctcaaatagtataaaaacggatttatatttctaatattaatagtttaattcgctttctcgtttatattttcatgttactattatccttgtatattgaattttaaaattgtattagaaaaaattatttaatatttcacattctaggtttatactaccatcaaataatgtttaatttactataatataatttatagtgattttaaataacagctagtgtacttaatgtttgaagtcccagtatatcaacatttttgtctcaacaactacatttcatatttgtttatgaatgtatctgatgaaagagtctgtcttatatatgtgagaacaagaaaataactaatgactattaaat

SEQ ID NO: 173797 - DNA, 458 bp, Glycine max
  unsure (1)..(458): unsure at all n locations
actaagctttatagataaccatttctttacaaacatttcatgtagaaaattattaaatataacttaactgtcaggcaaccggtactactgctcaagaccaaaaaattgggcgacattcacgggaacacagagaaacaagtgttactttgaactctaaaacaagactagttggtgaactggtaagatagatatccaaacataattgtcaataaaattgggcaaatctgggatgttaagtgtaacttcaaattgaaatcttcagttatgcccagaaaaactatgctagcttgatcttctttcaaggtccctcactgtcatttagagctaatttgcaatagtttcaactaaacaactatcctccatttcatcagctaatgatcatctnggttaaaaactcagcttgctcgggaaaatactccatcaattcatccttcgtcacccagacatgatcctcacat

SEQ ID NO: 173798 - DNA, 408 bp, Glycine max
tgcatatctttttaccaagggtggagggctcaccaatgacggaccttgggtttggactatccatggagattcgtcaaggctcaccaaggacaaaccttgggtgtgatgagccttggagattcatcaaggctcgccaagggaggaccttgggtatgacaagccttgaagactcgttgaggctcaccaagggcggacgttgggttttggtgagccttggagatccgtcgaggctcaccaagggaagaccttgggtttgacaagccttggagaaggctcaccaaggtcagaccttgggtttgatgagccttggagattcgtcaaggctcgccaagggccgaccttgtgtttgacgagccttggagattcttcgaggctcatcaagattggaccttatgtttgactaacctc

SEQ ID NO: 173799 - DNA, 405 bp, Glycine max
  unsure (1)..(405): unsure at all n locations
accggtgagagtgtgaacttaaactatgatggaatgactttctgtgagtaataatctttgcatcaatctctgaattntagaatgaaatgtataaacgagaacatgatgaaggccatgattgtacatacacaagccttttgaccaaaaagcttaccttgaatgataattatatcctttgcaccctttntgagctgagtgattttgtcataaattgaaccctgaacttaaataattatctcctgataccttgcttagattctaggagagcatatggttcaagacaaaatttaccccanatttgggggagtaaagtcagttaaaatgcaaagaanaaggtaaagcatcagcacacacaacaaataagtngtatgtttaanaaaaaattgtgctgatgtaagaatgtca

SEQ ID NO: 173800 - DNA, 379 bp, Glycine max
agcttgatgaattctaggtaaagactgaaatatgactttgcttcttagatagaccacaatctcttacccaagaccctctagtttctattccttgttcattgttattatagtgatttaaatcatccaagtttcacataggttacaaaattgatgtaatgcatgggaggaacaataaaatataagattaagaagaaaacaacattgtcttattttttctatcttctttttattcactgttgaagttatgttttggaaatgtcctagaaatattagacaggaactgcaacttattttgttatttcaaatgatccaaggtaggattgttaagttgggtcacgaatatttgttattaataggaagatctaaacccttattaatt

SEQ ID NO: 173801 - DNA, 469 bp, Glycine max
  unsure (1)..(469): unsure at all n locations
tcactaaagatgaacaatntaacgcattattagtaacttacacattgaggcatgcgaaaccattcaatttgcatgtttaacgtgagtataatgtctcttaactntntttaaaagaataattagttattaatttattagctgttgttagtgaaagaaattttaaaactaatcttttttctcattcttttaatcatcaagtcaattttataactcacttaacttttaaatatattcttttttcataaaattttacttcattcattctctgtttattattcttttaaaaaaaataaactaatgttattcacccagaaaaaaaaactaatgctcactcaatccactagatagattagatatgacacggctatagtatgataaaataaaagaataaagagattagatggacacagttgttaataatcaatgttacattaaaattattcctaaagtcttttgctgatatatatta

SEQ ID NO: 173802 - DNA, 215 bp, Glycine max
gaccaaaaaacccatatgaacacagtaaacactccccaccgcgctctctgtcaaagaccaaaaatcatgccgctgccgcaaaacaaaaagatgagccacagaagacacacctgaagcaccgactgaaagaacgccatcaccgttattagacaaaccttagatacagaacctcacattttgtcagcgccgctctcttatcaaaaacgaagcgacac

SEQ ID NO: 173803 - DNA, 376 bp, Glycine max
ttcattaactgtcattgcgcttggcggccacgctcaacaaagtactttctacacctactgtacgttgatttgaccaatgctgttatgggaatgttgcgacaatccttcataaccttattgatacattctgaaaggttggttgacatgtggccatatcgacagccttctctatcataagccatcgtgcattttttctttgaaattcgatcaatccatgtggctatggctggactcagttcacaaaatgtttctaaattttgatcaaaaatgtgcttgcaaggagtgtaggctgcatataaacagttgatgaataacaattctatgtataaatgatagtaatatcaatgtgaccaacaaatatgacatcttacccaat

SEQ ID NO: 173804 - DNA, 380 bp, Glycine max
agcttgtgcgtcagaggtgtgattccccttgggtctgtttaggcaaggtgtgaggggattgctcgtcaccctggaaatgtcttaaacaagcctccagccggtcatggtcagcctttatctttgtcaactcctccttatggtatcgctccatcttcgtgatgcggttttggagttactgtagagtatttgtgtctgtcatagataccagatgaggatgagagtcttcgagagaagtctcatgtctaaggctagatcgagtgctaaccatgtgtgtatgtgagagagagttaacgagaggttggggtatgctttaccatggccccatggtgggtgccaaatgtccttaccaaaatccgaaaccatgacacgtcaaggttgac

SEQ ID NO: 173805 - DNA, 390 bp, Glycine max
  unsure (1)..(390): unsure at all n locations
atatgaatcatagatccagagttaataaaccatgtatcatgacaaatatcagtcatattagattcaaaacatacaaaggaaaaataattatccttttttccaagccaagccttatgtttatagcggtccttcttcatgtgccctttctttntatagaaaaaacacctagactctttctaaattttggtaatagcaggaatatggttcttttccttcctttccttcttccccttatcttgagtcacggtaagatcaccttcgccaatttctggagcaagtctccattcctcctggacacacatgatcaaaagttcattgatggaccatttctctttatgtgtattggataataatttgaagggaccatactgtgatgggagtgaattcaaa

SEQ ID NO: 173806 - DNA, 382 bp, Glycine max
atgcttggaaaatgatttctatacaaaagtttgtcgtataaagcgactaatattttgataaactaggcgtgactagtaaagaaaataagctatgaaaataagcaagaaatgtaaagtaggcagatcttaagagtgtttggatgaccacatttaaggttcccaacaaaacactcactatcctaagggaaaatggcctaaaattattacatacgaatggaagtaggataacctattagaggctcccaacacacttccaatgaaaggcctttttgttacaacatttcaaagcaatgaaggtaaatgtacaagtttccaattacaagtaaattgccaattataaaattataaaaaagagtcctcgattttggcgttttttctctct

SEQ ID NO: 173807 - DNA, 265 bp, Glycine max
gaacaatctttgcacacgagaatgcttcatagacattaagaaagctcgcagatgggcctaacagaaatctataacctggcatggatacgacataccaagtcttacttcacacgaaagcacgagatgacaaaaccacaatgcggaacagcgtggtcaccctaacggctgaatctcaacacttcgcacgtgtgaatgacgccaatccatgtgtagcttccatcccttactgtgcggtcattgataatattgggagcttaactatgtc

SEQ ID NO: 173808 - DNA, 382 bp, Glycine max
  unsure (1)..(382): unsure at all n locations
agcttcttatctaagtcactctcttggaggttatagcttctccttccatggcttattctctagtggatggtgtctcctctcagctcttctcctttatcttccgctgcaactacatggttgaaaatcaccattgaaagacctcattgaagctcaaagatccagcctccataaaagcttctcaagcaagtttccatcactatctaggtcgagccttagggtttatgtatggatgcattataactgaccaatttgatattctcgcaagggttattatatccgatattacttgctgctctaagatcttcgggcatgtattgcaagtggttaaggttgcttaaaggctaaggattggatggtgtgcacactanggtgcctaactaac

SEQ ID NO: 173809 - DNA, 405 bp, Glycine max
  unsure (1)..(405): unsure at all n locations
ntataagtgcgggtacgggagacagaggtcaagcgttctctatgtgcgaagatgatattccgagtactttggatttgggacgaccatgctctcctgatttccagctgggaaattggcgagtggaggaacgccccggcatttacgcaacaagcataatgtggacctttacggttttaaaagctctatagctgggcctaggctttagagtcttcattttgttaaggctttgggtcttttgtgcttgaatttataatacaaggatctttcttcatctgtgcctgggctctacccattctcattcatttgcatgtttacttctttctctaaaacggcagattcgatgacgagtcccccaaaggtactaatacctgggacccgtctatcaacttcgagccagaaatgaat

SEQ ID NO: 173810 - DNA, 334 bp, Glycine max
  unsure (1)..(334): unsure at all n locations
agcttctgttttcaattacgagcgtctcgatattctacgggacacaatcagacatccgagtgaaaatttattgtgctntaaatttgctcagagcttcagttttcaattaggagcgtctcgatatattacgggtctcaatcggacatccgagttaaaaattatggtcgtttgaattttgccagagctttcgttttcaattacgagcgcctcgatatcctacggggctcaatcggacatccgagttaaaagttattgtcgtttgatttttcccagagcttccgttttcaattaagagcgcctcgatatcctacgggacacaatcggacatccgagt

SEQ ID NO: 173811 - DNA, 443 bp, Glycine max
  unsure (1)..(443): unsure at all n locations
gtgaggagattcaacgagaattatgtttgactcggatgtccgantgtgtcccgtagtatatcgagacgctcgaattgaaaacagaaactgtgagaaatttcaaacgacaataactttatactcggatgtccgattgagtcgcgtaatatatcgagtcgctcgtaaatgaaaaaagaagctttgagggaaatcaaacgacaataacttttgactcggatgtccgagtgtgtcccgtagtatctcgagacgctcataattcataacagaagctatatgaaaaatctatggacgataactatttacacggatgtcccattgagtcccatcatatgtcgagttactcgaaattggaaactgaagctctgagagatatcaaacgacaataaacttttactcggatgtccgattgagtcccgtatatatggagacgctcgaattgaaac

SEQ ID NO: 173812 - DNA, 358 bp, Glycine max
  unsure (1)..(358): unsure at all n locations
agctntgctgggtaaatagaggcagcaccttatgtgctttgtattatcttttcattcagtaccacttgtactgtttttgtttatctcaataatatattatacattatgccttccaaaaaaaagtacaaaataaaaaataaaaaagtaaatacagtaaggaggcagagatataaaggttgccaacctgactgtctgatctgtgtgtattccaacaagtagaaaatctccaagatccctagcaagcctcaagatctatataacataaaggtcagttaatacaatatcaagccacacatccatttaaacaatctaaatggtagtagcaacatagaagtaaattattgcaagagcctagtat

SEQ ID NO: 173813 - DNA, 403 bp, Glycine max
  unsure (1)..(403): unsure at all n locations
actcagcttagtaaaagaaataatccanatatgtcaaagaattgtgtgttgaaaaaacataacaaaactttctgtgattggtttaaagatacaatctttgctaatgaaactgcctcagaaacattaagaaagctagcatatgggcctataagaaatgttataacttggcaaggatacaacataaacaagtattccttttacacaaaagaacaagacgacaaaagtacaatgcaaaacagcgaggtcaccctaagggctgaatctcaatacttcgcaagtatgcatgatgacaatccctgtgtagcttccatcccttactttgggttcattgatgaaatttangagcttaactatgtcaaaattactgttngtgtttcaaatgtaatgggttgacacacaccgt

SEQ ID NO: 173814 - DNA, 304 bp, Glycine max
  unsure (1)..(304): unsure at all n locations
ttgctncaatctttctgcagagaataaatccatgttaacacatgcatgcaaactaaatcatgatactaaaacaaatttcaacaccattttagcaagcgttaaggctggagtattagctaatgctagaaaggaaaggaatttcttatttttctatctatataaaagagaaggggcatttttacttatagcttatagcctcagtttatacacagaattctcaaaaaattgagtcaaataaactaagaggtcgttacttgtgaaaaatatgtcaaaccgtcgttgaaaagaattgaagtacacaaat

SEQ ID NO: 173815 - DNA, 350 bp, Glycine max
catcattgtgacaactagaacgcaatcatataaaatgatactctatcacgaattattatggacagctttcacaatctagatcagcagaacaaccttccagaaaaaacttcaaaattacattgaaaacctgagaagccgaaagagttcctttgctgaattggttctggacaccatccttattagtaataacaaaaacatgacaagtttcttgattaaaagtgaaacgctttcttttcaaccattcatatatcagatactgtcgccagcggctgagggtaaagtagtattacataactctttgttcctttataagagaacgtggcacaccttatcttgatcgttgtaactaa

SEQ ID NO: 173816 - DNA, 401 bp, Glycine max
gcaatctcgtagagaccctgggctacaataaacaattgtttttctaagattcaaaatttttaattataggagagcacaaatcctaaaattaaccattttttcttttccatttacattcttttcaactcaactcacttgccctttgtacttagctttattctaatagcacacacacctcttatttaaaacttactgtgttttttttttaaattacaatctaattacctatttgttgcgtgcgctagtatttcttacctttataacttggctacccaacaaactcccccaaatttgaggaaaattgcgttgaatcctattgctgtcctataacctaagacaaggtctatggagaagacattttcaggcttgaggttcaacttaaacaatctaattcttcacct

SEQ ID NO: 173817 - DNA, 173 bp, Glycine max
ccatgtatacccatgtaagtacgacatatcaattcacatgcacgcttccaaattatcataccgacaggaaatagacaaaggaacaaatacgaacactcttcactcactaactaaccacattataccgacctccaaatacagtgtctagcatatatttcaattaaagctaccac

SEQ ID NO: 173818 - DNA, 272 bp, Glycine max
ctcatctgagtcgtatcttcaattttctttagagttactggggcatatgaactatgcttttatgctaatattttaattgaagctctgttcggtgtacgtcaaatatatgcacgtgctttggatttttctattttccatgagaatgacgtccttgatactctgattctttgcacatatcaatgtatattatataatgattacaaccttgctattattcgcacgttcttcacacactaagtcacaattcttgctgggatatttttaacaactcg

SEQ ID NO: 173819 - DNA, 345 bp, Glycine max
tgcaagctttgagccaattcaaacgacaataactttttttttttatgtccgaccgatttttttcctatatcgagacgcttcaaattgaatgttgaagctctgagccaatttaagcgacaatacttttttactccgatgtctgattgagctcttctatataacgagacgctccaaattgattgtagaacctctgtactaatcttaacgacaataactttttccttggatgtctgattgaaaccctgtcatatctcgagacccctcggaattgaatggtgaagctctgtgccaactcataagacacaatctctttactcggatgtgtgattgacgctgttctatatt

SEQ ID NO: 173820 - DNA, 318 bp, Glycine max
ttacagcagattgtagtaatgacccactaacctagaattataataactttatgccattaacctacggaattaataaaacttaatggctgagtgtaactgaaattgtggcaaccaaaagtcatccccaacagctcaacaagtagccaccatttggtctcccaaaatgctgatgcctatgttgccaatagggtccttattacaacctggactaaacctaactaaagcccttttatttgattaaccctaaacatatttttggtcatccaactttccaaggatatggccacttatttaacaaactcaacactctaaatcgaa

SEQ ID NO: 173821 - DNA, 212 bp, Glycine max
atcagttgcgttgaaatgttttttttagagctcacaatttttaagactctctttacatcaacaatgtcttcaaaaatattgaatcgactggccttcttattattgaaaaagaaatatacatgcaatcaatttccaccatttatttcataacttggtccacaaaaactccgcaaacttcattttaaataaaacaatgaccattccaatcaacc

SEQ ID NO: 173822 - DNA, 123 bp, Glycine max
accctatgctagcttggagatactcactttttataaattacgacggagaatatcatatgaaactatatgtgcaatccggctataaagttacgattgttcatgctaaacatctaagatcatata

SEQ ID NO: 173823 - DNA, 278 bp, Glycine max
  unsure (1)..(278): unsure at all n locations
agcnngttcttttagcggtcacggcgaaactattgaagcaagaaacccagatataactctcatcaccatacactgacgaagccgcaacgctgtactggaaacgttccttatcacctcaaagccactctacatcaaactcaaaaggagacctcacatatctccctagtaaagcgaaaaaccagctccatgacaaaaacggcgactctaaactcataatcatcgcaaacgaagcgcctgatgatccaagaacgaacaccaggtctcctaacgagatcagc

SEQ ID NO: 173824 - DNA, 263 bp, Glycine max
  unsure (1)..(263): unsure at all n locations
catgcaagnttaatatacctntctatggagttaaactttatcaatgacactagtatgatatacttaacaacttcctttttgaacacaagtttgagagaggaaaagttgataaactgttttctttaaaaagaactgcataaatcaacacctaatagctattttggcttaaaatacgtgtaaactcgttatagcgtagaaatcttcgaggtttggcgttgaatgccacggataacatgggttcggtgcatgggataggaatgaag

SEQ ID NO: 173825 - DNA, 400 bp, Glycine max
tagcttgcttgtacaacatctgcactaaattgttgctgtggtaatcaaatgcatatgcaattgcagtagaagggggtaatgacaatatattactactattatatcaaattcagtaggtaatactaacaacagaaaaacacgacgtttggccgcatcaccattataggaattgtgaatggccactgtattagtagcatgactgaaaataagatagatgctgtgtaaaataacaaaacaattgtctcaaatacaggaaaaaagaatactcctaagccatcattagccgtttttacttattgttgtctttaaaaaaaatgttgcccatttctttcgaattgtggtgatgttgtcgatgtctaacggtgtctcatcagcaaaccactgcaagtattcataattt

SEQ ID NO: 173826 - DNA, 409 bp, Glycine max
  unsure (1)..(409): unsure at all n locations
tatacaagaatanagctcgtataccacttgtttgacaagtggcctcagatatcttattaatgaagggttgaattaagatatcaaagactattccccctattaaaatcttaactatatttctaaattattaatgcactcttaatatgaattactaaaaatacaattcaaaataaaacttctttaacgaaaaagataaatgacaataaataaaagaagtttaagagaagagagaatgcaaactcagttttatactgggttggccacacccttgtgcctacgtccggtccccaagaaacccgcttgagagttccactttcttgtaaaatccctcttacaattactgagccacacaaggacaaacccttctttgtgntagataaccttacaacaagagagcgtcgatccctta

SEQ ID NO: 173827 - DNA, 372 bp, Glycine max
  unsure (1)..(372): unsure at all n locations
agctttgatctaccaccaccaccaccaccattatcttagattgctattatgtttaatattattaggactttgatttctagtcgtgtatttggctatattattatgatatttgaacaatttagtatttcttttatttgcatggtatgattgaacaattatgaattatgctatatgactatgtggnttttatatatttgatctattcatgtttcttgcttcatgattnggttatattctttaatgaatgtcttgtgaatgattagtagtgtatgtatgttttttacttgttacgcactttggctttttggtgatgccaaagggggagagaaatagggactaaatcaagaacgcacataagttattaacttaatt

SEQ ID NO: 173828 - DNA, 365 bp, Glycine max
  unsure (1)..(365): unsure at all n locations
ttcgttccacaatntcaaatgttgcctanaatttattagccaattttgagtaagcttccttaacccccgtgactgtggattatcgggaaggtcgcaacttaaccatgacccaatcacccacgttaaacgccacatacctgcgtttggaatttgcagcgagcttcattgtttactgagcttttgtggaaatcttgcgaaagttggtgaaagtctcagtcctatggcagaggagatcatccatcctgtcaaatttggcagttccggtgagatactctgaaaaaataaaaggttttcgcccaaaggtgatttcgaagggagtggacccgaccttcgtgttccaggaagtattatgagaccattcaacc

SEQ ID NO: 173829 - DNA, 403 bp, Glycine max
  unsure (1)..(403): unsure at all n locations
tatctntgcacttcattgtcctccctcacccttctctcgcccaagtgagccacccttccttgttgcaaataattcttatacacatttgttgcaacgagttatcaatatgatgtggtgaataggttgagttttattttttttttaagaaggttttgcattagtgaggtgttaattcattatggaaaaactaaattgtttctggttttcaaacacaattttttgagcgaaaatgaaatcaaacatagaaaagtgttgctaaaatgaaatccatagaattcttcatatgaaactcattcttaatcaatctcctagttcaatgcaacaaaaattcaaattacaatgaataatcttaattccttagtgattaatccttgagttctaagccaaatccctaattccttac

SEQ ID NO: 173830 - DNA, 454 bp, Glycine max
  unsure (1)..(454): unsure at all n locations
ctgcgtctggattggaggaactcattatgggttgctcttcaagtgaaatcatanaaggtaataaaagtgttgaaattgctacaaatttcaaaaatattcttaaatataatatgtatagaatatggtagaacaatctagaactataatgtgtatgaatatggtagaacaatctataactataagtctatgtataagatagaagaatctagaactatcatgatactaatctatcatgaaactctagaaagacctaaagtaatgtagaaacattcaccaccattgagaggttagtaacttgagcctataaataggcaattggtatgtcgtaattgatcaatccaagatatcaatgacataaccttctttctaaaacaattctctaatactatcaactaccaactatcatctaatcaactaccaacagtggcatcatagctacgttcggtcatacatt

SEQ ID NO: 173831 - DNA, 396 bp, Glycine max
  unsure (1)..(396): unsure at all n locations
agctcactaatgacaagtacacaaccacttttattttaacaaacataattttatttctactccaccatcacaaccatacaagtntagttttctcccttcccagaatcaagtttcaaaccactttagagacttgaagcttttatgatgaaacatagcatgtacaacacaaaattggaatgaaggagagagactcttgttgtttgtatgtctgaaatgtttaacggcttttggactgcaccaagtagattttatctaactattaaatggtgaggtcatcttatcaagtgcattatgttattcaagtaagcagaacaatttctctttatccaatttcaattcaactcacccaaatatgacagcattccacaacattatgttggtatcctgaggtgcccc

SEQ ID NO: 173832 - DNA, 398 bp, Glycine max
  unsure (1)..(398): unsure at all n locations
cattcgggcacctactgtgaatctcctatgctatctctacatatataaaacagtcccaccattccaatttcgcaaaatcatattcatatatcattgnggcatttcatcgagcactcgtggggtgcaacgttggacacaaattgcaagagaatggggacaatgtggcataccccattgcttcagaatacaacataggcctaatgcattctcacacaaaccctcaactcaacaaaacaagcatggattcagatgcgaattgcttcacgaattttgcaaaagatgagcaactaaagcaccaaaacacatcaatggagagcccaattacccatggataatgcacttacttgtggcgagtgaattaaagcgtgacaagggatagcaaaactcaacaattgaag

SEQ ID NO: 173833 - DNA, 406 bp, Glycine max
tgcaagctttaggagaaaccatgaaaactaaggttgttcctaaacaaaaatcaattgtttaagcttcgccgagtgtccccattgaaaaacctttattcaaacctttcaaagttagtgataaggctaaacgaaaaattagggaacttagaaaaactaaatccttaattgaaggcgtaggagacaatcatagcgaattactaaacaagattggtggtttgcttaaggtcattccagacactccccaagcctcggaaaatacttccaaaatggtaacaagaagtacctccaaattaattaatgttattaatgaagatagtgaccaaaactcagataacacaactgagataggatcagtgtcagaaaagaatataaattcaataaactccaaacactggaaaacatcctc

SEQ ID NO: 173834 - DNA, 465 bp, Glycine max
  unsure (1)..(465): unsure at all n locations
acccatcacatgtggtactaggtggcggnccgtcgatggtgcacaacaagtctttccacatccacaatgcgcgcataaacccaccatcccctgtagcccacctccaactgagctcacgtactcccacgtagcccatatcctacgttctttcaacaccgggtccccatcaatccttccaagcttccacaacagtcaagcaaaactacattcacacagcacaagctatcacagccaagcaaaacagagcgaaggcagataactctgtcaaacaccaaccaaatatcacagcttttcccactcatagaccccagtaacaattccttcgatccaattcgttaaccgttggatcgactgcaaaattctactggaagtctatactgcataagcctacattctgaccggtgggatctactagaaaacattcagaactcatgtacattactctttcacaaccagcaaaataca

SEQ ID NO: 173835 - DNA, 199 bp, Glycine max
agcttcatgatgatgaatcaagattgattctttgagttttgatgataaccaagatgatgacaaaaagcccaagagaatgagtttcagattaagtcaggatacttcaagattcaagaaaatttgttttcaagattaagaatcaggtttcagattcaggttcaaggagtcaagaatcaggattattcaggtggaggattca

SEQ ID NO: 173836 - DNA, 455 bp, Glycine max
  unsure (1)..(455): unsure at all n locations
ngtggagatacctcgagattcctcatggagctaaatgctctaattaatgtggttaccaaaagataaataaccttttacttaatcaagcttaaataaccttttagttcttataaaataggacatttttatttatttttattttaatcatttatagtttttctgtaatcctttaaagattttaattttttgatttagtgactgcatgttatcaaataataacgttaactgatgacataataatgatgttgatcacagtctattgacttgtcatcatatcaaggagtctaacaaagtagtcatgtctactacttttttagtaaactctatctttaaatctctcatcactagtatgatattatcaactattttgaacaaataaaaatttatcaacataatttaccaataagaaaggtacatatgacatatcaatgacaaccaacgttgttatgacatca

SEQ ID NO: 173837 - DNA, 371 bp, Glycine max
  unsure (1)..(371): unsure at all n locations
tgccgcatgcaagcttattcttttcttatgacagtaggnttttctccacaggaggatgtttattatgaaaaaatacaccaataaagtagctaaattatggtatctattgatggaatcataaatgaaaactttagttataattctaaatgctaattgctaattcaggtgtgaaatatgatgagtttagtgaacttgcaatattgcttagcttagctaggtattgataaactacatatgttgagttatagattcttaatcatgcctcattgctcttataactaatcaatctttcctcattaaaaaagtttagaagaatggaacgacttgatgctttttgtgttgctatttgtaatggtatacgtttatgataa

SEQ ID NO: 173838 - DNA, 467 bp, Glycine max
  unsure (1)..(467): unsure at all n locations
gcttgagctntgagcagaggcagagcataaacgttgntgtgtgtnttcttagaaattatagaaagaataatgagctccatgggtgagagccatcagcggagcttgtttgggagtacaaaagcatcgtctctgccagtgtcaacgtcgcgttcagactctgaaggaggccttcgcagacgtctatcttctctgtctgtgaagatccaattatagagcccgaattcctcctcatggtcattttccagatccaagtccctctcatccatgggtgactatgcaaggacatggtgggactggagctgggcctggatcctctccaggaagctcatcttcgctacagatctcgaaatgaacgaccaggagaccaagctccttgcttctcattacaagggcacttgcagacatagtttctataagctgcgctctgagatcagagagtcatcaattcttgtgatacaccactcttc

SEQ ID NO: 173839 - DNA, 381 bp, Glycine max
agcttgtacaagccttccactacatcaactctacccagctatataagcacttatcaagtttgttaaacatccgatgtgggactattttcaacacctatcggtgctaggattttgtggtttgagtctgtacattgtatctatgttatatttattcattgtggttcgggttatgtaactaaaatgtatttttgttttacttgtgtcatttttgtaccgtaccttagccatgctgagacttttttttttggcatgagtttgtatattatatctttgtgatgatttaaaactcttaaaccagattgtaatggataagaaattttgtaccaataaccccattgattttcttttttcttttttgaaatatatccccctcatgcctgg

SEQ ID NO: 173840 - DNA, 419 bp, Glycine max
  unsure (1)..(419): unsure at all n locations
cgcttgtggggcttctatggatgatggatctttgagcttcattgaggccctttaatagtgattntccaccatgaagatgcagcggaagacaaaggagaagaggtgagaggaggcgccatccactatggaataagccatggataagacgcttggagaggatgattcaatgggggataagacagagagagagaaagacagaggggggagcacgaaattgaagatagaacaagagagagaagttgaactttgagttgtgtctcacaagactctcattcatcaaagttacaacaagtgttacacatgcttctatttatagactaggtagcttccttgagaagctttcttgagaaaacttccttataaaagctcttttagaaaaatatcttgagatgctagagcttagctacacatacccctct

SEQ ID NO: 173841 - DNA, 374 bp, Glycine max
  unsure (1)..(374): unsure at all n locations
agctntgatctaccaccaccgccgccaccattatcttagttttctattatgttctattattagtactttgatttctagccttgtattttggctatattattatgatatttgaacaatttactatttccttatttgcatggtatgtttgaacaaatattaagtatgttatttgactatgtggattttatagttaatctattcatgattgttgcttcatggttcttgcttcatgatttggttgatatttttccatgaatgttgtatggatgcttanttatatgtgtatgcctcaaatttgttacgcactttggctttttgttgatgccaaagggggagagaaatagggattaaatcaagaactcacatgagtaatc

SEQ ID NO: 173842 - DNA, 469 bp, Glycine max
  unsure (1)..(469): unsure at all n locations
tccttgagaagctagagcttagctacgcacacccatctttaacaaagctcaccctccttgacaaaatacatgataatacaaaaaataaagtccctactacaaagactactcagaatgccctgaaatacaaggctaaaaccctatactactagaatggccaaaatacaaggcccaaaagaaagaataacctattctaatatttacaaagaagagtggatccctagggccatctttagtagctctagcctaagtctcttagagttttctatccaatacccttgcggngtaggattgcatcattacacgtttctggtaatcgattacacagttatattttgatgggtcatgacctttcaaattgaatttcaagagcttcgttgctggcaattgatacaggctttacaatcaaaattcaaaaccctctctaaagcctgatattcaaaaatgattctggtatcgatacactgcc

SEQ ID NO: 173843 - DNA, 385 bp, Glycine max
agctttctttatattcaagcaaaacaacatttttacagcacaagctatcacagccaagcaaaacagggcaaaggcagaatactctgctcaacacaccaaccaaaatcacagcttttctcacttaaagaccccagtaacaattccttcgatccaattcgataaccgctggatcgactccaaaattttactggaagtctatagaacataagcctacattgtgaccgttgggatctactagcaaacatccagaactcattctgcactagactttccacagccaaccacacacaagcatttttctgcacaaagccaaaatcctgctgcacctaatttgacagcaaaattctgcataagtgcagatttcgaaaatcacacatcctctcat

SEQ ID NO: 173844 - DNA, 423 bp, Glycine max
  unsure (1)..(423): unsure at all n locations
tgccttctgcaatcttcgattcagggaagtacttctttatgaactattcttccacttcatcccatgacttcagactgtttcctttaaaagaatgaagccatctcttagcttctctagataaagaatatgagaacagactncacctgattgcatccgcaggcacacccgccaacctaatagtattgcatatctctatataggtggctaagtgagcataaggttcttcattgggcagaccacgacaaagtttaatttgaatcaattgtatcaaagaaggaggatatgcaattgtctgagcttgaacttctggctgtgcaatactagtgaaaaattggtgcacaatagaacttgaataatccttcagggttactcatcttggctttcatccatgattgatcttaactgatttatatgagaatccct

SEQ ID NO: 173845 - DNA, 351 bp, Glycine max
  unsure (1)..(351): unsure at all n locations
agcttatatcctaatcctgccttatcaaagttacatctttgctttcctaatataatatctaagttacttttgccaatagaaaattttgcaagagaaattttcaaatccttaatttcttctaagtacttgttacaacaattacatgaattagatacctctatattatcatgcatggtagaagaatgaattatatcatttgatcttaaagttataacttcagtcctaagattttctaattcttcatttaattntaaaaccttattttctaaatttgaaatttttttcttagaagatgaaaccagttntgcaagtttaactgattctttatgaaaatcagcaaatgcatcttgt

SEQ ID NO: 173846 - DNA, 427 bp, Glycine max
  unsure (1)..(427): unsure at all n locations
tcaagaataatggcctcagcaaacttcttattcccagtttgaaactctataaataggcctcctatttttaatggagagggttacgactactggaaaacccgaatgcaaattttcattgaggcaatagacttaaacatttgggaacccatagaagttggaccttatataaccaccatggtggctggaaatacaacaatagagaaacctagagaagagtggtctgaagaagaataaatattagtgtggtacaatttataggctaaaaacattattatttctgccctangaatggatgaatattttanggtttcaaattgaagagtgctaaggatatgtgggacactctacaagttacacatgagggaacaactgatgtcaaagatctangataaatactctaactcatgagtatgaattatttangatg

SEQ ID NO: 173847 - DNA, 363 bp, Glycine max
  unsure (1)..(363): unsure at all n locations
agcttcactaataccaacactattactaatgtacaagttatactttcacaacattgacagataagattcacaatgttcaccaggcctctgaagtataaaaatattaccattggaagcagtgaaatttaaagtttaaaaaatgaaaaagttactttgtgtacctgtggacagtatttttagcatgtcaattttccaagtcctgacaaaatttgttgagtacctatggagccaccaacaactgataacaatagaaatagatactcacttatttcaattcccacanaaaagattcaaacatggaaaaggaaatctatntatttgcattaattgcttagcattgtctttagattggcatcatatgaa

SEQ ID NO: 173848 - DNA, 387 bp, Glycine max
tgaaggcaaactggatgcgttggtcaacttggtaacccatctggccttgaatcaaaaatctgtacctgtcgcaagggtttgtggcttgtgctcctctgctgaccaccatatagacctttgcccttccatgcagcaacctagagcaattgagcagcctgaagcttatgctgcaaatatttacaatagacctcctcaacctcagcagcaaaatcaaccacagaagagcaattatgacctttccagcaacagatacaaccctggatggaggaatcaccctaaccacagatggtccagccctcagcaacaacaacagcagcctgctccttccttccaaaatgctgctggcccaagcagaccatacattccttcaccaatccaacaacagca

SEQ ID NO: 173849 - DNA, 376 bp, Glycine max
  unsure (1)..(376): unsure at all n locations
atcaacctggattctcttgcccctaaacttcttatgttcagtttttctgaagattagnctattgttgaagattgattcatgcttgctgaaatcaatttcttacactgagaatgctttaagaaatagtttcctcaatcctgtgccaattgccaatagctttgagctcctcataattagatttagtgttggtcacggtagctcctttgatgtaaatagaatttagaacacacacagagctagaattagctcctgccctctgaaataatctttaaacttagacatgtttgttttgactaatgcacttgataagaaaaatcaggattagataaaaatactactcaagtagattagttgggctatacgcatttcatatcca

SEQ ID NO: 173850 - DNA, 423 bp, Glycine max
  unsure (1)..(423): unsure at all n locations
attgtagggtattttcctctccttatactgtattcatagtatatttccatgtataagatgaggctattcataatatatttcatggtataagataaagctctactagcatcctggaagcagcaactggatcgagaagttgagactcaaaattaaaggaaatttacatcacttgcacatagtgagtgccttgtgtttgcttgttaatttaattcgttggcataattgaaaggcatgtttattgcaacatctacatattttcatgcaaaaacagagttggaggcaacaatactttccttaatatgttatttcattgtggcactaagtaattcacagtatgatntatatatgaatggatgggataccaattaaacaatcaatgcaacttatgcttttccatggaagtttgtntcctttgcatgtatg

SEQ ID NO: 173851 - DNA, 381 bp, Glycine max
  unsure (1)..(381): unsure at all n locations
gctttactttacttttattctttaataattaatctgtgatttgngccttgatgcattanttatgttactccactattattgaccttgagctgcatcgtctgtaatatgtatgatnnttttgtgtggcttattttgcttatatatgttcagcttgatggattgtgtcttggatagattatatggttgtggcccatctgtgatactctctgttgttataagtggtctgattgatatgttgttattttttttctcatattgtttggctggtggagttgtgatgaatatgataaatctatgagaataggaattaaaattaagtgtcacgggaatacatagttgggtttggctttattaacctatgtcgagtgggggatgttctgt

SEQ ID NO: 173852 - DNA, 396 bp, Glycine max
  unsure (1)..(396): unsure at all n locations
tctatagaaggtttgttcctaatttctctacaattgcatcacctctcatttatctggtgaagaagaatgtggcatttacctggggtgaaaaacaagagcaagccttttctttgctcgaagaaaagcttactaaggcacctgttctagcttttcctgacttttctaaaacttttgagctaaaatgtgatgcctttggagtgggagttggagctgtattgttacaaggtgggcaccctattgcttattttagtgaaaaactttatagtgccaccctcaactaccccacctatgataaagagctttatgccttaataagagccctccaaacttgggaacattaccttgtttccaaggaattngtcattcatagtgatcatcaatcacttaagtacatta

SEQ ID NO: 173853 - DNA, 401 bp, Glycine max
  unsure (1)..(401): unsure at all n locations
ngctaacccatggaagctcctaatatctcccacactntgtggggtgggccattcatggatggccttgattttctcaaggtccacttggaccccatttctaccaactaccaaacctaagaaaactacattatctacacaaaatgtacacttctctatatttgcataaagggtgtttctcctaaggactgaaagcacttgcttgagatgtcctaagtgatcatctaggctcttactgtacactaaaatatcatcaaaataaacaactacaaatctacctatgaaatcccttaagacatgatgcataagcctcataatggtgcttggtgcattagtgagcccaaaaggcatcactagccattcatacaaaccatacttggtcttcaaagcggttttccactcat

SEQ ID NO: 173854 - DNA, 120 bp, Glycine max
actaatgtgcgctttttttctcgagcacaaacaaggccaccgatctaagcctgaaatcagattttagagagagtttcgactgggattcagagctttgcatgtctaaatgttctagagaga

SEQ ID NO: 173855 - DNA, 415 bp, Glycine max
  unsure (1)..(415): unsure at all n locations
gtgctagtagactccctcatcaaaagatatgcgagatgtttatagcataccattttaatctcatatacaagctctcattgctagcataattatattctcgtgtaatttcctagggtttatcatacaagagattgtactacaagatcttgaagaatataattcccacatctattatactatatatgtaatttctatgagaaactttagaatacttgctcgaatccataatattgttaaaaaagtattaataatgtttctctcttctctaacttccttggtctctctaatagtatagaaaccttttgaacttgttgtgagcctttctatgttctcacttttttgtgaaaaacttaacaatggtntcaaatgtgtacagaagaagagagagtatttttattcttttcaatcctttttt

SEQ ID NO: 173856 - DNA, 388 bp, Glycine max
agcttttaatggaagtcaagagtatgacattgttcctataccgttcactggtgatcaggtatatcagcgggttcaacacctgaacactgtatttgggaagacccaaaagaaggataaaagtcaaagttgcatatggaagaagaggtccattttctttgatcttccgtactggtgtgatcttgacgttagacattgtattgatgttatgcatgtggagaaaaatgtttgtgacagtgtgattgggacgctccttaacattcaaggcaagatgaaggatggcttgaatacccgtcaagatctagctgatatgggtataagatcacagttgcatccaaggtctgatgggaagaaaatttacttgcccccagcctgccatactttctccaag

SEQ ID NO: 173857 - DNA, 387 bp, Glycine max
  unsure (1)..(387): unsure at all n locations
ctcagcttgtcaataatgtctgacactatntatcanaaaggattgtctctcaaactctcccacagccttacatcttatanttttgcgtggtgtcaaagtgaacatctaattagtttatcttttgttatttattgtatcgctgctgagaacaattcgaattaaaatagaataattctatttcctccacatatctattgtctctcttctctcctctgtgttttataatttcctcctcaaaaccaacaattggtatcaagagctttattcttacgggacctgtaccatggaaggtgatggagagaattatgatctttgngaagtgaaaatgcaatcctacatggattctttggattaatgggatgctgtagaagaggattatganatata

SEQ ID NO: 173858 - DNA, 202 bp, Glycine max
atcctgttggacatctctaatggtatcaatgatcttatcttacaatatatggtttcctttttctattatactttttatactacaatataaaatttctcttaaagaatatagggtaaactatgtttttaaccactaaactttctaaaattgtgtttataacaacaaaaaaaaagttttttaactacagacatttttttttttt

SEQ ID NO: 173859 - DNA, 418 bp, Glycine max
  unsure (1)..(418): unsure at all n locations
tgaaccttgaatcttggatcttgattcttganatcaaatttcttcttgaaccttgaagtgttcttgattcattcttgaacatcttgaacatcttaaacatcttgaacatcttgaacttatgctttgattatcatgaattgacacctttgagctttatgtcatcacctttgttatcatcaaaacatctttgaatcaatcttgaatcatcatgaagctttgcttctacaaaatcatcttattaacagatgtatttttgaaggatattttaaaatgtaaagtcttatactgtctagaataattttacttcactagtttatataatatcatgtgtgtttgccaacaattaagaccaaagtcatatgagggatatcatngattgttatcatcccaccttgattttctcgaatgaaactcacat

SEQ ID NO: 173860 - DNA, 302 bp, Glycine max
agcttgaggttaatctcaaaatttcaaagactttaccttgtgagaggggtactcttaatgtcatacaaagatgaattactttgtgaaccatgtcagaaaaggaaccaaattaaaacctctttttcaagcaaaaactccatttccacctcaagaccactggaccagcacatattgattggtgtggcccaactaaaacaacctttgagagtggaaagagatatggtcttgtagtagtggatgactactcaagatggacatgagccatgttcctggctcaccaaaataagtcctttgaggccttc

SEQ ID NO: 173861 - DNA, 369 bp, Glycine max
  unsure (1)..(369): unsure at all n locations
taatgtatgtattcttgtagaatatgagggtttaaatccttttggcggtctgcaatcagataatatcccgagagctggttgtcctgttggggtatttttattcttgtcggcaaacttttatattgatgactgccatttgtttggatattttcttttctcatgaaatttaatttttatattgataattgtgaatgaacttcttatatgtataataatcactttcttcctttctttggtcaaagaatcttcgacaaactttatatgatcggacacaaagcagttattcagtggtgagtataacaattaatcaatgctctaccattnntttatgtttgttaaatttttatccctccatgactgaacttatgc

SEQ ID NO: 173862 - DNA, 380 bp, Glycine max
  unsure (1)..(380): unsure at all n locations
agcnnataataagacataccgacacgnnattttttcattccaaggaccataatattgggcccaggcacagtatacacaccctattccaccacataaaagggtccaaggaggaaggccaaagaaaattataaggagatctgtagatgaggacaatgtcacaggacataggctaaagaggaaattggttgactttacatgtggaaggtgtggccaaaccaatcataacattaggagctgtaaaaatattggagttcctgttaggccaaagaaatatgttgcaccaccaacttcaaatgaggatgaccacctattatctcaagatgaacaagctttgaatgaggctgaagaagctgctgctcatgttcaacaagattcggtgg

SEQ ID NO: 173863 - DNA, 447 bp, Glycine max
  unsure (1)..(447): unsure at all n locations
taacaaggcanacacactgcanaagatcatttgtactgttattgcacctttaatataagcatttttgtctaaaattatgcataataaacctgaagtgatagaataaaaaagctccatattctatcaaaacttcattggagttagaactaattaaatcaagcactcacttgacattttcatcctaatatcatcaaaagaattctaaaagaaaatttgatatttccaatagttcaataacagtgaagatccaaatcaaaacactactagaaaagtgaaaatctacattggttataaaacacctatatagtaaatggtacggtgatatttttgaaataaagcaaactttcttaatccaggtacgatgggttttataaaaccactttcgatgtgaacgttacgatagcgagtctataaaacccgttttggtagtcgacctaactactacca

SEQ ID NO: 173864 - DNA, 381 bp, Glycine max
agcttgaattggataacatgcatttggctctttctaacaaggtcttgttcatttttcagctattatgttttgctatagagtatagagtatagtacgttgtcttgctatgccttcatctctacaaatttcattgaatttagtagaacaaaattccaaccattatcattcctaagacactttatagtctttcttgtccgattcttcataagaatcatccaatacctgaaaattttgaaagcttcagatttttgcttcatcatgaatacgtatgtcatctgagagtaatcatcaatgtttgagaggaaataccttgcccctcctaattatggaactcttgaaggccccaaaattagaatagacgtagtgcaacttggcctttgt

SEQ ID NO: 173865 - DNA, 412 bp, Glycine max
  unsure (1)..(412): unsure at all n locations
actcagcttagaccnagcacatnaatcaggtatccaaatccctaattaatggattttaaggtttgagaagtgaaattgagaatgaggtaaatttggagcanactctcacctcacacaagtctataacatcaatttaaacttgctcaaactggatttacacctaaaattccaccgaatcaaaatttgactcctcaacacccaattttaccctaaaaatggctctttgttcactttggtcatttgttnttctctctagcacagcccaagcttcctcataagtcctaaatgacatttcaaactangattaactcactttaacctccanataccactaaatccagaattggccttncaactctcnaaaactcactctttttccactcataacaccatattctcactttctaaccct

SEQ ID NO: 173866 - DNA, 358 bp, Glycine max
agcttctatttatgtggcagggcgggcttcttttactttcttgtctccaacgcgagctttgaccactgctcttccttcccgcgatgcttcttttcatatgcgcctgagtgggcttatagcctaaaccatacttcccacgatttcctttggcatttatcaggctagtcatgccgccgttgtccttgcctaaacccattccgggttcgtaaccgatccctaacataactcgggccatcattactgctacatcggacaggcaaggctgcccagagaagaagtccacggaggaaatgctgaccacctcaaaagactggaaagcggtttctaacgattcttctgcggcttccacataaggcat

SEQ ID NO: 173867 - DNA, 407 bp, Glycine max
  unsure (1)..(407): unsure at all n locations
ntatgaactngganaggaactngaactatactatagccttctcgtgctggtgtatcttgatattaggcagaggcaattctcagggaacatcaagctcactttcggataaggttcatcaagttgaatggaaatcttttagcaccctcatcttgttcttggacttaaacctcatgcagagggataagggtataccattataatgattgcatagttggtcatatagggttaattgaaagtatataatttctctattnttttcangacagatttgtttaataattataaatggattcatagttccttcttgactntcagcttctacagtgcattcatatcaagtgataacattctctnttatgattaataacatgactcctacttggaatatttgtaaatctgtttgagtg

SEQ ID NO: 173868 - DNA, 225 bp, Glycine max
  unsure (1)..(225): unsure at all n locations
agctngcctcatagaggtccaggaaggacattgtatccgaaggaactagttccgctccggagtatgacagtcaccgctttaggagcgctgtacaccagcagcgcttcgaggccatcaagggaatggtcgttctctgggagcgacgcgtccagctcagggacgacgagtatactgatttccaggaagaaatacggcgccggcggtgggcatcactggttactccca

SEQ ID NO: 173869 - DNA, 328 bp, Glycine max
ctttatccatggcctcctatggtggtgagctccttctatactcatcttctccttgaagtggcatctcctctctctcttcctttctccatttcgctaccattcatcttccaagaagcaaaggaatccattgatgaagaagatcctaggcctacaagctccaatggagcttacatcaatggagttctatgcgaatgcatggcccaccgaagaaggagtcatggataagcgctcctaggtgtggggccagtggatcccctatgatgaagataccatcaaccagttcctggggcatccgttggtcctggaagaggggcagtgttgtgagttc

SEQ ID NO: 173870 - DNA, 359 bp, Glycine max
gtcacttagccgatttctatttgtgccatgagaggtatatagtacatagatgtgaaactacacttcatcagagatgtgattgaatctgagaaggcaaaggtggagaaggtttcaacaaaagaaaacccgactgatatgttcacaaagtccctttctagtgtcaagttcaagcactttctggacttgatcaattgcgaagatgcctaaagcagattggtaggagtgcagccttgaatcacaaggtagacacttgctgatttggagtcaaggtggagatttgtggtgtgtgactcacaattacaattggcacaagtgagaagggcttaaagtggtgtcgtcataactacattaagtattat

SEQ ID NO: 173871 - DNA, 364 bp, Glycine max
  unsure (1)..(364): unsure at all n locations
atatgctggatagtcattgatggtacaaaanaccattgcacgcaacctaaaggtctctcgcagattcccatcccacatatctaccctgtgttcccaattttttgtcaagtcttctatcaacagaatcaagtagacgtcaatatcattccctggatgtcttagatccgctatcatcatgccaagcattatgtacttttgcttcatgcacaacgaaggaggaaggttgtaaatcattatcaaaacaggccatgaactgtgattgctgcttaagttaccaaatggattcattccatcgaaagcaagaccaagccttagatttcttggctcattcctaaaggtctctcgcagaattccaatccacata

SEQ ID NO: 173872 - DNA, 362 bp, Glycine max
atagaagaagaagtattgtaatcgattacaggtattggtaatcgattacaggcccaataagccttttggtaatcgattacaggatgttgtaatcgattacaggctgcctgttcatgtgtaatcgattacactggatggtaatcgattaccagagcctatcctaggctagtttctaagagaatatctatatcaatggaaccaatacatcctatatgactaattttcattactaatacactaaattcaatcattcaattactatatacacaagaaatcataaattctatcataaaaacaagaattcaaacaagatcaaacaaaataatctacaatcaaaaggtaaaagtaaatcaaccaatcaa

SEQ ID NO: 173873 - DNA, 308 bp, Glycine max
cagagcggcacctggagatatgtcgcgggggtcacgagaccttgtggacggcacgtggggtgctattgcccaaaaccaaacttgaccaatcccgacccaacccgggtatagtcggtcagtgagaacctgtgatgtacctaagcaggcgagctcctggctgtcaacagataaaatgaacaatgaccactacgcaaggaggcttgtggtagttggccagctgtgaaacttgacttgatatgcgagatatggcctctggtaatcgattaccaacggtgggtaatcgattacaaggctctataatgaagaca

SEQ ID NO: 173874 - DNA, 227 bp, Glycine max
cccctctctctacgatcgtagaacatttgaaagagaacaggctttgctgaattgaagtaaattcgctgcgaccgtggaggaaataacgaaatcaagagaattaatcgcaacattaaggacacaaagcctcgctggacgatcggataggataggattgcaaccaacgagcttcataactatatctataacaactcgggcgctttcgatctttaaatattgctgttata

SEQ ID NO: 173875 - DNA, 346 bp, Glycine max
tgacatgtcgaaatctacttttctgcggggtggacttgagggcagctatcatgactcttctcgtgtcatctattaccataaagagcgtgttgtctatcttatattctatgaggatgatatcatcatcacaggttgctggtcccctcttgttcaaatatgactaccaatctgaacactgccttgtctcttaagccatagggacatctggattgatttttgggcctacataccagagacttgccttaaagctctttattgatgactcaatcagacatttatcggagtatctccacataactaacatgggtgaagctgagtctatttactactccgatggatcttaact

SEQ ID NO: 173876 - DNA, 232 bp, Glycine max
agcttatccaaatagactctaaatctttcatttgttaattattgcataagaatgttttactttcctccaataaaaatatttcaactataatggaaaatggaaaattggcttataaaatagcctgagtggcttcactataaacatttggattccattttattccttttataataaaaattccctctagaaaaatttatattattttttatattttggaattggagacacatat

SEQ ID NO: 173877 - DNA, 337 bp, Glycine max
  unsure (1)..(337): unsure at all n locations
gctttgcagctggaatatntatcttatctccgacagccaatgggtgagtcccgtccaggtagtcccgaaaaagactggcctcacagtgatcagaaatgagaaggaggagttgattcctactcgggtgcagaacagttggagagtctgcattgactataggaggctgaaccaggttaccaaaaaggaccattntcccctgccattcattgaccagatgcttgaacgcctggcaggtaaatcccactactgtttccttgatggttnttctggttatatgcaaattactattgctcctgaggatcangaaaagaccacattcacctggtccttcggcact

SEQ ID NO: 173878 - DNA, 319 bp, Glycine max
  unsure (1)..(319): unsure at all n locations
atcttgngttngncgaatgaaattggattaatcaatggcatgaattgagtgaattgtaatgcatagatcatatgctttaagtgagtattcaataattagaagagaaagaacatggattaggtacatggttgactgagatagctacttagccaaaaagctttccttgtgcatgaatgaattatcccttgcacccatgttgagctgaaaatttgattgattgacttgaaccctgagcttgtaaaatgcaatctccatctaccttaggttgtaggagagcatcatagttcaaggcaaatttgtcccaaatttggaggagttt

SEQ ID NO: 173879 - DNA, 485 bp, Glycine max
  unsure (1)..(485): unsure at all n locations
actcagctggccactnttccactgtcatgctgaaagagataagatagaaatttatcatgtatttatcaatggaggtttaaaggtggcattatctaagtacatgggacacactgcgatgctttgattcacactaaatagttatgtttctatataatctaaatatgctctatggagtaaatgatgaactttttcattttctgtggtgtgctaattatgggtaatgtattgtgacagcacagatgtttactcttatccagatgatgaaagtgtcttggatccacaattagcgcagcatctgggcatttttggcattgacttttcatcactacgaaaggttaattatttatcttgaaatgatacttttcacgcacaatanagaatatattaattattaatcctgagtataaacttttgacttgtactccaacaggcatggcgttagagtgtacttnaaattaattaaatttaaatatcacttgactctt

SEQ ID NO: 173880 - DNA, 378 bp, Glycine max
  unsure (1)..(378): unsure at all n locations
agctntcatcaagtgtcttcacaaataattatttacagcagaaacctagcaagactacccatcatatctcccaaaaccccatacccacgaaaatcaaaggagaaagaagtccacccaaacctgaattttcgaagtcccactcgtagccacgcacttcacgaccccgaaaatgccctcctttcgcgatttggggcagaaatgatggccaaaggttgaagctttgcttggagcttcaatggagaatgaagaagaagaaaatggcaacgtgagggagagagagagctgtctgaaaagtgtgggggctgagtgaagagagagaaaagctttttggttataaataaagggttttctctttttctattattttatttaagcaat

SEQ ID NO: 173881 - DNA, 379 bp, Glycine max
  unsure (1)..(379): unsure at all n locations
tgaaggcaaactggatgcattggttaacttggtnacccatctggccttgaatcagaaatctgtacctgtcgcaagggtttgtggtttgtgctcctctgctgaccaccatacagacctttgcccttccatgcagcaacctggagcaattgagcaacctgaagcttatgctgcaaatatttacaatagacctcctcaacctcagccgcaaaatcaaccacagcagagcaattatgacctctccagcaacagatacaatcctggatggaggaatcaccctaacctcagatggtccagccctcagcaacaacaacagcagcctgctccttccttcaaaatgctgctggccaagcagaccatacattcctcccaatccacaaca

SEQ ID NO: 173882 - DNA, 388 bp, Glycine max
  unsure (1)..(388): unsure at all n locations
catgcaagctttattatnttgttgtaatcgattacttattccatgtaatcgattaatttgagagtttttgcctcttcaagaaacgtttctgacttaaaaacttttcttcacacaaaccatgatgatacatgatgcaatatagatatcatatgtactaagatgcaacacacaagataacaaccaatacaaataccacacaagggagttaggcatgtaaaagtcaaaacttcttcacgcttttccttgagcttcaagctttagcctttaggctattcaccatgttgctccccttatctctaataccacctgcacatatggccaacacacgacccgaactcaagagagagacacccccataaaattccaaccctactctaacgaccaccat

SEQ ID NO: 173883 - DNA, 357 bp, Glycine max
  unsure (1)..(357): unsure at all n locations
attacttgtgatagagagccatgagggtgggctcatgggccactttggaatagacaagacccttgtcttactcaaagaaaagttttattggccccatatgaagaaagatgtccataagcattgcactaggtgtgtggcttgtttacaagccaagtctagggtgatgcctcataggctatacacacccttacccatcccatctgcaccttgggtagacattagtatggactntgtccttgggcttcctagaacccaaagaggtgtagactctatctttgtggtggtggataggtttagcaagatggcacactntataccatgccacaaggtggatgatgcttcccacactctcaaact

SEQ ID NO: 173884 - DNA, 343 bp, Glycine max
  unsure (1)..(343): unsure at all n locations
gatcttcagcacctgcagctgcagctatttttcagatctaacaatttttttattctcacatcttccatagagggtttgagaaacatcagctataaagaattcttgagcttcaagattaattntttccatgtattctgatccattgatggtctaacatgatccatgataatcactcataggttgaattctttttgctaccatttcgagtatgaaccttgcaacactactcaggaaattgggatactcctcactatggctgccaccatatattggctgacccttctatgaagatggtatccatcatcccaacttaaacttactttcattacataggactttactt

SEQ ID NO: 173885 - DNA, 466 bp, Glycine max
  unsure (1)..(466): unsure at all n locations
ntgacaagtgcctctccgacacgatgagcagcttcctataatcatgttatgancaaacaganaaacaaaaataatagatagcaaaagcctaatgagaccccaaaaaacaaaggaaattgaaaaggatgcattccatgtctcgtgttggtttgtaagaagagtgctacaaggaggatcttgtcgaaacgatttctgcagagtgcttccatagagcaaacactnttttatttntgtcatctacaagcattgcatataattgcttatctgagcaaaataccgaaagccttggatgtgtgacaaaatcatgtattgtattaatagctgatggtggaaaaacatggtacttggcagctagtagtggagtggcatataacttgangcactctaaaactttgatgaaattagttcctttatgaatgctgtacagcttgcaactgtatattttgtagtaaacatacatatatgt

SEQ ID NO: 173886 - DNA, 379 bp, Glycine max
  unsure (1)..(379): unsure at all n locations
agctntctattctaatttagaaatacatgattgtaccctaatgtctgaagtttatgggattaagatggtcattaaccaatccctattttatgacttaacaaaattgcctagtgaaggtgtaacaccctgatatatatatatatatatatatatatatatatatgtaattatgcttgatgtttgattatttgttgcgttattttcatccgtaattatttttaaggaagttaatttagttaatagagaggtgtggatagataaggatctatattctcaaagaagcctcttgataaagcttctcaaagaagccacgaggaagcttctggaggaagcctcttaatgaagcttctagagaaagctacatgaagctgcctcggca

SEQ ID NO: 173887 - DNA, 447 bp, Glycine max
tgccacccagctcgcccaggcgagctatgttgcttcctctagaaggcaccgccttctggaggaaattcctggaaggtccaagtgggcctgtgtgctatttgcacccctatgtttactaaatacacctccccatgcctttttttgatgattctttgttttccttccgtaatgttatggaaccttacagattacgtaatcatcccttctttggctttcggaatgttacggaacctcacgaattgtgtaacaatgcttccttttgatttccggcatgttacggaacttcacggatcatgcaacaacgctctcttttgacttctggcacgttatggaacttcacgtattgtgcaacaatgggtgccaagtacctcgaagcggtcaagcaaatgttggacgccatctaagaatggtccccgaacgaaattagggtatgacagatggaaatat

SEQ ID NO: 173888 - DNA, 282 bp, Glycine max
  unsure (1)..(282): unsure at all n locations
agcttgagggattttaatgaagagaaattttttctttgctcaggaatttgaaggatctctgccttggaggaactctatcacctaagtttgtgaaacttatcaacataaagtctatgtaagtaattgtttgttacttggtggaattgactttgtagttcctttacttcgngatttatatattggcattcattcttataaatagagggtgaatatgctacaatattttgaggaaaactctttctctgggaccatccctgaaggatttgtaaagttaaaagaact

SEQ ID NO: 173889 - DNA, 457 bp, Glycine max
  unsure (1)..(457): unsure at all n locations
tgtaggattatggtgtacccatcacatgtggtactatgtggcggtcgggcgatggtgcacaacaagtttcccacatccacaaatcgcgcataaacccaccatcccctgttgcccacctccaactgagctcacgtactcccacgtagcccatatcctcgtttctctcaacaccgggtccccatcaatcctcccaagcttccccaacatccaagtaactcaacattcaaacaacacaaaccatcacagccaagataacagggcaaaggcaaaaaactctgcccaaaacaccaaccaaaatcacagctnttctcacttaaagaccccagtaacaattccttcgttccaattcgttaaccggtggatcgactcaaaattttactggaagtctctagtacataaagcctacatttgaccgttgggatctactagcgaacattcagaacttattctacattac

SEQ ID NO: 173890 - DNA, 360 bp, Glycine max
  unsure (1)..(360): unsure at all n locations
agcnnnatattataannaatgaagncatactttaactttagctctaggaaatgtaattacattttattaaatcatcttttcatttcattaatactttctcataccatttagtgagcacactgaagaataataatataatttacaaaacaattaataatattttaaaagcaataacctacttaaatttggttaaaactaagacttctaagtaacatatatttttagaacagatgaagtacatgtgttatgttctcctgatttgcaatttggttaaatgacaatcagttttttttgtctttttgccccctgatattatagttattatacaaaggtacaatttgatcattgacatcctaaact

SEQ ID NO: 173891 - DNA, 325 bp, Glycine max
  unsure (1)..(325): unsure at all n locations
tttaagaattatgatgaagctgtgaatcagaggcgtattcaatgcttgaagtaagcaataaagtgttgtcttagttttaaatttagttatcagttttaaacattntgcataacaatatatcttttcatttcatgattgntaattacaaaaaaatgcagttaactgtaaatcataaatcttggcagtaatacttacaaagatatatgatatacttgtcttatgaaatccatcatttcctgagaattaacatttagctcgactatttggaaacaaaccattcaagcaaccttttttcttttgtattttactttgtacataagttcta

SEQ ID NO: 173892 - DNA, 361 bp, Glycine max
  unsure (1)..(361): unsure at all n locations
agcttcttatattttgattaaagaagtgctttaaagaattatgtgaactttattgagtttctgaaaataacttgtgatattctataaatttttaagcttattttagtatattattatatgatatgatattatcatataaacttttatctaataaaatttatcgtgtaacgtttgaacaggtggtggcaatagttttgagaaatgaacttcgatcgtggtccacgtcaaaatcaagaggattggcacaggtacatgagtcaaggagcagcaacagttcacaaagcaaatcccaatgttctggggtttgtttcatctggtttgaactatgacactaatntgagcttcctgaagacaaggcctc

SEQ ID NO: 173893 - DNA, 379 bp, Glycine max
  unsure (1)..(379): unsure at all n locations
gtgttctattatattcacttacatgataactatgagaactcaactaatgtataaagcaaaaagagaaataaacatggtgaaaattgtttaaaaagggagtgtcatgagcaattagagaaatgagatattagttatcggtttctaacaagactcactttttatactaatttcatcatgtctatgtctctttttgctctcaaagttagtttattctaataattntcatggaaatagatataacgagacaagttccatatcctaaattaaaaaaagaattcacacgtgtgtttgaaaatctagaataataagttttttgaaaggaccgatgtgtcattaataaaaataaaatgacacgtgacatagatgcacacttatacat

SEQ ID NO: 173894 - DNA, 310 bp, Glycine max
cacatttactctcttcgacagcagaatcaaacttggccagagaaaaaatttagtcgtcccgactcaaagacaggcatataagtcccatacaactaatataaaacccataccctaagtcacatcctatcagagcgcggtgatcccgtgtcctctagcaagaggttctgcataggcaagcacctattcatctgcgtccccgaacacaaagttcaagatcattacaggatccaaacacaaacaacaaaccgggagtgaggtatcacattgcgcactactacagagaaacaacacaacatatacgagccaaaga

SEQ ID NO: 173895 - DNA, 216 bp, Glycine max
gtaatgcaaacaggctgaaagaacgacatgaatatgacgctggaccacctttctcttgcttgacacctaaccagcctataaactgatccaaaataactccatcgaatctctggggcaacctcgacaggtaactcccgaacaacctattaccttggcactacgaaacaaatcaggaaatgactcctatgctatcccaaccacgacaacatggactat

SEQ ID NO: 173896 - DNA, 388 bp, Glycine max
gcattcttgcgagttgccaccccactttttccctattttatgaaggctgcattcttttttgttttccttcaacattatttcattgcgtcatttgtgtgtctaataacgatacacatacacaaaaccaaaattaattatcacaatccatccttagatcatgattgacgcataaactatgattcacttagcttgactagcttgttagaccctcattatcaacctatatgaatactttatctaagaatcaaacagtgcatacataatcatcttcataattttttaaaacattgtagttatataattagcattagcacatttacctggttaaattcccaacaccttaaaacacatagagtcgcgctatctatatctttataactatctctat

SEQ ID NO: 173897 - DNA, 303 bp, Glycine max
atacatactagcttagatgtgatagcggatacattgagatggagaatatgcgatattgaatcacaaaactcagacttctcctcacgaatggacgcaactgctctgccctgcaacagaccccttctactatcaaacctgttccctattactgtagctcctattctcaaactccaaacgatctaaagcacctatagagagacctatccataaacggtactaacagagcagcggtcttccagctcaaattgagcagattaacattcagtaacaacaaatctcacggcacctatcatacgcacccac

SEQ ID NO: 173898 - DNA, 200 bp, Glycine max
gatccttaattttctgggcagcagctgtttttctttctgaactcactcttacggggaccctcgagctttcgcctcacacagtctctaaaaacactcgcgactgacggtgcttgaatcctgctggtaacaaatcaaaatgatcttaaaaatctcattatctcatcaaacaccacgatgaacgaaacgaaacccaatccggg

SEQ ID NO: 173899 - DNA, 353 bp, Glycine max
agcttgtcttatagaggtgcaggaaggatattttttgtctgaagaactagctcctctcctgagcatgacagccaccgttttaggagcgcggtacaccagccgcgcttcgaggtcatcaagggatggtcgtttctccgggagtgagataccctaatctcgcccggggaccttagcttgatgacatgccacctttctatggtccttgagaggtgcctggcaaccatcattacgcaatttgcgaaatgccaggacatgccgaaagaccaaaaaaatattgctgacaatccgcaagactctggacacaccgaaattcaatggaatatgttacataataattgacgtcccgaactttc

SEQ ID NO: 173900 - DNA, 327 bp, Glycine max
  unsure (1)..(327): unsure at all n locations
tgtaagattatggtgcacccgtcacatgttgtactactgttgtggancgacgatggtgcaagtatactatccacatcaccaaaactcacattactccaccattcccacgtgaacagcttcaactgagctgacgtactccatcgtacaccttatcgctcggtacattcagcactggggtctcatcaatgcgtacaagctttcacgagaatcaagcgattgcaacatccatacctcatgagctatcattaccacgcaaatacagggccgaggcagaaaaccttgcccaatacacaaaccaataccacaacttatcttactcaaataccc

SEQ ID NO: 173901 - DNA, 343 bp, Glycine max
agctattaaatatcgcccaggttcagatcttttttttgccatcgaagcaatttttttattattttccatgctaatcgagcacccgaatttcatttttcggtttttttcaccaaaaaattacgatacctgtcttgatttaccatagacctaacacagagtcgtctccattgacaacggtaacggtaaaaactcattaatcacactcacctccattaattccaaagagaaacaatactctccaatattatttatcattagatcttgatctcacaaataagacatactcattcgaactataatattcatgtaatgaataatatttcacaaacaatacttttgatat

SEQ ID NO: 173902 - DNA, 439 bp, Glycine max
  unsure (1)..(439): unsure at all n locations
tgcagcttgatataaaactattctgagctgtttgtttgagtggangcaacagctactcaacacaacacaacacaacacatgtttccggttttctgattccacgccctaatgtctagtctagctatagcatgattttgtatgttcttaccaactctagcttatcctatgattaattaatgtattgccttgtgttattatccttgcttgccttgtataaatggttatagcccaatgtttacagatatgtagccaaatgatcgacttgaatcctccctgctcgctgcttctaatggaatcaaattcaatctcaaggtgatgatggtgaccttgttctttttccacacttaatccacaggtgatgatgaagttgttccgaaataaaatatcattcatgaacctgtacctagcaacttgatcttttgtatgtctatccttcacg

SEQ ID NO: 173903 - DNA, 462 bp, Glycine max
gaatactcacgcttatgcagttcacttatattttctatctatccatgtctatcatgaatttttatccaggatgtagccattgagacttgtctccaagaagaacttatctatcaaagtttaaaaggaagtgaaagctccttaacaccagatggggttgcagatttgctgagcatgcagacgaggattagagtagttgaaaagtttatgatgaaagaacttgaaagacgtgtgaagaaggaaagtttgaccgcatatgtcaaagcaaaagctgtaacagaaatgaatgagcattcaaatttggaagttggcacatatccataaattgacgacagaaaagtggtgatgaaaattaagaaagacaacagcaaacgacgccataatgcatggaggacacaatctcataaaaggttaataatgatagacattcctcttgatgactacaaggatgatccacacttcaac

SEQ ID NO: 173904 - DNA, 390 bp, Glycine max
  unsure (1)..(390): unsure at all n locations
tttttcttcttcttactttcggttctctacagttatcacttatcattgcttggtacatttggaaatgattatatttctatctcttgttttcttaccggacacacagtgaaaagatagtgatacttctgtcttcttaaagatgtttgccaagtaacgtcaactacaggagacagactttttttactttctgatagctctgaatttggttacttcttacacttttctggttttggggattggaggtgttcacttgtgaaaaatgtgcgcgttgtaataattcaatctcttacagattaacaaaccggnggaagaatgcagcttaagatggtgacttggtggtagacatatctcttcctcatgtctgtattcttgtattggactcagacatta

SEQ ID NO: 173905 - DNA, 374 bp, Glycine max
actaagctggaattaacatatcagtatcagtgagaagatccaattttactttctttgacaaatgttaataccagaggttccatgagcaacttcaaagcaacttcatatccaagaaaaatacctcatattaccaaagtctttgatcttaaacttgtcatccaataatttggtaatatgagaaataacagagagatcatgcccactcagaacaattatatcaacgtagaccaataatgcagtgaatgaatcttgtcttttgaaagtgaagagagaataggcagcagtagactgtttaaagccatgacccactagaaatgtttataatcgatcatacgattgacgtatggcctgtttcaacccatagagagatcttt

SEQ ID NO: 173906 - DNA, 435 bp, Glycine max
  unsure (1)..(435): unsure at all n locations
tacatagccctaatcttaactgattcttcaacataaaaaccctaataatctagagctacaattaaagtattctacccttgagttaagacaagaaaaggagaaaaaggatcaaggaacttacttggatggtgtatgattgatgcttcaaagtcaaaaatgcacaaagagcgtacagatgcataatgtgcaaatttttggagagagagaatgcagaggcgaggtatctgtaatctggaaaatgtgagtgtaactgctgttccactcacttaagcagtttttcgataccttcgcttatcgaaccgttgcgctaagcgagcaagatagacgtttggtttctcaaccangctcgcttagcgagcatgtgcgcttagtcgacgtttcaaattcgaaaacaattntttatctntactttttattttatcttatcttatttta

SEQ ID NO: 173907 - DNA, 408 bp, Glycine max
tgtccttgactcattttctccttgaagtgacgtctccattcacctttcctccttctccattctgctgccattgatcttcaagaagcaaaggatctcattgatgaagaagatccaaggcctacaagctctacatggagctacatcatgtggtatcaagagcatcttcatctaagtgatgttcttttgcttcctctatcttttgtttggtcaattcactttaattccttgttcttcatcatattctccatgtatctcctccattatcttgtggttaggttctgtttatagtagattcaaaaatataaatcgattaaatcgtagatctatacttgttcttgcatttctatggttcaaattttatagatccactcttgaatcatgtttttgtgttgattttaggttctatct

SEQ ID NO: 173908 - DNA, 421 bp, Glycine max
gtaatgcattggatgtcaacgatagtccaagcaggtttcaaggataataggaaaatgataattgtttacttgtaaactaactcaatttggtataactgttattatgtatacttattaacttatgttgtattataacatacaatattttaccaatccaagaccattggaacagagagaatgaaagcaattcgcatttagtgggcaagatattatctaaaagttaaaaaaaaaacactaggtgattaagtcattctagaaatgtagagttatgttaatttagattaggttacaaatgattttatgtgttggcttttattactttaaatatttcttttaattgatagtaaatattcaattattgatggataaattgaattgcctaaataaaattgtctcaaactatctgaatgggtatattttc

SEQ ID NO: 173909 - DNA, 403 bp, Glycine max
tgttagtaaaaatgactgaagttgatgttgtaaaaatttattttatattatagctgattttgaaataaagcgacttctatttaaatatctgtattcagaaagtaagtttgacatataacatgatgaaaattttcaactcattataaaaactatattctatcactgctatcaataactaaatatgagtatctacactacaaaataaaactatgtttgaatatcagcaaatagcgtgagtaaaacgtattgcgtaacatatactcatgtcatatattgtctaacacctcaaatatgcagaaaaacatatcatgtgtgtgcatgaaccctatctccacgtatatcacgtgaaatacacagaagaccatattctacttgatggtcattgatccatccaacctaaatg

SEQ ID NO: 173910 - DNA, 301 bp, Glycine max
tcatgacatacagtgttagagtagttactcgcttactctcacatgaatattgaaatgactattaggaagtaaaatagactgataatatattgttcctcctacattttaagtgttgcatagcctaagctacaacaatagagaaatcatatattaacaccataatattagcactgtcacataaaatcatattacaagaatgttacagtccacaggtagcattatcaatgttatcagcatcaatttgatcgatggtaactcggtgtgattgatagtatgcatgaaaatctcttcgttcttctat

SEQ ID NO: 173911 - DNA, 347 bp, Glycine max
  unsure (1)..(347): unsure at all n locations
aaatgtctccgcattgattggtaaatctgttcctcaaattcctgaanaatgcaaagatccaggtacattcagcataccttgtatcatagggaatagtaagtttgacaatgccatgctagaattaggagtttctgttagtgttatgcctctgtctatttttaattctctatctctaggccccttgcagtcaactgatgtggtaattcatttagctaatagaagtgttgcctaccctgttggtttcatagaagatgtcttagttagagttggtgaactgattttccctgttgattttatatnttgaatatggaagatggattttctcaaggatcagttcccatcattct

SEQ ID NO: 173912 - DNA, 453 bp, Glycine max
  unsure (1)..(453): unsure at all n locations
ngcttgtccttggttgacgaaggggaggcttaagaaatctcagtcgatacacattgagtcttcgagaaaggctgcagacgaccatgttggtttccgggtgtcaaagtgctcacttgcctctggttgacgaaggggagactaaagtagtctcggtcggtggacattgagtcttcgacaaaggggacagacgaccatgtttgtctctgcgtgtcatcggacttgattgcctctggatgacgagggggagactaaagtagtcttagttgataaacaatgagtcttcgacaaacagtgcagacgaccatgttggtctctacgtttcgtcgaacttgattgcctctggatgaggagggggagactaaagtagtctcgatcgacaaacattgagtctttgacaaagggtgcatatgaccatgttggtctctgcgtgtcgtcggacttgattgcgtctgg

SEQ ID NO: 173913 - DNA, 442 bp, Glycine max
  unsure (1)..(442): unsure at all n locations
agcttctagccaaatggacttaccttgtattaattcctttgatagcccttttgagccttgtttccctttccttgttntgaagctcactacaagccttaaatgaaaaaccatgatatcaccatatccttaaggaattttggagctttggaattgttttgggaataagtatggggggtttttgtttcattggataacttgttttgttggctatgcttcatgatgtattttgggccatacttgatgtacattgtatattggttaaatgttggacatgctgaatgaaatgttgtttctcaaaggctatagagtaaaaaaaaaaaagaaaaagaaaagcanttaagttgagtgaataagatcttaaatggcacaagaatgatgaaacntctggttctactctttatggtaaaatttatcttacttcttttaatttctaatttttctc

SEQ ID NO: 173914 - DNA, 447 bp, Glycine max
tgagatgaagaagtgttgaagggtgaaacttcctgcttttattgttgaccacagagtggtacctggagatatgtcgtgggggtcaggagaccttggggacgtcatgtggggtgctattgcccaaaaccaagcttgaccaatcccgacccaacccgggcatagtctgtcagtgagaacctgtgatgtacctaaacaggcgagctcctggcagtcaacatatattaggaacaaagaccacaaagcatggaggcttgtggtggctggccagctgtgaattttgtgtaatatgtggattatggcctctggtaatcgattaccaagggtgggtaatcgattacaaggcttataattgaagacaggaggctaagatggtctctggtaatcgattaccaatgtgtgtaatcgattaccatgcttaaaaacgaagtcaggaaacttatggagcct

SEQ ID NO: 173915 - DNA, 403 bp, Glycine max
  unsure (1)..(403): unsure at all n locations
agcttgacattaatatatatttcttttttggaggccatcaattntttataatgagagtaacttanactattctatattttctttggtggagttggtgggtaaaaactaaattaaagaataatagtggtctcaaaatatatattattatgcacaaaaaagaccaaactaaacgtgcaggtaaaaggtgagtttaattatcataaagtgtttatatatatgtggcctttgttggtcgattatgcaagtgtcaaataaactattattaaggagctagaggcaatgggaaagagcaaggctcttgttgtgggtggaactgggtatgttgggaagagaatagtgaatgcaagtctataacaaggccatgaaacctatgttcttcaacgtccagagaattgtcttgaca

SEQ ID NO: 173916 - DNA, 445 bp, Glycine max
gtagtatatctaaaggcaattctctgacagaagttttcttaatatccagtgtttctagattatgcaacttccctattatgtaacctgtaaccattgtcacctttgtgttccttaagcttagatatcttaaatgatatagatcaacaactgctactggaaacttattcaaaggtgcatcttgataatctaaaacacctagcagtttacaaccaccaggaaacagtttgccaagagataaattttctcctacaccaaacattaagagagaacggagttgagagcctgacctatgaatatgttgctgccgatgacatggtaatgtgccgtgcaccgaatgtctccgaatcttttctggccatgctatgtcttgttcttagacaacggatacaaaagtttggtcccttcacttaaaatgataatctcccttagagatcatggattcgca

SEQ ID NO: 173917 - DNA, 373 bp, Glycine max
  unsure (1)..(373): unsure at all n locations
atgtaaaactagttccagttccatcaactgtgacagtgttcaatgttccaaggacattgcagcaaaatgcaacagagattattcataagtggcagcttgtcgcaaataaacttggcaatggcataatgattagggtaaacttggtaagggtaagttcaagtcaaaatgggaaaccaacagtgctagctatatttgagtccattgtaattggaggtgtggatcaactcattcccttgatgcanaagagcttcccagagttgggtttggtcagagaagattgtactgaaatgagttggatagattcaattctctatatggctcgatgtacaaatggtcaaccccgtgaagctttgatgaatagaactggatgtgg

SEQ ID NO: 173918 - DNA, 451 bp, Glycine max
tacataacagactatgtgagtatcttggatttcctgattaacacgagcaaagatgtggatatactggttcgaaagaaagtactggttaataggctaggagatactgattctgtggctaacatgtttaaggtcttttgaaaaacaatattcattcaaggtttaattcccattactctgaaatctgccaagacttgaatgctttgtgtagaaatccttggcataatttgaagtcgactttaaggcgtgattattgtaaaactccttggcaaactgctgctaccattgctggaattgttctccttattctctctttagttcaaactatttgttctgtcttgcaagtaatacaacaatagaatatctggcctcctccctggtaaattcagttgctggtattttcttcttcttcttattattatgtaaaggcttaattactatgattgtttcatta

SEQ ID NO: 173919 - DNA, 311 bp, Glycine max
acattgaatattttatcgatttagatgagattaaaaatcgggaggaataaaatacctttacaacaacaatgcttagaattatatgttttggattatatatgtcatattgtggttttcgcaatcatcagatagaggaaaagaaagagtgacataaatcaagtaatagaaaaaatagtatcgtaaaaagtgttatataaaaaaattattattatatatatataactgaaaaactaataacaattgattaacaacttctgtctatgggtgttttcaaacctatcatactccttaaaacaagacccgtgtatcta

SEQ ID NO: 173920 - DNA, 403 bp, Glycine max
cttgtcaagtctgtgtgctgtcaatctatgtccatttatatgcaacccggtcgaacaaagaaactcttgggagtttgtataacttcttagttccatttccgttgtttatactctactcgcgtcaatttgatgaaaagcacgatatcatatgattgtttatagtttaaaaaagtaatgcccgcccaatataattgaaatctgtaaatgttgcggagagcattagccaatgaatcatatacatttctctatatatgctaatccaattcttacttgtgcttcggtgatatttatgtctattcaagttcttctggaaaactttggattgttaaataaccaaagataatctgcatcgcagcttttgaacaccaatgaacacgatgacttacacgtgcttgtcataata

SEQ ID NO: 173921 - DNA, 428 bp, Glycine max
tgcttctcctgaatatcaaatgcattttgggaataagttatagacaaattaggattggttagaagagcactaactgaaattaaattgaatttgaatttaggaatgtaggcaacattatgcaagagtaaggtattggttaagcaaactgaactaatggcaatgataggtataacatcattgttaggcagagtgacagttttatcataaacaagttggtaagaccgaaaatgatgaagggaacaagaaatatgaatgctggcaccagaatctaaaagccaacaatcatgaagaaaattagaagtggatgtagaaaggatcataccactggcagaagatacaccttgatggatgacaacatgggtagcatgactttctaaaagattcatcaattggctatattgttgggcaataagttgaaactgggaacc

SEQ ID NO: 173922 - DNA, 397 bp, Glycine max
  unsure (1)..(397): unsure at all n locations
tttgatttatctcacaggaataccatcaatgacaatgaagtattatgtgtgggatgtgttttgacttgtaatatacttggcacttgttctttgaatgcaatttgttttgctagagtttggtgcggctactttaggtggtgggggtattcatttgcacaatataatgactctccttctaaattctcacaactcgtgggtttgccaagttgcaatgattagaatgagttactgtgataacaatttggtttgtagtgttttgggcagaatggaggactcgtagttttcttgtttntaaaaccataagaatgagttntgatctaatcgtttaacggttacgatacaccctttgtcaataattagtactatatgtgttttttttgactgtcctactcatgtt

SEQ ID NO: 173923 - DNA, 464 bp, Glycine max
tgcctattcgatgcagcagtaatgatggcccgagttatgttggggaacggttacgaacccggaatgggtttatgcaaagacaacggtggcataactagcctgataaatgccaaaggaaatcgtgggaagtatgggttaggctataagcccactcaggcagatataaagagaagcatcgcgggaaggaagagcggtagtcaaagctcgcggttgagacaagaaggtgaaggaagcccaccctgccacataagtaggagctttataagcgcgggtctgggggacgaaggtcaagtggtcgcgatatacgaagatgatgttccgggtacattggatttggtacgaccatgccctcctgatttccagctgggaaattggcgagtggaagaacgccccggcatttacgcaacgagcataatgtaaacctttacggttttaaaagctctatagttgggcctaggctttaa

SEQ ID NO: 173924 - DNA, 387 bp, Glycine max
cacttatacctgcgatctttgggacccaagacatcccttgcgttctagactgaaaccatctgtgatatgtcacctatgacgccattggtaattcccctaatctccttatctataatgtccattgcattgcatgctttaccgattctatgaaggatcttctcattagcttaaatgaaacctcacgcgatgatgtcctccatgatgcacctctcatagggcagcctggactgtttatggcctacacgggattataagttatacaaccccatctccatatgcaggagacatttgggaatacttcacatgagttaacactcctgcactacttgtgtcccgtgtgactaactatggacctcccatctgcctgcaaaagtctacaatttgttt

SEQ ID NO: 173925 - DNA, 367 bp, Glycine max
  unsure (1)..(367): unsure at all n locations
atggacttcttttagttctatatgatatntggacaatttcttaaactcttttcgcatgtttttttaaggtttgaaagaataacaagtntgaaagtagttcatgataggcttgttttacaggtttagggtcatcgagatctacctcctcttattctaattctgattcttcagtagcaatattagccatcaaacataggttgacttcctcttctccttcttcattagaggtggtgtcatctatgtcctcccaagtgctcatgatacttttcttgtccttggacttctctagttttgggcattctgtcttgaagtgtccagacttacactcataacatataatgaagctattttctctattgtccttctc

SEQ ID NO: 173926 - DNA, 443 bp, Glycine max
  unsure (1)..(443): unsure at all n locations
gggttcgaggtacttacccgttgaagatcgaagaacgatgaagatctgttgaagaacgtcgaagaacggttgaaacctttgcgaaattcttcacggaaaacgttatggaaacgtttcggaagcgcctcggcttatattttcttcacggaaacaatttttccaagcaaattcgaaagagagagaagtgcctaatgggctgaacccctttcttcttcacttcctcccctatttatagcaaaataggggaggtggttgccgcccagctcgcccatgcgagccaggttgcttcctccagaagcaacagccttctggaggaatattctggagggcccaagtgggactgggtgctatttgcacccctattnttactaagtacaccccctctgctgttttttggtgattctttttcagtaagtacgggaacttagaatttcgaacgatac

SEQ ID NO: 173927 - DNA, 176 bp, Glycine max
ctaagaacacctggatgaacccctcaggatgccatatacgtgcgcacttctgcagatataacttttgtgttccatccagcatacattggctattgactacatgtcacaaactatgtatatcatggtttccccaaatcacaatttaaaagcgcagctaccactgttacacagacatt

SEQ ID NO: 173928 - DNA, 445 bp, Glycine max
tcaccttgtggccctcctcataagcgtcgcatgaaagctcatgctctactcccatactccactccacgttcgcctccggatcatcctggcctttagacgggggaatgtgcgagaccaataccatcgatgacgctctgtctacgaacgccatcgttccctcttaccctccgttcttcatcgattactgatctctattacccatttgatcacaacctctcatggagcgcatcatctgcttgtttcattaacctctccaaaaggcgcatcagagatggcatatgcaattgcgaacgcaccactccatcatcaagattagctccctgacatctaatcacggatgataatcgcgccacgactattataacttgtggctgaattacctacacactcaagtgtttacacaaatatggcttttctctatgaaacactcttgcctttaccactc

SEQ ID NO: 173929 - DNA, 449 bp, Glycine max
cgcgatccttgagtcacctgcggcatgcaagctttatacctcctgagagtgagatctaacggaattagttgtgtacaagcatattctaactgattctagaatattctacactctctaacagaagtgattatctgcttcccactccatgcaaagctctacccgattcgcacataatcctccatgtacgttggagcttttgttttcctcttgggcctctcttcacgttgctgcccatttacttcctgcaacccttctccattactcgtaacactcccctccccttcaaataacaccttgtcctcaaggtggtgaagctttttgaagttggaccattcttcccacgaagcttcctcgatgggcacgtctttccattgaactaacaccatgccgctaggtcccatctctgaaagaatcagctcggacgcgatgatggctaaaggagtaacgac

SEQ ID NO: 173930 - DNA, 448 bp, Glycine max
tgttactactattagattgctacgaatactattgcaatctgtaattgtcttttccactcaattatattacacttgaatatgtgtgtgttcctctcttgacttaaatataaatgcggtcattttattttactcaatacgtaatttgggcctctctattttaaaatgaaaatatttgatactccgatctttaaaaatctaccattttggtctctctattttaaaatacaaacatttgtgccctatattttagacaattcataattatgattctcatattatagaacattcacaatccttggttaatatataattttgcctatgtataatgcctcttatcttttactctgtaccttattaacacatttcttgacgatatcttagatgaatatgcacatttatgatttaattggaccacgacgaacgacataagtctgtgataaattgagag

SEQ ID NO: 173931 - DNA, 474 bp, Glycine max
  unsure (1)..(474): unsure at all n locations
cctgcngcatgcaagctntgtgatgctcgctaaaggcaatctagtcatagtctcttttaaaccaagaggtgtagtttctacatctaaaccattggaacttctacactaggacttgtttagcccttttaaaactatgagtgtgggaggagactattatggtcttgtcattcttgatgattactctcaagatgtaacatggactatttttcttgctatagagaataatgcttttaaagctttcaagaaacttgcaaaagtcattcaaaatgttaagtcaaaagatatttatgtcttaagacaaatcaagacccttaattattttgattagatgtaaacaaatacaaagattaaaagcttattcttatgtgttatcaaaacatgacttgtaaaatctgcgtctgaagtttaaatgatagtcagattaaccataatcttgtatgacattaaagatgacatttaagaaattacttaata

SEQ ID NO: 173932 - DNA, 444 bp, Glycine max
tgcttctacagaacaaggaattaaagtgagttgactgttcaaaaagatagaggaagcaaaagaacatcacctagacgaagatgctcttgacaccacatgatgtagctccatgtggagcttgtaggccttggatcttcttcatcaatgaagtcctttgcttcttgaagtttaatggcagtggaatgaagaaggaagaaagatgattggagacgccacttcaatgagaagatgagtggagagagagggagagaaggagcatgaaattttgtgcctcaaaagaggtctgaactttgaagtgtaattctcaaatgatcaaagttgataaaatgcacacacatggccctctatttatagcctaagtgtcacacagaattggagggaaatttgaatttcacttgaatttgaaattgaatttatggagccaaatttcattaattatgatta

SEQ ID NO: 173933 - DNA, 316 bp, Glycine max
gcatacaaatgctgacttttccttttaaaaaaataataaaacaaagatatttgcgggtcccatgttgctcaaaacgtttcgttttcagttttcacatcttctgtaggtacatgaacatgtcctgcaagggcgagagctggcccatttgatactgaacagtgccaaaaaggtaatcatccacggaaaggttattatcgtccaagtaattaaactgaatatcaaacgcgttttctagctctatgtccagatcatcgttccacttggggtcgctctgcacctccctctcgcacgtgacatcgggcgataccacgtgctc

SEQ ID NO: 173934 - DNA, 448 bp, Glycine max
gtgacactttaatactaagcttcgcaatagatcagagacaacacgatgcctttgactttttcttataataagaatacacttcgttctattaggacatctatactaatttctttgtaagtgttaaatttacaaaaacaaaatagaaaaatttgttctccaatcaaatatttctacacacacttgtattgaatagttagtgaattaacaaacctgtttttgaaatggttccaaaaaggtggacaagatatatagcatccactgatgctccatcacaggttcatctccttccttgttgcgacgccgcgcctataacagtggcgcgtcgtcgatgctttacaactccaccatgtttgagtaaagacattacgatgccaacgacatttctacgccagggaaagcgacttacaccacaccgccgccaccgtgctgctcagtcatgaaactcatc

SEQ ID NO: 173935 - DNA, 446 bp, Glycine max
  unsure (1)..(446): unsure at all n locations
agcttctgaaacagatntatacttgatctctatccattaggcgttatgtaaagatcatcagaaactataaaagaagcagtctccttcacaaagcccatttctaaattcagtttatctgaggatcccaccaccctgttcattagttttccacaactacatctttgattcctgaaagtgctcaaaagggacggctttatagtacatttcgaccagttctcacaaaagtagtagttcttaggctcagtgtcatcaatattcagcttcagttgttgacaataatcttccataagttctttggctgcagtagaattgttaattactcaaatatgatgaatttggaataaaccagtggtgggaaatatttgcgtttaatttaacattataagatatattaatatattattctatttttaaataaacattatttagatttcttaaatttgttt

SEQ ID NO: 173936 - DNA, 450 bp, Glycine max
  unsure (1)..(450): unsure at all n locations
tctcgcactcatggagtggtcctataatacctcgcggttcacgggcaccggtatgaccccatacgaagtcgtctacggcaaacctcccccttctcttccaacgtatcttcaaggttcatcctgcaacgacgccgtcgacaccgtacttcgtacacgcgaagagacccacgcaatcctccaacgtaagcttgtcaaagcgcaagaggctatgaaacatttcgcggatcagaagcaccgtgatgtggtttatgaggtagaccaactcgtccatgtcaagcttataccccatcgccagtcttccctgcgatcccagccaaccagcaaactgaccatgcactatttctgaccttaccctgtcgtggaacaaataggtaatgtngcatatcgtctggaagtacccgagggatccaagatccaccccgtattccactcctccctgcttcgacccca

SEQ ID NO: 173937 - DNA, 391 bp, Glycine max
ctctctatgtgcagaaggttatgagagttggaaataatgccaacaagaatgacactatagttagctgactactccattaccaggccgtatggagtgattgatgatgtcttggcaagagtaaagcatttcactctcccaactgatttcgctgtaatggacatcgaagatgaatctgaaatacctttgatcctgagacgtcctttcatgtttattgccagctgtgtggtacatacgagaaagaaaaagctggagatgggtattgataatcagaagattaacttccacttatttgatgaagataagaagtcgttggaccaataatgtttgttttgatatggatgatgtcgatgaagagaaagttttgaaggttggaaccatagttgaccctgat

SEQ ID NO: 173938 - DNA, 421 bp, Glycine max
tcttcggatgaatgtgatgaggttcaagccctcttggcatattttttatagcccgagcagtcgacgagaaggtcaagtccatagccatcaaagtctgaacagagtatgatgaactaagggacgtcaatatggccaccgctgatgccttgtactagaaacaagatgcccaaaaggaacacactgccacaaagtttgatgggctatattaggcatcactattaagctcaaactccgaagacgtgaaaggaatcatcacgggtcaaaggcatgatcttgaaggacgagctataggcttaccttaggtcgataagatatctgcaccaacatcaatcgagactgatcggaatatgtgggccgtcatcgaagaatgcaatgagaatctaagtctaactgcgactctcgatcataagctatatgatga

SEQ ID NO: 173939 - DNA, 363 bp, Glycine max
agcttcactcgctaagctcccaacacttattataatttctgaagagttggtgctgctaagcggagcctttaaggagcttatcgcaaatccttgcagcacatgttcagcttagcgggcgctttcccgctaagccaattctgcagaatcttaaaattctgcaacttccgctaagcggcttcatatgtcgctaagcgataatgtttttttttataaattctagctaagcagaccatgtctcactaagcggccagggtctttttcaattttatttttcaggttttaaaatttgaataactgtgtcctaattaattgtttggttcctctgtctacagatggcttctataaagagaaagagcattggta

SEQ ID NO: 173940 - DNA, 428 bp, Glycine max
tggtgataagtttgttgtaagagtcggaaatggtagtgtttaatacttataactttgggaagttagtgaaagttggtggttagccaagaactagatgttatatcaatgatagagacgaactaatacaaatatctatgtgtcttatatgctttctatttcttttttgttttaaactgacctaggttttgaatttgattttgtttgaaaactctttcaattttgcaaaatttgttcctatcgtttgaacttgcatttgtgaaaatttgttatctgtattataaagttatactttacacgataactttgttgtcacaaaaaaagggcttaaaaattcttaaaatcacaatttatgccccttcttgtgatatttgcttttacagtttggtataagagcttattctctaagggttgatcacctgatagtgtct

SEQ ID NO: 173941 - DNA, 400 bp, Glycine max
  unsure (1)..(400): unsure at all n locations
agcttagccctagaggggatgaaccttttcatgtttggagaggatcaataacaatgcctataggttggacctcccagaagagtatggagtcaggaccacttttaacatttctgatttaactccttttgcaggtggagctgatattgaggaagaggaactaacagatttgaggtcaaatcctcttcaaggggaaggggatgatggaatcctccctaggaagggaccaatcactagaacaatgagcaagaggctccaagaagattgggctagagctgttgaagaaggccctagggttctcatgaaccttangatagaattctgagcccatgggccaaggttgggtccaattatctttgtacatattagactangatgtcattatatttggtccttgtatata

SEQ ID NO: 173942 - DNA, 417 bp, Glycine max
  unsure (1)..(417): unsure at all n locations
tcttatccaaggctcatcttggtgatgaagctccttcttccatgacttattccctagtggatggtgcctcctttcacctcttctactttgtctttcgctacatctccatggtggaaaatcaccattaaaggacctcattgaagctcaaagatccagcctccatagaagccccacaagcaagcttccatcagagcatttggtaatgaagttctcttacaaaaatatccatttgtatataattttactccccctttgttttgcaatgattgcttatatgagatagttgaagatttcatatataaaaaactgtctcataaagatttcatatatcttttatctatctctccccctttgtcaacatcaaanacaaattatgaatagagaggaggaaaatgtgccccttgttgcgtgtgtatg

SEQ ID NO: 173943 - DNA, 337 bp, Glycine max
  unsure (1)..(337): unsure at all n locations
atgaaaacgtgggtcgtgatatcttttggtgtcaccatgatgcagtgaagttagtcaacacatgtaatttgatgtttttgatagacagcacctacaaaacaaacaggtacaagcttccactgctngattctgttggggtgacaccaactgggatgacattctctgccgattttgcatatctggagggtgaacgtcttaataatgtggattgagctttagaacgcttccgaggtatatttctaagacatgatgtcctccctagagttattgagagtgatagagacctaccattgatgaatgcagtgaaaactgtatttcctgagtgtacaaattattt

SEQ ID NO: 173944 - DNA, 414 bp, Glycine max
  unsure (1)..(414): unsure at all n locations
cttgtacgtgacactgtgnagtgctccatcccatgccgaagtgatgtggatgggtgctacttcacacttttattcgctgaccacagagacgttcctgtaggatatgaccatgggtgacactgatagcattgggacatcaagtggtgcgctatgggactccaccttacttgatccatgactacccattcggggcagtaatcgttcttgagaacccgtgaggctcctaatcatgagatctcctggtcgtcatcagataatttaacctgaccacaatgatgagtgggctgtgtgtggtatcgccatctgacaactgtaaatgatacatgccatatgaactctggtaagctattaccaaagatgggtaagcaatgacatacgatttgtttgtgacgcaaatttagcctgaggtattcg

SEQ ID NO: 173945 - DNA, 426 bp, Glycine max
tagcaccccacctgacgtgcccaatgtctcctgacccccacgacatatctccaggtaccactctgtagtcaacaaacaaaagtaggaagactgactcttccacacttcctcacatcaagcttgtgggattatggggtacccgtcatatgtggtactaggtggcgatcgggcgatggtgcaaatcaactctcccacatccacaaatcaaacatgaacccaccatgcccagttgcccaccttcaactgagctcacgtactcctacgtagcccttatcctcgttcctctcagcaccgggtccccatcaacccctccaagcttccacaatatccaagcaattcaatttccaaatatcatgaactaccctaaaccaagaaaacagggcagaagcagataactctgcccaaaacacattcacatattacaac

SEQ ID NO: 173946 - DNA, 463 bp, Glycine max
  unsure (1)..(463): unsure at all n locations
acttgaatgctctattcaatggagttgacaagaatatcttcagactgatcaacacttgcacagtggccaatgatgcgtgggagatcctgaaaaccactcatgaatgaacctccaaggtaaagatgtccagactgcaactattggctacaaaattcgaaaatctgaagatgaaggaggaagaatgcattcatgacttccacatgaacattcttgaaattgccaatgcttgcactgccttgggagagaagatgacacatgaaaagctggtgagaaagatcctcatatccttgcctaagagatttgacatgaaagtcactgcaatagaggaggcccaagacatttgcaacatgagagtggatgaactcattggttcccttcatacctttgagctatgactctcggatagggctgaaaagaaaacaagaactnggctttcgtgtccaatgatgaatgagaagaagat

SEQ ID NO: 173947 - DNA, 390 bp, Glycine max
caactactgtgattaatactaaattttcattttatggccaaacgcataattatttcaaactaaactggattcaacaacaagtgaatacttacagttcataagaggggtcgtaagccataaaatgcaacattttgaagactaggtgagcctcaaaccctttttctggataaatgaatgaggaaacatgtagcacaaataggaaagaagtctcttaggaataaactctgtgacaatatgattcagaatacataaataatttcaatctataaaagaacagcccatacttgagcaatttatatacggcccaatgcttaaaaaaacatcatactcttaagttttatgtttggatgatgctatcattatcctcatgtgcaaaaccttaccaaaaat

SEQ ID NO: 173948 - DNA, 385 bp, Glycine max
acattgatgttagaattaatggagggtggttgtttgctctgctagacaaagaggagagacccactggttaatctaactttccaaatgtctgccttcttaagaaatggccccgatgaagcttgcctctaagatgtccaggaaggactaggcagccgatagaactagttccgctccggagtatgacagtcaccgctttatgaacgctgtacaccatcagcgcttttaggccatcaatggatggtcgtctctccgggagcgacgcgttcatctcagggacaacgagtatactgatttccaatatgatatatggcgccggcggtgggcaccattggttactcccatggccatatttgatccataaaagtccttgattttatgccatgct

SEQ ID NO: 173949 - DNA, 410 bp, Glycine max
gtccatcccttaatttcatttcatcactttcacttgccaattttcaacctaattcgtgttcgttcgttcaaattttatgtgctttgagggatacgtcagtgatcgtggtgacgctggacttggacgaggtcttcatcatcgctaggctctacaccagaaccgacactcatgtaatccacatcaatccgaccacgagggcaagctatggttgaggccttggatttcatcaccaacggatcgcggtttgcctgcaggagcatgacgctcgtgagtagaagagagagggaggaagagggaatcgcgagcgatcgacagaattggtgctggagggtggagagagaaagtgccgagaagatatatatctaatatgaaagactttacggtgagatgaatctaacaatagtggagag

SEQ ID NO: 173950 - DNA, 444 bp, Glycine max
  unsure (1)..(444): unsure at all n locations
ggggctcaactcatatatggatcaattnttgttgtttgttgagctttaatatcacaagcacgtggatcaactggtgtgggattgttccgacttaactaggttcgagtcctgtgtacacaattagattaaatatttggaggaagaactttgtcacccataatagtactatccggctcaaacaggattacctccaatggaatatatgagtgttttagacaaaaaagaataattcacgtcataattattgaatgaaaaaggatcataacaattaacaaggatctcacagttaattgcattgtgtatgctggtggctctgctatgaaatcttcctgctgagcaacaccattgatgtatagtgccccatgattaacctgcatttgaatattgaagtgagaaaaaccagatgtacgtgctatttctctatgccatcaaacaaattattac

SEQ ID NO: 173951 - DNA, 338 bp, Glycine max
atcgctcagcgacgacttatccatggctattctagatctattgtctccaaacgcaattccttatggccttaattgaggtccatgacgcttatcgccagtcatggcaactaagcgagattttttgcggcaatatgagcgctaaacgagtacatctcaactaagagcgtgctcctctacgtacttaatatgcatcatttcagctaaactggccaaggctatacttatagagagttgcagcttttctaatctgcacgtctcgctaaacggatgctctctcgcgctaatccgagattatattaaaaaataatatatttctttcgaatatgaaacgtcgacta

SEQ ID NO: 173952 - DNA, 379 bp, Glycine max
  unsure (1)..(379): unsure at all n locations
catgattgtttcatgatttgggacttgtacgattcaatttgggcaaaattggatgagggaaagatgtggtttcnaaatctgcactttatgcataattctgctggtggaatgtgcagcagaattttgtataagtgcagaaaaatgcttgtgtatggctggttgcgaaaatggtaatacatatggtgttctggagattttatatcagatcccaacggtcaaaatgtagacttatgtactagagacttccattaaaattttcgagtcgatccaacgggtaacaaactggaacgaagagaatgttactggcgtaattgaattgtgaaagctgtgatgttgtttgtgttttgtgcaaattttctgccttgccctgtttcttgct

SEQ ID NO: 173953 - DNA, 438 bp, Glycine max
tctacgaagggcatggtcgaatactattttctgacattttctaaaaatctcgctagatgacgatctctctctttatcggaaggtaccacaagatatggtacttccacaccttcatccacagctttttcacttctactcctctttgcattcttattattatgtctcttaaacactcatttgttttcattatctattaacttttctttttcttggtacgtcaattctgtattcttgaccattatttgttcttccttttcttgactactttcacctcttacctcattttgcttaccatcattacctttcttgtcagcaaatttgttcttatgcacaacactatacgaatgcttatcctccacataccttttactccttgtcatcacaactctgcattattccttaagattatgctctatattttccacaaaactcgttgat

SEQ ID NO: 173954 - DNA, 458 bp, Glycine max
  unsure (1)..(458): unsure at all n locations
agctnggtgcgccaggttgagaagatagtgggagagtatgattattatgactctaagatcttgcttggctacagcgccattaaggaggattggaataaagtttcaccacccctcttctttcttgctctcaatcgcctagtgcattcttggcctaaggttaagggcgcatctgtcaaggttattagtgacacctatgccttcattcccccaacgtggatccctaaactcctgtctttggccgtctccgatgctggaaaatctagacatacagatttctaactttctctatcaagttctaaggttttaaaacattttccaatactaanaaacctaactaaacatacaaatgggtgatcaagccacaagcattgtaaataagtatagatagaagcaaagaacaccagaaaataacattaagtagatatttagaacattacatcaagagttcagtagtctac

SEQ ID NO: 173955 - DNA, 448 bp, Glycine max
ttatatttcctggaattgaaatctaactgaatctgttattgtacaagcacgtgctacttctagaatattctatgctttctaacagaagtagttatctgtttctcccctccatgcatggcccttaaccgaattgcacgtagtcttccatgtatactggagttttcgtcttcctcttgggccttccctcgtgttgctggccatttgttatctgcagcccttcttcattattcgcaacactatttgctatctgcaacgcttcttcattactcgtaacagtgtatctactcttgtgtattacaatggtaacatgatttcatcatatgaagggataatgtttgaatgtcttagtggttttaaagtcatcacaataagtgaggacgtgttgcttgatgccttaaggaaaactattttatacaccaacagaggtggtataattttacatgatatt

SEQ ID NO: 173956 - DNA, 377 bp, Glycine max
  unsure (1)..(377): unsure at all n locations
caagcttgtggatatagttatcaccgtcttttagatcaaagtgggtctgaaaagaagcaaatntgatcatcctgctntgacaaataaaaagcctatggcaaatgaagagaatgagaaggaaggatgaacccatgctgcgactgccattcctacatggccaaatntcccaccagttcaacaatgtcattactcagccaatatcagcccttctcattacccatcaccctatcaaccaataaccctaaatcagccacaaggctcgcctgccgcacgtccaatacctaacaccacccttaacacaagccaaaacaccaactagggaatgaaatttccagtaaagatgcctgtagaatcacctcaatttcgggtcatatgct

SEQ ID NO: 173957 - DNA, 436 bp, Glycine max
tgaatatagaataccagtgctgatgttaggtttagatgttttttttagacatgcaaaaattggaagatgtgagcggaatagaataaatttataatatacctatatatgtagttctcgtccaaaatttcaaactacataattagaagctggcaaaaagattagaagaagagtcattgcttaacctgtcatggtgattggcaaaggcaataagatgcttgcaatgataaatagaaaggatttgaatcaatttgcagaatcatagattgtgggaggcatttatattatttgagaaacataagttgtaaaccctaaacataaatttataatataaaatatcttgagtgcaaggattaaatgttacttcaacacttaccatgctaattctgggattgctaggacatttatatgtgattaattgggtagttcatatcaattt

SEQ ID NO: 173958 - DNA, 363 bp, Glycine max
  unsure (1)..(363): unsure at all n locations
agctntatacagtgctntgaacanaaaatatcacactttttgaataatgtaaaaaaaaatattaaattgcatggacgaaaacaaatatttaaactaccaaattattattactagtatgtgtattggactggagatcatgcgcatgtcacgtgaagaactccatttggcttaatttaggtgctagtgaagtgagtgagcgagcaagtgaggctccgcagccactttcccaacccaaaacctctcttcagcccataaccatcatgtatctcccccgccaccacatcctcaccagactctccccttaccgccgtcacttttcccacttccgcgncgtcgtcctccgccccccggaagccgagcccc

SEQ ID NO: 173959 - DNA, 439 bp, Glycine max
gtagaaggatggaattctatagtttctcatgtctgtttttttgtaaggcaaagatataatatattatagaataacaagtaccagaggtactacatattacataacagggggtcctgacaattcatgagatacaacaccctacacaaatgataaccctactaacaaaaactttaactaaaagctgtagacatatttgaagaccagctataaaaaggaatctggaagttcctttcccaacccctcaaccatgtccatgaaaggaacatagtgctatctgtcagcctagtgatatcaaaagtttgattctgaaaaatgatatcatttctgagcctccaaatatatattatctgttgactcttgtgtaaatttttgcataaagcactagattggtaatactttatacttctttttaaggtacatgcaataatttatacttata

SEQ ID NO: 173960 - DNA, 385 bp, Glycine max
  unsure (1)..(385): unsure at all n locations
agcttggatttgtttatttaattaaacatacgagcttgattgagcatttaacgagtcgaactcaagtagttcacgaatagcttggttcatttacaccttgttgccattgggcatgggttacaagcctgttatcaactgatcattgcatcaactagtctgaacttttatcttttctcagtcagtatgctgcaggtcttatttttttgctcgtatttcagtttctgcataacatcccatggccttatatgtaaaccataaatggtttgcttcaacatgtgcaaaatctctcaatttgtggctatatattgntattctaattaatttacagaatgcanacgtattgtgtttcaactttgatataaattcgaattctgcattttctgat

SEQ ID NO: 173961 - DNA, 425 bp, Glycine max
tattgacactattgataagcctcccatatattcacctgatctgagtgatgctgaagcaaccaatgtttttcaaaagtacctagatgagtgccttactgctaagtgcattattttggcatcaatgagttcagaactccagagacaacatcaagacatggacccatatgagatcgttgaacatcttaagaaaatgtacgatggtcaaagcaggacgactagatttcagttatctaaggccctgtttagatcctcacttgttgcaaatgaaaaaggttggaccctatgttcttaagatgattgatctcatagaacaacttgagaagttgaggtgcattcttgggaaagagctttctcaagatttgattctgtaatcactttctgattcattttcacaatttattatgaatttcaacatgaataagatg

SEQ ID NO: 173962 - DNA, 461 bp, Glycine max
  unsure (1)..(461): unsure at all n locations
agctnttaaaaaaagntaagaaaatttaatcctactatatgtgagacacagaacatgtgtaatatagaaacctaaaaacattgttccttaatgaatcaaaaataaaaactattcagaaatgatttcaagaaagaattgagattgatattattcttattagaatacaatagaaagtatattaaaactttgatgtataatttgattctatttttagtaaggtgtaaagaaataggataaaatatacttttattctgtatgctattatttttattcaactttaaaactactttttttttataaaattcaagaactaatttgcatattgaaagtagatattcaaaacaagattcaataatgaaaatatatgtactaaaaatatattttatgctaaaaaaatataatcttaatctaaaattctgaatgtgattagaatattaattggtttcatatatatatatata

SEQ ID NO: 173963 - DNA, 448 bp, Glycine max
ttacaatattagcatgatgaatcttgtatatgctgttgtctaacagaagaaactgttcatgattgtgtctgctataagcagtagcattcagcttgctaactgccagcttctacgaagaagattattactgagatgtaagaatctgatgctccggagtattaagtgaaacttggataataataacaggtcatggcacgatagcacatcaggaaaaatctggaatcgttcacaaagatactatatgttctatgaacaagctatgtttaaacttcaaactaattttcttaatttattaagggcagtggaggaaaagaaatactgttcaaacgtttgagagggggcagcataagatgaacaaatatcctggcctatatctttgatgtaaaaatgtgtaaataaatagatattaacaacttacactgaaaatgtaggcctaccttccctttac

SEQ ID NO: 173964 - DNA, 332 bp, Glycine max
  unsure (1)..(332): unsure at all n locations
ggatccttaagtcacctgcggcatcaagctgagtgcgcatgggagaattanatatctattaagtgacgtttaataaataaattattaggacctttagattagatccaacggttagtattagatcctctcatctctcatataaaactttttctcactggcctatatatgttataactaggtgggcgtagtggtactatagtacttccattggcaaatttacctaagggggcttattttaaaaactatttacggattgtggtctgttttaaaagaaatgacggagggggtctgttattgggtggaagccgccattgccattggcggaaggctga

SEQ ID NO: 173965 - DNA, 438 bp, Glycine max
gttattttcagcaaatgaagatgaatccgtggccaccttatggactcctctaatgacaatagcatcatttctggcactgaattgttgggagttggaagccatcttctcaatcaaatttctggcctcagcaggggtcatatcaccaagagctccaccactggcagcatcaattatactcctctccatattgctaagtccttcatagaaatattgaagaaggagtttctcacaaatctggtggtgaggacagcttgcacacaatttcttgaatctttcccagtactcatacaagctctctccactaagttgcctgatgcttgaaatgtcttttttgatggaagtggtcctacatgcaggaaagaatttctccaagaacaccctcttaaggtcatcccaactggagatggatctgggagcaaggtaatactgccaatcttt

SEQ ID NO: 173966 - DNA, 390 bp, Glycine max
tgcagcagtaatgatggcccgagttatgttggggaacagttacaaacccagaatgggtttatgcaaagacaatggcggcataactagcctgataaatgccaaaggaaatcgtgggaagtatgggttaggctataagcccactcaggtagatataaagggaaacatcgtgggaaggaagagcggtagtcaaagctcgcggttgagacaagaaggtgaatgaagcccgccctgccacataagtaggagctttataagcgcgggtctgggggacgaaggtcaagtggtcgcgatatacgaagatggtgttccgagtacattggatttggtacgaccatgcgctcctgatttccagctgggaaaatggcgagtggaggaacgccccagcattta

SEQ ID NO: 173967 - DNA, 486 bp, Glycine max
  unsure (1)..(486): unsure at all n locations
tacggacactatgaaactaagctttaattccaatagagcttcttaatctgtattgaatatgttattgatttctcctcaattccaaaatgtttgaatccctatccaaatagttctgccatggggccgagacatgcatctatgttataaaataactcctaatcacaagtagttaaagcaaagtttgccacttcaaaatgacacccatttgaaagaagggaaaagtgttaaggaaaaaataaacaaaccaagaaaacaattatctatataagcaaaagtgacagagattaattaatcctgaaaattaagatatttctccatgttcacatgtatcttattctatggcataaactaaagtaactattctgttatgattcatgctccgctaagtaaactttanaagcatcttatctattttaaattcaaattcaacaacacaagctaacttgaatttaaatggaggcaacataagctggtaaaaacttaagt

SEQ ID NO: 173968 - DNA, 350 bp, Glycine max
atgggttggatgttgagttcatgttgtccctggagcggagatgatgggacagatggtgaaccaaaagctgcaggttcttttgatgaggtagccatggaaaagcagagcgtttggactgatttcgtaaatctcagaaaactattgggaaatgctgatgaaaacacgactgtcaagcagatatatatttgaatgaggaatgtagagggccgtgtgaagcaacggtcgaattttccttggttcagtagtgaacgtgctattaatgctaagtgattcgtttgggcacgttcagattgctgtagttgctataattgctctagcacacaaatgcccagctcgcccctcagtttttc

SEQ ID NO: 173969 - DNA, 407 bp, Glycine max
gacactatgaaactaagcttgagggttaaagtctcacgatcgtcacgtgctcatgctacaattgtttatcgtggctatacgagacatcttgccaaacaaagtcaggttagccataactcgcctgtgctttttcttacatgctatatgtaacaaagtcattgatcctgtcaagtttgatgagttggaaaatgacgctgcaattatactgcgccatttggagatgtatttccctctgctttctttgacatcatgattcacttgattatgcatctagtcagagaaatcaaatgttgtggtcctgtttatctaccgtggatctacccggttgagcgatacatgaagatcttaaaagggtatacaaagaatctctatcgtccaaaagcatctattgttgagaggacattgca

SEQ ID NO: 173970 - DNA, 435 bp, Glycine max
  unsure (1)..(435): unsure at all n locations
atgtgagaaagcgtggaagagtcagtctttctacnttttgttggtgaccacagagtggtacctggagatatgtcgcaagggtcaagataccttggtgacgtcaggtggggtgctattgcccaaaaccaagcttggccaatcccgacccaacccgggcatagtcagtcagtgagaacctgtgacgtacctaagcaggcgagatcctggcagtcaaccaataaaagaacaaagtccatgaagcgaggaggcttgtgtggcggctggccagctatgtatcttgggtggtatctgaaaattaggctctggtaatcgattacaaattgtgtgtaatcgattacagggcttaaaaatggagacaggatgttgagtggctactggtaatcgattaccaattgtgtgtaatcgattacacagtatgatagggcacctgtaatc

SEQ ID NO: 173971 - DNA, 423 bp, Glycine max
  unsure (1)..(423): unsure at all n locations
cattctaatagcttcttgtctagctacaagagcataagtntcttcataatctgttccttcctcttggttatatcctttaaccactaatctagccttatttctaatgactattccatgttcatccaatttatntctaaatacccatttagttccaataattggatgatcattaggtctatcaactaattcctatacttgatttctttcaaattgatttaattcttcttgcatagcaataatccaatgttcatcaattatggcttcatttatgtttttaggttcaattaaagagacaaaattcatgttattgcatgcatctntaagagagtgtcgagttgttatcccttttgagatgtcacctatgatattatcaagagggtgtaccctgaagttctccactccgttggaagatcacatttattt

SEQ ID NO: 173972 - DNA, 438 bp, Glycine max
  unsure (1)..(438): unsure at all n locations
tctcccacaattntctataaataaggggagaagtgaagtttattttggttcagccccttatgcacttctctctctttcaaatttgcttaagaaaattgtttccgtgcagaatatccatgccgaggcgcttccgtaacgttttcgtgagtgatttcgcgaaggttttcgaccgttcttcgacattcttcattcgttcttcatcgttcttcaatcttcaacgggtaagtacctcataccaaacttttcaattcattctatgtactcgtggtggtccacatttggtttcatgtatctttattctcgttttcatttactttttatacccccttttgacgtgcttaagccatttatttaagtcatttctcgcttaatctaaaaataaaataaatttccaccgatcgtttgaattgtaatacccgttagtttcgattaaaatga

SEQ ID NO: 173973 - DNA, 338 bp, Glycine max
  unsure (1)..(338): unsure at all n locations
tgaatgatgtgttaggtagataagagcatgaaattagtgcctctaaagaagtatgaactttgaagtttaatgctcaaatgataaaagttaaaaaagatgcacacacataagagcccnccaaggaatttgtcattcatagtgatcatcaatcacttaagtacattagagggcaaagcaagttaaacaaaaggcatgcaaaatgggtagagtacctatagcaatttccatattttatcaaatacagaaaaggaaaaacaaatgtggtagatgatgctctttctaggagacacacattgttntgctccctaggaagctaaattttaggacttgaaaacatt

SEQ ID NO: 173974 - DNA, 430 bp, Glycine max
acatatccttacactcactttctacactatttcaccttctctcttattcgagcttatactcgactttacttttactacactagctctttttcttgggtaactcactccactttccttactcgaacttatctcttaaatactacccttgctttagtctatgattgaaaacaatacaaacattctaacctatggtcacatagtgtcattctagatagaccttcatgcctttaaaaagtcacttctcatccattccaagtcatcacaatagtttcccatcccaatatatatcataactaatgagggaaccatccacccattacacaagtacaacctatggcattcatggcatccacatcatccatcacacaagtcagactaactcacaataatgcaatatgcaatgcaatgttcttttgtcttttcgtgtgca

SEQ ID NO: 173975 - DNA, 419 bp, Glycine max
  unsure (1)..(419): unsure at all n locations
ggatccttgagtcacctgctgcatgcaagcttgagatgaggaagtgttgaatgtgttttcttcctgcttntattgatgaccacagagtggtacctggagatatgtcgcgggggtcaggagaccttgnggacgtcaggtggggtgctattgcccaaaaccaagcttgaccaatcccgacccaacccgggcatagtcggtcagtgagaacctgtgatgtacctaagcaggcgagctcctggcagtcaacagatgtaaggaacaaacaccacaacgcaaggaggcttggggtggctggccagctgtgaaacttgattgatatgtgagatatggtctctggtaatcgattaccaaaggtggtgaatcgattacaaagcttaaaaatgaagacaggagggtaatatgggctctggtaatccatt

SEQ ID NO: 173976 - DNA, 445 bp, Glycine max
  unsure (1)..(445): unsure at all n locations
tgatatgangaagtgtggacgggcgaaactttctgcttttattgctgaccacagagtgggacctggagatatgtcgcgggggtcacgataccttggggacgcctggtggtgtgctattgcccaaaaccatatcttgaccaatcccgacccaacccgggcatattcggtcaatgagaacctgtgatgtacctaagcaggcgagctcctggcagtcaacagataaaaggaaaacactaccacatcgcaatgacgcttgtggtggctggccagctgtgaattttgtgtaatatgtggatggcggcctctggtaatcgattacaaggcttataattgacgacaggacgctaatatggtctctggtaatcgattaccaacgggtgtaatctattaccacgcttgataacgatagcaagacacttatggagcctctggtaatcgattacca

SEQ ID NO: 173977 - DNA, 392 bp, Glycine max
agcttagctacacacacctctctaatagctaatttcacctccttgagatgagaagctagagcttagctacacaccccctataatagctaagctcacccccatgacaaataacatgaaaatacaaaaaaaaaggtcttactacaaagactactcaaaatgccccgaaatacaaggctaaaaccctatactactaaaatggccaaaatacaaggcccaaacgaaggaaaaacctattctaatatttacaaagaagagtggattcaaccttgacccatgggctcaaaaatctaccctaaggttcatgagaaccctatggccttctttagtagctctagtccaagcctcttggcgtcttctatccaatacccttggggggtaggattgcatcatcc

SEQ ID NO: 173978 - DNA, 456 bp, Glycine max
  unsure (1)..(456): unsure at all n locations
ggttaagataaattatattgagcttgagatttaatgattatgaaatttatccttcatcaaggctctgtaacaaaagggggaataaccatgctgctatgatatcacctaatgcggtgtcctggactgctatgatatcaggcagttgtgaaaatgagaactacatggatgccctacagtttttcatccaaatgcaagaagaaaatgtaagaccaaactctactaccatttgcacacttctcctggcatgtgcaggcctgtcactattaaagataggagaagagatacactgctcttctatctggctgcaagaattcaggtttagttatggatgggtggaagtacttcgacaacatcaagatagattacaatattaatgcaacaattgagcactactcttgcatggtagatcttctcgganaagctgggtttcttgatgaagctttggatttcattccc

SEQ ID NO: 173979 - DNA, 382 bp, Glycine max
  unsure (1)..(382): unsure at all n locations
agcttgactnttataacctaaagcatcatatattataagagtttaacaagtttattacatataaataaatgataaatattaaccagggttnttaagatattgactataaaattaaaaaaattattaaaatacacaaaattatattatgctttgacttttttaaagttttttattcacaataaaaacttttttctttttaattccttaatcaatgccaactctaaatcaattaatacaagtctcattaatgttactagaggatggataaggagaaggcaatacaaggccgcccattcgcatgtatgaagaaggggtaggcttgtgttctaagttctatagggtaatctgccacacacccaattctaggtncagctcctgttga

SEQ ID NO: 173980 - DNA, 451 bp, Glycine max
  unsure (1)..(451): unsure at all n locations
gtataaataaaatgctgccaatgtgaacaatatttacttgtcttagaagaaaattagtacaataaaataagaaagtaaaataagtcagtttatgtaataaattaaaattaacttaaatatctcttaacttctataaaaaaaatatcctcattcaacttctctataagaatccataaacttataaattttttaaatttagaaatcaaataaatttctcaatgtaaattcttataaagcaagaaactgatctaaactaaaccataaatgcttttcttataagtcgttgaataacatttggaaaaaaaataatccaaaggattgacatattggtgcaaggtctcctatatttgatcaatgacacttacgcatcgtgagtganattagttttcaacttaatggatgtgaagacttttgtgatttatgacctatgaataaaaaccatatatcacat

SEQ ID NO: 173981 - DNA, 428 bp, Glycine max
  unsure (1)..(428): unsure at all n locations
acctgcggcatgcagcttcttttaagctgaaccatnttatttattaaagcaagttgagttttattcagaaaaattagagtttatctcttttatcttagggagagtgattcccctatgttcttgagtgattcaagaacaccttggctatatcaaaggtctttcacatcctttgtgtgttgcccttgctggaaagagtgattctttccttccaccatttcatcttcaaccttgttctttcaaaccacaatttccagaacatccaatttttcccagaattatctcgtgaccataactctcattttactcgtttaagataagtgattctggagcctaaattgaaattcaaaacaaggcctttcacctcgttttggaatcacctcatttggtgccctatagcttaagttataaccatttctatattggtggat

SEQ ID NO: 173982 - DNA, 446 bp, Glycine max
tctcaccctttctgcaagcagtgtactgaatgataagatttgccatcaaatcaagcaaagatatcatagtccagttaagcatagatgctgcatgaaacatagaaaaggcatcaatatcaacgttgaaacattataattttggaaaatattaccaaaaagattaaatcataaccaaacatgttttgaatttacaaagaaataacactcattgtcatagtattcttgtaaagatatacgttgaaacaaatgcctcctaaagggtgattctgtttaactactacacaggtcaataaaaaatgtcataaaaaattaattaaaaaaatatttctaagaaacctcttttattatgaatgttattttttttaaaatacatatcaaacatgagaaattaaatttgtcaacctataattttgtaaaaataaaatgttgatctcctatcatacatg

SEQ ID NO: 173983 - DNA, 450 bp, Glycine max
  unsure (1)..(450): unsure at all n locations
agctngaaatggcattattttatgagtgatgaacaatgtccaagtatatctagaataatcatcaactatgacaagtgcataataacttccactaaaactcatgactctagatggaccaaacaaatccatatgtagtaattgtaaaggttgagtagttgaaacaatgtttttggattaaaatgatgctctagtttgttttcccttttaacatgcatcacatagtttatctttttcaaattttagccttggcaagccaacaaccaaatctttttgaaattaatttgtttaaatgttccatatttatgtgagcaatccttttgtgccatagccaaggatcattgtctttgctaagaaaacattgattatcatctgatttttgtttaaatctatcatgtaaacactgttttctctaaatcctatatgctctatgtccttatcatgttcatggat

SEQ ID NO: 173984 - DNA, 451 bp, Glycine max
ttctcccaattcctaaatgacatttcaagctagtattatctcactttaacctccatttaccacagaattcagacttagccttccaactctcaaagcctcactctttttccactcataacaccacattctcactttccaaccctaggttaactctatatttcatctctaacagttttccatgggcaatttcatcatacaaacatcacaaacatcatcacaaaacactaaaacagaatgggtatgtctaactcacccaaacatggcaatttcaacaagctttcaacaaaagtcttcacaaataatcatcacacagcagatacctagcaagactacccatcatatctccccaaaccctatacccacgataatcataggagaaagaagtccacccaaacctgatatttcgaagtcccactcgtatccacgcacttcacgactccaaaaatgccct

SEQ ID NO: 173985 - DNA, 388 bp, Glycine max
agcttaagataattcaaagctagttctgttcttcttaaaaccaagatttggaagcttcaaacaaatagtggagacccaaaattattcaaacttgaaaaaaagaggaaatagtggcagaaacgcacaaccaacaaagcacataagtcattgagaaacacactggaaaactacaacgacaaagaagcaatcggaaagtttttcgctgaaaaatgagtggcaagctgaaggcagttgatggaaaacacactgaaaaaggacggcggcaggactggtgaccataaatttctccgcaacaacgtaaaaaacgttaaaatgtcttgcacattgcccaaaatcacaaaccaaataatacctaagaacaggcacaaaacagaaccaaacatggtgc

SEQ ID NO: 173986 - DNA, 441 bp, Glycine max
tgtacccagtgtgcaacttacaaatattactggttaatttgctgttgagtatttatgaaacaccaccaatactgttaagtacacttctgaaatgttgatctatacgcttgataactaaataacacaaccacatatatatgttgtgcttttggaaagggtgaaaatgggaggaatattagatggaaacgagtgaaaattgacaatgaaccaaagcatgcatgcaccatttcctagatacactgtcaatttttactcattcctctctacttattcggtcttcatctctagtctctacgatatattaaaatatacatatatgtaaacattatgatggtgtatgctactaccacatgaaattactaagttcagaaggggtttgcgagtcttcaagttcatttgatggcgagtgcacgtgtctcccttcatatgtggttatcacca

SEQ ID NO: 173987 - DNA, 453 bp, Glycine max
  unsure (1)..(453): unsure at all n locations
agcttgtagaaacacacctcaattgtctttcttcaaatgcatatgaaagtaggctttcataagaagataatgaaacaagacagttctatttattaaattttcaaaatataagaataataatctattactagctagttgtaattggttattttattcttcgtggacctgggtttaagactttaaatgcatttacaattaattggacatgtaatcaattaaaacatgaacttgtatttcaataacaaacaaagctntatttgtaatcgattaaaacacgaccggttctagttttagattcaagccctagcttgtgtaactgatttacctggtaggtaatcaattacccacaacttatgtgtcttaattttcatattacaataagaacaatgtaatcaatgactacttattttcaatcgattacccatctgtaaatttgaaatactcttaattttc

SEQ ID NO: 173988 - DNA, 445 bp, Glycine max
  unsure (1)..(445): unsure at all n locations
tcatgatgatgaatcaagtatgattcaagtagttttgatgatgaanaaagcccacaagaatgatgtcaagattgagtcaacaagttcaagatcaagattaaagaaaagacatcaagaagaatcaagattcaagagaagatgaattcacaagattcaagagaagaaaccatgaagcaacatgtcaagacttcacaagggaagtattgaaaaagatttttcaaaaaccaaacatagcatagttttgttttacaagaagagttttctcaaatttttctaagttactagagtatttactctctggtattcgattaccagtttcctgtaatcgattaccagtggcaaagtttgatttcaaaaagttttaactaaatntgcaaagttccaaatgatttctaaatggtgtaatcgattacaatatattggtaatcgattaccagtgtatctg

SEQ ID NO: 173989 - DNA, 440 bp, Glycine max
tgatatagccctgctcattaattacatgcaaaggacaggttgacttggataaccagggaatgtcagcaggaccttttgactatgaagggaccatcaaagtggattcgtcgattgtgctgtgggagcccccaaatgaaagttgcatcggacagaatatctttatacatatactacatgttcatcagatttatgaccacactatagttctttgtgtctatatatattaccgtaccttctttaatatctcacttttttttttttcacgcggggtttgatatttcgttgatttatgatagattttgtgagaaactgaaaaactaattttatcaatgattgaaatgaaaatggtaagttacaatgatcaatgtcagcgcgctgtattatgtagtgactaacaaaaaactaactctaacgggtactaactaactatgagtagtaaa

SEQ ID NO: 173990 - DNA, 307 bp, Glycine max
ttgcatgtctagtgattctagagagagaaaggaccatgttctacttttttctgacagacctagttgtgtgatgatctacaaataccacatccctgttacgaatccgtttcgagagcttcagatgaatttgtgagaggtcgtgagatcctataggtgatggtgacattctcaccactcgaacgcatgcaatctgtcatcctgtccttctatcattttaaaagacgcttctgggttatggtatactaaaatcgctcgtttgatctacctctgagcgacttaatggtcatatgttctctatctattccat

SEQ ID NO: 173991 - DNA, 202 bp, Glycine max
atagtagacaaagaaacatatagaaaacaaccgaggataccttgccagttcccggaacaccatgaatggaaaggcaacgccccagacattgattgtcagaaagagcaccattgatgaatgcagctatctcctccatttctctaaataaaagcatgtgttgattatgaaacttcagagagatatacaaaatatttaaaatcat

SEQ ID NO: 173992 - DNA, 445 bp, Glycine max
ttcctacattgaaacctttcaacatgcaatttttaatgttatataaatagaaaagaaagcaccgctggtgcatgtaaaataaaatgtttcttgaattgtaacctcctcaatagcccaatataatgttcatttaattgttaccagtatataaaatcattattctaaatacgacttttaattgattggtaacatttatatatttttaacaatcattaaggctaccaaaaaatgaagagatgataggagaatgtttaaaacatctacatctctaaataaacaatgaacttacaaaggagaagaaaaatgtttttatattgttaatatagtaacctgaatctctggtttcaactatacttatatctcgaagagaccatgatgtcaaatctcccccgttgcatatacagttgaaaaatatcgtaaatcatttggtgcaaaaattgaacat

SEQ ID NO: 173993 - DNA, 259 bp, Glycine max
  unsure (1)..(259): unsure at all n locations
tggatgagacntacatgaacggctcatatccaaaagcagcaatgcatcgctcataactcccatcccaaagatcaaagaccctcaatcccttaatgactatagacccatatctctcatatgaagtgcctataaaactgcggccaaaattctggctaaaaagttggccctcgggctgcctcatcttattgatgaaaggcaaacaaccgttatgaaggggaagcacactctccatggtgcatcgaacgccaatgaagtaata

SEQ ID NO: 173994 - DNA, 436 bp, Glycine max
ttatgacgatgaatcatgttgattcttgtagtttggatgatgaccttttagctccaaagaatgattccaagattgagtctacaagtgtcaagatcaagattaatgtcaaggttcatgagaagaaatcatgatgatgcatgattctagagaggatgaattcaagattcaagagaagatatcgagaagacttgccacaggacagtttgaaaatatttttcaaaaaatttacatatcacacttttgttttacaagataaagtttttccaaatgtttctatgttaccatagtttttactctctggtaatcgattatcagtggcatagcttgatttcaaaagattttaactaattttgcaacggtccaattgatttttaaatggtggaatcgactacattatattggtaatcgaataccagtgtttctgatgttgatattc

SEQ ID NO: 173995 - DNA, 331 bp, Glycine max
  unsure (1)..(331): unsure at all n locations
cattggaggaccttttgagggcgtgtgtcttacagcataaaggaaactgaaaaactgccttccattgatagagttcacttataacaacaggtttcactctacgattggcatggatccttatgaagctttgtatggtagaaggtgcaggacacccctatgttggntagagcccagagaaagccttaccttatgactagaagtggtacaacaaaccactgattaagttaagcttatccgagaaaggatgacaactgcccacagtacgcanataagttatcatgataagaagaggaaagatctggaatttgaggttggtgatcatgcattcctg

SEQ ID NO: 173996 - DNA, 456 bp, Glycine max
gctttgagccaatatcctaactcaccatataccttgacccattgtgagtatgtcaatccttaccctcggtagctaaataatagagtaggaaaatttccaatctaagaaaaaaaaagagaaggaaaatttccaatctaaaagaaaaaagaaagagagaaggaaaatttccaatcaaaggaaaaaagagaggaaaggaaattcccaatcaaagagtgggagaaagcgaaaagaaaagaaaggaaattcccaaccaaagaatgggagaaaggaagaagaagaaggaaagaaagctcctgttcaaggatcaaaagataacagatgaaatgtgcataaaggtctttggaccggacaatatctgaacaatacagagttgccacttaatgaacgataagaatgaaaggaaaccatgacctatagtggtcttctccctttaattgccaaccaaaatcttgtgtg

SEQ ID NO: 173997 - DNA, 411 bp, Glycine max
agcttgaaggtaaactatatgccttggttaacctggtaacccaactagccatgaatcaaaaatctgcacctgtagccagactctgtggtttatgctcctctgccgaccaccacacagacctttgcccttctgtgcaacaatctgaaacaattgaacagcctgaagcttatgctgcaaacatatataatagacctcctcaacctcagtagcaaaatcagccacaacagaacaattagaaaagtagaggtaaacatacctctgctggatgcaataaagcaaattccaagatatgctaaattcttgaaggagttgtgcactaataaacagaagcttaaaggaagtgaaagaattagtatgggcagaaatgtctccgcattgattggtaaatctgctccccacatccctgaaaat

SEQ ID NO: 173998 - DNA, 406 bp, Glycine max
acaccatagaaatactcaaactttgatgcaatcattggagatgttaatgaaacaacaagatgttgctctctatgagagattggatcaaacggagaatagagatcataatgaagaagaatggagaagaagatggattgatggtgttcctagacaaaaccgaattgatggtattaaactcaacattcctccctttaaaggaaagaatgatccggaggcctacttggagtgggagatgaaaatagagcatgttttctcatgcaacaactattaagaggacgaaaaggtgaatcatgccgccactgatttttccgactatgctcttgtgtggtggaacaagctactaaaggagagatcaagatatgaagagccaagggttgatacatgggcggagatgaataggatcatg

SEQ ID NO: 173999 - DNA, 378 bp, Glycine max
  unsure (1)..(378): unsure at all n locations
agctnatgctcactcagtggaggactatttgttccaattngtggccgagttggataagtggcctcaataacttaagagatggcgaattaagnttcaaaattatcccactaacaaacttaaatccccttttaaatgatagacttacaatgcaaaagaagagaaggaagaagaagaagcaatcaatttaacagtttttctaaatgcccaagacaaatgaaactgtagttaaataactgagataaggaaacagagaaatgcaaacttgacttatactggttcggccacttctcggcctacgccaatcctcaagcacccacttaagtatttactaactttgaaaaaaaaaaaattttcttctaacaccaatgatcctttccc

SEQ ID NO: 174000 - DNA, 406 bp, Glycine max
caaagcttaaatgttatgagagcattcacatattcccggttttcttactatcatgatttccttgctacatccctcttttctttgattaccctactaacatcacacaataatctattagacacaattgcttcatgtttctatttctcattcaatgtttttttacaatggcataacaatgacattgtgccactttttacagtttacattgactgtgtgatgctattacaatccctgtacatagatagctccaatcactcccccaaatttgaaccaaatatcttttctaggacaatgttttcctacaacctacgacaaggtgtgcaaggcaatcatgtcattcaggtacggttaaaacataaatcaagtatgttatgctcacagaggtgcaaggtgttccttcacttat

SEQ ID NO: 174001 - DNA, 304 bp, Glycine max
  unsure (1)..(304): unsure at all n locations
caattctactggaagttcacaatcttgttctttctttgtccaacaggcatatntgttcaaactcatgaaaagaaacacaaacttcatcctaatcatgcattcaatctaaaataaaagcatacaactggtagtcggtgaaaacgactaacttttgtgtataaaacttgtgtatattgtatcaaacttctccaatntataggtggtttataatattataagtattttatattaaatataggtaatagataatttatacttttgttttgtgtgttaataatcaatatctctcaatttcaggttaatt

SEQ ID NO: 174002 - DNA, 452 bp, Glycine max
tcagagaaacagagcttcaagtcgaatcttcaaaattgttgcatcattgcaacagcagatagcgcttgatggtgaagacatagacgccatcacgactgactggccatgagctttgtgcacacacaactatttccaacatagatctggtttttgcatacacactttaccaaagaaccaactttgatgttgagaggaagtgaggtcgtgtgcgcttctcaaagtgtgagagggtgcgagagagaaaggaagtcaagcatgagagttaggccttaacagagtggcaaaggtagcatagcggtggcagccaaagtgagaggacacgagagtgaaaaaggaaaactcgtctcattcaaagatggtttttgaaaactaatgttgaattcttccctttcaaagattattttttgaaaactgatgttaaactcatgactgtgacatcggtgcatgaagaa

SEQ ID NO: 174003 - DNA, 363 bp, Glycine max
agcttcatattacacgggtgtgttcttattccatactctgcccaccttgaagatctgagagagatctagaaaggtcaccatatgaagaaacatgcactgtatttgtgttgcctccatcatacacggtctatattattattatcacatatcgccacattggataatgattcagacttctctttaagtgctttgatttctcttcactggtacacggctttaacaaatgttgtacagcaacaagtcctagagtattagaaaattgtttactttcaaccataggacaaacctccttctcttatctgggtaatggcagtgttccatttctgtttcctccaagtcacagtgcttattattgtcagtgag

SEQ ID NO: 174004 - DNA, 431 bp, Glycine max
  unsure (1)..(431): unsure at all n locations
atggtatttactaattaaactaattattttgttctttgttngacaaacaaggtgtaccataggttgatatagttcagttctttgattatatctttcaattctttatttttaataactgtatactttccaatctttatttatcatgtgatataggttcttttcgggaagtgaaaggcccgattggttccagaacattttggcaacaactttgctcggaatagttttgtgaacagggtatattataaagcagtcacatatataggagagaggctctatacataaaactctgtatgtgattgttgctactgtgcaatgtcatcaacatgtttaaataaattgaaacggtggagatgatgctagagatagctgttgacagatatttacgattcgaaatatgggtgcgatgcactgattcttgatatgtttagaac

SEQ ID NO: 174005 - DNA, 118 bp, Glycine max
acactataaaactaagcttgctgcgcgaagtcacgtctacagatccactgttctctttctagattgcccctatatgaatcagatgagatatcaatggccagtggttgcacgacgcaaa

SEQ ID NO: 174006 - DNA, 412 bp, Glycine max
  unsure (1)..(412): unsure at all n locations
agctngcttctacactngtatgatatgtttataagtatttgattgatttctcatgttttttcaaaaccattatattatataaaattatttttgatatattaaaactttctatgttcatctgggtaagtgttgatttttttgttgttttagaagtgtctggtaatcgattaccttctcatgtaatcgattacaggcagttaggctaagtgtaatcgattacaacattcctgtaatcaattacagagcatctatgtctataaatttgaaatttcagaaactgcgagaacgttatttctgcagcaactcgaccccanaatccctaatacttcaatactcgttttctccctataatctcaaccaaatcatgtgccacaaagcccaaaaatcatcatntttcattctctttcatctc

SEQ ID NO: 174007 - DNA, 445 bp, Glycine max
  unsure (1)..(445): unsure at all n locations
tgttatgaaaatcttcttatgtatgcattntgatatttctcattntgagcgtagaaagatctaatgcagatgcattatatgagaaaacaaaatagcaaaatgtaaaaggaagggaaaagaagattaacacatggatttttatactggttctccccaaccttgggttatgtaacaccccgagtgaatcacacatgaatgagaatgatccagaggctatgtaggaggtatgggattgtatagttgagaatgacttaaaggaattaattggtactactaatactaacaagatgcatctactttttggtagcctatcacttaagaactccatagttaaacatgcttggcttggagtagttctgggatgggtgaccttctgaaagttttcccgaaagcgtatgagtgaggataaagcgcactaaaaaatattggattggtttggggggac

SEQ ID NO: 174008 - DNA, 351 bp, Glycine max
  unsure (1)..(351): unsure at all n locations
agcttttccaaagtggtcttctgcattacatttaaactcgatccattgtcgataagtacctttgcgacaacatggtccatacatctcaccgacacatgtagagccttgttgtgtcctctcccctcaacgggaatctcttcttccgcaaacgcgatgtagttgttggtggttatatgattaacgatgccttcgaaaccctccactgagatatcatgtgctacatgggcatcgttaaggaccttcatcaacagcgcacgatgaggctcggagtttatgagtagttcaagcaaggagatccttgctggagttntattcaattgctcgactaccttaaactcgctttggtggatg

SEQ ID NO: 174009 - DNA, 441 bp, Glycine max
tgttgagaaatcttctcatagaagccacgaggaagcttctggaggaagccacttaatgaagcttctagagaaagctacatggagctgcctcggtaaaaacgatgcccatcgtttgttaaccgttggatcttcgcaaaatttggtttgcaactccacaagacacgtttccattatcttaccgttgggatctttgagaagatatctggagtgtgctataagtatcataaagaagcttctggaggaagcctcttaatgaagcttctagagaaaactacatgaagctgcctcggtagaaacgctgccccgccttcgttaaccgttggatcttctcgaaatttggttttcaacttcacaagacaatttaccatgccttaaccgttgggatctttgagaaaatatttggagtgtgctataagcttccgttctcgagagcatctctta

SEQ ID NO: 174010 - DNA, 427 bp, Glycine max
  unsure (1)..(427): unsure at all n locations
gctatattgtaggggttcttttgttatgtctatctaaacaccctagttggggatttctaatgaacaactgatgtaaatacctaatatctaattgattatgttttttgtgttcaatgcttccttcaatgcttaatgtttgtatgcttttggtctgatcatccatntgtgtgcatatttagatgactttagcattgggaaatgtactgttgccttataacttgattgaagtaggattgaaatttacttttacaagagggatctgcggattaagttttggttttaattatgtngttacaataatgttgtttagtctaggcctaatcttacaagagggatctgcggacgaagcttaggctaaattaggctaaactctcgtaagctgcttgatctaagtctagtcttacaagaaggatctgcaaacaaactc

SEQ ID NO: 174011 - DNA, 466 bp, Glycine max
ggacacttaaaactaagcttatgatatggttgagtatatttatttattgtgtgttgtgtaacatttttcacatctgaagttgcattgaggttgtcctcaccacatatgtgttaggaaaacatgctgaaattaaagagatggggtccaagagatacaaatgcaagaataaccgctagactgattagtaaccctgttgacattcctatcaaagggagaaaattatcaatggatgctagaattgaaaatttccatgttggaagtgttgaacaagtggccttaataacttaagaggggggtgaattaagtttaaaactttctcgattaattgacttctaattcccttttaaatctatatgttaagaatattgaagatgaagatgaaaactatatcaataaaaatcttcaaagtgtagaacaaagaactttgatttggtgtttgatgatgcatatgatcatgatgtttgat

SEQ ID NO: 174012 - DNA, 390 bp, Glycine max
  unsure (1)..(390): unsure at all n locations
caagctataccttgccatcgtctcaaatatttattcttattntggtcatgttaatataagngttccttttgttttggaccatccgaccattgagcataacaagcactcactcctttcaagtccttaaaaggctttggattgtccggctgagtaaattgactgattataataatgggtaagacaatcataataagacatttgggcttctaaccttagacttgaaaacattcttcaacatagagtgatttggtcttgaacatttgactcaattatatccaatatataagggtgatcttacttgaccgtcttaaattcacatccactctataatnttattaagaattctagaacttttgactttagatcttttgaaatacaaatgtgaacact

SEQ ID NO: 174013 - DNA, 431 bp, Glycine max
tatcacatcattgagttcccatgtgagttgtcactcttttctgcttataaatgattttcataggccaaataaatctaactcactgattaaatatgatgtttgagtgttaatattttattttaatggataaaaaaaattgattttaataacaaattttaaatatttttttttaaaataaagcacttatcttttgttcaaaactggatagatgggggttactccatgaattaacaagatatttttcacgtattcaaataagttaacattgtccaaaacgtaccttgtgtaaatactattagataatccaatttagatttcttagatttgagtcattaaacaggatatgttgaaattgttatagatagagcgagctactactgtttagtaaatgcatatgcaaaatgtgtatgaatcggataggatgaattcca

SEQ ID NO: 174014 - DNA, 368 bp, Glycine max
tcgggcgatggtgcacaacaagttttccacatccacgaatcgcgcataaacccaccatcccctgttgcccacctccaactgagctcacgtactcccacgtagcccatatcctcgtttctttcaacaccgggtccccatcaatcctgccaagcttccccaacatccaagttattcaacattcaaacagaacaaactatcacagccaagaaaacagggcaaaggcagaaaactctgtccatagcaccaaccagaatcacaacttttctcacttaaagacccctgtaacaattcctttgttccagttcgttaaccggtggatcgactcgaaaattttactggagtctctagtacatagcctacttttgacc

SEQ ID NO: 174015 - DNA, 447 bp, Glycine max
ctcaagcttgaaaaataatatcttgatttctaaaatacccatttttctttcttcctttggcaacatctaaaaggccaaagtgcttaaaacatgaataatttaaaacatacacaaagcataatttgtaaaacaaacataaatgattctaaaacatacataaatcataattttaataaaaccaaattgaaatgcaaaccacttattcatatatcacaaaccatatacatcatgttcagtcatactaagcaaatattaaaagaaatactaagtgttcaaatgtcataataataaagccaaatacacagctagaaatcaaaatactaataataatagtaatgtctaaactgatggtggtggtggaggtaaatcaaggtagtcgcgaatgatagtgacattgtcttcaacctttgtaatccttgagttcatctcctcaaattgcgtgctcac

SEQ ID NO: 174016 - DNA, 455 bp, Glycine max
  unsure (1)..(455): unsure at all n locations
gtattcatgttggttatgttgctctctctatctctaacaccttgcacagagtccactcatacaaagataaattacattccgactcaatgcacaatacaattcttgcacaaatgaaaatctagcttagaaaatntctatataaaaacacataactactaaaattaaattcatacatgcatagatggcacaacacagagtttcctctgtcagtntgagttgtaattttttagggtgttacaactctaacttattttaattattccacatcatataattagacactgtaattagtcaccaaatagttcaactaaaattctatttttgaactagttatatagtaatttatgaaaatacccaccactttaaactcttatgacttaattaccctttttctaatttatggaatctaatcaccattaatcaccctgactatctcatttaattcttaacttacg

SEQ ID NO: 174017 - DNA, 419 bp, Glycine max
  unsure (1)..(419): unsure at all n locations
taggttagaataganactctttaatacaactttctttcttccatttatttttctgttatttcagtatgataaaatcatatttaaatttttaaacaattatcagatttaggtttaaaatgattataatttcttgaatcacttccacacattatggcttctgcattggtctcgaatctggagtatctaatattggaggagacaataaataaaagagatttactaaaagttgtaacaaaatgtgtgagaaataataattagaaaactaaagtcttagaagataaaaggttgtgagtttactgtacatcaagggatattattcttgttgaagggttatttttccttctaatgtagccgctacgtattttacttgagaatttatatgatgtttatttgttactctaccacagatatataaccat

SEQ ID NO: 174018 - DNA, 406 bp, Glycine max
  unsure (1)..(406): unsure at all n locations
tgaccgcgaccttaagtcacctgcggcatgcaagcttccgtggcgaaacaggtggtggagtcctagaaacggccccggaagagagggcgaaagccggctaacggaagagaggaaccactaaatcatgtggaagccgagagacagaggaaagaaaagctgaaccaaagattctatgctctacgagctgtagttccaaatgtatccaaaatggacaaggcatcgctgttgggggacgccatattgtacattaacgagttgaaatcgaagctcaacgtgctggattcagagaaaacggaattggagaagcaattggattcaaccaagaaggaactcgagctcgcaactaaaaacccttcttcaccggcaccgtcgncaccaccaccaggaccggcttcatctaatagcg

SEQ ID NO: 174019 - DNA, 443 bp, Glycine max
ggacacagagataaggttgaaagtaaatgaaggtatgttaagatcttcaagcaacgttatggatgtggaaagatacaccactctcgagtgagtggcataaacatggtgaccatttggcatcttcaccatgattggactgatacgattctaagagtgaaggttgtttaatgagcatgttacatggtttgtagctcctgaatctaatatctatgaggtagatgtttcagttatggaggatgatgaaatacctgcgtttggattcgtatcagtggagcatgaaaaaatggaggcaacctgtttgttctatgattggatgaaagctgtgttcccaaaagatggctgttggattaaagccagtactgctttgtactgctcgggagaaaatcgaatcatgtcttgagactcatggtgctgaagttgatcatctgtggctttactataca

SEQ ID NO: 174020 - DNA, 404 bp, Glycine max
  unsure (1)..(404): unsure at all n locations
agcttctntgagaaaacttccttgtgaatcttgagcttanctacacacacccctctcataactaagctcacctccttgagaagcttccttaagaagattcctaaagaagctagagcttagctacacatacctctctaatagctaagctcacctccttgagatgagaagctagagcttagctacacaccccctattataactaagctcacccccatgacaaaaaaaacatgaaaataacaaaaaaaagtcattattacaaagaaaactcaaaatgccccgaaatacaaggctaaaaccctatactactagaatggccaaaatacaaggcctagacgaaggaaaaacctattctaatattttcaaagataagcgggctcatacttagcccatggggctcgaatcta

SEQ ID NO: 174021 - DNA, 413 bp, Glycine max
tgagatgaggaagtgttgaagggtgaaactttctgcttttattgttgaccacagagtggtacctggagatatgtcgcgggggtcatgagaccttggggacgtcatgtggggtgctattgcccaaaaccaatcttgaccaatcccgacccaacccgggcatagtcggtcagtgagaacctgtgatgtacctaagcatgcgagctcctgacagtcaacagataataaggaataaataccacaaagcaaggaggcttgtggtggctggccagctgtgaattttgtgtgatatgtggattatggcctctggtaatcgattaccaagggtgggtaatcgattacaaggcttaaaaaagaagacaggaggttgagatggtctctggtaatcgattaccaagggggtgtaatcgattacc

SEQ ID NO: 174022 - DNA, 345 bp, Glycine max
tttatattagagtaccgataatgtgtctaccatcacgattatcgtcttcctttttgcacatgttcttgagttgcatcctatccggaaccatatcagaatagtactaatactgcctaacaaaggcaaccattaggtccttccaagtatggactcgggaaggttccaagtaagtgtaccaggtaacaactaccccagtaagactttcttggaagaaatgtatcaacaattcctcatcttttgcgtattcccccatcttctgacaatacatctttagatggttcttgggacaagtagtccccttgtacttgtcaaatccaacaccttgaacgtgggaggggtgatgat

SEQ ID NO: 174023 - DNA, 428 bp, Glycine max
ctggattacatttgggcacctattttgattttcccatgttgtctctacatacataaaacaaccccaccgtcccaattgtgcaaaatcatattcatatatcattggggcatttcatcgagcacttggtgggcgcacgtttagacataaattgcaagagaatgggagcaatgtggcatgccccattgcttcagaatacaacctatgcctaaggccttttcattcaaatcctcaattcaagaaaacaagcaccaaagcaaaccaaaactgccttacaaatataagcatgttctcataattcgaggcaccaaaagatgaagaaagcacatcaatggaaagtaaaaacatcaaagatggaacacttacttgttggagtgaattgaaataccaaatatgaaagcataatgcgatcaatatgcttatgggagcaa

SEQ ID NO: 174024 - DNA, 397 bp, Glycine max
  unsure (1)..(397): unsure at all n locations
agcttgcttctacaatctccnccttttttatgatgactaccctgaaatcaagaaacacatacacaatatattgtaattgattacaccatntaaaaatcaattggaacattacaaattcagttaaaagcttttgaaatcaaacttttccactggttatcgattaccagagagtaaaaactctggtaacgtagaaaattttgagaaaaaatgttcttgtaaaacaaaactgtgctatgtgttggttctgaaaaaaaatcatttcaatacttcccttagtgaaatcatcttctcttgaatcttgattcttcttgatgtcatttcttgaatcttgaaattaatcttgatttaatattgattctgaacttggtgactcaatcttgaaatcattctcttgggc

SEQ ID NO: 174025 - DNA, 449 bp, Glycine max
tcccctcccttataaaaaaatacgaaagatgtggaagtctttggaccaaacaactaatttaaatagaatatgatagttattaaaatgtattatattatgatcgaccaccaaacgagttcttagggatgatgttggtaacatttctcacaagacttttaactcgttattcatttaattcaaatgttaaattacttaaaccctaattaaatcaaatcatattcgaacccaaaaaaatgaccagttcatgctatcggtttaatttgatttagtaaaacatttttttaaaggatttttagtataaacattaatcctaaccaaacataaatgtttaacaactaaagctgtccatatatatgagtaacctagcaactcctttaaagcacgagagatgatgaaaacagccaactatcatttacatgatgtgagaatagaccaactactgtatctcg

SEQ ID NO: 174026 - DNA, 409 bp, Glycine max
atcttaaagcaagttcctttataaaatgttctttgtgattgaaattaaaggaggaactctggtcttttcacctaaagaattagggattggaataccatttttgaactatgactaacattaacattaaatctcaagttaggtattacgcattagtgtaaggagagtttggttcaatgcaatccaatcttgacaatcactttgttatttgaaaactcccttgttttaagctttgtttttactaaaaaaccaccaaaaagtatttaattactttgccttgtttaattttaacttactcaaaataactaatgttcatgtttactgtttcttgtgaaattgaagataaataggactcgcgaaattggccaaattaacagtctttaagaacatactgggcttcaattatacttgc

SEQ ID NO: 174027 - DNA, 409 bp, Glycine max
tccaagattcaagatcaagattcaagaatctatagatgatttattcatgataagcatgaaaaagttgtttcgaaaactgagtatcacatgaatttttctcaaaacatgtttaccaaatagtttttactctctggtaatcgattaccagattgttgtaatcgattactattagcaaaatgtttttgaaaaagatttcaactgaatttacaatgttccaattgatttcaaaaagctgttatcgattacaatgtgttggtaatcgattacagtgtgcttgaacgttgaaattcaaattcatatgtgaagagtcacattctttcacaaaaaaagctttgtgtaatggattacacttatttgataatcgattaccagtgataggttctgaacaaatgaaaagatgtaactcttc

SEQ ID NO: 174028 - DNA, 425 bp, Glycine max
  unsure (1)..(425): unsure at all n locations
ctcttagtcacctgcggcatgcaagcttaatgaggtccttcatggtttttctcttctggagatgcacgggaagataaaggagatacggtgagaggaggcaccatctactagggaataagccatggaaggagaagcttcaccaccaagagagtgtcttggataagaagcttagagagggagcttcaatggaggaagagaatgacagagagaaagagagaaagtggcatggataattgaaggaagaaagggagagaagcttaactttgatgtatgtctcacaagactctcataaaggtaccacaagtgatacacatgnttctatttatagcctatgtagcttccttgagaagctagagcttacctacacatacncctctaataacttagctcacctccttgagaagctttctttagaatctaaaact

SEQ ID NO: 174029 - DNA, 405 bp, Glycine max
  unsure (1)..(405): unsure at all n locations
tgcttgtggggcttctatggaggctggatctttgagcttcattgaggtcctttaatggtgatttttcaccatggagatgcagcggaagacaaaggagaagatgtgagaggaggcgccatccactatggaataatccacggaagaatgagcttcaccaccaagatgaaccttggataagaagctcggaaggatgcttcaatggaggaaaagaaagaaggagagaaagagagaggggggagcacgaaattgaaggaataaaagaaggagagaagtgaaactttgaagtatgtctcacaagactctcattcatcatagttacaacaagtgttacacatgtttctatttatagactangtagcttccttgagaagatttttgagaaaacttacttgagaagcttctttg

SEQ ID NO: 174030 - DNA, 445 bp, Glycine max
  unsure (1)..(445): unsure at all n locations
agcttgtaggcctaggatcttcttatctatggattctttggcttcttggaagatgaatggcagcggaatggagaaggaagagagagagaagaccgcccttcaaagagaagatgaggttagaagaagctcatcaccataggaggccatggattatagcttggaggaagaaggagatgaatgaagggagaggaagagaaaaacacgaaattntgtgctctaaaagagctctaaaatctgaagtttaatattcacatgatcaaagttgaaaaaaatgcacacacatgacctctatttatagcctaagtgtcacactaatattggaggaaaatttgaatttcaattcaaatttcacttgaatttgtggagccaaactttgaggcccaatttcactaattatgattagtgaattcaggtatgattcncccacttatccaagatctattcc

SEQ ID NO: 174031 - DNA, 432 bp, Glycine max
atcctagtagaacaatcaatgtaaaaacttgattagtctcacacaaccactataaatgctactattactatcgaactacacctgtgagcccacttagaggttagggatgagtctatcacaattggggttagaatgaatatgtgtagagatctttataggatcaaattggggctcattttgggatgtttattgaatggtaattttccttttacgatcataaatgcaatattgttgcgtttgatataccaattgatgttctgatgcgaattggttgataaacttgaatgctattgatgttatcgtgtttttgacctatgatgctgattcattgattttattatgattgcgtggaattgtttgagggttcttactccccatgttatgagaagaatttcttataaattgttatattgacattatgacatcgcgatt

SEQ ID NO: 174032 - DNA, 408 bp, Glycine max
  unsure (1)..(408): unsure at all n locations
agcttgctctaaatntacattgatgtttgtatntatnggaggaggttgtatgccatttttgttttaagggtagcatttcttggtaaaactaactttccaaatgttttccttcgcaggaatggccccgaggaagcttgcctcaaagaggtccagaaggacaaggcggccgaagggactagttccgctcctaagtatgacagtcaccgctttaggagcgctgtacaccancagcgcttcgaggccatcaagggatggtcgtttctccgagagcgacgcgtccagctcatggacgacgagtatactgatttccatgatgaaatagggcgccggcggtggacatcactggttactcccatggcccaattcgatccanaaatattccttgagtttattccaatgcttgccaac

SEQ ID NO: 174033 - DNA, 448 bp, Glycine max
  unsure (1)..(448): unsure at all n locations
tccncaacatccaggtaatttaacatccaaatcatcacttactaacaaaccaagcaaaacagggcaaaggcagaaaactctgcccaaaactcaaaccaaaatcacagctttttctcacttaaagaccccagtgacatttccttcgttccaattcgttaaccgttggatcgactcgaaaatcttactggaagtctctcgtacataagcctacatttcaaccgttgggatctgctagcaaacctctagaactcattctacactactctttccacaaccagcaaaacatatcatttttctgcacttatgcaaaattctgctgcacaatttcacagcaaaattctgcataaagtgcagatttcgaaaaccacacttcccctcatccaatcttgcccaaatcaaatcctacaagtcccaattcatgtatcaatcatgtctaaaccaaagtcaa

SEQ ID NO: 174034 - DNA, 390 bp, Glycine max
  unsure (1)..(390): unsure at all n locations
gtgagaacctgcgacgtacctaagtaggcgagctcctggcagtcaatcaataaaagaacaaagtccacaaagcaaggaggcttgtgtggcggctggccanctatgtatcttgggtggtatatgaagattagcttctggtaatcaattaccattcgtgggtaatcgattacagggcttaaaaatggagacaggatgttaaatggcttcttgtaatcgattaccaatggtgtgtaatcgattacacagggcattagggcactagtaatcgattaccagttgtgtgtaatcgattacacagtgctacatgccactggtaatcgattaccatttaggtgtaatcgattacacagtgtaatttgtagatttcaatgagcaaaagctgagtaattc

SEQ ID NO: 174035 - DNA, 438 bp, Glycine max
tctagaaggagatcaacttgatgttctatgcttcttgattgtggctgtccatgaagaatctccttgggaaagacatctttaaattcctgcaataagggttgaacactaggagaaacataaatagttaactgattagaattatcactctctctctcttgtgtatcactcttttcctcgggtgtatcactcttctttttcatattcctttgtggtgcctcactattttctttctcttgttctctcttttctcccattctgatttggtcatcacacacttctctaggggatagaggtttaagagtaaatgaggaagatttggctattcgtctgtaaggcttttctttgttacggttcaacaaacgttgcatttgtgtagtccacgcgtccagatataagcgttgagattcgtccagttgatgatatacaccaccgttgtca

SEQ ID NO: 174036 - DNA, 428 bp, Glycine max
  unsure (1)..(428): unsure at all n locations
taatgaagntgnttcaaattcttatctttctcttctccttaattccattaaacatgaatccactcaaggacgatccttaaaaacattatgactcctatcgaggatcatatcaaacttggctgggttgcaacagtttagaaatttgctcacaattttgcattcctgctccaaacagcgtaaccagttgtgctgcttgaaggtgggagatgcagatggttgaaattatgtgtttgatatgcctgttaaacctaaagcactaactcttatttatgctaatcataatcctaactaattacctattctaacattctataagggccactctcaactgactaggcctaaccaacaaatcccatcctaacgcacatatgctcgtaatattaattgcttccaatccatcaacgattccttcccacccacttggatct

SEQ ID NO: 174037 - DNA, 457 bp, Glycine max
ctaagcttccaggctctgatccgcatcacttggatcccaatgtttttttctattcataagctataaataaagtgtacctgctgtatcaagatatgccaacatcacacattattgatataatttttttctaataattatttttatcttcagttaaaaaaaatacgagaccctttaaatattcctactcttgattttttaagttttagataatgctttttattcagtagttttagataaattctaactattaataaaaaaatatatattaaagtgtactacttaaaaaagtagtttactaatatttttcataagtagttaaatacattatcaaattaatgagaggatatgatttatggcaagaatattattaaacatgctggaattttctcttcttatattgcaattaattcaaaatgaaaagctaaaaatttgttactttgagaacatttttttatat

SEQ ID NO: 174038 - DNA, 476 bp, Glycine max
  unsure (1)..(476): unsure at all n locations
gcgatccctaagtcacctgcggcatgcangcttagccgaattcagattgaatngaattttatcttactcgcttgagactcacggcttagtgcatgaacacagatgtgcttagcgtgaggctngtgcttatcgaaatgactgttnttttccagaaaaatgttntctgagttaatcttcaatcctttttccaagaaattgaaacccttatgttaaacattcaaagataggctgtatactcctatgtacaaatcatatagcaagttccaaattactaattgcatgaaaaacaaacaaagattacagaaattaaaactgggttgcctcctaggaagcacttctttaacgtcattagctcgacgcatagcttaataccttcaaggtggcatgaaagtcacatagaacacatcttccttgaagcttcgccttttatctagaaattccatgaacttcatatagtctagaaggacattccaaat

SEQ ID NO: 174039 - DNA, 424 bp, Glycine max
  unsure (1)..(424): unsure at all n locations
tcctctggttgctctgataagggtttcaaatgttagttagaatgagatgaaattgaagccttcattctactgtctacgcgcaatgagtatttctccctccccagacatagttttacaaatccaaaatagtgaagatatgcggaaatgaatttcaaacccggtgtccaactttcacaatgatccaacagttatcgagtccgggatcgtagttttactgggacaggttctggatctctacgggaaaggagaaggttactatgagaagataatttctatcaccttcgacattttttcacaattttcaacggagaaaatgttcaaaaatgagttcctaacctggtgctcatatttcacgacaatccaacgggtaacgagtctgagatcttcattntactgagacaggtttaagtgtatgtgggaaaaa

SEQ ID NO: 174040 - DNA, 261 bp, Glycine max
  unsure (1)..(261): unsure at all n locations
ccgttcttcnngtcgttcttntggtgcttcaacccggttcccccgaaatcgaaccttttcaattcatttctatgtaccccttagtggtccccacttgtttcgcataattntattttcatttcatttacttttcggacccccctttgaagttcttgagtcatttatttaagtcattctctcgcctaatcaaaaaataaaataaatntccatcgatcatttgaacgtaacatcttttaatttcttgtaaactgaaatctgatc

SEQ ID NO: 174041 - DNA, 457 bp, Glycine max
tcatgctgttcaattgcttcagattgttgcacagaatgttctaatgtctgtgtggtggtcggtagaggagcatataccacagagtctggcgacaggtgcagatttttgattcatggccagttgggttaccatgttaacaaaggcatctagtttaccttcaagcttcttagtctcggttgatgaagatgaattcatggctacttcatgcactcctctaatgacaatagcatcactcctggcactaaattgctgggagtttgaagccatcttctgaattaaatttctggcttcagcaggggtcatgtctccaagggctccaccattggcagcatctatcatacttctctccatgttactgagtccttcacaaaaatattggaggagaaactgctcagaaatttggtggtgagggcaaatagcacataatgttttaaatctctcccagtattcatatagg

SEQ ID NO: 174042 - DNA, 402 bp, Glycine max
  unsure (1)..(402): unsure at all n locations
agctngttcacacgcggagatntacgtctttctttctcgcagacaacctctgtcgagactaactcgtgaagttagggggcaggcggaaatacctaagtggctatccgtataaacattcttttgctatctctaagactcagcgcatgatagcatgcggagacaaacgtcgtcttctgcaccctttgtcaatcgcagccaacaagcttgttcacacgcggagatttacgtcgtgttccgcgcagacaacctctgtcgagactaactcgtgaagttagggggcaggcggaaatacccaagtggttatccgtataaacattctttcgctatctctaaaactcaacgcatgatagcatgcagagacatacgtcatcttctgcaccctttctcaatcgcgggccacaa

SEQ ID NO: 174043 - DNA, 429 bp, Glycine max
attccagagtcctcttataggcaattttatcctttattgaagaatcaccggagctcctaccattttaaaaaaaaacaatgacgaataaacatattgtgtttaaatcacacgatggacgatgcatatacaaaaccactagtaccctttcagcagtcatcacttcttcttttcaaattatctatatgtaatatagaaagaaaaaaatcacacccacaaccacatatcaagtgccccaatttaaatcacacgaacctgaaacatgaacagagtggagccctttcgattacacgtttgtgccctttacctgtcatcattagaaacaaacaatcaatcgcacacacaattaatatcgtgcaaaggccaaacacttcactcatcacatatatgtatataatagagattgtgatagagacacatacaattcagaga

SEQ ID NO: 174044 - DNA, 195 bp, Glycine max
agaggacgactcgtgtatagggccaaacggccacactatataaacatatatactgacccgtagacgtacgttatctggcgatcgcacgcttctatatccctatggacgacacgctcaatcgagggtgactcgaccttctgattcctttgctatatatagtgaattacaatctgctggcaactcctggaaatgtct

SEQ ID NO: 174045 - DNA, 292 bp, Glycine max
aaaaaaaaaaaaaaaggattgacgtgagcggacaaacacgagagcaccacaagagggcctaatccagggggaacaacacagacgagcaatccgcccgccacgaacaaacgtacgcccttacagaaacaaaaaggggggaagaaaagaaccactgaaaaggagaaaaacggcgaccaaggaacccgaaaaacaaagcgaggcccgccccgacaggacacgaacagcgtcaaaaacttccacggcaaaccagagcccaaaaggaaacagcgagcgaggggagacgaaacagcga

SEQ ID NO: 174046 - DNA, 439 bp, Glycine max
tactaagcttgaaaggatgcttaatggaggaaaagatttagagatttgtggagcacagaattgaaggaataatgcagggagactagtggaactctgaactgcgtctcataagaatctcattcatcaaagttacaacacgttttacacatgcttctatctataaactaagaagcttgcttgataagctttcttgagaaaagtaccctgagaagcttctttgagaaaacatccttgagaagctagagcttatctacacacactactctaataactatgctcacctccttgacaagcttccttgagaagattcctaaataaactagagcttatctgcacacacctgtctaatagctaaacccacctccttgagatgagaagttagagcttatctacacaccccctataatagctgaactcactgccatgtacgaatacatga

SEQ ID NO: 174047 - DNA, 341 bp, Glycine max
acctgcggcatcaagcttgatggtgcgcaccccaccttctttttatattagagtaccgataatgcgtctaccatcacgattatcgtctccctttttgcacatgttctgtagttgcatcctatccggaaccatatcagaatagtactaatactgcctaacaaaggcaaccattaggtccttccaagtatggactcgggaaggttccaagtaagtgtaccaggttacaactaccccagtaagactttcttggaagaaatgtatcaacaattcctcatcttttgcgtattcccccatcttctgactatacatacttagatggttcttgggacaagtagtcccct

SEQ ID NO: 174048 - DNA, 402 bp, Glycine max
attgggcacctattttgatttttccatgttgtctctacatacataaaacaaccccaccgtcccaattttgcaaaatcatattcatatatcattggggcatttcatcgagcacttggtgggcgcacgtttagacataaattgcaagagaatgggagcaatgtggcatgccccattgcttcataatacaacctatgcctaaggccttttcattcaaatcctcaattcaagaaaacaagcaccatagcaaaccaaaactgccttacaaatataagcatgttctcataattcgaggcaccaaaagatgaagaaagcacatcaatggaaagtaaaaacatcaaagatggaacacttacttgttggagtgaattgaaataccaaaaatgaaagcaaaatgcgatcaaa

SEQ ID NO: 174049 - DNA, 384 bp, Glycine max
agcttgcatgatttacatctccctctgtttatatcaattcttcttgatatcatcaaaatcttcatgatttacaggatattcaggtattttagttttcatctttcattttctttattagccgaaattttaaatttactaacaataaaacctaatttattgttggcaaggctgaatttgatatccctgaagcatctgccagtaggacaaagaagaaaatacttcagactgccgaggagcggtggagacagtttaaatctgatttgaccaggaaatggacacttgtatccgacaaggacagtgtggatgcactgtttgtgaaaaatacgacattatcaaggagatatgggcccagttttgtcagatccgcacagacccctcatggga

SEQ ID NO: 174050 - DNA, 442 bp, Glycine max
  unsure (1)..(442): unsure at all n locations
tgcatcagtataacctttcaggtntaattcttagtctctcattaatgaagaataggtctttagttcttcttaagtacttaagtatggtcttaaccactttccaatgttcctcaccagggtttgcttgatatcgactatttacacctattgcataatcgacatcacgacgtgtacaattcatggtgtacatgatagctcccactgcactatcatatggtactctagtcatgcgttctctgtcttcatgagttgttggacaattctccctactaatagtaattccaacacctacaggcaaatagcctcgtttggaattatccaatgagaattgttctgatagccaaatctttgtgccttgcaaagttggtatgtcatttccaattaataatatgtcatctatatataacactaagaaaataattgcactcccactgaccttttt

SEQ ID NO: 174051 - DNA, 382 bp, Glycine max
agcttgcctcatagaggtccaggaaggacaatgcggccgaatgaactatttccgccccggagtacgacagtcaccgctttatgagcgttgtacaccagcagcgcttcgaagccatcaagggatggtcgtttctccaggagcaacgcgtccagctcagggacgacgagtatactgattttcaggaggaaatagggcgccggcggtgggcaccactggttactcctatggccaagtttgatccagaaatagtccttgaattttatgccaatgcttggccaacagaggagggcgtgcgtgacatgagatcctgggttaggggtcagtggatcccgttcgatgccgacgctatcagccagctcctgtgatatccgatggtgttgga

SEQ ID NO: 174052 - DNA, 397 bp, Glycine max
  unsure (1)..(397): unsure at all n locations
tctatagaaggttcgttcctaatttctctacaattgcatcacctctcaatgagctagtgaagaagaatgtggcatttacctatggtgaaaaacaagaacaagcctttgctttgctcatagaaaagcttactaaggcacttgttctagctcttcttgactcttctaaaacttttgagctagaatgtgatgcctttggagtgggagttggagctgtattgttacaaagtgggcaccttattgcttattttagtgaaaaacttcatagtgccaccctcaactacctcacctatgataaagagctctatgccttaataatatccctccatacttangaacattaccttgtttccaaggaatttgtcattcatagtgatcatcaatcacttaagtacattat

SEQ ID NO: 174053 - DNA, 422 bp, Glycine max
agcttaagctcaatttttagcatgtccatatatcaaattacctaattgataaaagatatattaaaaatatattgctaacgttgcacaatatcctatacatgcctaacatgcctaataatgggacagtaaacaatgagctaaattagcaggggaacgacgatgatagtcaacataattcataacagggaacaacatcaaagatgtaaatctttgcatgttctttagggtacatttaagaaaatcaaatgagcaaaggcaaatggaacacggaattcctttttaatgactaatatggcagcaacgtgccatattcaaattcttccactagttgcccatttcattttgtactcccttgacagctagagcttgctgcaacatgtaacaaaagcaagtttcatcttatagcattcaatcaaaaacat

SEQ ID NO: 174054 - DNA, 430 bp, Glycine max
cgcaatctactgcatatgcatgccatgatgcatgtgatgtgaaatgaccaattgtctacatacggcaagtctggttcttggctctttttatttagtcttcaatctgtatgatcatttggtttaacatatgacaaagtcatacaatatatatatatagaactatgatcatatgaaatttggtaccaaagctacatgaatatctctcagttttcacgcctcttggtgttggctagtttttatttatttgttgggtttggtttcatttctctaattattttctagtcataactttcattcatctacttgatttcattaatatgccaccttccatagaaaagctttcagcatatatcctacatgtgaagcaagaataaacagaccactaaaggaaagaggaagaaaaacatatatgtattgaatcaacaaattc

SEQ ID NO: 174055 - DNA, 317 bp, Glycine max
  unsure (1)..(317): unsure at all n locations
agcttgngtcttntatatgcctaacttatcctatggactctaagcaaacgagcacggacccataggggaacgcgcgattttctactttgaaaagggggggggggtatgcacaaggttagctcgcctgggcaaggttagctcgcctgggcgagcaccccctacacgagaaaggttaaaaggagagggaaggggtgagtttttcaccaaaaacttcttcctctcatccaaaaaacgtaagctcacgggatccctcataattctagccttaggtcaccatttctcagcgttttttgattccattttgcattgttattcat

SEQ ID NO: 174056 - DNA, 435 bp, Glycine max
tgttatccaatgctcatcttggtggtgtagctccttcttccatggcttattccttaatggatggcgcctcctctcacctcctttcctttgtcttcctgatgtgccatcattttcttctattttctaaaccttttttgcaccattttaattattgattggtcttaattgtcaattaattaggcagttttattatttgggcccattcagctaatttgatgtttttaatctaatttcaggaattaatgaagcattgggcttgaatctagcattgggcttgaatctataattgggcttggacttgaagagggcagactaatttattctataaaattagatcttatcttatctagatattatttagatttgatctcatctagatattatttcatctagatcttatcttatcttatcttatcttatctagatttgatttga

SEQ ID NO: 174057 - DNA, 412 bp, Glycine max
gtacttgatatatggagtattactctttggtgcttcttgtatgggaggtaactttttagataactttcttactgccatagtgccacatgcatgtcaaaatctttatttgctttgtgttataaattaaaaatccagatgaatataaaaaacatctcaaccttctaaaggacaagaaaaccagtagttaccagaatgtaactcttcctcaggatacactactaaaaaaaagtcattttatgacgcgctatccacatcgttcctgccatacccgtcgtagtatgagtagcggtggcaattccgtaaaaatgttaccattttatgtgccatgtgcttggcgcgtgacacattcaatgacgttggccgggggtgcccgtctttgtaggtagcgcaacaggtaagttaagatggtgca

SEQ ID NO: 174058 - DNA, 437 bp, Glycine max
  unsure (1)..(437): unsure at all n locations
cttgatggtgttgagaagaaatcacatgtttgtcatcatcaaaaagggggagaatgtgaatgtattttgatgatgtcaaaagaagaatcaaacaaggctcattttgcttcaagattaatacaagattgtttcaacaaacaaagccttgattcaagatttcttcaagatcaagtcttgcctcacaatgaaaggtttcaagtcattcaaggcacatgtaatcgattaccaatggtttgaaagtgtgtaatcgattacacatcatatgtaatcgactactagagactctgaatgttgggaattcaaattttaaatgaagggtcataactgttcaagaaaaataactgtgtaatcgattacactaattctgtaatcgatttccagagaggatcttcaaggaatatcgccnacagtcacatcttatcatttggattttgaat

SEQ ID NO: 174059 - DNA, 455 bp, Glycine max
gctttgacttgagtcatcaagagattattaaatgtgaccatggcatgagtttaataattatccttcaacatctttatcatccatcaatcatcaatcatctttgaatcatctatctttcaatatctttttacagaattttttgattcatttctcttcatctttctaaaagtttttgatcagcactttctcttccaagaaaagttctttgttcaaaaacttgtgctattcatctttttcattctcttctccctttgccaaaagaacaaaggactaactgcctgaattcttttgtgtctctcttctccctttcaaaagattcaaaggactaaccgctagataattcttttaattcttcccttccccttaagcaaaagatttcaatggactaaccgtctgagatatattttggttcccctttacaaagattcaaaggactaaccgcctgagaatctttg

SEQ ID NO: 174060 - DNA, 400 bp, Glycine max
tgcctgtccgatgcagcagtaatgatggcccgagttatgttggggtacgattacgaacccggaatgggtttatgcaaagacaacggcggcataactagcttgataaatgccaaaggaaatcgtgggaagtatggtttatgctataaacccactcaggcggatataaagagaagcatcgcgggaagaaagagcggtggtcaaagctcgcggttgagacaagaaagtgaatgaagcccgccctgccacataagtagaagctctataagcgcgggtctgggagacgaatgtcaagtggtcgcggtatacgatgatgatgttccgagtacattggatttggtacgaccatgccctcctgatttcagctatgaaattggcgagtggaggaacgccccggcattta

SEQ ID NO: 174061 - DNA, 361 bp, Glycine max
tcctcagtctatcacaagaggacacttctatactctgcagttttttgaaattaaaaattcctcctggatccctgctccacacctgctccaactttgggagtccttctacatcaacaacctgcaaatttgtgtctatcccaccagatgcatctacttgctgagaatctttgatttcaaaaatcacttccactgactcacaatcagaaaccttcaagctgttcaaactcgcaaaccatccttccatgtcactcgagaaaaatttgtctagtttattgcaaccatgaatgttcatataagtgagactagaaaaggaatcagcactcacttcagcttgccatatgtctgttaacttatccatttc

SEQ ID NO: 174062 - DNA, 423 bp, Glycine max
gtaaatgcagcagcttcttaacgagggaagtattcatttttgagtatacttagaggcaaatataaagaagaaaagagatggaaaatagagtactttggtgaagaacaggagctttcctccttcttattttgtctcacaacaaaggtaagatccttaatatccttatcggttacttgcgccccgtcttttaatttatccattgctgaaatgaatgcttgtaaataaatatatttgcatgataaatatgtctgttcctagcttctttttttttattatcaatttgatacccaaaatatattaaaagattcaatttgacacccaaaatatattaaaattcttaatgttatctcaactcttttttataattaatttaattgacaaaccatttataaacaggccaatataatctgtttcgtccaatta

SEQ ID NO: 174063 - DNA, 373 bp, Glycine max
  unsure (1)..(373): unsure at all n locations
agcttgcctaattaacctgttatctagatataatgattattaaatgcacaaaatggaagtactaagtatttattacctatacttaacagaaaatacttataacagtacaaaataaccataaattggaagaaattgatacaatttacacaagtgttatacacaaaagttagtcgtattcaccgactaacagggggaggagttgtttgtgcacgacagggtgacctcgactcttactggctaattntcctaagtgagagtgtcgtgtggacacatgtaggctatttccttgaggatggtatcacattgcatttgagagttgaggtcaggtgcatgcatcatattgagcatgattgattggaattatggatggatg

SEQ ID NO: 174064 - DNA, 386 bp, Glycine max
  unsure (1)..(386): unsure at all n locations
tctntgagaagttagagtttagctactcacactcttctgtttactaagctcacctacttgagaagcttgcttgtaaaacttctttgagaagcttccttgagaagatttatagagaagttagagcttaactaatcacacccctctaatagttaagctcacctccttgagatgagaagcttgagcttaactacacacaactcctataatatctaaattcatcccatgccaaaatacatgaaaatacaaaaaaatttctagtacaaggactactcataatgtgctgtaatacatggctaaaatgctatactatttgaatgacacaaatgcgaggctcggaagaaggaaaaatctattcttatttttacaaagaagagtggacccaacat

SEQ ID NO: 174065 - DNA, 450 bp, Glycine max
  unsure (1)..(450): unsure at all n locations
cacctgctgcatgcaagcttgtancttaagcatgaaaggtttatctataaaattatacttagctaatattaaaaccttaaggatttaattgctcggtccaatccaatgtaatttgaatgcaaccaaacttagcaacatcctcatattcattctttccaaataattcaattaatgcatatattatatggattatattctattatattctcaacagtatcttaaatcaattatagtacataaaaactgtttaaatcgaaatattcagatcctatatttattttactttctaaaattttatatagtagtgttcttttacagacatttatataagagatataagaaccgtgtaaactgatctgatatactttttatgtaaaggtgcatattatcttctatttatttgcctcctaaaaaacttctattttactggattatgaactttattggatt

SEQ ID NO: 174066 - DNA, 456 bp, Glycine max
  unsure (1)..(456): unsure at all n locations
agcttgtagagctatatatgcaccaatgcttgatcaacttgtgttaacctaacaaagagccattgtttgggacttctaagtgaggaggtcttaatttacgctgtgttgggtgatgggtgtcgagcattatttaaaggtcatatgacgttggttttcttggtcatttttggtttgataactatgggaggtgtgacacatgttatcccgtacctaattattaaataatacattgtgaaaaaagaataatttttaaacttttattaatcttaaaactttcatatcataaatctcataaataattaaaacttagctctccagaaggccatgcaaaatgtctacaaatataaacaatccacacataagaattcatattattaatctagcttccatgtcacanactattagaattttacacatccctaataacaatattaaagacataacaaatattatgtc

SEQ ID NO: 174067 - DNA, 445 bp, Glycine max
cttgttgttatcgcttgcttctagggttgtgatgacttttttataacgttgaataattcaacaataagtctacaattgaactagtaataattaattttttttcttaaagtttttaatataacatattaatcagtatcaaataaaaaaaagcttgatatttacaactttatccaatccacacaagttcttcactttttttccgcgtttccaactttacacaattaaatgtccaaatccaattattagttactagttataaacaaaagtatgtgcaccaacttgatgggagtaaataataacatggactcggacatatccttttaactgttagtctcataaataaatcactatggctatattgcacaaacgttatttaccatttacctgtgccaggttacacgtaataaaatatgagactactgtaacccaaaatctacagttgatg

SEQ ID NO: 174068 - DNA, 291 bp, Glycine max
  unsure (1)..(291): unsure at all n locations
aaaaanaaaaagaggatggccgtgaccccgaaaaacccgggcgcacagaacaaacaccttcataaaaaaagccaaggagcgaagaaccaaaccacacaccaaggagcgcccaccgcacaagcccacaagaagcaaaacgcaacagaacccaagaaaaaccgcacaaaaaagcccacacaaaacaacaagacacacctaacgagggcgcaacacccaggcaccaccaacggacgagagccaacaacagcaaaaggaaaacaaacccaaagaccacaaaccgaaaacagcaac

SEQ ID NO: 174069 - DNA, 93 bp, Glycine max
gagggtgaaagtaagaaaaacaaaaaaaaagaagagaaactgaacgagactcgcaaacggaacagaaaaggagcgagaaaagaaagacgaagg

SEQ ID NO: 174070 - DNA, 413 bp, Glycine max
  unsure (1)..(413): unsure at all n locations
agctngtagatgcttcgaggctctccattgtcttaccttgggtttgatgagcctttggagaagcaagactcactaagggtggatcttgggtttgacgagcctctggagaagtgagactcaactaggacagaccttgggtttgacgagcctttggagaagtgagattcaccaaggatagactctgggtttcaaaaacctataagtctcaccaaggacaaaccttgggtttgatgagcctttggaaacacaagactcaccaaggacggaccttgggtttgatgagcctttggagaagcgagactcaccaagggcaaacctttggtttaacgagcctttggagaggcaagactcactaagagcaggcattgggtgatgagtcttaaactanggaatgctcgacttgggttttgtcg

SEQ ID NO: 174071 - DNA, 442 bp, Glycine max
tcacccgcattttcctataaatagggggagatgtgaagtgaataattgttcagccctcctggtaattcgagaatcacttgaaattagtgaaaaaaatttgttccgtgaagaaaatccaagccgatgcgcttccgtaacgtttccgtgggtgatttcgcaaagattttccaccattcttcaacgttcttcgttcattcttcatcgttcttcggtcttcaatcggtattttcccgaaatcgaacttttcaattcattctatgtacccttagtggtcctcatttgtttcacgtgcttttattttaatttcatttactgtccgtacccccttttgacgtgttttagtcatttgcttaagtcattttcttgcctaatcaaaaaataaaataaatgtccaccgatcatttgaattgtaatatccgttaatttctgttaaaatgaaatt

SEQ ID NO: 174072 - DNA, 372 bp, Glycine max
  unsure (1)..(372): unsure at all n locations
agcttgaattttgctgttgtttcatgcatctctaagttacttactgccccttttttttaacttctggaatgtaaaattacattccaaaatgatgaccaatcccggtaaaaaaaaaactccaaaaaaggtacagaaggcaaaaagggtacagaaagcaagaactagacaattttttttttagcctactataatccacaatcagtattgggctgacctccattggattggaaactctgtaacactttattttcaacacattctattttatttggtgaaatttatgtgagtacttattaaatatgtgagttacattctccatttgttatatcccatgcccaaaccagaggaatctacatntaatttaattttttt

SEQ ID NO: 174073 - DNA, 444 bp, Glycine max
  unsure (1)..(444): unsure at all n locations
tatactgtgtatttgtgntttgattgtgtacacttggtggattgttacgttgatttgtatggttgtccaaacttattaatttgtactattttcacttactaatatagggggcaataaatcatgactttatggttcatgtcgtcatttaattgtgatgggaaatattattttaaacatgtttaatttctggatagacaaaattacagcgaaaaattatcaaaatttagtattcatagaaaacaaaaccatactttatcctattattttccttccttcgtttctttgtaagaatagttcagatttgaaagtaagcccatctataagtgggttatgctattcacactctgctgatttgttcttcacacccctcaccttgtgtttattttttaattgcttaaaatattgttttaaaggatattcctgaaatacttatcttctttacac

SEQ ID NO: 174074 - DNA, 433 bp, Glycine max
  unsure (1)..(433): unsure at all n locations
agcttgtgcttttcttggggatctgttatttacatantgttgaatattngatgatcttgtgcaagcattgcttgataaaatgactgatatcatagatttttaccagtcatttgataatttgtaccagacccaggctgctttagaaatttgatttataccaattctcttttgacttgggtaaacaaataatgttgaaaaacatttccatgaaaataatgaacatttgccattacttgtgctcaaatcctacctgttggccagcatttctttcttaaaaatcttttntaattacctgagaatagaaatcaaataaaatggagaaatcttttggtagaatcacgttaatggtatttcatacatcgtgatntttcttggaattgtgttcaatcacacatgctaaataataacggatatctttaagttgtgtagtatg

SEQ ID NO: 174075 - DNA, 402 bp, Glycine max
gttgcaagtcatagcactaaaacctattattctcttcatttcagctcataatctcagagtaatctgaatgaaaaaccaaaaaatacaataaagaaaaaataataataaagtcaaactattaattccacagcagaatctcacaaatgaataataacatgaaccaaactagcaaactcggattcagcacattcgtcaatgaaaaatagcataacaaaagcctaagctatactctaaacaggtacagtgcaatgacgcatagaaaatgtaattttctacaaaatcaaaataatacaaaataaaaaggatcgaagataaacgcatgataaacataaaccgagaagttttatctccgaatcatataaccaaagtcgtcagggatgtgaaaatgtgtacctggaacac

SEQ ID NO: 174076 - DNA, 435 bp, Glycine max
gcttaacttatggataccatttcctttctccaatccatactcaggaccctggctttaaaatcatccctaataccaattcttttgtccatttaacgttacaaaaagataaacaacagaataaaccagaaattgggaggtgacaacaataactaaccgtctcgggcaaattatatatgagcacggaactcaagacagttgccaaagcaaatatcctgcataagcaaacacaagataaagccaactaaacaatcatatatgattcaacacagaacacagaatgcatgatctgaaagcaattaccgatcatcatatacattggacttccaacactttcaaatccttcttgttaagagtaaagacagaagttctactccataatatccaaattataggtgtcccaaaccatattctgagatggaaccaaaaataaaaata

SEQ ID NO: 174077 - DNA, 422 bp, Glycine max
  unsure (1)..(422): unsure at all n locations
tgaacctcaatgtttaaaggcatgcattctattgaagttacagatgangaaanggcgaaacaattttgattcatataaagaattctgcattcaatctagattagaaaaaagtacttaaccgttgatctctcctttattgaaaaaagtaattatgggttttggttctgggaaactccctatttatgaaggtggagctacaattgatattgccttggactcctgcatggtatctttgaaaaaagttgaggctaatcaagctcctatntgctcagctagtggtgtgactatgatattcccttttctggtgtctgatgtaaaccgttcacggttgctcatgatcttgtcatgtcctatatctgaagatacctcatgttttttgacattctctcaacattattctgattttaatttctgactgatgt

SEQ ID NO: 174078 - DNA, 423 bp, Glycine max
ctgcagcttaatgaaatgcgtaaagaaattgtatataaggattaataaaagatagatgactggaaaagataatttgtttgattttggttggggacttaaattacatatgagttttccttatttataatgatagaaattgttataaacaactcaattgatcttaatccactatcttaaattttaggagatcatggattacatgatttcaacctcttaccatttgctaacgttgccctccaaattttccagagcagtgttcttcaaatcatgggtatgacacttcattcttctagatttactcttgttatcctttgtcaactaagcatagtttttctactaacaactatttatttgccgacacctatcgcctgttatgcttttgtcgactatttttggtgcatgcttccaccatgggtagttgtc

SEQ ID NO: 174079 - DNA, 364 bp, Glycine max
  unsure (1)..(364): unsure at all n locations
taagaatcctatatatggctagagcttaccttattttcctaatatttgngactgatgagagactcataatataatatacctacaaattntacatataattatcaagttaaattagtatttcacataagtcatgttactaccaacttaaataccttatcatcatttaacactaattctaggtaaggactatatatgttaactaagaacatataaaaaataagacttacgttgagagattaaaaataaaatcttaaattaaagaactgaaatcattttttatctggaaaaaaattgtgtgggggaaaatctaattttcccggtcaaaaaaggcaaaaaccataatctccaccacattttttcctta

SEQ ID NO: 174080 - DNA, 404 bp, Glycine max
agcttggttgttgtttgaaaggaaagattgtatccatttggagtcatctatttttctcttttttttttatactgaattaggagtcatctattacttcataaaatttcctcatttttaaattctacatatttgatatctaaacaaaacattttattctaacgtattttaactatccccttacagtacaatacttactcccttatattacatcatccaaacacattctaagaatttcctataattctattgttgctctatgagaaattgggtgaaatggagaatgaacataagaagcgcaccagattgagacctacttttcattaatgaccaaaacaactattgactggaatttacaaatactccagttgtgggagggcatataagggtgacactattcttgatac

SEQ ID NO: 174081 - DNA, 445 bp, Glycine max
  unsure (1)..(445): unsure at all n locations
aactcagcttagacatgagaatattgaaagtgtaaaatatattatttaaatatatcatanacacaatgcagcaataatagagattgaagtttttggataaacatcacttgatgaattctaatgtataattgcaaaacaggataatgtagtcattttttgtaattaatacttttttcacttgataaacttggattccacatttttccttgggaacatttttgcgataaagtggattaaaattgatgtcttgaaatcataatttctgggattcttttaattaattacatatttaacgtgagaatcatagttttccaacataagaatcctaataaaagtaaaaaaaattcggctatcaaatacctcgtaaggaaaaagtatttcattccttgaattatatactgaaatcatgttcttgataacaataatttgttgatagttataaatc

SEQ ID NO: 174082 - DNA, 413 bp, Glycine max
  unsure (1)..(413): unsure at all n locations
agctntgcagcacgaaatcttttcctgctttaaaaaatgaagggctttcttgtgccttagagccacgacgaaaatcatgtgacgtcatcccctatagcccccttttttccatttttaacccagacgacaaacatgaaattcctataaaggaacccaaagttgaaacgtgcaacctcacttcgtcttccattatagaacttgaagctgatgtggaagcagaaaaaaccctaaaggcgagggatgatctcttggatatagattctcaagggaagaagagttctagccgcgatttaaaggaatgcatctggtttgatacgtcaaactttaggaagaagtttcgaaagtggaggcaaaagcagaagatgaagaaacatgagtgaattaacactgctggaacactttttattgcgaac

SEQ ID NO: 174083 - DNA, 397 bp, Glycine max
  unsure (1)..(397): unsure at all n locations
atagataacatgagaaaataaaatgaaatatagtttactagtatcaatactcgtcagcctctagttggataacattcatcttactccttctaccatttctttcattttcatgtttagtgcccacactagtcaacatccctatcacatctaagtagaagtaaagacattagctaaaaaacttttctctaatgaatattgacacatattacaaaccttagagtccgcgaagactatttccatggaaaaagataatttggggggtttattttccttctggcgggatacgtcagatatcatccatgttcaaattaccctaaccaatatcctctaacaatccttttcagcagtaatttcagcaatagagttgtatttgttagccatnntttcaaaataaaaa

SEQ ID NO: 174084 - DNA, 411 bp, Glycine max
agcttccttcataggcaggaagacagcatttagtgtgagtactacgtaatgcattggatgtcaacgatagtccaagcatgtttcaaggataataggaaaatgataattgtttacttgtaaactaactcaatttgcgataattgttattatgtatacttaataacttatgatctattatagcatacaatattttaccaatccaagaccattggaacagagagaatgaaagcaattcgcatttagtgggcgggatattatctaaaagttaaaaaagaaacactaggtgattaagtcattgtagaattgtaaagttatgttaatttagatcaggttacaaatgattatatgtgtcggctttcattactctaaaatatttcttttaattgatgagaaatattcaattattatgga

SEQ ID NO: 174085 - DNA, 129 bp, Glycine max
gaaaatttctaaaggtcgctgctatcagaggaatttaactgtataacctgtttcctcttcaaaacaacatgtatttctcgaacgaacatgtgattacgcgtgggttaacaatgttaccacctggtaaac

SEQ ID NO: 174086 - DNA, 415 bp, Glycine max
  unsure (1)..(415): unsure at all n locations
agcttttcgcanagcttactgtaaaatctgggacctaaccatggtagaagtctctacaaaggccattgcctccctcgcctaggattatgatcagccgttgaggtgcttcacctttggggacttccagctgtcacccatggtggaagaatttgaaaagatcctaggatgccctctaggggggaagaaaccatacctcttcacagggttctatccctcattagctagaatttccaagatagtccaaatctcggaacaggaattagaccacaagaagcaagtcgaaaatggggtggtcggaataccgagaaagtatttggaggtaaaagcaagaatcttggcaggtaaaggcgagtgggccccgttcatagatattctcgcactgttgattttcgggggagtcctctttccgaatatg

SEQ ID NO: 174087 - DNA, 358 bp, Glycine max
  unsure (1)..(358): unsure at all n locations
ggtgactctnggcaatttctttaattctagtcacttaataagttgtgacttttgaaagaatcttcagaaacaagtcacttgaagaattgtgacttttggaaatgtattttttgaaatcagtcactggtaatcgattaccattaaggtataattgattacacatcaatagatgtgactgttcattttgaattttgaaaattaaaacatttagaaacacttgtaatcgattacaagtattgtgtaatcgattacacaagtttaaaatgatntaaaactgttgaaatatgaaatctaacagtttaaaacactggtaatcgattactaccttctggtaatcgattaccagagagtaaaactc

SEQ ID NO: 174088 - DNA, 417 bp, Glycine max
  unsure (1)..(417): unsure at all n locations
agcttctgttgttcaatttccagcgtctctatatattatgcgcctgaatcgaacatccgagtgaaaagttatgaccatttgaatttctcaagagcttccggtgttcaatttcaagcgtctcgatatattgtgtgcctgaaatggacatcccagtcataagttatgaccatttgaattgctcaagagcttccattgttaaattttgggcgtctcgatagattatgcgcctgaatcagacctccgagttaaaagttatgaccatttgaatttctcgagagcnttccgtgttcaatttcgagcgtctcgatatattatgcgcctgaatctgacatccgagtgaaaagttatgaccatttgaatttcacgaagtcttccgttgttcaatttttagcgtctctatatattatgcgcctgaat

SEQ ID NO: 174089 - DNA, 452 bp, Glycine max
  unsure (1)..(452): unsure at all n locations
ntgccacatgtccctgattgattggagcaaaagggccctctttctctntttgactgtgatccatactcagtcacaaaagtgagaaaaatctgacctttgaaatgctaaaatcctgcctcggtttgcgtgtcgtttctctgattccagtttctcgcgtttctctgcgtccgccggggccagttgtcgaaagcaagcaatatatatatcataacgctcagaatgaaaccccgagcgtggtttagaggttggtttcgttaaattttaagtcgcacgcaaaacgatgatttttaactaattaattaggaattaacccataacctcccagttgtggattntctctccttaattaagctaacccgcatatctggccccccgctatatctacttctaccaagaacatatatgcatatacactggataatacttatatattatcatgtcaaatacatccg

SEQ ID NO: 174090 - DNA, 417 bp, Glycine max
ggatcctctaagcaccgcagctgcagcttggtttatataaaacttattacctactgaaatgcttgacaataggttgttgaaagaatggcaagcacggaattggattctgctgttgccattgttaggcctccaggtcatcatgcagaacaaaatgaagctatgggattctgtctgttcaacaatgtggcagttgctgcaagatatctcttaaatgaaagagtgagtaacgtaacacctactaccaattccatatttgcaaagttttaagcctttaatttaaccattggttactttattgacacctttgtttggttttgccgtctgcatgacagccaaaattaggtgtgaagaaaatattaattgttgattgggatgtccatcatggaaatggtactcagaaaatgttctggaatgatt

SEQ ID NO: 174091 - DNA, 334 bp, Glycine max
  unsure (1)..(334): unsure at all n locations
caatgttcttggtttgacttgccatctatgtttatgacgaacagtgtattttcagggaattatttttgccttttacttttaaactgtgttgattccttgaaaatctttctattcagaatcaaatgaaagaggacattgctacataagtttaattnttcgtgggtgcttagcatgtctggacaggaaatatctttctggtgtgatttgtgcgacatttaatgtagtcaatgatttcatttcaatttgggttctacactntgttttttcagtacctttgctttatggcacatatcagtatgcatacatgagttgtcattgccaccagcattaatat

SEQ ID NO: 174092 - DNA, 366 bp, Glycine max
agcttcagcacatcagcatgtgcaacaatatggcatgtatccaaataacaaccctacaatgggggcttcttttgtcggtaggccggtgatggggatggccggtggcgtccgtgttggcagtggtggtagaaatgtggttgcaccgccttaccaggcggggcctcacggtggtgttggtgttggtgttggtggtgcaattgcggagtcttcaaggtatgctggaaatggaaagagggatgttgggtatccaccgggggcgccgggggtttgctttggagggagggtggtgaatggtggcggtggctatgcggcagtgagtaatatgggagtggtggcgccggttagcccggtttcgccggaggggat

SEQ ID NO: 174093 - DNA, 351 bp, Glycine max
  unsure (1)..(351): unsure at all n locations
taacaactcanaacttcaacaatattacaaaattgaaattaatatctttaaattgattaaaaatatcattttaaaataattaacaaatatggtttttgaatataaaaaacacacgctatttcaacaaatttaatataaatatttatttttacgataaatacatttaaaaattaattatgaaaagaatcaagtccatcttacacatattatctcaaaattgaataattatatattcatatttaacatatttacattcttttttaatttatatatttcatataagtattccatgactattactggcttagtaaaaaataaaatattaataaattcattanggtaaagattttt

SEQ ID NO: 174094 - DNA, 409 bp, Glycine max
agcttcaccaccaagactatgtcttagattagaagcttatataggaagtttccatggaggaagagaatgagagagagaaagtggcatggaaaattgaaggaagaaagggagagaagtttaactttgaagtgtgtctcacaagactctcattcatcaaagttgtgacaagtgttacacatgtttctatttatagcctaggtcactaacatttcacgtgaatctaagaggaatattccaagaatatcccaaatgcatcttaacatattccaagaatatgccaaaggcatcttagcatattataagattatgtcaaaggcatcttagcatattttctttagatgccacaagaataaaaggtgtgactctagtacatgagaaaagactatgccacaagaatattccaagaata

SEQ ID NO: 174095 - DNA, 407 bp, Glycine max
  unsure (1)..(407): unsure at all n locations
tatgagaattccaatctntataagttaagagtaaaaatctatcatgacaaaaagttgtcaaaaaggaattntcagcttggccaacaagtattgttatttaattctagattaacattgtttccaagtaagctgaagtgcaagtggtttgaccattcttcatcaaaaaagttatgccacatggagcaatgatattggaggacccaaccaccaaaaggacatggactgtgaatggcattagaatcaaacactacttaggtggagatttcgagaggctaaccactgttgtccaactgcaagaagcttgaacccaacaaggacatccatctataaagactgtaaagaagcgctcctgggaggcaacctaatatttctaaactctactcttanaattctttcttctgattcat

SEQ ID NO: 174096 - DNA, 288 bp, Glycine max
tgtttgtccctatcgggcatgtcgataatatcaaccctaaaattttaacaatgaaatatacttcaccatgtaaaaaaatggcgtttttgcattaatggtattaacactagttctcattttactggtgcagccttaattatggaatttacattcttcacggcgattaaaatgagacgccaaacttgaaaatactccttgaatggtactttaatataagatgttacaaacttaaaccttttttccatcatattttgtgggagaattttgcaatactactggtattcatct

SEQ ID NO: 174097 - DNA, 369 bp, Glycine max
taatactcggttctaattagtaacggacccaagatccttattcagtgaatataaattaataaaaataaaatcaattggttcccttatataaatatagataaaatagaatataaaaatataagattttatttacaaatttgatgaattttaaaaaatgagggagtgtaagtgcacactcttactcgcatgtaggtccgccaatgatactaatgtattatccaataaaaaaatatacataattacaagtttataaccaataattaaattattaaaacttgaatcgttaaaaaaagtgattctataaaatgtaaatctcactctctctagagtagttaaatctgacaaataattattcagaatttatgaagt

SEQ ID NO: 174098 - DNA, 328 bp, Glycine max
tctatggaggctggatctttgagcttaataaagtccttcaatggtgattttcagccatggagttgcagtggaagataaaggagaagaggtgaaaggaggtgccatccactagagaataagccatggaaggagaagcttcaccaccaagagagtgccttggataagaagcttagagaggaagctctcaatggaggaagagaatgagagagagagagagagagaggcgtggaaattaaaggatgatagggagagaagttgaactttgaagtgtgtctcatagtttctcattcattaaaaatatgacaaagtctacacatgtttctactta

SEQ ID NO: 174099 - DNA, 423 bp, Glycine max
agcttattgcttggaaaccaacactagataagataccctgatttttgaatttatctcacaggaataccatcaatgacaatgaagtattatgtgtgggatgtgttttgactgtaaatatacttggcacttgttctttgaatgcaatttgttttgctagagtttggtgcggttactttaggtggtggggtattcattttgcacaatataatgactctccttctaaattctcacaactcgtgggtttgccaagttgcaatgattagaatgagttactgtgataacaatttggtttgtagtgttttgggcaaaatggaggactcgtagttttcttgtttttaaaaccataagaatgagttttgatctaatcgtttaacggttacgatacacccttgtcaattaattagtactatatgtgtttttttt

SEQ ID NO: 174100 - DNA, 226 bp, Glycine max
  unsure (1)..(226): unsure at all n locations
tcaacccgttgggtggcaaacacggggctactgctgtaatgcaagaatcgggagtgggtagcttaccctcngcgattaaaaacatgcggaagaacggatcaactccgtgacaaaggagacccctgcctatagactttacgcgttgggcaagtatggccattcaaatagtcggtcatgattgtcactcctcattcatgaatgaggaacccgttcccacttgactcgt

SEQ ID NO: 174101 - DNA, 395 bp, Glycine max
tctcacagtcacctgaggcatgcaagcttatgctggacatctttatcggagactttcttgacattttctttaaaatcaacctcggctgagcaattacgagctctccggcgacacatccaaccctggatggtagaatcaccctaatccttgaaggtacagccctctacaacaacgccaacagcctgctccttactttctaaatgcagcaggcccattcaaacaatacattccttcaaccattcaacaaccgtttgaaccccctaatcagccaacaggttaagccccttccaaccttcactctagaaaataggctgcaaagactatgcttacgtgcaattcatcaagagaccgagcctcattttgagcttaccaatcagatgggacatttggtaccc

SEQ ID NO: 174102 - DNA, 400 bp, Glycine max
  unsure (1)..(400): unsure at all n locations
agctttatcgggttgagtagnttctgtcatataattgatatctttacattgacggacttcctttagttctatatgatatttggacaatctcttaaactcttttcgcatgttttttttaaggttttgaaagaataacaagtttgaaagtagttcatgataggcttgttttaaaggtttagggtcatcgagatctacctcctcttattctaattctgattcttcaggagcaatattagccatcagacataggttgacttcctcttctccttcttcattaaaggtggtgtcatctaggtcctcccaagtgctcatgatacttttcttgtccttggacttctctagatttgggcattctgtcttgaagtgtccagacttacactcatatcatataatgaagctg

SEQ ID NO: 174103 - DNA, 272 bp, Glycine max
cgcgaaaactgttgaacctttgcgaattcttcactggaaacgatatggaaacgtttcggaagcgcctcggcttagattaatttcaaagaaacaacaacgtcaggcgcattcgtaagagagagaagtgcctaaggggctgaacccctttctatttgacgtgctaccctatatataacacaacacgggaggtggttgtcgaccaggtcgctcaagcgagccaagttgtttctgcaatgcgacagccttctgaggaatatttggagggcccaagg

SEQ ID NO: 174104 - DNA, 414 bp, Glycine max
catgcaagcttcctttagaagctagagcttagctacacacacccctttaataactaagctcatttccttgagaagattcctggagaggctagagcttatctacacacacccctctaatagctaagctcacctccttgagatgagaaactagaactcagctacaccccccctatactactagaatggccaaaatacaaggcccaaaagaaggaaaaacctattctaatatttacaaagaagagtggacccatccttggtccgtgggatctgaaatctaccctgaggttcatgagaaccctagggccttctttagtagctctagcccaatcctttaggattcttttatccaatacccttggggggtaggattgcatcatcccctcacccttggaaaggatttgacctcaaatctcg

SEQ ID NO: 174105 - DNA, 434 bp, Glycine max
tctacttatgtggcagggcgggcttccttcactttcttgtctccaacgcgatctctgaccactgtccttccttcccgcgatgcttcttttcatgtccgcctgagtgggcttatagcctaaaccatacttcccacgatttccttgggtttttatcaggctagttatgccgccattgtctttgcctaaacccatcccgggttcataaccgttccccaacataactcgggccatcattaccgccgcatcggacagacaaggttgcccaaagagggagtccacggaggaaatgctgaccacctcaaaagactggaaagcggtttctaacgattcttctgcggctttcacataaggcatggaggatgggcagcttaccaagatatctttctcgcctgacacgatgaccaagtgcccctcactacgaacttaacttttgg

SEQ ID NO: 174106 - DNA, 266 bp, Glycine max
  unsure (1)..(266): unsure at all n locations
tgcttttatttngtgaccacagagtggtacctggagatatgtcgcgggggtcaggagacctttgggatgtcaggtggggtgctattgcccacaaccaagcttgaccaatcccgacccaacccatgcatattcagtcagtgagaacctgtgatgtacctaaacaggcgagctcctggccgtcaacagattaaaggaaccaagaccacaaagccaggaggcttgtgtggtggctggccacctgtgaaacttgattgatatatgggata

SEQ ID NO: 174107 - DNA, 384 bp, Glycine max
  unsure (1)..(384): unsure at all n locations
gcttaaattgaattaaacgtttagattctgttggtaatcgattaccatatatgtgtaatcgattacacagtgcanactnntgaattcaaatttaacagctgttgtaaatcagttttggccactggtaatcgattacatcctctggtaatcgattaccagagagtaaatntgttgaaaaatactttttaacttaaaattcttggccaaaccttctgctacttcaattggaattcccttcctatttaatataccctttctaagactctagagactgtcttgatcatgcatcttgaatatctttaatttctttgtcttgaataaagctttgagacgcatgtgaaactttggatcatcaaaacattcagcttgattctttgtcacaca

SEQ ID NO: 174108 - DNA, 412 bp, Glycine max
agctttggaggacgctattgctgttcttatccaaattgctattaatgcctattgattctcgggattggaatttctttttgcttatatagtacctttttgtgttgagaatttcttccttccattaataacaacaagtttggttgttgacaatttggcaactctgattttaatatatgataacatattctgatccacgtgagttaagggtgaaagattaattaaaatagtaataggatttggtgctatgttttattcaaattcagctgaaaagttcatgatttgacattttgttgttaagtcaaatccaatattgttctagaggattctggtagtttcggtgatgtcttatatgttttacaacttctggttttatattatattctcgcttctctgaactgtcttggttttaact

SEQ ID NO: 174109 - DNA, 364 bp, Glycine max
tgttcctgaatgggagacttggaagtataaacatcagtatttgcacaattcttcattccaattgacgacatgttacatagataatattgttacagaaacttttgtcagattatccttagctccaaataaagaaaaaaaaaaaaggctttctgtcatatatggctcttaatttgtggaaacaaaatattgctctagtgcagctcttttccggaggtttacttgcactgtgaaaaatataaaaaaaaaagagtcggctctaaaacatgatgttcaaattatgcacttaaagtgcttggcatctatgtgatagccatttccaaaatatctattggtaagacatgcagagtagattggaaaagacata

SEQ ID NO: 174110 - DNA, 394 bp, Glycine max
  unsure (1)..(394): unsure at all n locations
aacaattatctaatcattcctatccactcaaatcatacaattgctcattcaaatcattctcaaacactcatttcatgccaaacaatccactacatatcattttcaatcaattcattgttcaaacacgcttttggtacaaacaaacaactcaaagtgctgaaatttatataattgaaatttaaaaaaattgaaatataaaatctgaaattaaaatgactgaacataaatcataaaataattgaaaataaactaaaatgttcgagatgcacaaatttaaatgtcctgctcctgtggttgctcctatgcatgctcattaaggtccaacacctgagcagctggtgcagatggtgtggcataatcaagtatgggtgctanggatggctttgggatctgt

SEQ ID NO: 174111 - DNA, 264 bp, Glycine max
  unsure (1)..(264): unsure at all n locations
cattgaaatttgaagaaaataatcttataatgagaagcatcttatgctgagaaattaagaaagaaaacaaaccgacggttcttcttattcttccatcattgtcgaatccagtttaaggtagttgggattgggttggacatggatgataacaaaacacttagacttcttctttaanataggtataacaagaaaggaacttgatcctaagtacggtggaaccaaacttatcgtaatcctaactgcgacatgatcaagttattaacc

SEQ ID NO: 174112 - DNA, 157 bp, Glycine max
cgaaaaaccggaagcgcactccaccaccccccaaacaacgacccccgggagaaaccgacgcaccccccccccccaactcagaaggcaaaagcagggcggcagaacaaaaaccatcctaatcccacaaagaagagaggacccgggcaagagccggggg

SEQ ID NO: 174113 - DNA, 376 bp, Glycine max
acaaaaatcaattgaggaagcttcgccgagtgtccccattgaaaaacctttattcaaacctttcaaagttagtgataaggcttaacgaaaaattagggaacttaaaaaaactaaatccttaattgaaggcgtaggtgacaatcatagcgaattactaaacaagattagtagtttgcttaaggtcattccagatactccccaagcttcggaaaatacttccaaaatggtaacaagaagtacctccaaattaattaatgttattaatgaagatagtgaccaaaacttagataacacaactgagataggatcagtgtcagaaaagaatataaatccattaaactccaaacactggagaaccccctccaaattatattat

SEQ ID NO: 174114 - DNA, 378 bp, Glycine max
  unsure (1)..(378): unsure at all n locations
taagtatgtgttggtataatttgtctgttccattatgctnttaatgtctctagaggttacttcctcgttgacatcttttgtcttgaatggaattgccatgacaggtttgttgttactgtctttgatatttggtagttgatattgtgttgtgggaggtaattccgactggattaactcaccatccttcacttgccaatttgttatgacatttgttgttggattacctatgatgtcttgtttccaagggtagtctatatcctttctgatggcataagcatgaaaccaatcaaagaaaaggacattatatttgacttctttcgacaaatcgtagaacttgtcttggatttgtttctgtttgacccttgtaatgtggaaaac

SEQ ID NO: 174115 - DNA, 405 bp, Glycine max
  unsure (1)..(405): unsure at all n locations
agctttgaagnattntttcactctttctgtttttgncagtttaagctttaaagtttaaatggagctggattgaaatgatgcttcgcacagctaggagcctaagagcaatgatggagtgggcccaagaaggtccaacggccattttccaatttattttcattctagctattttgagagagattgtgtttgctaagatgaattaaaaaaaaatgaaactgaaagtgtgaaggatgataagagatcaagaacattatgataaagaactttgaattgttttgtataaatgaaagtaagttaaaaagatgtaaaatgtttgaattaaaatggctaggtgggcaataaaataaaattatattatgttaatagccgctttattatagtattatactattatgaattttgttc

SEQ ID NO: 174116 - DNA, 343 bp, Glycine max
  unsure (1)..(343): unsure at all n locations
agaaaaatccgttggttctagtttgactgtgcacttataaatatcgtatgtatttatgttccttaccatttatagaatcaagatctctgatgccatggaattagttaatggttaatttagtggtgatggtgaaagcaatcattagaattgtttgcagttgcactactttatagttntctttcagtttgcacaaaaaggtagatctagtttgcaccaaaaatgtaaaaatggatcttagaggttagagaatgtgttttagttactaacagtttangctanggaacttgtgaatgaagaccatgcccaataacatgacatctattttgatatttgacccaagaga

SEQ ID NO: 174117 - DNA, 385 bp, Glycine max
cgaggtacttacccgctgaatatcgaagaacgatgaagaacgaatgaagaacggtcgaaaccttctcgaaattcctcacggaaacgttacggaagcgcctcggcttggattttcttcacggaaacaatttttccaagcaaattctaaagagagagaagtgcctaaggggctgaaccctttttcacttcacttctccccctatttatagaaaattgggggagaagcttgccacccagctcgcccaggcgagctcaactcgcccaggcgagcagggttgcttcctccagaagcaacagccttctggaggaatcttctggaggacccaagtgggcctggttgctatttgcacccccatttttactaagtacacccctaccattttttg

SEQ ID NO: 174118 - DNA, 206 bp, Glycine max
ggctcacaacaggccaatcatatctatggagcagtttctggaaaaagtggcttggcctgaagctcatctccctctggaaagatcccatgaggttgttcctcccacgcctgtagcatctaagactagtgttccttctcggcctgtaccagctaggactattatttctcctgggcctgtaccagctaggactgagccaacatcagctg

SEQ ID NO: 174119 - DNA, 346 bp, Glycine max
  unsure (1)..(346): unsure at all n locations
gcaagcttggggctgganaanaactatataacagcacaaggttctagtttaggggccccctctctccctcgcgggagactctctatctctctcctctctctcttctatttttcggttttagttttagactctcttctctttctcttttattttcggttttttttcaattccagttcagacttttagttttatcaataaaatttcattctctatttgattaatggaaggctaagtctgcagcgttgttttcccttgaggatcaagcacagttctctttggggtttattattactggtaattttgtttagtttttctcttcctaattacttgaattggtgttttaatc

SEQ ID NO: 174120 - DNA, 343 bp, Glycine max
  unsure (1)..(343): unsure at all n locations
acatgggaccaactcattntatttcataaaaaaaggaagtcgtatctagtcaaggtctgagagaccatacaagtttcctaacgatttctaattatgtgggccattaagtctatcatatgctgacaatagccgagaagcccatgaatctcttcgggggtggagtaagtgtctgccattgccttggccttggctaacaagcggngaagttcttgactcccgttcaaggtaagagcaaaccggtccatccacatggttgcctcttggtgtaaagagtcgatcacccttcctctagcctctntttccgcatatacttgagcatactcatccgcgaatctatgctcgt

SEQ ID NO: 174121 - DNA, 356 bp, Glycine max
  unsure (1)..(356): unsure at all n locations
gctntacccttaggttgttcactatattgcttatgttgcccccctatctctaacaactttggcacaaagacttggaaaactcatattctttgggaagcatgtcaacaagggaaacaaatcaaaacgtctttcaaatccaactagaacattgaatctggaaggaaagaggtatgactttatcatagttgatgactattctagatatacttgggtatacttccttgctcataagcatgagtctttcaagatctttgaaatattttgtaaaatggttccaaataagaaaaaattatgtatctcttttatcaaaagtgaccatggaactgagtttgaaaatgctgagttgagaacattct

SEQ ID NO: 174122 - DNA, 373 bp, Glycine max
agcttgcctcaaagaggtccaggaaggacaatgcagccgaatgaactagttccgccccggagtacgacagtcaccgctttaagagcgttgtacaccagcagcgcttcgaagccatcaagggatggtcgtttctccgggagcgacgcgtccagctcagggacgacgagtatactgatttccaggaggaaatagggcgccggcggtgggcaccactggttactcccatggccaagtttgatccagaaatagtccttgagttttacgccaatgcttggccaacagaggagggcgtgcgtgacatgagatcctgggttaggggtcagtggatcccgttcgatgccgatgctatcacccagcttctgggatatccgat

SEQ ID NO: 174123 - DNA, 373 bp, Glycine max
  unsure (1)..(373): unsure at all n locations
tggttgacaatatggatttcaattcactcctattcttgtataacaggaatatgatatatggctatctatatagtaatcaaacaagaacccactatgaatagtttcaagattctataaattagaaaacaaatgtattttntaaaagagaattaccaaatgattaatattgttgatgagtaaaggaactaattgattaaaattaccaaatgcacataactcctatgcatctcttatgcatctttgatgcacaacatagacaacaggcaatatgactctgcacacaaccagtgaatgaagaaaggaaactaaattggcagcaaagaatatgataacagtatacccattaccttttctcaaagcagcgcacgacaga

SEQ ID NO: 174124 - DNA, 412 bp, Glycine max
gctttgcggatattgtcttctccagtgtatagatccaagtggatctgaaaagaagcaaaattaatcatcctgcttatacgaatgaaaaaactggggcaaataaagagggtgaggatgagggagaaacccatgctgtgactgccattcctatacagccaagtttcccaccaaacctaacaatgtcattactcagtcaataacaaaccacctccttacccaccacccagttatccacaaaggccatccctaaatcaaccacaaagcctgtctaccgcactttcaatgacgaagaccacctttagcacaaaccgaaacaaacaccaaccaagaaatgaattttgcagcgaaaagcctgtaggattcacccccaattccggtgtcatatgctaacttgctcccatatctacttgat

SEQ ID NO: 174125 - DNA, 287 bp, Glycine max
  unsure (1)..(287): unsure at all n locations
acggatgcacattntatctatatacaattggttgttgcttgcttgaatcttgatttcaggtattgtattgtcatcatcaaaaagggggagattgtagatgcaattggcttttgatgtttgatgatgatcatgatgatgtgctgcaaatgggcttttcaagattaanattcaagacaatacttcaagattacaagtcacaacatcaagatgatcactagaatattatgaagggaattcctaattgaattagcanaggtttggccaagtgattaaaataaaaagtgttc

SEQ ID NO: 174126 - DNA, 372 bp, Glycine max
gcttgcaatactaacatagcagaaaagtgttttccattttttttaaagccgagaacgtgagtcattttcccaatttttaacttcaaacttggctagccttttctagcctcatcctggagtggtgtctgttaaaaagagggttgggaggacacagatattaagaagcaaagcttctcaagatacagattatagaaaatagaaactgaaaccacccacccatgacaattacttctgttctatagcaatgccaggaatttagagaaaaatgaattggaatacactagcattatacatcaaatagaaggagaaaaaagatcttatgcacttttgacatcattgacgtagccatcatgctcttacgagaactcaaat

SEQ ID NO: 174127 - DNA, 349 bp, Glycine max
  unsure (1)..(349): unsure at all n locations
aagcttanacgaactgtggagactcaaaattattaaaactgaagagatgaaattgccataaacagccactgaagctagagaagttaccgagaaacactccgaaaaaggacagtgacaaaataggtgaccgaaaagttatttgatggaaaaagagtggcgagatgaaggcgatggccgaaaaacatgctgaaaagaaacaacggtaagataggtgcctaaaaagttcttcgttggaaattgaacggcaaaccactcactaaagtccttgtaggcaacaagtatagaagccatatgagaaaacaaggcgcgcacaaacaaaacctgcaactaaaatgaagcacacatcaca

SEQ ID NO: 174128 - DNA, 412 bp, Glycine max
agctgtaggcgaagacctttgaatattttattcttctctcactccctcagatagagcctgcactactttgtggtttgaggaccctgtaacttgggtcttgaaactggagcgaaaatgggtgtgcacagagacctatctcttcctttgttgcgcacctctggtctgttgcacattgttaatggggagtgatcaaaaccacttgtaggctttttggcattgcccttcttgccttcctctgtctaatgccacaggcattgtatagagactggaccagcaacatttatatcgcatgttaactagctataccaccggaattcatttgcttacttctgataatatatactttggctgacacgtataaaaattatttttgtatcaaccaatattataatgtttgtgagaatgttattta

SEQ ID NO: 174129 - DNA, 348 bp, Glycine max
  unsure (1)..(348): unsure at all n locations
ggtagatatctgtgaagtatgttgtatgactcttcccatttaccatatactctctcgagggtcattgttttgctagccatgctttttcatatgtgatagtgtaaccgaactcttgtctaatgaatgtgatgaatgttggaacgattagttgctcattttcttcaaccatcacaaggatatttttgcctatgagtttggaatccatcttattgtgatcttgtgaaatggtgggcatgacgcatgtgtgagacccttcaatcatactaatttcccaaacttcttaattnttcattcagacgctctaagtttccattgacacccctgagctcagcaacataagacccatgt

SEQ ID NO: 174130 - DNA, 400 bp, Glycine max
agcttttacatgcatgttcacaccatattttctatacttcgatcaactgatgcaatctatttgattgaaaagataatttatattactcttctaatgtagtcgacaacaaaaaaaaaatataacaaaaaatattgttgttcttttaaagggaattcaaatggcagatgcacaaaaaataataaatttaaatgtcttttatttaataattatttattttatagaaaaattatttcaaatcaaatatataatgtatggaattttaatacttagttggccttcagccaacagtgcctaattctaagagtcatttcaagcacaggttacaggtctttgctttcaaagtaacatggggatcaatgctctcaacaaaaacattattgcacaataataacacctgaaa

SEQ ID NO: 174131 - DNA, 265 bp, Glycine max
  unsure (1)..(265): unsure at all n locations
gttgcaatagtgctaacgtttctggttntagttattctatattgtctacaattaactcggggtcctgtcttcatgatttttaagtttaatgtgctaagttgttccaagtttggtctctggcaagtgtgtacaaagatattcatgacccgctgactaataggatagattcaacacctataggatatgaagagacttttggtgtattgctaaattgctgatttcttaatatgatgcaaggctaactcatcgatgtctactccaataa

SEQ ID NO: 174132 - DNA, 239 bp, Glycine max
ttttaaaaaccatatcgcgtcttgttaaaaaacattaagggggtgattaaccctgttaaagtattgggtcacttgctcaatggttgaatgagtgagccacttattcaactgcatgacctggtcttttataaaaaaattaaaattttcatatcatgtctttgataaaagcacaccacaagttactactactattaattcaccaattaatataacattttattattagtaataatatcttt

SEQ ID NO: 174133 - DNA, 341 bp, Glycine max
ggttttcattttccttgtctacaaggcaaaaagatggttccattcatttaaaggtaacagtcttaagacttgtgatgacgtggttgaaaaattcttgaagaaatacttcccagagtccaagaatactaaaggaaaagctgccatctcatcctttcatcaatttccagacgagtccttgagtgaggctttgaaaagatttcatgggttactaagaaagacacctactcatggattttcagaaccaatccaactcaatattttcattgacgggttaaggccacaatcgaggtagcttttagatgcttctgcaaggggaaaaataaaattgaagacccctaaag

SEQ ID NO: 174134 - DNA, 344 bp, Glycine max
ttattttttctcattgtgcgggcaaatttgtctctgttaaaaccattaattcaagcacttggaactttttgttaagccatcttatcgtttcttattcctaaattgtaatataactttgtaagaatccatttatcaataaaactaagccttgaattttgttgctcattggtgcttggtaaagctcacagattagactctatttcttctctcataacttataatcaccctcttgaactaatttgcagggacctttggggaccaacatactttggttccttatagagtataactattatggacctttgctgatgcatatactaagaatacttggaattttctactta

SEQ ID NO: 174135 - DNA, 382 bp, Glycine max
gcttggagtttccaagtgccaattcgtcttcttctttagtccagtcttcttctggcttcaattcttcagtgggctttccttctgtgtccagcatcttgggatgttcccagcctttgatgacagctttccaggttctgctatccagtgatttgaggaaggccaccattcttgctttccaatattcatagttgcttccatcgagaattggtggtctgttcactggtccgccttctttctccatgttcatcagaatttatctccctagatctcactctgtgatttcgagtgttggctctgataccaattgaaattctgataccaggggacagatgtcgtacaagatgtcacgacatcacgcttcagaacatgcagattatatgtg

SEQ ID NO: 174136 - DNA, 282 bp, Glycine max
cggagtacgacagtcaccgctttatgagcgttgtacaccagcagcgtttcgaagccatcaagggatggtcgtttctccgagagcgacgcgtccagctcagggaggacgagtatactgatttccaggaggaaatagggcgccggcggtgggcaccactggttacacccatggccaagtttgatccagaaatagtccttgagttttacgccaatgcttggccaacggaggaaggcgtgcgtgacatgagatcctgggttaggggtcagtggatcccgttcgatg

SEQ ID NO: 174137 - DNA, 404 bp, Glycine max
gcagctttgccggaaatgtagttgattttgatgcctgaagaaacaccatttgctagttaaccatgcattaagtgccatgttcaattattttgtttttaagagaaacgggtttatgatccccacatggttggctcggggtgcctaacacatgaaactaagaatgtaatgtgaagtttcacgcttcccccttttttgattttgttttgttgaggaaaacgcaaggatgatcaaacatgaaaacaaatggtatgcagatttgcagatcaaaaagtttgttgaacgcatatgcatgatgatgccctgactcatgcaagatgtgaggctggaatatgataacggacaaatgcaggatatgtcctttatgatgttatgaagagatgcttatgcgatgcatgatatgaatg

SEQ ID NO: 174138 - DNA, 249 bp, Glycine max
  unsure (1)..(249): unsure at all n locations
atgacatccatcactgaagaagctcaattatgctacaaggtcatgccattcgggctataaaacataagcaccatataccaaggactaatggatcgagtcttcatatagcatatcatactaaacatccatgtatatgtggacgaaatggttgtcaagtctcaaagcataccccaacatgtggtggacccgacagagatattcanggaactacgcaaatacaacatgcacctcaaccttgagaaatgtaca

SEQ ID NO: 174139 - DNA, 395 bp, Glycine max
actggggtttttatgttctctaacataattgctggggcacccaacaataatactgaagtggtgaaaatgcccttcaataaatatttaaaaagctctctccctcaatcccttttcatcatgttgctgttgctactgtttatttccttcctttgggcatccagagctccaccgtcatgttgtaaatcaccttcaatccctccgtggtcgccctctgtggttttcacgtcgtcagtgtcagcctcgccgtcgtcttcatcgtaagtgtcgtgctccctatacctatggtggtgtggttgttttgtggattggaaaatctgcataactcatggattactcatacagattcggtaatccatgagttatacaaatgaattgcttaatccgtataactcata

SEQ ID NO: 174140 - DNA, 343 bp, Glycine max
  unsure (1)..(343): unsure at all n locations
tcttcttgtcatatcataattctnatgattnacacaaaacaccaaggcaattgcatctacaatctccccctttttgatgatgacaatacaataccttgaaataagattcaagcaagcaacaaacaattggatatagattaaatgtgcgtttactgcccctagatttcggaatttatgatcacttgatatctaaggttgttaagctttttctacaaccttttgtcccctttggaacatcaaaaaccaaaactcggaatcacataatatacaacgggtcgaagatataacatggagttaatggtaaacttcaattccaacagaaatatcatccaatcaatactca

SEQ ID NO: 174141 - DNA, 405 bp, Glycine max
acccaactcgcccaggtgagcatggttgcttcctccataagcaacagccttctgaaggaatcttctggagggcccaagtgggcctggttgctatttgcacccccatttttactaagtacaccccctgccttttttttggtgattcttttttcgtaaagttacggaaacttacgaatttcgtaacgatacttgttttctttccgtaatgttacggaaccctgcggattacataatcatcccctttttgacttacggaatgttacggaacctcactaattgtgcaacgatgcctccatttgattttcggtgtgtcacgaaaccttacggattgtgcatcaatattttcttttgttttccagcatgtcttggaatttacaaattgcctaatgatgggtgccaagcacc

SEQ ID NO: 174142 - DNA, 342 bp, Glycine max
  unsure (1)..(342): unsure at all n locations
tgcttgtgaagattctatggaggctgcatctttgagctctaatgaggtccttcaatggtgattnttcgccatggagatgcagcggaaggcaaaggagaagaggagaggggaggcaccatccactatggaataagccaaggaagaaggagcttcaccaccaagaattgccttggataagaagcttgaagaggatgctttaatggaggaaaagaaagagagaaggggggagcacgacattgaaggaataaaagagggaaagaagtggaactttgaagtgtatctcataagactttcattcatcaaagttacaacaagtgttacacatgcttctatttatagact

SEQ ID NO: 174143 - DNA, 398 bp, Glycine max
ggaaccgccagctatttttaaacctgccggaaacagagtaaccggtttccaagagccgaaacagaagaagaaagggaacagcgtgaaaaccaatccacagcgtcccccgcaaattctgaacaccgttgtgcaaagcaacgtgtcttttgacagcacgtgttcctcagatagcaattcatcaaccaaaaaggtgaaacccgccaccgcaactgtggcgagtaggagaaacgtgaagcgtaacgggtttaagccggtaagggttgtgccacaccccgtcgatgtagcaacagtgttgccgcctcttaagagatgtgaatggatcactccaaattctggtgagcgtgccctagactcagagaaccttcatttttttttttcggatgtaaagtgttaactat

SEQ ID NO: 174144 - DNA, 344 bp, Glycine max
  unsure (1)..(344): unsure at all n locations
aatcggctactctcccatataatatagaagaaagaatctctggtgcatgagatattgagattgcttaccaaaatgcgaactacatatcaccttatncatgaaaagcttagttgctcaaacagaacataatagagaaagccaacctatgcatctcatctcatgtgaagagagacttctcatgatattagagggaagaataaaaagtatttcttatggttatggatatgatgntacaacttagatcccatttgcattcctctcgacctttgtaggaagtcatatttatgatctattattatataaagtaatgatccagatcttcttaatatgaaaatcatctatta

SEQ ID NO: 174145 - DNA, 349 bp, Glycine max
tttgtcaaaacacttcgaggcccctctctattctgtgattctatatttctatctatttcacaaatatagtcatatacggatgagagtttgactggcattctctttctagatctttgggaattggacattcaaaatattatttgagaatggtcatggaatataacaagcaacttcgtatttatttatttgtattttcatccactttaacaatcaagtatgtaggtttcaatacatggctatggcagacaataggcaaagggttatgccttttcctgaaaatccggtagcaggaagatgccaaaccttgggctacccagaagctgtcctgctagtcaatcccaaggatcca

SEQ ID NO: 174146 - DNA, 329 bp, Glycine max
agacccaagctaatgtgctctgttggttacgcttctaaagatttattctactagttaatccatcttgaaggtgggaagaaagagaggaatggggtgtatcattatcaattcaacaaacatatttctcaagattgttgagaaacaatcttgaaactggataatatgacaatatgctgtatacaatggcatccctgctcttaatattaaaggcttgttgtgtagcacttcaatgtagttcttttgctaatgccaattatacacccaacaaatgggacttggatcctctccagcccctctatcttatctatatgccttcatccgtctatttt

SEQ ID NO: 174147 - DNA, 406 bp, Glycine max
  unsure (1)..(406): unsure at all n locations
tgcaagcttcttaatttcagatgatgcagatgggtttgtagctacctcatgcactcctctaatgactatggcatcatttctggcgctaaactgctgggatttggaggccatcttctcaattaaatttctggcttcagcaggagtcatgtctccaaaggctccaccactggcagcatctttcatacttctctccatattactgagtccttcataaaaatattggagaagaagttgttctgaaatctaatggtgggggcaactggcacatagtttcttaaatctctcccaatactcatacaggctctctccactgagttgtctaatacctgagatatccttcctgatggttgtggtcctggaagcaaggaaaactttntctaagaatactctcttaaggtcatcccac

SEQ ID NO: 174148 - DNA, 320 bp, Glycine max
  unsure (1)..(320): unsure at all n locations
tganatgaggaagtgtggaagggtgagacttccttcttttattgttgaccacatagtggtacctggagatatgtcgcgggggtcaggagaccttgcggacgtcaggtggggtgctatttcccaaaaccaagcttgaccaatctcgacccaacccgggcatagtcagtcagtgagaacctgtgatgtacctaagcaggcgaactcctggcagtcaacagataaaaggaacaaagaccacaaagcaaggaggcttgtgtggtgactggccggctgtgaatcangtctgatatatgggttatggcctctggtaatcgattact

SEQ ID NO: 174149 - DNA, 361 bp, Glycine max
accgaacaattgcttcgagctaccatgctttgggatgtcaaacattatgtgaaattgatttaatggtctgttccttctctttcttttataaatcatacactgggttggatttggagttggagtaggacccacctagttagtgcttacttaataacttcaaaaatttttacaacaacaaattatatttaattaactacaaatttcaccaacaaattatatttaattgaaatgggtaattgacaatagcaacaaattactttctactacagatccttcaggaaaacaacaatttcaattatcaaagcttgttttcacatcttacctaaaatacattccgccttaaactaacattacaattaaa

SEQ ID NO: 174150 - DNA, 327 bp, Glycine max
  unsure (1)..(327): unsure at all n locations
ctaagctntccttgaaagattcctagagaagctagagcttanctacacatacttctctaatagctaagctcacctccttgagatgagaagctagagcttagctacacaccccttataatagctaagctcacccccatgccaaaatacatgaaaatataaaaaagcccctacaacaaagactactcanaatgccttgaaatacaaggttaaaaccctatactactagaatgaccaaaatacaaggcccaaaagaaggaaaaacctattctaatatntacaaagaagagtggacccaaccttagcccatgggctcagaaatctaccctg

SEQ ID NO: 174151 - DNA, 343 bp, Glycine max
  unsure (1)..(343): unsure at all n locations
accttatccttacaagctgaagattatcaggtcgtgaagatatatgtgagtttatagtggcatgatgtcctatattttaaacatatgcataccctaatgtgtgtataaaagtccacattttatatttaaaaatcaaatcacgctactataattgtgctttataggagagcttatacatccaataaanaaaagaaaggttaattccactgccaacattgccttatatgtaaagccctttatgagctggaggagccgttggacggggacctactagtgaatccaacttattctatcgttagagatatgatacccatttcactacccctgcctccatatttttagg

SEQ ID NO: 174152 - DNA, 320 bp, Glycine max
  unsure (1)..(320): unsure at all n locations
tcaagaatgcgaacaagtaagagatctctggttactttattntagacaatttatgtgtacgttgtgcttaagtatttgcattatgcgtttgacaattaagttgttttgaagcctctttggttactatgaattataactgtgaaatttcttttttgacagcatggaaggaaggtgaggagtccgattcttgaaacagacatgcaattgtggtactgattctcaattgataattaagaatatttaaattaagttaaaactaaagattttgaaaatgatagattgaaataaataagagaataagttaaagcatttacatgata

SEQ ID NO: 174153 - DNA, 365 bp, Glycine max
  unsure (1)..(365): unsure at all n locations
ntaaccncattgtctctcacagtctttagaattgggagccaatccaatccttgtgtccggactctcagccacttatgatagccgccgatgatcccattactgcttcccctaagctctctgtcctttcttcacaccgcatcacatgacttgtgaactccttagagtaccctcgcattggggtcactgaaaccccgtgtgatgaaaggcgtgatgctttcgtctgatggcactcctctcatggggtagccaagctgtcttatggcgaggacgggattataattaatacaaccccttgttctcatcaagggaacatttggacatccttcgcatgaagatagaatcctgattcttccttccttctagcg

SEQ ID NO: 174154 - DNA, 369 bp, Glycine max
  unsure (1)..(369): unsure at all n locations
gcttgtatttcaaatattatggggngcttttgttgtaacatgttatgtttgctactgatttttaattctttgaccctttgaatgaccaaattggctttcgatgtcttcatgagacttgtagagaattttatcctttacattcaagcactggtatcatgttatttggaccattacaacataatcaatccttaaagcattgcagttttgttatattgtgaggacaaactgacatctctatcttcatggtcagtttcttccaagatccaagccttatttgcccatgacttctccataaaagatatatatatctttctcttagctttctacaaccactgagatcatcccaaattcacttttgtagctcaagta

SEQ ID NO: 174155 - DNA, 396 bp, Glycine max
  unsure (1)..(396): unsure at all n locations
actcagcttacctttgagtttaatntaggctcaagaatcacttattttgaacgagtaaaacgagaattatggtcacgagataattctgcccagaattggattttctggaaattgtggtttgaaggaacaaggttgaagatgaaatggtggaaggaaagaatcactctttccaacgagggcaacacacaaaggatgtgaaagacctttgatatagccagggtgttcttgaatcagtcaagaacttaggagaatcactctcactaagataaaagagataaactctaattnttctgaataaaactcaacttgtgtttattgataaaatggttcaacttatatagaagctntacatcagattttagtaatgatccactaacctagaattaanagaactta

SEQ ID NO: 174156 - DNA, 224 bp, Glycine max
  unsure (1)..(224): unsure at all n locations
atctacagcttatactcttaacgatactcanctctaactctatttcttgtatccaagtattggttggctatttgaaactatagtatttaaactatttcacattgggggggaaaaactggtagtttggtaatatgcgctacatttaacacttctaaatttgtcttcttgtgtgactgctagcttaattgtatgcgcagttgatgtgcaggttttccacaattcta

SEQ ID NO: 174157 - DNA, 415 bp, Glycine max
agcttcttcaatggaatatagtccttgctcataatttacatgcaaaggacatgttgacttggataaccagggaatgtcagcaggaccttttgactatgaagggaccatcaaagtggattcgtcgattgtgctgtgggagcccccaaatgaaagttgcatcggacagaatatctttatacatatactacatgttcatcagatttatgaccacactatagttctttgtgtctatatatattaccgcaccttctttaatatctcacttttttttttttcacgcggggtttgatatttcgttgatttatgatagattttgtgagaaactgaaaaactaattttatcaatgattgaaatgaaaatggtaagttacaatgatcaatgtcagcgcgctgtattatgtagtgactaacaaaaa

SEQ ID NO: 174158 - DNA, 409 bp, Glycine max
tccttcagtcacctgcggcatgccaagcttttagtttcagatgatgcatatgagtttgtggctacctcatgcacccctctaatgactatagcatcatttctggcgctaaactgttgggagttggaagccatcttctcaattaaattcctggcttcagcaggggttatgtctccaagggctccatcactggtatggccgtttgaagtttgaagtttggcgaaacacaagttctcaaattggtttgaatctctcaaatctggccacaccaagtgttcctggtatttttcaaacaaaatatgagtcaaaagaacctaccacaccaaaattcaaccaaaaataaaaaccctaactatcaaaacaaaaatcgccaattaaattgtcagcagcagtcactaattcagtcactaat

SEQ ID NO: 174159 - DNA, 247 bp, Glycine max
  unsure (1)..(247): unsure at all n locations
actctgtccaaagcaccaacacagcttttctcacttaaagaccccagtaacaattccttcgtccagtacgtaaccgttggatcgactcgaaaattatactggaagtctctagtacataagcctacatcttgaccgttgtgatctactagcaaacatccagaactcattctgcactactntttccacaaccagcaaatgcatagcatttttctgcacttatgcaaaattttgctgcacaatttcacag

SEQ ID NO: 174160 - DNA, 430 bp, Glycine max
  unsure (1)..(430): unsure at all n locations
acctgccgcatgcaatgcttgaagcccagatcatataaactattagcaaggttttacaaaatagatttcaaaagacaaaaatgaatcacaggttaggatctttaatggaaaaatatattatcccaacctgactctgataccaattattcttgattttttagagttctcacaaagttctcttatgtgagacaaagtaacaataaaaacttgatagatgagagagaagttattccttttgtaaaacaaactttttgataactttttccacaatttcctttttaaatttctttttctttaatgctaatattacccttaatgaagtgagaagagagggaactaattntaataaaactaaaataatctccgatgactttaatacatttaagtctaacaattatcacattagacatatattcattaaagtcattct

SEQ ID NO: 174161 - DNA, 355 bp, Glycine max
gatctatatatatgcttgctcagggtagagagaggaagacttcagatttggatcacgttccgtgtattaaggatgaagacagcacagtcttagtgcatgaaaaagatatcaccgataagtggaaggcgcacttccacaacttatttaatgacggatatggatatgactctaccagtctagacacaagagaataggaccggaactattagtactatcgtccgattcagaaacatgaagtcaaggaagcgttgaatagaatgagatatggttacgcggtggcgccagacaacatacctattgaagtgtggacaactcttggagatataggtcttgagtggctcacctaacttcttac

SEQ ID NO: 174162 - DNA, 415 bp, Glycine max
  unsure (1)..(415): unsure at all n locations
gcaagctttagatttgtagctttattgatttaatatattaaatttttataatcagcaattattattattattattattattattattattattattattattattattattattattattattattggggaggtcataatctgaaaaaattgacatgcatgtgtatttaatttgctttggcagaccagaccagaccacaggtttggctaggtntntntntggattctaatatatctaagcatggaccacctgctatgctatttggctggtccccaagacctttcatggtcagtatgtcatcagttccaccaacacattgataatttgtgtctcagtggatacatttatggccaactatgctgaagaactcgattctctttgtaggctgtttcaactctagtaggaatcattttgg

SEQ ID NO: 174163 - DNA, 380 bp, Glycine max
  unsure (1)..(380): unsure at all n locations
attttccaccttcttactagcagctgtcanaaacagtggtgaacacctagacttgttcaattcatggaccatatctttatctctttgtaaaatgacttcaaccacactaagatctccactctggacagcctcatgcaaaggagtgtccccaagctcattcttctctcttgttatctttatatctttcatcacatcatcatgtgttgacttcactaatgcatattgcgaaagaatgaggctgaccatagtattgttcttggacctcacagcaacatgaagtggagtggacctcttacattctccctataaaagtcatgaagtgacaaaaatcactctcatctttcttcccttactgtgcacatgacatgttgtctgttcat

SEQ ID NO: 174164 - DNA, 416 bp, Glycine max
aacttaagtcctcaggtaagctgatacttataaaatacaggttgtacatccagcaatattaacgagatgagaactcatcagcaaaaaagtgacagaaagatactgaagagctacaaataatgttttgaccattttgtaccgaatctggtgagtggtaacataaattttgggcaggaagatactaaagagctacaaatcttttgttagaataagttgatattattattaactcttggataaatgaatagacccagccaattgtctgcacttggtgtcaccacaataacactcttggttcctctcattgcaggaggcaatattcattattactagtcgctagttatattaatttacttttaacatatagagacgtgaaaaacgatactcagatgcattaaatatcttaccaaagtagc

SEQ ID NO: 174165 - DNA, 378 bp, Glycine max
  unsure (1)..(378): unsure at all n locations
cttctgttctggaggtggtgatcaagacaaggatgttgttgtggatgacttcttatggagagcgacgtntgatattaatgaaatccctatacgtgtgcctccagatagccctttggctccacagtggtacatgctagaacataggaggggtggcaaagccaaaggagagctaatgttggcggcttggatgggaactcaagcacacgaggcatttcctgatgcatggcattctgatgcagcaactgttggtcctgaagctgttgcatacataagagcaaaggctgacctttcacctaagctatggtatgtcatggtcaatgttattgaggctcaagacttggtaccaagtgacaaaacccggtatcctgaagtctctgt

SEQ ID NO: 174166 - DNA, 418 bp, Glycine max
ttaagtgaccgcgctgcagcttgatgcttggttataatatttataagagctttttttgatatatcgctggaaatgagaaaaattcatactgtcaatttaataaaattactttaaaattaaaatttaaaataattattacaaaaatgtctaatgtatcacatattaattggactatatatacaagctaatatattctaatcaaatttttaaaagaatatataaataactgagtcgttaaattttgagcgtccaagttattttataaataaaaaacaattaaataaaaagttcgttaacccaataactcacgtgagcacacaaattctattaaaactagtaaaactagtattgtcactattgcatataggaaactttttatggaagttatatatagagcacatttatctataaactatac

SEQ ID NO: 174167 - DNA, 319 bp, Glycine max
tatgctaaataagtagtgtaaatgttgtgttacactgatcaaatacctaagaaagattgtagctcagtgttataatcttgaaaaataatttgtctaaaagatcaaattgtgtctcttgattaaattattttataactaaatgttgttttcctgtaagttgtccttgataaagagaaacacatttgccatagtggacataaatgttgatgatggtatagaaattgtgtctgaacttatcaacattacataataatgtgtgtcatattcttttaagaattttgtatccaccctacctatatctttaatcatgttttgccat

SEQ ID NO: 174168 - DNA, 429 bp, Glycine max
tctcgacccggatctctaatcacctgggctgcagcttccaattagtgtaccacactaccgcatcttcggccaatctatcctgaaagaagtgtatcaacagcttttcatctttagaatgagcgcccatcttacggcagtacatcttgagatggtttttgggacaagtcgtccctttatacttgtcgaagtccggcactttgaacttcgggggaataacaacatcgggtactaagcaaagatccgtcatgtctgcaaacggatagtccccaaatccttccacagccctcaatctttcttcaaggagatcgagcttcctcttttcttcaggtgcgggggcggcccttccataaacaaaactattggctactctgcgatgttgggttggggcaacgtgcctcgtgccggcccttctgggatcggaggataaaa

SEQ ID NO: 174169 - DNA, 336 bp, Glycine max
  unsure (1)..(336): unsure at all n locations
ntataagcgcgggtctgngggacgaaggtcaagtggtctctatatacgaatatgatgttccgggtacattgtatttggtatggccatgcactcctgatatccacctgggaaattgtcgagtggaggaacaccccgacatttacgcaacgagcataatgtaaacctttacggttttaaaaactctatagttaggcccaggctttagagtttcttttgttaaggctttgtgtcttttgttttgaatttataatacaaggatctttcttcatctgttcctacgtctctacccattctcatacattcgcatgttaacttctttatttgttaaacggcaga

SEQ ID NO: 174170 - DNA, 313 bp, Glycine max
agctgttgagaaattcatatggtcatttctttacactcggaggtccgatcaggcgcatcacatatagagacgctcgaaattgaacaacggaagctctcgagatattcaaatagtcataacttttaactcggaggtccgattcaggcacataatatatcgagatgcccgaaattgaacaacggaagctcttgagaaattcaaatgatcattacttttcactcggaggtccgattcgagcgcatcacatatagagacgctcgcaattgaacaacggaagctctcgatatattcaaatgggcatatcttttaactc

SEQ ID NO: 174171 - DNA, 235 bp, Glycine max
ccattataatgtgagctgagcttgcgttgttgaaagccgtgctatttgatatactatgtgcctgaatctgacctctgagcgtaaagacctgaccatttgaattagagcagagcttgcgcagttcaatgcgatgcgatttgatatgtgattgagctggatctgacctccgagagtaaagacctgaccatttgaattacttgagagcttgcgtagttcagagcggagcgattaatat

SEQ ID NO: 174172 - DNA, 350 bp, Glycine max
agcgtccattgtagagtttgtgcttcccttttcacgctttaattcactccccacaagtaagtgcaatttcccttggttatttggctctccattgatgtgttttggtgctttagttgctcattgtttgcaaaattcgtgaagcaattcgcatctgaatccatgcttgttttgttgagttgagggtttgtgtgagaaaacattaggcctatgttgtattctgaaacaatggggcatgccacattgtccccattctcttgcaatttgtgtccaaacgtgcgccccccaagtgctcggtgaaatgccccaatgatatatgaatatgattttgcaaaattgggatggtgggactg

SEQ ID NO: 174173 - DNA, 403 bp, Glycine max
  unsure (1)..(403): unsure at all n locations
nggatcttccttggtcgggtacatgagcatatgcaatgctcccaaatactctcaagtgatcaactcttggcttcactccactccatgcttcttgtggtgtttgatctttgacattctttgttggggagcgattggacaaataaatggcacatgcaacagcttctgcccaaaattcctttggcatatttttagccttcaacatacatctagtcatattaagaatagttctattttttctctccgctaccccattttgttgtggagatctaagaaccgttagagggcgacgaatcccatatttttcacaaaattcattaaattctttttatgtgaattcgccacctctatcggatcttagagctttgattacataaccactcttctttttcacaagagcctttaa

SEQ ID NO: 174174 - DNA, 388 bp, Glycine max
  unsure (1)..(388): unsure at all n locations
atttttttgntattnnnaaggaccctgaaacgattagttacatttttgcccccatttaggacatatagtttagaaaatagatgtttttagggttgttctacgatcaaagtaggagcctaaccttatgaaatgcataacatgattcttaattaagacatcaatatttgcattttaactatttttctccaacttaattatgttggcatccgtaactcggtgcgggcgaataaagaaagaccaaacacagttactttcatattggaaataccatgtcaaacatgcattattttatagaaatacaggacatgtattatatattcattgatactcgcactgtacagtatatatataaaatgttcattgatgttcctactgtattccctacagg

SEQ ID NO: 174175 - DNA, 359 bp, Glycine max
  unsure (1)..(359): unsure at all n locations
tgaatataataaatgatagtataaatgctcaaagcatattacatactagttttgtagaaaatgttcttcaaataatttaaagtaaatgagcatattaaatgcaaaattctctaaaagaatctctatgacttgttgactcttgagacttatgttgacgattttgaaaactaatatttgtgaaagtttttcccacttatttaaaatgaatgttcatgtgcattaaatgtttttttttctgttttgacaaacatattatctgcttctcttttttttttctttgtgtgacatgtaaaaaattaaatgcaaattctataaaaaanaatctcaatgacttggtgactctngagacttatattaat

SEQ ID NO: 174176 - DNA, 369 bp, Glycine max
  unsure (1)..(369): unsure at all n locations
tctatataagctgaagccatttatcaataaacacaagttgagttntattcagaanaattagagtttatctcttttatcttagtaagagtgattctcctaagttcttgagtgattcaagaacatcctggctatatcaaaggtctttcacatcctttgtgtgttgccctcgctggaaagagtgattttttccttccaccatttcatcttcaaccttgttctttcaaactccaatttccagaaaatccaattctgcccagaattatctcgtgaccataactctcattttactcgttcagattaagtgattctttgagcctaaattaaattcaaaatgagagctttcacctttgtttggaatcacctcatttg

SEQ ID NO: 174177 - DNA, 395 bp, Glycine max
  unsure (1)..(395): unsure at all n locations
agcttcttgtatctataaccattcttcaaaaatggggcgctgnctctaaacgaaattctctatttcttttcataattgaacttgcatttgaagaggtgttcgttggtgcattaaatgtatgtccaatccatgtgaaatactacttctttttatctttcttgatccacattntaacaaagacaaaaacttttgctcaaaaaaggtattgtccacaacaggtgtaacaagtcttttaagaaaaaaaaaaaatattgttttttgggtctttgatgattcaactactttgctagccttcgacaaatcctaagaataatgttttaaacattctttgtcaaacaaatctcatatatagagcattattgaaatctttaatgcttgataaagcttagcatatg

SEQ ID NO: 174178 - DNA, 364 bp, Glycine max
  unsure (1)..(364): unsure at all n locations
gtttacttcctcaacctcgaagccgtcaccattggacagtatgtggtgccaacgggtcgaaccgatggcaacataatcattgactcaggcacggtgttgacgtatcttgaacaaaccttttacaacaattttgtggcttcgttgcaagaagcccttagtgttgagtcagcgcaagatcttccatttccgttcaagttttgttttccatatcgtgacatgactattcctgttattgcgtttcaatttaccggagctagtgttgcactgcagcctaagaaccttctcattaagttgcaagataggaacatgctntgcttggcggtggtgccaagctcactaagtggaatntccatctttggaaatg

SEQ ID NO: 174179 - DNA, 406 bp, Glycine max
  unsure (1)..(406): unsure at all n locations
agctncttcatctataccataaccacaacattcacctccccttcaactgctatgcctcctccaatctatgaaaaaccacaaattgatgcaatcctaccccgcaagggcattggatagaagactccaagtagattgggccaaagatgcaaaaaaaggccctaaggttcttatgagccttagggtatatttcgggcccatgggctaagtacgagcccacttatccttgacatattaaaataaggtttcattaattctgggttttgtatttaaggctccataatgtaagtagggtaccctaaaaatatagggattttcagcccttgtattttatggcacctacactattttntgtattaggggtaggctttgtatttcacatacactaagtgaaaatatgatgcgtgtg

SEQ ID NO: 174180 - DNA, 400 bp, Glycine max
tgcatcttagacaatatcggtgccttcttttactgcctttgggttcggctgacacgaacaacaaagtctttcaacacctactatatgttgatgaccacactattattggtatgttgcgacaatccttcaaaaccttatctatacaatctgaaaggttggttgtcatgtggccatatcgacacccttctctatcataagccatcgttcattttttcttggaaatgcgaacaatccatgttgctatggctggactacaaagacagaattgttttaaatgttgataaaaaaaaaagtgcttgcaagcactgtagcctgcatgaaattagttagcaacaacaattcttagtatatatgaaactttaattaacgcgaccatcataaatgaaaagctacccaattt

SEQ ID NO: 174181 - DNA, 433 bp, Glycine max
acctgctgcatgcaagcttagaattctgcacatgcaggaacaacttgagagtaacattatttcaataaaacaatgaaacgaaaccctaagcatcttatatatacactttaattaacgtgcggagattcctctcttcacagctcaagctcaatcacaaaggaagacattatcataccgcatttacaagatcagtcttcaccgaagcttgctctttcaccagtttctctacacatgaaaaaatcaacgatgcatggccatattacgatcaaaatttccgacacaatcttcgctcacgaggaaaatcggaaaatcgatatgaaattcggttcaacacctgcggtgagcttcaggtttgcgaaactccccgacgaaacggaattcgcagaaggacgcgaaaataatgtgctttgtgttgccgaaattgaaccataca

SEQ ID NO: 174182 - DNA, 422 bp, Glycine max
  unsure (1)..(422): unsure at all n locations
agcttggntatccatttttgttcgggcctttcttcttctttattggctttctgagagcgtttcttccgccatcgaagttagtgttctaaccccattggctttggttatctgtttgaatcgcgtaaatggccttaggatagacgacattgttgttgtttggtgttggatgttggaggttgaaaatgaagttctttcgcgcgtgtgttaggggacgaaaatggagtctgcggaagaaggtgaagaaagttcttttgtagttcttctgcagttgacagtgacggaagaattcttccgtgggactacacgaaagaaccttcttctgctgggtgcccctaacaaatccctatatgatattgttggattgggaggctaaccggataatctatgttcattcgttgatttaatgaccaaaatacccatat

SEQ ID NO: 174183 - DNA, 342 bp, Glycine max
  unsure (1)..(342): unsure at all n locations
agcttggcttctntatactntagtatctgagaccacagattattgcttnggatgttgcatgaatttttctgagctttgatcacgctctatacatattgcatctacactttctaaaatggagctctatacatattgcatctacacttgactattagctaatagcggtgcgattgtgacaactattgcatctacactttctaacacggagctttatacatatgttcattgcgtgcaacaatgaagagatcgatgtgagtcatccagacttttcaatgcggcaaaactcaatggttatattcctccanataaagagatcttagcacatttctcttgaagntccct

SEQ ID NO: 174184 - DNA, 403 bp, Glycine max
agcttctatggaggttggatctttgcatttattgaggtccttcacaggcgattcttcaccttggagatgcaacggaagataaaggagaagaggtgagaggaggcgccatccactagggaataagccatgcaaagaagcttcaccaccaagaatgtgccttggataaaaagctcggagaggatgcttcaatggaggaaaagaaagagagaaagcggggagcaccaaattgaaggaataaaagagggagagaagtggaactttgaagtgtgtctcataagactttcaaagttacaaaaagtgttacacatgcatctatttatagactatgtagcttccttgagaagctttcttgagaaaacctcctagagaagcttttttgaaaaactttcttggaatctaaagc

SEQ ID NO: 174185 - DNA, 93 bp, Glycine max
  unsure (1)..(93): unsure at all n locations
tcttttccacatcaatcttcacctttaccaattttgtcattctttatttctaagnttgtcaccttctttcgaaaagttggtcaaaactggtat

SEQ ID NO: 174186 - DNA, 371 bp, Glycine max
  unsure (1)..(371): unsure at all n locations
accttgaacaggcaactaactcnctcttttatccatgctatgtgctcgcgactggaccctttcctctcttcgcaacttgagttcattattgctaccccatagggctacgcgaaatttgttccggccatactcttccttgcgagccctcttggtctctcgttcaagggctcttgcggcaattgcattctcttcccataacccggcacactccttccgaacgtgtgtagcagccaacttgaacttctccttggcgagatatgcctttcctaactcgcttatgagagcttggactttctcgtcctcttccggagctacaaaattctctttgctgacgactnttaacttggcgagccaatctaaaacctcgtatg

SEQ ID NO: 174187 - DNA, 381 bp, Glycine max
tctcaacttctagctctaattgcacttttcatcctttaaaaatgtaaagaagagagtgtttcctagcttccaagttttatttttgtatatattaccaggacaaagacatctttataatttcttttatgaaaaatataaaagcatagaattgcatccatgtatgttttgtagttgaaaatatgtaaatgatgatattgatgagaagtgaaaacgatcattctattggaggatctccagtttgttaatttgatatttcacatttcagttgccaaagataatgaaagatgatgtgatctgcttacaacagcatctgatgtatgttctttcctttgtacatacaggacgttctgacacatgtccttgaggaaactggttatgcaa

SEQ ID NO: 174188 - DNA, 426 bp, Glycine max
  unsure (1)..(426): unsure at all n locations
tgggaaggtttccaagttccggtggtatattgcctgagatattgttgttctgcagtaatctgcattcatccgccgttagaacactccacagaacataaaacacaataacaaaaaattgaagaaattcgtttgctacgagaatcatgctgaaagtatctagcaggggatgaccgttacagacaaacagaaacatatactaaaatacgaagaagaaaaaagtaagaggaaaaaggtgaagttaaagagaggaaggtggtcgctcacacttgtcgaagatttgttagattttcgatagccggagataaagttccggagagagattggctaggcgctccactgcagagagaanaagaaaaagtgagaaaggaaatgcngaanaagagaaagagaaagagaaagaagatgatatactaacaggcctatgac

SEQ ID NO: 174189 - DNA, 404 bp, Glycine max
catgcaagcttgccacccagcttgttcaagcgagcttatctcgcctaggcgagcagggttgcttcctccagaagcaacagccttttggaggaatcttctggagtgcccaagtgggcctggttgctattttcacccccatttttactaagtacaccccctgcctttttttggtgattctttcttcgtaaagttacggaaacttacgaatttcgtaacgatacttgttttctttccgtaatgttacggaaccttgtggattacataatcatcccctttttgacttacggaatgttacggaacctcactaattgcgcaacgatgctttcatttgattttcggtgtgtcacgtaaccttacggaatgtgcatcaatatttatttttgctttcggcatgtcccgaaatt

SEQ ID NO: 174190 - DNA, 381 bp, Glycine max
tgccacccagctcgcccaggcgagcagggttgcttcctccagaagcaacagcctttctggaggaatcttcaggagggcccaagtgggcctggttgctatttgcacccccatttttactaagtacaccccctgcctttttttggtgattctttcttcgtaaagttacggaaacttacgaatttcgtaacgatacttgttttcttttcgtaatgttacggaaccttgtggattacataatcatcccctttttgacttacggaatgttacggaacctcactaattgtgcaacgatgcttccatttgatttccggtgtgtcacggaaccttacgaattgtgcatcaatattttcttttgcttttcggcatgtcccggaatttcac

SEQ ID NO: 174191 - DNA, 408 bp, Glycine max
  unsure (1)..(408): unsure at all n locations
gcttgaagccaatgttcttctccactctttcttcactctcattgaaccaaaactaccaagtgcttgattattattccccatgccttttccactgtacacccagttgctttctggactcccaatatttgcttctagcctttgtgataaggacttgaccctccctgatgcagcaaaagcaaattccccatcactgttaggactcactttattgtctctattacccatcaccactttggatccacttttcaagggccatttctctttgctttcttcaactttattgaactcaacaatcaagggcttcacttccttgtgttccttttgacaggacaaatcttctaactcttgattctcnggaacaagctctttaggctcttgacttctacaatggagataggggcttccact

SEQ ID NO: 174192 - DNA, 404 bp, Glycine max
  unsure (1)..(404): unsure at all n locations
ngagtctttacatgcattgatttcgagggaaaggctcataattccactggcgcaggatgaggcagaagaagagatggctgaagtagaaagagacaaagtttggtaaaggaaaggtctttaaataaacccttttgaaagaagaaacttttggtatagagggtttgtgttgtgtgtgtatgcgtacgctccaaaaatgggcttggtccattgagaaaggtgtgtcaagaaaaaagtgacgaatcacgaattgaactgagtctcggtcaagcatgtcaacagcgcaccgcctgtgtgaatgtgatgtcttctgtttgtgtcttcagtcaatatttctttttcagtaaaatgcaaaaatcacttcattttcgattcangatcttcacattacgactaagcgacaaaac

SEQ ID NO: 174193 - DNA, 384 bp, Glycine max
tgatttattgatggcctttgtggatgattgggtggtgggtaacgaggagggttgatatctgctgagtaatgacattgttgagcaggtgggaaatttggccatgcaggaatggcagccagaacatgggttccttcctccttctcattctccccatttgccccaggctttttactttgtaaagcaagacaatcaaatttgccttttctcaaacccacttcaaccctttcaccggcgaacactaaatcggcaaagcttgaaggcatgtaacccatcatcttctcatagtaggacatcggtaacgtgtctactatcatctttatcaactccctctccattatggggacactacttgagcttcctatccttccaccttgggcgtaccct

SEQ ID NO: 174194 - DNA, 395 bp, Glycine max
  unsure (1)..(395): unsure at all n locations
tctagcacaatggacttaccttgaattaattcctttgatagcccttttgagcctatgttcccctttctttgtnttgaagctcatcacaagccttaagtgaaaaaccatgatctcaccttaaccttaaggaattttggagctttggaattgttttgggaataagtgtggggcggngggttgttggataacatgttttgttggctatgcttcatgatgtatttttgggccataatgatgtacatcgtatatgggttaaatgttggacatgttgctgaatgatatgctagttctcaaatggctactgtgcaaaaaaaaacaaaatcaagttaaatcaatcagaaaaagaaaaagaanagcacataaagtgagtgaataccttctcaacaaanaaaaaa

SEQ ID NO: 174195 - DNA, 393 bp, Glycine max
tagttgggtattctgatttagattatgcaagacgtaaggtagataggaagagtactagtggtacatttcatttgtttgggagtgctttggtctcttggcattctaagaaacaagtttgtgtggctttatccatagttgaggttaagtatattgatgttgatagttgttgtgctcaaatattttgaatgaagcagcaactagaggattttggtatttttattgatcatattcctttgagatgtgacgatacaagtgcaattaacttgaccaaaaatcctatcatgcattctagaactaagcatatacaaataagacatcttttcattagagatcatgtgttgaaaagtgattgtgctattgaatttgtatacacatacaaccaactagctaaca

SEQ ID NO: 174196 - DNA, 404 bp, Glycine max
agcttgactaatcccaacccaacccggtcttattcagttagtgataacctgcgacgtacctaagtaggcgagctcctggcagtcaatcaataaaagaccaatgtccacaaagcaaggaggcttgtttggcggttggccacctttgttttttgggtggtatataaaaataatcttgtggaaataaataaccatccgggggtaatcaatcacagggtttaaaaatggaaacaggatgtaaaagggcttcttgtaatcaattaccaagggtgtgtaatcgattacacagggcattagggcactaaaaattcattaccagttgtgtgtaatcgattacacagggctacatgccactggtaatcgattaccatttaggtgtactcgattacacagtgttatttgtatat

SEQ ID NO: 174197 - DNA, 330 bp, Glycine max
  unsure (1)..(330): unsure at all n locations
cttgatgttctatgcttcttgaatgtggcagtccattatgaatctccttgtgaaagacatctttaaattcctgcaataagggttgaacactangagaaacataaatagctaactgattagaattatcactctctctctcttgtgtatcactcttttcctcgggtgtatcactctctcttttcatattcctttgtggagcctcactattttctttctcttgatctctcttttctcccattctgatttggtcatcacacacttctctaggggatagaggtttaagagtaaatgaggaagattggctattcgtctgtaggcttttctttgtac

SEQ ID NO: 174198 - DNA, 419 bp, Glycine max
cctgggctgcagctttgacacttgttgaatcaatgactatgaggctgtattcgatcaaaacagagagtttatgcctttgaagaaacttttctaacttagaaacttttctcaaaacaaaccatgatgatgcatgatgcaatacagatatcaaatatactaagatgcaccaaccaagataacaaccaatacaaatgccactcaagagagttgggcatgtaaaagccaaaacttcttcagaacttcttcaagcttttccttgagcttcaagctttaaccttagggtagttcaccatgttgctcattgttcgtggtcggcaagtgtaccggatcgcacaagtagtataaaacagtaagaactgagtatcgaactcttggggaacttgtgttatttggtaagctatttcggtaaataggtgtct

SEQ ID NO: 174199 - DNA, 378 bp, Glycine max
cactgtaagttagtctcgatcggataatcgatgctactatctataatttgttcattcgtgatgagagaatgattgattcattcacgagtctcggctctaattgattaccaagtgcgttaatcgagtacttctctctcattaagtggtcagaggcgaacaagaacacttcactccattatctatggcatctaatcgaatgcatagctcttgagttattttcatatgctgggatgaactctttaatcgattactcacataatctaatcgattacttagtaactcaatttcttagtcattcgcgtatgaagatcctttcttggcagagagatgcgtcttttgagtagatgaagatcacactctcaatcaacagatttttgt

SEQ ID NO: 174200 - DNA, 416 bp, Glycine max
  unsure (1)..(416): unsure at all n locations
agctntcatacttcgtgtagagagaatcatctttcaaagcatcaaataattaccctcaaaagtaaaatagaaaaaaaaggaccattcttgcccctataaatgaattgataacttgatgattcattgattctgctccatgcccgaaattgtaattcttttttaacactcatgggcatcttaattatccttaacttcactctttgtatctgataatggggtttatccatttgataaaattcaagtagttgtaggtttgtaaccaaaaaataataataataaataaatccacgttgtaggtgatcatcacatcgnttcccatatgcagggagtagaatattccaatgtctggtaaatgtagcattttggttgaataacttgctcagaataatcataaatgcagatctgaggtgtgggcc

SEQ ID NO: 174201 - DNA, 419 bp, Glycine max
  unsure (1)..(419): unsure at all n locations
ntagtcaaacagaataatccgaacatgtcacagaattgtgttctgaanaagtataacaagactttgtgtgattggtttaaagatacaatctttgcagatgagaatgcttcacagacattaagaaagctagcagatgggcctaaaagatatgttataacctggcgaggatacgacataaacaggtattcattgtacacaaaagcacaagatgacaaaagtacactgcagaatagcggtgtcaccctaagggctgaatctcaacactttgaaagtgtcaatgactccaatccctgtgtagcttccatcccttactttgggttcattgatgaaattcgggagcataactatgtgaaacttaccgtatgtgtactcaaatgtaaatgggctgatagacacaccggcgtacgcaccgatgatat

SEQ ID NO: 174202 - DNA, 431 bp, Glycine max
cagtcacctgaggcatgcaagctttcataggtgaaatcaagtgcagccatttcccttatatttctctcacgagggggaggttgtgccatgttctcagaatgtgcaaaatcagaatgctcagaatcagaatgctcaaaattataatgctcaagatcaggatgttcaaaatcaccaataacagaatgcacagattcaccagttatggaatgctcataatgatcaaaaggtgtaaaatgatgcctaactaatctatgaaatgtcctatttatctcaggatcaaagggttgtaagtcagatggattgcctctagtcatacactacatttagcatgcacacaactagttgtcttgtcatgtaaataaaggtgtagggttgaactacagctaccctcatatgatatccaaatgacttgaaattctgtgagcaacctt

SEQ ID NO: 174203 - DNA, 442 bp, Glycine max
  unsure (1)..(442): unsure at all n locations
actcagcttaagctgttcaatgcttagattgttgacagaaaggcagaggtctgtgtggtggttggcacaagagcataaaccacagagtcaggcgacaagtgcagattntttattcatggccaattgggttaccacattaatcaaggcatctagtttaccttcaagcttcttagtctcacctaatgaagatgaaattcgggctacttcatgcactcctctaatgacaatagcatcacttttggcactaaactgctgggagtttgaagtcatcttctcaattaaatatctggcttcagcatgagtcatgtctccaagggctccaccaatggcagcatctatcatacttctcttcatgttactgacgtccgcataaaaatattggaggagaagctgctcatatatctggtcgggacggccactagcacatagtttcttaaatctc

SEQ ID NO: 174204 - DNA, 364 bp, Glycine max
ttttttccgctcggcaaacacaaagagtgatgatcatcacgtggtacactaattagtaatagctcatggtctcttcatttaaactagcgtgcttggtttttttgcctgggtggtggctcctggaccataaacaagggagtaaggattttccgacctagcttgttgaatttctatttcacaggagaggggaggctatctttcttttatttaatcccttcggaaatatttactttcattgggtggcccccaccagcaaaggggaaccaacattttgagaaaaccttcatgtttggtacaggaaatcaaatccttaaaaaaaatatgatactataacgatggacctctctacaaatataatacacct

SEQ ID NO: 174205 - DNA, 295 bp, Glycine max
  unsure (1)..(295): unsure at all n locations
actcagctttaagcatcaaagtggttgcatagagtttttgttgtntaatgcatgtgtgcttacgttcataagactatatctaataagtttctttgtctacaactagagatgcatggatcctccatatgcagtcatcatccttacactcaatagtcaccctacattnttcattnttaacccaccatccaaatccttcttgtattccaaatcccttcagcacttccctaaaatgtgttacatttaanaacaaatgcccaatctcaaaacagatcttgccatcattgtccaactcaaa

SEQ ID NO: 174206 - DNA, 383 bp, Glycine max
  unsure (1)..(383): unsure at all n locations
agcttatttgggataacttgcacaacccatataagcctttgtgcccaaatgttaatcgtaaatatgacacaaacgacttggaggacctgttggaatgtantggttcgaacttgatcacttctttaaacaatgcttacacatatcttaaaaatggttttaggctttagttgaggaatgggagtagtagtctgtggattgagccttggttggagggggagacattaacctccaaagtcccctttgctcatgtgaatgaattggatttaagggtgtgtgatgttgtaaatgaggaggggtggcatttgtcaaatttggcgacaactattcctggggacaccatgcaaaagttgttggagtggaaaatgtttttgcaccctaacttt

SEQ ID NO: 174207 - DNA, 413 bp, Glycine max
  unsure (1)..(413): unsure at all n locations
tgtatcaagatctcagaaggggtcaacagatnaatctaattaaagcacataaataaagacataggtagatactacacccaacaatgtcgcttaaggatcaagttaagcttcataaaaggaagacaaaaatatcataaaaaataaaaggtcacttgcaggttcacccatcataatcccttgttagaagaggtaaaagaaacggcatacaatatatttattacaaattataacgatgatatacattatcacccaccttaaaaatatttttgtggttaagatcattaaatggtcatcaactntgttttcttctatttacacttagttaactttctaataaaaattttgcttataaaattatanaataaanaaacttagtaacattctgatcagtctttgcatgggtaagacgtata

SEQ ID NO: 174208 - DNA, 249 bp, Glycine max
gtatgtgaaaacttctgttattgcaagaatgtacaaatcaatgtggatactcgcagaatgaaatgaaatgttagtcacagtcattcatcataacatcaaatcacgatataaacgaacgtaattgcttcgaatgtaagttacagatactaatatggtcaccacaaacatacatctcatgtgactcgttctctctgcgctgaacttgagtgataggatttgtgaaatatttgcgacctcaaactactaaac

SEQ ID NO: 174209 - DNA, 369 bp, Glycine max
actcgaatgaaatacaagaagatgatgattttaatttctttgtgaagagattcaataaattcctaagaaacaaaggaaatcaaagaagatcaaacttctaaccaaagaaaagaggagaagattcatcttctgttccaaagtgttatgaatgttatcaactaggacatctgagagtttattgccctagtttcaagaaaagaatggaaaaatctgagaggaaaaccttcaatgataaaaaatcaaagaaatcttacatcacttgggaagataacgatatggattcattcgaagactcatataatgaagtcgtgaatctaagtcttcttggccaaaattatgaaagcgaagaggtgacatcttctaacaata

SEQ ID NO: 174210 - DNA, 349 bp, Glycine max
cttgcactagtttaatggaggataatcgatatcgggacctggtattacaaattcagtcccgcccagatgaacacccttccctttctgtgcacaaggggttaatcttcagagagaaacacatttggttgccttttcctaatcctttcacctccttgcttatggaggagttccaatcaacccctctcggcggccacactggaattgcaaaaactttgcaccgcctccggcagaactttgattggcctaacatccattctgatgtccgccgatttgtgtcccagtgcctcacttgccagcagacgaaatatgagacgaagaaatctccgggcttacttcaacctctaactgt

SEQ ID NO: 174211 - DNA, 143 bp, Glycine max
  unsure (1)..(143): unsure at all n locations
ctctggctcgcttagcgttcattagtgaatntcaacttagcgctcgtcttttcgctcagcggatggactcaagcggtgcacttagcgagattagccctcgcttagcgaacatgcacagctcatccttcttccagattcttcct

SEQ ID NO: 174212 - DNA, 374 bp, Glycine max
taacaagcttttgcattttggagttttttgctatttcaatggaagggggttttaatttttatctttggtattacacctagttttaattttataaaactcgtgccatttcattcccgttgaaagaaattggtcctcaaagtcatgagtatttgcattttttagacatttcaaattgaccgtcaaactcctaccattttgctccctatttcaaaatatgcttctcattattccatttcatggagacccaattaacaatagacttgcatgacaaaaaaaaagtgtgaacgattgctaggtgcctttggataaatatattcgatttagtaaaaatgtaagtgttctcagttcgcccgttagacgagacattaatcact

SEQ ID NO: 174213 - DNA, 360 bp, Glycine max
  unsure (1)..(360): unsure at all n locations
tgtacataaaataagaaaaagatgcgctacttttaacagggaatatcataaagaatgtggatgactccatttcttgatctgatcttcaaagcttcctactttagccgattggttccagtcaccaagcctgtttgcatacatctcatgataagccttggcattcacatggctaaaaattctgactaatttcccatgttcctcatccaccaccatttatccatcgatggacacatgtccttgggccaagactttaatggtctttatctcaaaatttccatttagagatgaagggccttcagctaggacaacggcacctagaatttcccctaagaatgtgtnctacaacattataaataccaa

SEQ ID NO: 174214 - DNA, 317 bp, Glycine max
cattttctatttgatcgttcactcagaattaatcttaagaaataattacctctttctcttagcaatgaaaatttgtgttccattcttgtgttggacgacacacccttctttgtgtaaggaaacatcaagtccactggcaaataattgacttatgctaagcaaattgtgtttaagccctttaaccaataatacattttcaagtggaggagtgggagcaattcttataccttccacttctgttttctccgcaagtgactatttgtcaagcattgaacatacaccttttccgacatgtgaatgagccgccttgcccagtc

SEQ ID NO: 174215 - DNA, 448 bp, Glycine max
  unsure (1)..(448): unsure at all n locations
taataccagcagaagtaaaggcaaacatcatgttatatgtccttatgttntgttggtaattnttaccatcagctgtattttggtcaaacagaagttgatgcagaagtttaagtggattctgtaacaatgaacgttcaactttaccatctccacaacataagctgaaccttgggcttgaactatttttacatttttctattctttcattataccacattttgcattacagtgactacattgcatgagctggtcaccaagatcaaaatactctgaaatggttaaattagatatgagtaaatgatggtaaccattgattatattttgacaggaatatgtaaattatagcatgatagataaaagtatatnttggattgactattntaatttgaattttaaactgaagtacttggatcagacatttatcttctgtgttagttgcagagtcatt

SEQ ID NO: 174216 - DNA, 381 bp, Glycine max
  unsure (1)..(381): unsure at all n locations
catgcaagcttaggggccagtacgagcaagngctaattccatgatcagtaaatcatcttcctgcgtccggctcaagacgttaaaaaagcgcttctaggaggcagcctattaactttaatccacgttctttaaaattcatgcttttattcatctatttctcgaattttatttgcatatgcctagactatttgcggccattgatgttaacaaagtgataaacacatagagtttgctcgcctaggcaagctgaacttgcctgggcgagctgaccttgcctgggcgagctgaccttgcctaggcgagcatgtttgcaccaaaaatattacatggggaggggtgaggcctttctccacactcaaaacatcccaaagctttgcatta

SEQ ID NO: 174217 - DNA, 428 bp, Glycine max
  unsure (1)..(428): unsure at all n locations
ggacctttaaactcagcttatctaactggtatacatatgaacgcaggccgcagtttctcaggcgtaatctccactctgacccaggtcgcgaanagcctctagatgcaccacatgaacatttgttgcactcttgttagataaaagagtgccaccgaccggatgcatgagataagcacgagctgctacaatccgtcgtcttgctaggcatctcatctcatacatgtcccgaacccatgagaggcgtacatatgccccgcgtgctcgtactgtctcggctctagcctcctcaccagacacctcgagcagcacgcgcaacaaatataccagctcgtgcactgaaagagcctcaaacttgggaggcaccactgatcgggagactgaggagtgactacgcattatctagtgtgagcgtcaactctcctacttga

SEQ ID NO: 174218 - DNA, 371 bp, Glycine max
  unsure (1)..(371): unsure at all n locations
agctttgacttgagtcatcaagagattatatatatgtgaccatggcatgagtttaataattatccttcaacatctttatcatccatcaatcatcaatcatctttgaatcatctatctttcaatatctntttacagaattttttgattcatttctcttcatctttctaaaaggttttgatcagcactttctcttccaagaaaagttctttgttcaaaaacttgggctattcatacttttcattctcttctccctttgcccaaaaaaccaaggactaaccgcctgaaatcctttggggccctcctctccctttccaaaagatcaaaggactaaccgctagaaattctntaattcttcccttcccctaagccaa

SEQ ID NO: 174219 - DNA, 390 bp, Glycine max
tcagctgcctgtccatgcagcagaatgatggcccgagttatgttgtggaacgatttctatcccggaatgggtttaagcaaagacaacggcggcataactagctcgataaatgccataggaaatcgtgggaagtatggtttatgctataaacccactcacgcggatataaagagaagcatcgcgggaagaaagagcggcggtcaaagctcgcggctgagacaataaagtgaaggaagcccgccctgccacataagtagaagctctataagcgcgggtctgggagacgaatgtcatgtggtcgcggtatacgacgatgatgttccgagtacattggatttggtacgaccatgcccttctgatttcagctaagtattggcagtggagaacccc

SEQ ID NO: 174220 - DNA, 413 bp, Glycine max
  unsure (1)..(413): unsure at all n locations
agcttctaccataggctggaatgctatctatcatattcttatttggcttttgggttgctgccatggaggttctctctgcctctctctttattaatcaagcatccatacagcttagtataaattttctagacaaatgcttggtatcgtattctgttatgcgtgtgtgactctgtgtttgtgtattattctacagtgttttttagcatacttagtgtatgtgtattttattagccaccatgctcctgctacatgtagtaatgccatctaccatttttatggcagatttttggcttgttggttgctgccatgggctgctattcnccattaacaattaaaaaattgccccaaaatgttattttgtttataaaatggactcaacaatatttctcctccccaccccaccccacccacac

SEQ ID NO: 174221 - DNA, 348 bp, Glycine max
  unsure (1)..(348): unsure at all n locations
ntgatntanatccactaatgccaacaacaaanaaagaatatattcagaaaccacgaaatatattacacaaatggcagaagagaacagagcaagacggagcataccaagcggaatcaaacaatggcacttccacctccaccggaactcgaagcagagttaaccactctctcttcctcatattccttatcatccgttggtagctcatacctgcaaacagggcaagaatttcgagaactcaaccaaggaacaatgcaatctccatgatacccatgcccgcacggcaacctcttcgccaagtctccaacaccgagcaaatccttacatatagcgcacgccacggcttctctt

SEQ ID NO: 174222 - DNA, 438 bp, Glycine max
agtcacctgcggcatgcaagcttgtgctattgttgccaaaattgaagctgctactgggaatgccaaagttgccgatttaggaattcctccttaggattaattgtgttttcccaaatgatttgatccttcctctggttactaatagggaaaacacacaaggataagtgtaagaagaggcttcatgagcaccgaaaatcccctgaagaccttccaacccattgttctaagagattgcaatagtaaacccaaaactttagttctgtcgattccctagttcctttcccctcataatgggtggaggatttttctccaagaatttgaattcgtaaaatatgattggtcatggtgacgtttctgttgtcgttcaagacatcatgggtaatgtcaaccccactcctatatgggtttgctactccgagctgtaacaccctgaaatat

SEQ ID NO: 174223 - DNA, 397 bp, Glycine max
  unsure (1)..(397): unsure at all n locations
gctttaaaatgatttgacttcatatatgttatatgaagatgtatttaaagagttgcatgttcaacttccctttatggattctgaatgtgaaatattaagcaccttgaatgttgctcttgttcaattccaccctaatagttgggccttcttgtgatctttccaaattctttccagaagtttgcaaatcgtcctttatggagttaagattggttgggcttccttgaatgctcantaaattgggaaattgttcctgatatataatcaataatggaggaattcaaatctaacttcttctgagttcatcctaaccctgagtgtagagactcgaagagttatttttcaaaaaggatgaaaaaactcccatatttccttctactggaacatttccattcaattc

SEQ ID NO: 174224 - DNA, 380 bp, Glycine max
  unsure (1)..(380): unsure at all n locations
gtgcaagctttatttaattctgttgacaccncgattgtagcactaccaggatctctgaacatgccagcattaaaaagcttgcaacttgaggctgtctcttttactgcaagggacaatgactatgctgagccgttctctacctgtaatgtgctgaatactttgatactngatggttgttcattgcataaagaagcaaaactcctctttatatcaaattctaccctctctaacttgaccataaatggtagctttgaaggaggagcttacaaaatagcgctttttactccaaaccttagttctctcacaagcacgggtcataataatcacacaatctcctccgcatgcaatttttctttccttgaaaaaaaaccattgacacc

SEQ ID NO: 174225 - DNA, 389 bp, Glycine max
cgactagcactgtacataagccaaaatgaagatctacattgtgtgcaagatggatagggtcaacagcaagtgcagctatgaattcctccactgccacgccgtgtttacccttgattgcattatcttcagcctttcatatagaaatcaaaagacaaccaaccattctttaacacccaaaagagagaagaaaggacaatagacttcagatgcgatgtaaaaagaaatttccattgtagatccaggcttacacttttactcttttttagtagattattcaatccaaaatatgccttgttcagttcactatgctctggatctatgcggaggcctctctgaaaatgcctgaatatatgttcacatataagattgattattaaacaaaattattc

SEQ ID NO: 174226 - DNA, 399 bp, Glycine max
  unsure (1)..(399): unsure at all n locations
agcttttgttaggcaagtctgtgtaantcttttatgagatctgcaatctgagtgatgtcctaaaaaagattaaaaatttatcagaaaaacttgaattgtagtatagtgactaaattttatttgtattttgttaattctatgaataatgttttggagtttgaataccaattttattatcaatattaagtttttgttgctacaacactgcaattccttttatatctgtcttgcaaaaaaaaaaaaaatactaaatcactaatcatacgatcagacgacccatgcgtatgcatggattgcatactagttatgtatttaaatttgaacttgattgataaacaccttttattatatgtaattagacccagccaaccttatttactatgcaatataccaaaatta

SEQ ID NO: 174227 - DNA, 319 bp, Glycine max
  unsure (1)..(319): unsure at all n locations
tgctagagaatatttttccaattcataataggaaaccatctgntgaaaggttattctttcacctacctagtgaacaagaaatctattntaaagataacgaagtgattgatgatgttcttttaaacccaagtgttatcgaatcgatgttcacctcttggatggatgcaaataaaaatatctggaggcaaagaatctaacctattctcagtttgtgtccaagtttgtctatgtcaaaactagaagaacttggaacccacccacgtgaggttatacaattggaaggttgatgtgagtccctccacgcacaggcgagttatat

SEQ ID NO: 174228 - DNA, 374 bp, Glycine max
tgcaatcttacttaaaacctgtatgaatctcctatacaaacctacatgtccaagaaaagaacgcatttcctgcttaaaaccgaggtaaggtaaagaataaataacatcattctgggcctaatcaacctcaatccctttattaaatcccaaagcccctaaatatttttgtaccccctggtgccaaaacctttggttagaagaaagacccttcccgcggcccttggacctttatattgggtaatttcaacccccacacttctgtttcttctgggaatatacgcaatctctttgaatatgccttttctgtctgcaattgaaataggtcatgtcttcatcgacataatttgaggagatgtgcctgggcttaccacact

SEQ ID NO: 174229 - DNA, 360 bp, Glycine max
  unsure (1)..(360): unsure at all n locations
ctcagcttgaacatatactggcttcattactatctctgtgctggtggcacgctcccaaagtacttttgacacctactgtacgttgatttgaccaaggctgttatgggaatgttgcgacaatccttcaaaaccttatggatacattctaataggtgggtgtgcatgtggccatatcaacgtccttctctatcataagccatcgtccatttttcctttgaaatgcgatcaatccatgttgctatggctggacttagttcacgaaatttttctaaattntgataaaaaaatgtgcttacaaggagtgtaggctgcataaaattagttatgaataacaattntatgtatatatggaaagtaaat

SEQ ID NO: 174230 - DNA, 409 bp, Glycine max
  unsure (1)..(409): unsure at all n locations
agctggattaagaggctttctccanaagcttcctcgtggcttctttgagaaactctctcaagaggcttctttgagaagctagatccttatctatccacacccctctattaactatattaacttccttaaaaataattacgaatgaaaataacgtaacaaataatcaaacatcaaacataattactaataatatatagatatatatatatgagggtgttacaatgagacttatgcctttgttgcaagacttaaggccataagacttcttcttacttttgcttccataatggattttaagctatgaatgtgaaaagtgcatttgtaaatatatacatcaaagaggaagtctctgttctcaaccctctacatttattgaatatgactttcctaatcatgtatacaaacaaaa

SEQ ID NO: 174231 - DNA, 393 bp, Glycine max
  unsure (1)..(393): unsure at all n locations
taaanatagtttatggtagttgtgtcaaccctttattgagaatcaatagttatcatcttattattgaatctaagaaccaaacataaccaatggtgctttgccaaaaaaatgatgggatgaaattgaagggtacgtaccatatgtgaagtccatttcttcattaaaggcccaacatgtatttaatgaaaacactcccaatctaagcaatgtgagaaacccaaaccttcccaatctcaaacccaaacaatagtggtcaagaacagagcagaagagaagacattaaacctgttatcgtcaacacacgaggagaccaaacatgctaagaagaacatagaagcgatggcgaaagagagctagagcagcagtggcatgagagctcaagcgacaacaact

SEQ ID NO: 174232 - DNA, 337 bp, Glycine max
acatcccaagaaatatataattctttttgggtgaaaaaacggtagcatacaataattacatgtggataacaagccgagtgaagactcacgctacaccatgaaggggaaacttagtttaaaaaatatttttggtctcactttgtagcattttcttttatgttttgtaagcaaaaagaatcaaacaatgaaaatctattccacaacatattccaccatgctggtgcctgatgcaccacgaaatgtgaggcaacaaattcaagaatacatggcaaagctagaagtcaagaaaccgatgccccaaacaacattatgaatgcgcccatcatgtagcattttg

SEQ ID NO: 174233 - DNA, 208 bp, Glycine max
  unsure (1)..(208): unsure at all n locations
attcaaacctcactccatatacgactgtagcangctgcctcataaccaatgacagtagaaggaaaatatgacgctggattggttccttctaatattggcaagcctaacatctcctgtgaaacgacatttacagagaatntcctttcactctnttatgagaaacattgaacttaaaattagaactgatgttaaatcatttaccatggga

SEQ ID NO: 174234 - DNA, 318 bp, Glycine max
ctcaaactagggagggttgggacttataaacagtcgattaaacaacatctcggtgttgggtaaatataattggcatcttatccattctgttgagaagccttgggagcaaatcttgagtcacaggtacctattgggtaactctgctggtagtaaagaaagaaaccaaatcctcatatatttggcaaggcattatggaagccttggatgaacttaaaagtggtttggtgtcaagctggaggaaggtcactcattcatgcggtaactatcgggaaaatggcaggtggagtttaaataggttgtacacaaaaatttcacggg

SEQ ID NO: 174235 - DNA, 200 bp, Glycine max
gcatgagcatcacatgacttacttagattatccatgcgattcaatctatggcgacgacgatacttccgccacggtgaggatgcttgccgataggactacaagacatgttcaatgttggcggggataccatatccacatgtattcgctctactccatatcacatgatgacaagagtacaatgctttatactgggcttagtc

SEQ ID NO: 174236 - DNA, 458 bp, Glycine max
  unsure (1)..(458): unsure at all n locations
tggtaaanacggattaaaagaaaccgatattgaaccatataataatgaaagccaagaaacaagaagtgaattaaaagtctcagttttggaaacttacccgttgaagaacgaagaacagacgaagaacggtggataacggaggaaaaccttcacgaatttgcttacggaaacatctcggaagcgttacagaagcacctcggcttggattttcttcacggaaacaattttttcacccaaaacagcggttgaagaccgaagaaaacgaagaacgaacgatgaatgtcgaagaacggttgaaaatcttcgcgtaattacccacagaaacgttagggaagcgcctcggcttggattntcttcacggaaacaattttcctcagcaacttcaagagaatacgacgtgctcagaaggctgaaccctcttcttcttcattccttcccctatttacagcaaaatatgg

SEQ ID NO: 174237 - DNA, 248 bp, Glycine max
gcctgcaataatggacatgtattattttattactacactctcattgtgacgaagactctcatcatcgcatcatggctactcaatcattacaagggtacttcaacctcataggattaacaagagctcatcagagattccaacatggattatcgccattgacataatgaaacttagactcattcatgtcctgcctatttaatttcacccacatctctcactttgaaacaatgcacatttatgatgcatca

SEQ ID NO: 174238 - DNA, 361 bp, Glycine max
actgctttgctcagaacttattgacatacatttttgtagtatcaatccatcgcttaaacctattcgagccaatatctttttggtgcccggtttctatgaggaaaatttttggctattcagcaggaacttatgttattttgtctggacgcataaatgcccagttgaacccacgaatgaactcccaatgactcaagaattaaattggacaactgagactgaagacgtggatgatgttaatggacctcaaaacaattgctccgggggattttaatacaggatattgggtgaacaaaaccctgaacgtcatgttgaactaaaggctctgtatgagatatagacttctaaagatgtgatatgtcat

SEQ ID NO: 174239 - DNA, 417 bp, Glycine max
agcttgtaggattatggggtacccatcacatgtggtactatgtggcggtcgggcgatggtgcacaacaagttttccacatccacaatgcgcgcataaacccaccatcccctgttgcccacctccaactgagctcacgtactcccacgtagcccatatcctcgtttctctcaacaccgggtccccatcaatcctcccaagcttccccaacatcaaagtaatacaacattcacacagcataagctatcacagccaagtaaaacagggcaaaggcagaaaactctgctcaaaacaccaaccaaaatcacagcttttctcacttaaagaccccagtaacaattccttcgatccaattcgttaaccgtgtgatcgaactccaaaatttactggaagtctatagtacatatgcctacagtttg

SEQ ID NO: 174240 - DNA, 442 bp, Glycine max
  unsure (1)..(442): unsure at all n locations
ctttcttgtcttctacgcgagctctgaccactgttcttcctttccgcgatgcttcttttcatgtccgcctgagtgggcttatatcctaaaccataccttccacgatttcccttggtttttataagctaattatgccgccattgtctttgcctaaacccatcccgggttcataaccgttccccaacataactcgggccatcattaccgccgcatcggacagactaagtcgcccaaagagggagtccacggaggaaatgctgaccacctcaaaagactggaaagccggttctaacgattcttctgcggcttccacataaggcatggaggatgggcagcntaccaagatatcttcctcgcctgacacgatgaccaagtgcccctncactacgaatatcagcttttggtggagtgtagaaaggcacaaactccactgagtggatcc

SEQ ID NO: 174241 - DNA, 279 bp, Glycine max
tgattagattcacaaaccttagaaacgatatctttcattagacatatgtcggcctcttcattagactcatcggatgaggtgtcaaccaagtcttcccacatgttcattaaaaccttccttctttaactaccaaaaaaattgtttctgactctctctaattggacattttacttgaaagtcaaacttttttcttatgaaaacaaaaggctttgcgtttgcttctgcccgggcattttctaaagagttcccactggaccccttgttagccaaatctgcgat

SEQ ID NO: 174242 - DNA, 391 bp, Glycine max
gacacattgcttaaccacctaatggcaggaagcaaccattcttatttatcaagagtagaagctacacacgatgcttaaccactcaagacagcatcaaaccaataacagagcttaaccgccatatacgttgaagcaacatatgtcagccactcggagtagaaactaaacatggtgcttaaccactatgacatatgcgaaacaatatttgtatgcttaaccaccataaaggcggaggcaacacaccgatgcttaaccaaaggcggaaatttgacatcactacttaaccaccatggacagaagcaaatgactggtttgtttataaagaaaaataaacacctcaaacctcttgatgaatggaggcgacagcaattgcatacatagactatatata

SEQ ID NO: 174243 - DNA, 345 bp, Glycine max
tggtagaagatctctacagaggccattgcctccctcgcctagtattatgatcagccgttgaggtgcttcatctttggggactatcagctgtcacccatggtggaagaatttgaagagatcctaggatgccctctaggggggaggaaaccatacctcttcacaagggtctatccctcattagctataatttccaagatagtccacatctcggaacaggaattttaccacaagaagcaagtctaaaatggggtggtcggaataccgataatgtatttggaggtaaaagcaatactcttggccaggaaaggcgagtgggccccgtcatagatattctcgcactgttga

SEQ ID NO: 174244 - DNA, 437 bp, Glycine max
  unsure (1)..(437): unsure at all n locations
tgtgactcttgaaagaatcttcagaaacaagtcacttgaagaattgtgacttttggaaatgtatnttttgaaatcagtcactggtaatcgattaccattaaggtataattgattacacatcaatagatgtgacttttcattttgaattttgaagattaaaacatttagaaacacttgtaatcgattacaagtattgtgtaatcgattacacaagtttaaaatgatttaaaactgttgaaatttgaaatctaacatcttataacactggtaatcgattactaccttctggtaatcgagtaccagagagtaaaactctttggtgatgattatgtgaaaacttcttgtgctactcaatgttgtggagaactctcttagtacttatcgtcgatgagtttctcttgattcttaatcttgagtctcgagtctcgaatcttgat

SEQ ID NO: 174245 - DNA, 415 bp, Glycine max
agcttgtaatatcacatcggcgtgagtcattgcattcccatctaatgtcttttggtttcaatgctattcttaactcaccaaatgaactcttggaaattaattttttgtatgtatgtttaccaattttcctagatttaaaaatgtgttttttcttgagtctgataaattataaggtgttttacctgaatgagttacggaatttttgtgacaatcctatatatgaagaagcatgtgaacaacatgaacatcgctgataaaaactaagtttctccttttctcattttgtttatcttctttctatgataacattgatgtcttttttaatgaatttgctctgataaacaaaacatatttttgaaaaacagagttaaaagaaacttcttttgcgcggatcgtatcacaaactttggtaaac

SEQ ID NO: 174246 - DNA, 436 bp, Glycine max
  unsure (1)..(436): unsure at all n locations
tataaaactcagcttttatccaaggcattcttggtgtagaagctncttctttcttggcttattccctaatggatggtgcctcccctctcctcttctcctttgccttccgccgcatcttcatggtgtaaaatcaccattgaaggacctcattgaagctcaaagatccaacctccatggaagctccacaagcaagcttccatcaagtggtaatcaaagcacaagagcttcaagtaggtgctccttaaacctccattaattgttttgctttaccttttcttgcattgttgtttcttcattnttctccatgtatctcctcacatgtcttggtgataaatttgttaacatgattctntagagtttccaccgattaaacttgctataaaagctagatttgattgtctatgggtcaaatatcttgttcttgttcttgaaccat

SEQ ID NO: 174247 - DNA, 410 bp, Glycine max
  unsure (1)..(410): unsure at all n locations
agcttctccgtcttttccctataaatagggggaggagggaagaacaaaaacgttcaaccctcctggtatctgaggatcacttgaaattagtgagaaaaatcgtttccgtgaagaaaatctaagttgaggcactttcgtaacgcgtccgagacattttcgtaagcaaatccatgaaggttttcctccgttcttcaccggtcttcatccgtttatcgttcttcaacgggtaagtttccaaatccgagacttttaattcatttcttggttttttggctttcatctttatttcgctcaatttcggtttcttttcttctatntttaacgagctttaaccgatcgtttaagttgttttctcgtctaataaatgatgaaatgaatttcaactgatcatttatgtctgaatctcattt

SEQ ID NO: 174248 - DNA, 368 bp, Glycine max
  unsure (1)..(368): unsure at all n locations
tatcagatgttcacacatgtgcgcaaaatgaagctggttaggaaccacattggaattatatatgtgcagctgtggtgatgccaattttcaagtgtacaggtctctaatttttgtgtgggcttggtgctgatcaaaaggtaagctgaatggtgattatatgaacgcttggtggcgggttactacttactagtgcctcttattttcttcataaaggttaaggggttaagcgttttttgtttatatctgcctgtagaatatatgtatctcttgtttacatctatgagtatgatagattaatntactttctaaagtgagttggtgatcacttatctagaagatcactcttatttattattatgtcattgata

SEQ ID NO: 174249 - DNA, 411 bp, Glycine max
agcttttgaaatcaaactgtgccactggttatctattacaggaaactgataatcaaacttttgaaaaacaaaattgtgctacgtttgttttttgaaaaaacttttcaatacttcccttgtgaagacttcttgatttcttctcttgaatcttgaattcatcttttcttgaatcttgaaatcaaacttctcttgattcttgaaacttgttgactcaatcttgaaatcattctctttggctttttgtcatcatctttgttatcatcaaaactactcgaatcaacttgattcatcatcatgaagcttgcttatacaatctccccctttttgatgatgacaaacctgaaatctagaaacacatacacattctgtttcctagccaatcactcacttaattctccattattctcccct

SEQ ID NO: 174250 - DNA, 402 bp, Glycine max
  unsure (1)..(402): unsure at all n locations
agcttntaaggctcttttggtctgtcttaattataaacctgngtcccaacaagtagtgcctaatcttggctatagcttctatgatggcaaggaattcccttgcataggctgattgtttctgcatttttgggattaatttcttggagaaaaatgcaataggctgtccatcttgactcaagacaacaccaaccccacttcctaaagcatcagtttcgaaaacaaatatttgactgaaatttggcaggcctaaaactggagcagaggtaatggcttgcttaaacttatagaaagcttgtcctactgtgtcatcccacataaacccatctttctttgataagtttgtgagtggtgcagcaattgaagcatatgatttgatgaatctaccgtagtatccaataaacc

SEQ ID NO: 174251 - DNA, 460 bp, Glycine max
  unsure (1)..(460): unsure at all n locations
ctagatagagccagcttaagaagatagaggatctccctatcatgtagctaaggctgttgttttgcaaatgggacacaagttcttctgcattagccactgcttaatgcaaccactgtgaaactcatgcccacaatccagtgatccaacattctccccatcagagaattcctcctgccatcatgaaaaaataagaaagatgcattatgtatttagctcaaaagttaaacatcattgcatttgttttcatgtcctctttagttttacagttgtactaactgagacagacggagttataagattgatttggtggttgagaacggagtttaatggagaaaggcggaaggggggagagacaatgggttcgaatcttctncactaacattgtatcaanattaacaactaacattggctgatcataaaaggagaaaaaactgagaatactcatacctgactgatcaac

SEQ ID NO: 174252 - DNA, 403 bp, Glycine max
agcttcattctatacatgaaaaagaggatgagctatctgcacaaaagagaaagcttcctgatcatgaggaagctaacaaaaactttcatgcaagtggaccttcttctagtagttctgacttgcagcagcctcctatccctcttccattcccacctagagcaattacaaacaaaaagatggaagaagtggataaggagatcttggagaccttcaggaaagtagaggtgaacatacctctgctagatgccctcaagcaaattccaagatatgccaagttctaaaggagttatgcacccacaaaaggaagctcaaaggcaatggaaggattagcatgggtagaaatgtgtcagcattgatagggaaatttgttgctcatattttgtttctcacattcctgagaaat

SEQ ID NO: 174253 - DNA, 449 bp, Glycine max
  unsure (1)..(449): unsure at all n locations
tgtaattgaataccttaatgataaccaactatcttgtttcacagttcttaaaacataaccaacaacaatttaacatattacaacacctcataatccattataacatgttatcaaatacaattttaagcataaaaaatcaactntgttcatacaactataagtacacaaagattacaaaaatattaatgctacgtcctattaattttattaataaaaattaattactttaaaatcatataaataataagagctaattaattgataatataattgttagtcactaataaatgcatacgagactcactctttttcttcttctcaaaatcactcgccattatactgatatagtgaacccaatntatactaatcacttaaaatggtgcacaggtaattntgccaatatatattatgagcaanggcaactggacatgggtgcatttgaccccata

SEQ ID NO: 174254 - DNA, 434 bp, Glycine max
  unsure (1)..(434): unsure at all n locations
tacggacctttatactaagcttcgacttganatcttaaatggagaaaaatatttattatntcccgatgtgcagagatcaactagtgttgttcactttatcccaaggcagcgccaatcacagtcactgtcgataggaaggccaagaaagaaagatacacggttttatcgaaccattaaaatgaaaaaaaaaagggcattttttgtttgaaaagattaaaagaagttcattgtgtactataagggaagagatatgtgtgtgttgaaccaaaaatgcacctgtcctataatgattgaagcagaaaaagacactaattcggaggccagaaagattaataatatatatgtgtgctgtgttcataattgacaagacgaactgtgtagtgaaatatttatatgtgaaccaccttataaaatgttgtttgtttctttgggtt

SEQ ID NO: 174255 - DNA, 416 bp, Glycine max
agcttatagcttggaaaccaacactagataagatactctgttttttgaatttatctcacaggaataccatcaatgacaatgaagtcttatgtgtgggatgtgttttgactgtaaatatactaggcacttgttctttgaatgcaattcgttttgctagagttcggtgcggctactttaggaggtggggtattcattttgcacaatataatgactctccttctaaattctcacaactcgtgggtttgccaagttgcaatgattacaatgagttactgtgataacaatttgggttgtaatgttttgggcagaatggaggactcgtagttttcttgttttttaaaccataagaatgaagtttgatctaatcgtataacggttacgatacacccttgtcaattaattaatactatatgtgt

SEQ ID NO: 174256 - DNA, 360 bp, Glycine max
tgatggcccgagttatgttttggaacagttacgaacccggaatgggtttatgcaaagacaacggtggcataactagcctgataaatgccaaaggaaatcgtgggaagtatgggttaagctataagcccactcatgcagatataaagagaagcatcgcgggaaggaagagcggtagtcaaagctcgcggttgagacaagaatgtgaaagaagcccaccctgccacataagtaggagctttatatgcgcgggtctgggggacgaaggtcaagtggtcgcgatatacgaagatgatgttcccggtacattgtgattggtacgaccatgccctcctgatttccaactgggaaattggcgagtgg

SEQ ID NO: 174257 - DNA, 403 bp, Glycine max
agcttagacaggaattttacggtagaagtttttatataggagtaaataaacctgggctgggaatgaatgacctatacggagacaattacaactctgtgtgtgagaaacaccttaatctccgatggtccacccctcttccacaaggcctgcattttgctctatgctgctaacttgagaatgtccattcagacacttcctggataaaactacttcacaaccgtgtgatacccccatacaatctacaatttaagccccttgccaaacttccattaaagaaaaagcgacgctaagaatcttgcttaacggcacttcttacaaacacccaaaccttcatttaagctaccgcatcacaagtactactggataccatgagaatcaacaccagtccatactcctggaatac

SEQ ID NO: 174258 - DNA, 412 bp, Glycine max
gagcttcatgatgaattcagattgagtctaggatgtttgttgataaccaagatgatgaccaaaagctccaaagtcaagatcactttatgattataaagatgatgacattcaagaatgagttcaagtatgagtcaagaacacttcaaaaatcaagaggaaatttgatttttagaatcaagaatccagattcaagattcaagattcaagattcaagattcaagaattatcacgatcaagattcaagactcaaagattcaagaattaagagaagacttaatcaagataagtattagaaagtttttcaaaacattgagtagcacaagaagtttttacaaaatcattaccaaagagttgtactctttgttaatcgattaccagaatatagttatcgattaccagtggttctaaaaca

SEQ ID NO: 174259 - DNA, 465 bp, Glycine max
gacacacctatacttacgcgactatatattcttacacttaaggttgagggttcgactgttgtatatgatgtctaactctctaactaggacactggtcacatcaagagtttcctactcaagctccaactactaagctagctctaacggttgaaactaaactcacaacacgattcttaagaattctacccatctcttctaccttggattcaactcttaaggttctcacaatgtatcaaactaatggtaatgcctccaaaacgtgaaggtgagcaccatggctgccaactctatatcatgcttaagataaatcctctcatgagtcttgagttgttgagataacatatgtcgttacttggcctcctacaagcactcctctaaacttaaaacttcggatatgttactactccaacaaggacctacttggctaaggtagtacttaactggttacggtgactgacgtctcta

SEQ ID NO: 174260 - DNA, 355 bp, Glycine max
gcttggtatgagcccaaattttctcaatggttatttcctacaatcctttggtccctccatgaaagcgaccatatgggtgaactttcgatcctactctctaagaattttctccctagtttttacatcattaacattttcaccctttctcttaacgtgatcggtgattggctaaaaatctcagaaatagttggagaagacttcattttatttcatatgcaatgttttaaacttgggtcttaatgctttaaagcataccttcatgactggattcacttccttggatgcgcgttgaagctttttccatgcttcttttgccgaattttcttttgaaaccttctcacaagaattgtcgtct

SEQ ID NO: 174261 - DNA, 439 bp, Glycine max
  unsure (1)..(439): unsure at all n locations
ntatatggactagaatgggcatatctctagatgatgtaggctctcaactcactagtaagagccagtatcctagtgactccacactatgatgttgcacttagctgttctggccaaccactacatatgtacccctttctatcttgcaggctacaggtaaccaaagtaaggcagctttccaacaattttaccaacaaaaaaaaaaatccatatcatgttgttaaatctaatggaggtgctgccatcactcaagatgaaagtatgctattaaacatactttcgggaacaaacatgctggattgtagactgactgatattctgacggatcccgttgtcaaactcctaccacgttanggggagccactcacataccctatactggatatagatgtcatgccacgaaactcaactactttacctaacattaactatggngcattac

SEQ ID NO: 174262 - DNA, 250 bp, Glycine max
  unsure (1)..(250): unsure at all n locations
agcttgcagcccttaaaagagaatgagcatgtgattcgaattatgactaaaaatgttagttagtttgtcagattgattatgaaggaatgcattgaccatatcccggggagagtgtgatccttaaattttaaaaaaaacgactattatttaatactaatttttgcatgaatctttgaagtattgattgaatgcctgaaattgangatgaatcaagccatgtttgattgggatagccacttaaccaaaaagc

SEQ ID NO: 174263 - DNA, 444 bp, Glycine max
  unsure (1)..(444): unsure at all n locations
tatgcacatatntccttacgaacgttcacttgcacaagacattctatcatctaagaaaaatgcacccatatacaatcaaggtagcttcattacctagattatttacatgtacttccaaggtgtatttgttatttacatcacacacgcctccttggctgaatttacatacatgcatactcaaagcattttggggtaccaaaaactgcacatgcgctcatcttggtatttctaatacccatacatatacaaacttcacgatgaatcttgactacctacacaataaggtgctacatttcatgctttttgtcaagttnttgctacctaaagccacatgcaaattcaagcatattttcctttgctgactaanagtgtattcaaattagaacgtatatattctttgtaatatgtgttcttacataacatgcaacacatttatatatattt

SEQ ID NO: 174264 - DNA, 409 bp, Glycine max
agcttgttagccacagtgcccaggtgctaccactccctactgcgtgtgcggtgaaggcttatgtggagtggtcggggaagccaacctagtcatagcatggtaccctaccgcaaacaagggctttgtgaatgcccttgtagagaggtggcaccaggagatgtcatccttccacctgcttttttgagtgatgaccattactctggataatgtgtcttgtctcctgcatcttcttgcgatgggtaaacctattgatcatgtcccctccacctttgatagagacgtggtgagcattttgcttattactcaccttggtattccgacagaggaagaggctatggtgatgaccactatatgtggcaggatgaggtcgatgtggttggcaaagctatatcatcgatatgtcgagtta

SEQ ID NO: 174265 - DNA, 432 bp, Glycine max
  unsure (1)..(432): unsure at all n locations
ctcagcttgtgctgggatnggatgctgatttgcttccaatggtaagattcgaagctaccccacaagatntcagaggaaatccttcaggtaagctggttttgcgcaagtccttttgggcctgttctgttctgtttgcaccccctgctggtcactttctgattgtgctcctttttctgattgcaccccctgatgtctaacagatttcatcacagttttgactttaatgaaaccttttctcctgtagttaaaccagtcaccattcgattgattctcaccctagcactcagtcaccattgggttctacatcaacttgttgtgaacaatgcatttcttaatggtttgcttgacgagactgtctacatgcagcagcctcctggatttagtctcacgtcagtatttggtgtgaagctaataaagcctgaatggcttata

SEQ ID NO: 174266 - DNA, 407 bp, Glycine max
  unsure (1)..(407): unsure at all n locations
agcttataatttgtaataaatctaagatagaattgagagatttgtttttcctgagtagaaaccctcttgtaaggtgaaaatctatgtttgtgcaatcaaaaatacataatcttttttttttgtcaaaagtccaataatggggggcaaaagttgttaccaatggtgttggttgtggctaggtgtgaaatctaataagagtgttggcaggttgttgaaattaaatgatttgttggtccaacaatggttagttgtgtagtgaaatctcatcttgaaagatgaggactggatgtaacccaaggttagggtgaaccaatataaaaatctttgtgcatcattttccctttctctctttgcactgattttgtggtttgatcttgttactattttntgtaatcattaaaacaaaa

SEQ ID NO: 174267 - DNA, 460 bp, Glycine max
tctaatacacacacaaactaaaattgtgtcttctagaatctctaccaaataatcattaatccacatgcacaaattaaaatgcatatgcatgactagtttaatttcacaaccattcaaaaaatattgcatttgttggctcgaattataagagaccaactttttcatgaaaatacacctctaaagttagtgaaagaccaaatttaaactaacacctatctctaaggtagtaaaaatccataaaagtataaagtgactataaaatatcaaagatgttatttctgcaacactttgcttaaaatgggtaattattgttgagttgtgacatcttagatttaaacaacgtcgactaattgattcttcattttatattctaatgtgatggagagataaactaaaactcttgataatgatagtagactctttgtctcatcacaaattatggacatcttttctatcatgt

SEQ ID NO: 174268 - DNA, 403 bp, Glycine max
  unsure (1)..(403): unsure at all n locations
agcttgtagttggaagcgaaaaaaaattagcttatttaattatcagcatctagtaaaattaacaattgaagtagcggaaaagtataaaatattaaaaaataataaaattataatttatttaaaaatgacaagaaaaaaattaaaagaaaaaaattattatagctaaaaactaatattttaaaaaatattactacaagtaaccttaaaaaaacgttaaaaactatttaaaaacgactaaaaaaatttatttattcaacaattaatacaacttttcagttataaaatattntttaaaatataatctaaattaatttttctaatgtgatagtaagacaaatgctcatatgacatctctatcatttataaggtgccactaattgagtttgggttttgctcatatgtt

SEQ ID NO: 174269 - DNA, 382 bp, Glycine max
  unsure (1)..(382): unsure at all n locations
tttcctgaaatattaggaaagatgggaaacataacgcatctttctttggagtacactgccataagtaaattaccaaattcaattagagaacttgtccgacttcaaagtttagaactgcacaactgtggaatggttcagttaccgagtatcattgtcacattgcgagaacttgaggtgttgagtatttgccaatgtgaagggttgcgattntcaaaacaggacgaagatgtgaaaaataagagcttactgatgccctcttcatatttgaaacaagtcagattatggtcctgcaggatatctgatgaattcattgatacacgactcgctcggtgtgcgatgtgaaagctttatctttctcaaataatttacaatcttccttatg

SEQ ID NO: 174270 - DNA, 255 bp, Glycine max
gcttccacaacatctaagagaaacaatattttaacagcacaagccttctccgtccagcgaaacatggccaaggcgaaaaactctgtttaacacaccaaccaaaatcacaggttttctcactcaaagaccccaaatacaattccttcgatccaattcgttaaccaatggatcaactcccaaatattactggcagtctatagtgcataagcccacattgtgaccgttgggatctactagccaacattccaaactcat

SEQ ID NO: 174271 - DNA, 473 bp, Glycine max
  unsure (1)..(473): unsure at all n locations
tctcagctgaagcaactggagcgtgggtaactggaacttatctggccttgaatcagaaatctgtacctgtcgcaagggtttgtggtttgtgctcctctgctgaccaccatacagacctttgcccttccatgcagcaacctggagcaattgagcagcctgaagcttatgctgcaaatatttacaatagacctcctcaacctcagcagcaaaatcaaccacagcagagcaattatgacctttccagcaacagatacaaccctggatggaggaatcaccctaacctcagatggtccagccctcatcaacaacaacagcagcctgttccttccttccaaaatgctggtggcccaagcagaccatacattcctccaccaatccgacaacagcaacaaccccagaaacagccaacagttgatggcccctcacaaccttccctcgaagaactggtgaggcanatgactatgcagaacatg

SEQ ID NO: 174272 - DNA, 407 bp, Glycine max
  unsure (1)..(407): unsure at all n locations
agcnttgatgaagaagaaaaaatgatagatattttatagcgaaaccagtattatctgatttgagatccaatgtgagtgagttctataaagagaagaaaagagacatgttggatgcacataaattagatcatatatgtcacaccttcatagcataaatgtttgcttctatgattctatataaagtaatccaaaagtaaataatttgttcatgatgtttgatggaacgtatagtattttttatgtataaacatataaatatttctataattcttcttcacatgtggaataatattgatgaaaatgaatcttatgcgaaaaatgatacatcacgtggatgaaaatatataaagataatactccaagtgtatgaatatttaacatatacagcttaaaatattgttatatat

SEQ ID NO: 174273 - DNA, 431 bp, Glycine max
  unsure (1)..(431): unsure at all n locations
tattaacctananatgggacatatgtcaattcaatatactttatttaagacaaatcacaaaattttgcttattatcttgagaaaatacatcattgttcataaagtgtcaagacaacactatacataggatatgcatctgttcccacaaaaatgaattgggaaagagttattggggaaggaggagaataagaatcgcgagtggaagccataaaagagatctatggttcaaaacctgctctgtatacgataataggtaatagatttcagagaatagttaagagaactgttggtgttcaatgaaaaattgctattcaactacgtaaagtatatataatagatcagtttgagcctaaacgcacaacacactagcatgctctgactacctgttagttagagattacagcttgcaaaatataaagtactactcctac

SEQ ID NO: 174274 - DNA, 390 bp, Glycine max
  unsure (1)..(390): unsure at all n locations
agctngtgncgatctcacaaggtggaagcattctcattattacttgtgaccctaactggacgccctatgaatttacctaatgagaacgacccgacttactatggtgcggatagtctcgacatgtactcctaggagcccgatgaggcttttcactaccaaggtaccacattgcatatatgatcgagtcctagcgtatctattgcataacgcctgcgtaaagatcattgtgaactgtatataaaggtgagtaatgaactgtgagtgacatgcggaattatatttaccaagcgttgtcttgaatatgagataatcgtgcgacatacccaaattcatccctgactatcgttgatggcaacaacctttggtgacctcttcaagtacttggaccct

SEQ ID NO: 174275 - DNA, 372 bp, Glycine max
aatcttactgcacttgctgcacttagcgtgtggtcgtggcaacatgttttggtgggtgacccaattctccgtaatgctaacaaagtggatacattttcttcttatcacgacctgtggtgtagttgttaggactatcttcattgcctgctggctgattcttctcgaaaaaattctttatgctttcatcaactatatgatgtttggagggcaaagcaccttcgacaacacgatcttgccaaatcaaccttcgctgctcttgtacttgtacggcatgtgacactctttgtcatgagatcttcgacagatcccttgtgttctccaatgaagctatagaggcttcatactgcgccggcacgttaccagaattttctc

SEQ ID NO: 174276 - DNA, 405 bp, Glycine max
agcttcatctgatgtgtgagtaggtaatctcttatttcttattaatcattatagaatagaatatgatgtatgtttttgcggatcttctttttctaagcagatgtgagtgactacactagacactgacattggtgacaaatatattgttcaaccttcgtaccattttctcgcggacaacgattttagccatggagaagaagttacattttactatacgtattattattattatcattattattattatatattattattaatatataggatggttcatatttttccttcaatattgatctttccttttttttatcctttctgaatttcccgctccccacgtgatccacaaaaaaacatctatccgccaagttactttcttgtgcttctgatatgcatgttattata

SEQ ID NO: 174277 - DNA, 465 bp, Glycine max
  unsure (1)..(465): unsure at all n locations
tactaagcttatcntgcttaacctaacagatgagagtgagttccatgttctcgatgattggcagannatatgggcttngaaggttccaacgagagttaaaaatatgttgcagagatcctgcaggcactgtatccctaccagaataaacctaaaatcttgtggagtggattgccccatcatctgtccattaattntgtgaagaagatgttgaatctacattccattgcttttccctatgtaatgcaaatacaagttgctggaatcatttgcacttaaggcaccttgttgaggatattgcttctaatgttgagacttttgcagaattcatctatgcactcttcaacgacttgcatgatcatcatcaacaacaaatggctatgtngctttggaggcggaggaatgatatagtgtgggacaacaaagcttacccagattcgcatgtgatagctcaaggagatgagttct

SEQ ID NO: 174278 - DNA, 386 bp, Glycine max
  unsure (1)..(386): unsure at all n locations
agcttgccgccacggagttttccgactatgctcttatgtggtggaacaagctacaaaaggagagagcaagaaatgaagagccaatggttgatacatggacggagatgaaaaagatcatgaggaagcggtntgtgccggctagttactcaagggacttgaaattcaagctccaaaaactaacccaaggcaacaagggggttgaggagtatttcaaggaaatggatgtgctcatgattcaagcaaatattgaagaagatgaggaagtaactatggctcgatttcttaatggttngactaatgatatccgtgatattgttgagctgcaggagtttgttgaaatggatgatttgcttcacaaagcaatccaagtggagcaacaattaaaa

SEQ ID NO: 174279 - DNA, 381 bp, Glycine max
aagaaatcatatctagtcaaggtctgagagaccatacaagtttcctaacgatttctaattatgtgggccattaagtctatcatatgctgacaatagccgagaagcccatgaatctcttcgggggcggagtaggtgtctgccatcgccttggccttggctaacaatctgggaagttcttgactcccgttcaaggtaagagcaaaccgatccatccacatgggtgcctcttggtgtaaagagtcgatcacccttcctctagcctctttttccgcatatacttgggcatactcatccgcgattctatgctcgtgggccgtggctagacccaactcttcttggacttggcgatgatagctaacatgttggtctctgtctcgcata

SEQ ID NO: 174280 - DNA, 407 bp, Glycine max
  unsure (1)..(407): unsure at all n locations
agctttgcggattnggtctatgccagtgaaaggattttttgggtctgaaaaaaggcaaatttagtcattctgcttggacgaatgaaaaaactggggcaaatgaaaagggtgatagtaagggagaagcccatgctgtgactgccatttctatacaaccaagttgcccaccaacccaacaatgttcttactcatcctataacaaacctttttcttaaccaccgtccatttattcacaaaggccatgctttatattaaccacaaagcctacctaccgcactttctatgacaaacaccacctttagcgttaaccaaaacacccaccaagaaatgagatttgcagcgagaaagccttagaattcaccccaattccagtgttctatgctgacttgcttccatgtgtacttgat

SEQ ID NO: 174281 - DNA, 479 bp, Glycine max
  unsure (1)..(479): unsure at all n locations
tactaagcttctacaataatatagaatctatatgctgaatgtacattctatcagagcgtcgtgttcccgtgtcctctaacatgaggttcttcatagtcatccacctattcatctgctcccccgaacacaaattcaagatcatcacaggatccaaacacaacaacacacagggagtgagttatcacattcctaactaatagagaaacaaaacaattaaatatacatattatataaatgagataccacttgcttaaacatagctcacgtaacttcaccacttcatcattcaaaattcacttttcaattatcaatcacattacacaagaatcccacacttcgatcaagatataataacacatcaattagcaagcatatgcaatagntatgctcagactcaatcctatatgcaatgtggtaccatgtcagtgaaaaaccaccctgngacgcttatgagtacataacaagacacaccacacaat

SEQ ID NO: 174282 - DNA, 406 bp, Glycine max
  unsure (1)..(406): unsure at all n locations
gagaataaccacccaaggatgataaagtcttacctaataattncatggtcatgcttggttctccaaagccataaagaataacacgtagttgcccaaatctcattccaagtttaattcaattatttaaaagaaacaattacttggttttatttttcaattggtcatttacttcttacagtggagattgcgctgaggaagaatttcaagtcttacggcgtgtggcatcattgaaaatgggtaatcaacaatgggcattcattcatggacaacaaaatgcattttctgaatggttttatatagaagatcctctatattttcatgccctggaatatgcaatttgatagaaattttctgttgaccttgtttgtgtttataaataaagaaatcattctcgttgaaataaata

SEQ ID NO: 174283 - DNA, 371 bp, Glycine max
actaagcttgagaatggctggacatgatatatgtgagggtgtggctttggctagtggttcaggcataaaggaatgtcccacactatttttcatgacacgcgtgcaacaatgatgattcagaaattttatgcaaaattggtcatgcatgcacctatgtggacacttaagcatcaagttttgtggtcatgtgtccaaaacatgctcttttatcaattcatgcattcatccgagtccattttaagagttcgggaaaattttcacaacattcaccctttatgtgtatacacattttttcaacaaaaccctcttttgttttgattggtgaatcttttcaaagaaagagttggagattatttcttttcaaaagtgtc

SEQ ID NO: 174284 - DNA, 415 bp, Glycine max
  unsure (1)..(415): unsure at all n locations
agcttataaggagaanttgagtagtaaaatgaaagagttgtgagactattaaagggaaagaaacaaaaagagtgaaacatgagtgaaaaaaaaattattgagtgtaaacatgtgagagagtgtttgtgtgaggatatttatttttccatttacgatcactttaagttgtttgttataacaatttcaaacattaaacttgagattggatagtttacaatctccattcaaatctacaagtaatagacaatcaattggagaagaagaagaggaagaggactattcagatgcaagaagtcatgaaagaaggtgaataggtgaaccaagaagagaaaatcatttagggagcactaagatgacaatccctatgtttcaaggtacaaacgatcctgagttgtattttgagtgggagagaaag

SEQ ID NO: 174285 - DNA, 414 bp, Glycine max
  unsure (1)..(414): unsure at all n locations
ngcacaccaagtaactaaatccatttttagtacanaatgatttaactaactaactaactaactaattaacttccactaatatatacagttactactcagaaggaagggatgtgcctttattaggcctatctaatctacctgattaaactaattacccaaagcaaagcccaaattcatagcccaattattcaagtgtataggttccaacttccaagtccaatttgaccctcgaaatagaagaattggtcgaagcttatatatgacaaaattgaatatctttttctttgatttttagggactactcacatgctccatttggagttctatagtgtcctatangcccagcacaaggcagataggtcaagtaagcacaaaaatttgaaaataagccacaattatcaattaagctcaatc

SEQ ID NO: 174286 - DNA, 416 bp, Glycine max
  unsure (1)..(416): unsure at all n locations
agcttctcaaagaggtgagtttaactattagaggggtgtgtgtagataaactctaacttctcaacaaagcttctcaaggaagtttctcaaaaaaactttcatttagttagtagcctagaaacatttgtaacacttgtcataactttgatgaatatgaaatctcttggtggtgaagctcttccttccatggcttattccctagtggatgacgcctcatctcacctgttctcctttatcttctgttgcatctccatgtttgaaaatcaccattgaagcacctcattgaagctcaaagatccaacctctatagaagtttgtcaagaaagcttccatcaagtgataatcaaagcataagagcttcacgtacacctccttaaatatccattaattttcagctttactttnttctccattgg

SEQ ID NO: 174287 - DNA, 498 bp, Glycine max
  unsure (1)..(498): unsure at all n locations
taagcttccttgtgaacttccaaagcctgctacctctctccaatgattntggaagaaaagaacatgatagccatctagacctagcgatttaaggctttccctgtacttaaccgtcaagtgaatctcagtgtttattgacatgcgacccaagtcattcccccattccacatcccatggagtaaaagcatgaaacaccatataaggaacaaagaaattttcttccgtgtacaaatctcaatagaaatntgtaactagactttcatgatcatgtttctcttacgcccaagtcccattntcatcttgtgacacatcatacttgaacttcctcctacgaatcgccgttataacatgaaagtacttggtattttggtccctcaataatatccattcagttctagatatttgaaaccaatagatatcctanttttctaacacaagctcataatccgtccacactctcttatattcaaatatggcagaagtatcattattagctca

SEQ ID NO: 174288 - DNA, 334 bp, Glycine max
  unsure (1)..(334): unsure at all n locations
agcttgnccatattttattccatatgcttgctataaaatcaaagaaactgtttatactggcctctggtggttgaaaaggcataccctgcagtaatagatgatttaataattcacaatttgttgtcataacattaccaataattagcatattttgtgaagaatcagaagactaactttttaatgaacttatctacggggaacaattctacaatatcaaactcatgtctcagactcagactgatctgctattgattacctaaagcttattactaaccattttaagtaattagaaacaaaatattaaatgtatttatgtagtgatactgcagataaa

SEQ ID NO: 174289 - DNA, 407 bp, Glycine max
  unsure (1)..(407): unsure at all n locations
tgtgactcacagtcgtgctaagccatattcttccnctccctggaaatatggaaaccattctaggggacaaaggactattggaggacatcacctatctggtgggagttctcaaccagttaacagagtgcctcaacctactagtaaaggtggtggtggtgctcctgctacacctgctatgccaacccggtgtgctaagtgtggtaagatgggttattttgctcgtgagtgcccagatagtgacgtgacttgtttcaactgttgaagtaagggccacctcagtaccagttgcccatatctgaggagggagaagatgagtgggagttagaacaaccagagtggacgaccaatgactacagggagagtgtttgctcttagtggtgctgatgccgcacagtatgatgatctca

SEQ ID NO: 174290 - DNA, 342 bp, Glycine max
tgcagcctggtgcagggcgagaggcggtatgttctcacctaaagaggcggacccgtgaaatataaaaaaacgtcctctggaatgagctactgaatctatacataccatttataataggaaaattatactctaataagaaattggtttgtggacctcgtacatgtgaacctgaacctttgccatacaacccagtggataaatagatgcggcgaatagatccttcattaaattaaggcgccactactatattcgtaacccatttagttgatgttgtctatatacttataactatctatgttctgaggcctactgagactggtccttcatgtatatatttaattg

SEQ ID NO: 174291 - DNA, 233 bp, Glycine max
cctgagcttgcaactcaactttataggggaattttttttctcttggcgctctaaattgtgggaatgtgcccaaaaatgtggggccaatttggtttggttcctctcttgataaaagataattgggggcttgtatgaaaatgtcctaagccctttatacaatttgaaggaatggggcatgccacattgtccccgttcttttgcttttgatgcctaaacccccgcccacccagtgt

SEQ ID NO: 174292 - DNA, 459 bp, Glycine max
  unsure (1)..(459): unsure at all n locations
tgatagagctatcatcatatgatgctgtatgggcacatatttagttgctttctaagcaacttgagatgttaatagaaacactcggtaagctgccaacttagttgtctatgggttaacctacacactcttctgttttgcaggtgacaggttgtaccatttgtggtgaggctcatgaaacaggccaatatattcccactgaagaaaacgctcaagaaattcattatatgggaaatcaatagcgacaatggtatactcaaggaggattttcatgcctccagcagggcccctataatcaacaaggacagtggaggacacaccctgacaaccagttcaacaaagaccagagtgggccttcaaacatgccaatccaacaaggacctaacatatttcaaaggactactaagttggaggagaccttgactcagtttatgcanggtaacaatgtcaatcataaagcac

SEQ ID NO: 174293 - DNA, 409 bp, Glycine max
  unsure (1)..(409): unsure at all n locations
agcttaatattntttttaaaaaataaataaaggtatgattttgatatattataacaattttaatgtaataatattaataaaaatataatttatatttacttaaacgacatttaaaatatttttagacgacctatggttttaccttttaaccaaataagtttttttttataaaagtttaagcataaggttaattttttttataaaataaaagtattgcttaacctaggctctatataggttaggccataggcttgtatggagctattcttattgctacaaactacatcttgataaaaaaaatgtatatatatttaaaatttaatagtaccatccataaaaaaaaaattagtaccttaaaacaatattattttctataaaagaatttttgttcttgtgaaaccagaaacac

SEQ ID NO: 174294 - DNA, 424 bp, Glycine max
  unsure (1)..(424): unsure at all n locations
ttgctatgtataacaatctcacctctatactgngaggaaccagtggtctcttccctttcaactctctagttaagaagtccagtttcttttcttcatcccattcactgtacgtgcccatatccaaataccttgtaattgcatcaatggtttcaccatgtctgcttgattcctgtcacactgctagtttcaggccacaactgattatccaaacaataatgaacaaaaaactttgaaacatacctgacgcaagtcaagcttcattaacaccatgccaaaagtagcaactcttcgaatcagatcagctagtcgaccatcagctagcaccccagatccacataattgctggagaaatgtagagctaaatgataattctgcacaatattagagggtaaaagggtagaaaagaaagataccaaagattata

SEQ ID NO: 174295 - DNA, 407 bp, Glycine max
agcttctctaacctcctttctccattgtgatgacatattaattttggtttctttttcataactttcaacacctcttaaaagttttgctttcaactatggttttctcaatttcatttacagggttgcaaaacgttatgtggattttctgatagcttatgtattaaataggtcttgattttattgaatattgaacttgactattttggagttgcaggctccactagctgtgcctaccaatcttgaaccagtggatgaggataatcataaaggtaactccagtcttgtatcatgtatttgaagaatccattcttataattgggaagttctcacaagaacagtagtattgtgtattaagtcaagtgattttcatggtgaagtttgttcacagcagaatgagttatgaattt

SEQ ID NO: 174296 - DNA, 451 bp, Glycine max
  unsure (1)..(451): unsure at all n locations
tattacggaccttaaaactcagcttttatccaggctcatcttggtggtgaagctccttcttccatggcttattccttagtggatggtgcctcctctcacctcttctcctttgtcttccgctgcatctccatggtggaaaatcaccattgaaggacctcattgaagctaaaagatccagcctccatagaagctccacaagcaagcttccatcaagtggtaatcagagcacaagagcttcaagtatgtgctccttaaacctccattaattattttgctttaccttctcttccattgttgtttcttcatttttctccatgtatctcctctcatgtcttgtgctaaattntgttaacatgattctttagagtttccaccgattaaactngctatagaagctagatttgattntctatggttcaaatatcttgttcttgttcttgaaccatgaatt

SEQ ID NO: 174297 - DNA, 346 bp, Glycine max
  unsure (1)..(346): unsure at all n locations
aagcttgtctagcatgctaggacaaaaggggcgangtcttttccctccgaatacacaggccgttaagacaattaacgggaagtcacacaccttgacgatggcgttaaataaacgaatctccaataagggggctgctcgcagatcttaagaatcggacttgactggcacaaaatacccttggtaccggagtccaaaactgacagatagatgtcctggcataccatccctcggaaaaatacccgtttcgacaaggtaacctcaatctaaatgtgcaatcaggttccctgtagatcacgcataggccttagacaagaagctattttttttcacggggggtccatatcat

SEQ ID NO: 174298 - DNA, 404 bp, Glycine max
agcttctacttatgtggcagggcaggctatcttatctttttgtcgccaacgcgagctttgaccactgttcttccttcccgcgaagcttcttttcatgtccgcccgagtgggcttatagcctaaaccatacttcccacgatatccttggggatatatcacgctagttatgcccacgttgattttgcctaaacccaacccgtaattatataccggtccccaacataactcgggccatcattaccgctgcatcggacaagacaaggctgcctcaatagggagtccacggacgaaatgctgaccacctccaaagactggaaagacagttctaacgattctttctgcgcttccacataaggcatggatgatgggcagcttaccaagaaatattactcgcctaacaccat

SEQ ID NO: 174299 - DNA, 384 bp, Glycine max
tcgcaagtttttgacataatcttggctcctggttggtgggttggtgagttggtgagttgctatgttcgtgagttcctgagttggtgtgttctcgagctggtgagtttgttgtttaaaactgttggctttgtttactgcaatgattgttattggtgcaccattttcttgtttgctgagtgccattgttttgttttagggtataagaaaacaagacctactttgcattggatatttgctttgaacaatgtgtttgataaccctaaacactaacctaagactatgttgtctcactcctgtgcacattaggtgattgattcacgaaaagagagaagggtcatctggaacctatttccctccaaacttaatcctgttgttgggtgtcct

SEQ ID NO: 174300 - DNA, 307 bp, Glycine max
cagctctccaccaatggtattcgaagttaatgttttttttttccttggatttaggaaaacattgttggtcgatgtatatatttataggtcaatctgtgttagggcataatctctaatcctatatgttgatgatatttgggttccaactaatgatcttggtccttttcatgagactataaactttctctctcacaatttgaaatgaaagatatgggtgaggcaagctttgtgatacgaataaaaatatttcaacaaagatcacaacgattgctacgcttgttccagaaaacattatcattatagtgct

SEQ ID NO: 174301 - DNA, 486 bp, Glycine max
  unsure (1)..(486): unsure at all n locations
ggacctataaaactaagcttggacatttcatatgaatgtcctacgtgggagaagattgttattatgctgagatggaagataaagatgaacaagaggatgagttattgttaatgaccttcgtagattgcaaagaagggaataaggatgagtganttttagactcgggatgcagcaacaacatagtattaacaaggagtggttctcagaattagatgagaactttcggcacaaagtaaggcttagtaatgatactcgtatagctatgaaggggaaaggtagtgttcggatggttgggaatgggattatacatgtaatcacacatgtatattatgttcctgaactcaagaataacttgttgagtataggacaacttcaagataagggctcgattataacaatttagaacaacaagtgcaatattgttcattctaagagaggcatgatcatggaagtatacatgagtggaaacagaatgtgtgtgctgat

SEQ ID NO: 174302 - DNA, 478 bp, Glycine max
  unsure (1)..(478): unsure at all n locations
tctacttataggaatgataanataagctagagagntacccattgtttctttattatgattttctttcactcctaaagatgtgaacgaacatcaagcatccaaagaaattctgagagaagctaaaattcatagaaatttaattgttaaattcacagaaataaaaatatgataaggaaacaaaaacgtcgaaaattgttgacagaacaaaccttcaaagactgcctccttgtgacataattaggagatgtcaagagtttctcttatagatatcaaagaactgggaacataaagtcctattaaaaaagttgaaatgtaatatgggagataaaaccacaccaatcattcaatttgcaatatgtactatgtacatattctaatatgaggatatgaacacttaattatatcacagagagcagaacaattaatcgattaatgtattttccccacaaatttctanggtataaatattagataaaca

SEQ ID NO: 174303 - DNA, 328 bp, Glycine max
gctttagccaaaggacttaccttgataattctttttagcccttttgagccttgattccctttccttgttttgaagctcactacaagccttaagtgaaaaaccatgatattaccatattcttaaggaattttggagctttggaattgttttgggaataagtgtgggaggtttttgtttcattggacaacttgttttgttggctatgcttcatgatgtattttgggccatacttgatgtacattggatattggttaaatgttggacatgctgaatgaaatggtgtttctcaaaggctaaagagtacacaaaagaaaaaaaaatcgaaaaa

SEQ ID NO: 174304 - DNA, 306 bp, Glycine max
gaccacagagtggtacctagagatatgtcgcgggggtcaagagacctttgtgacgtcatgtggggtgctattgcccaaaaccaatcttgaccaatcccgacccaacccgggcatagtctgtcagtgagaacctgtgatgtacctaaacacgtgagctcctggcagtcaacagataaaaggaacaaagaccacaacgcaatgaggcttgtggtggctggccaactgtgaaatttgtgtgatatatgggttgtggtctctggtaatcgattaccaaaggtgggtaatcgattacaaggcttaaaaatg

SEQ ID NO: 174305 - DNA, 409 bp, Glycine max
agcttcatgcttaactatgtatggcaaaactttattactgttggtcaagacatacaagtgagcttgtaacaaatcttctacacttggagtgatcacatgcaatcctcttgaacccttaccacccactctgtcattatgccgagacttaagaaggccaacaggtttagccttctctaagtattctaaacaaaattcaatggcttcttctgcaatgtacctctcaacaatagatgcttctggatgatatagattctttgtatacccttttaagatcttcatgtatcgctcaaccgggtacatccaccgtagataaacaggaccacaacatttgatttctctgaccagatgcacaatcaagagaatcatgatgtctaagaaagcagggggaaaatacatcttcaactggcac

SEQ ID NO: 174306 - DNA, 489 bp, Glycine max
  unsure (1)..(489): unsure at all n locations
ntgaccttcaggtaagggttaattagttgttgtctattttatattcagngcattagttactagcttgcttgaatcttatattactaaggatgaagttgaaccatctatgtcattggtgctcgagaataatgatgttattgacaatataagttatttggtgttactcatcaaatataaatcagaaatgttgtatgactaattgaatacaaatcatatnttggtgcagcaatgcttttcaactaatgctgagtctaatccatatttattgggatccaatacaccaactaagtgcaatntggccctgactattactcaattggatgacataccatttgaagatttatcattaatacaactatcctttatcagggtgaccaaacatatcaagactgatngatgatgaagaagcactattaagacttnnttttggtngtcatgtcacacacatttatttnttgggtattnggatcaatgtatcaagtactttgg

SEQ ID NO: 174307 - DNA, 351 bp, Glycine max
acaagcaatattcacgtaagcaaccacaggctgccaccctgggccaacagcaacacctgaaagaacgggttgcacgtttttgatgacaatgcaaaaggccaacatgggcgcgagctctaccacaatctttctcacttctgaattatttgaaaacaagaaagggtactggttccggaagataatcatcaccatctagagcatgacaccgatcagagctgaagtaatcacagcaacaagaagagaaaactttgctggtcttgggtgacatgcttctagttcatttgacaccctcacactgccaatgtaatatatggtcactgactgatatatgtaaatcattcaagtttaatg

SEQ ID NO: 174308 - DNA, 438 bp, Glycine max
  unsure (1)..(438): unsure at all n locations
tactcagctctaactcatctctaataggctagcttagtttgtttttctgtggcccagnattcattagatatagcgtcatccatgtgctttggctcgatcttggaaagtagtgttgtgtgcttgagagaattccttgtctggactttgcccttatgatcaccaatgatctaagactcttgatgatattttctcagcaagtgtctagttgggtctctaacttctttaggttgatcatccattggtgagttggacacaagttggttctgactggatgcaacaatagacttgacgatatcttctattctcatctctgcaaaagactcatccagttttgacatggtagtgttatgcttgttgtcattaaacctcacatgaatggcttcttccatagtcaagggtctggagttgtacactctatatgcctacactattatcata

SEQ ID NO: 174309 - DNA, 243 bp, Glycine max
taaagaccgccgataagcgttgtaaattgtaagtggtgggaatacaccctgtccgaaggactctatcttctaggttcacaaaaagatgtcacttatagtttaatgcactgccaaattggtatcaaaaggcgtcataataacgagaaagtcctcatgtatgacaccgaagattaagacatatctccattaagaggataaaaatggtagtgcatacgaccctttacaaagtttcttcaagaacat

SEQ ID NO: 174310 - DNA, 307 bp, Glycine max
  unsure (1)..(307): unsure at all n locations
agctngccacncagctcggccaggcgagcattgttttttctcccgaagcaccaaccttctggaggaatcttttggagggcccaagtgcgcctggttgctaattgcacccccatttttactatatacaccccctgccttttatggcgaatctttttcgtaaagagacggaaacttacgaatatcataaccaaacctgttttctttccgtaatgttaccgaaccttgcggaaacaaaataatccccttnttgacttacggaaggttaccgaacctcacatttgggcaccaatgcttccttttgatatcc

SEQ ID NO: 174311 - DNA, 460 bp, Glycine max
taccaccataggaagccatggataagagcttgaaggtattttattatgattggagggagaatgaaagaaggaacacgaatgccctctattgaatttctattcaaatctcacttgaatctgaaattgaatttgttgaaccaaactttagagccaaaatttcattaattatgattagtgaattttagctatggatcagcccactaatccaagaccaaatgcaagatgctccactaattgtgcttaagtgtcattatgcatgttaaacatgaatgacatgcacaaagtgtgactatatgatgtagctataaggtgtagcaagaaaatgctcacctccccccctctataaattaataggattgcgcgttctccaattcaattaagattattactcaacacacacatcaaatagtcacttatttcatgttaaattacaaaactacccctatacaaaactagtctt

SEQ ID NO: 174312 - DNA, 157 bp, Glycine max
taacttgatgtgagatagcgtgaaagagttcttttttctactcttgggtgcagaccacccagtggtgcctgcagatatgtctcggggtgcacgagacctttgggacctcatgtggggtgctattgcccaaaaccaatcttgattaattccaacccaa

SEQ ID NO: 174313 - DNA, 358 bp, Glycine max
  unsure (1)..(358): unsure at all n locations
ctatgtacccatagtggtgcacantgtttttcgtgcattcttattcacngtttggggactttgtatacgcccctcatgacgtgctgaatcacattttacttaagtcattgctcgctgaacttaaaaataaaataaatttccaccgaacgtttgaattgtattatccgataacttcggtgaaaataaattccgaccgttcggtcgtgccgtaaccacgttggaaatcaataagagaggtgataatgtaatatgataatcaaaaaacatcttctagcaaaataaagcggaaaatcaatcggacgttgtctctttgggatttctcattcttaatctaattgattaataactaaagttaaac

SEQ ID NO: 174314 - DNA, 398 bp, Glycine max
agcttatcccttccttctaagtagtaactctaatattagtataatttagttagttagttacttcattttgtaaaaaaaagatttagttacttgttgtgcaagctttatgatcaaactattttctctctttttctctcaattattcttcattcttcttcctcttttcacttcttttttttcctttctcttatacaaatttcgtggtttttccattagtgatgattatggaaggctaaacacttaatcaatccaaggatccactccaagcaaggctgaatttgagatctggtttaatatttctaatctttgtgaatgtttaactttttctttaatcctattttttattttcaagattatgattatgcttacgattgaaaatggatcaggctgtggattca

SEQ ID NO: 174315 - DNA, 412 bp, Glycine max
  unsure (1)..(412): unsure at all n locations
ntagcatggcctccggatagaagcattgatttttaatgccgaaggtcggccttcatctattcttgcactccctcttcattatccatttttctggatcgagtgttatatgggtgcctctgcgctttcttagttattgtgagttccctaaagaaacaaacaatggtgagtatgccaccaaaacatgaatatgcttatgaatgatcggagcacttggatccacctcaagaattttagataatgtgatgagtttcagaacttctcgctttataaaaaggaacaaagcttttatctagccaagatcatacaaaagtgttacaacagaacctaacggtttctaattatatgggccatcaaatctatcatgtgttgacagtagtttattagcccgtgaatgtctcggggctgtcacact

SEQ ID NO: 174316 - DNA, 406 bp, Glycine max
  unsure (1)..(406): unsure at all n locations
cagcttttgngaaaggatgtgactcttcacattttgattttatattcaactttcaaacacactggtaactgattaccaatatattgtaatcgattacaccattttgaaattgattggaacgttgtaaattcagttgaaagctttttgaaaacaaaacttgccactagtaatcaattacagtaaactggttattgattaccacagagtaaaaactctttggtataaggtgttgtgaaaaattcatgtgctactcaatgttttgaaaaactctttagtacttatcttgattcttgaatcttcaacttgattattcttgattcttgaaacttgaaacttgaaacttgattcttgaaactttctcttgattcttgaagtgttcttgactcaatcttgaacttattctctt

SEQ ID NO: 174317 - DNA, 508 bp, Glycine max
  unsure (1)..(508): unsure at all n locations
gacctatgatactaagcttgatttaaaaatggtttaaagatacttngagagaaattttgtttttattcctttattaatatatatgtgaggggtagagggtgtcacacaaatcaactctcccacttccacaaatcaaacattaacgtaccatccccagttacccaccttcaatttgagctcacgcactcccacgtagcccttatcctcgttcctctcaacaccgggtccccatcaacccctccaagcttccacaatatccaaaaaattaaattccaaataccatgaaactatcctaaaccaagaaaacagggcagaggcagaaaactctgcccaaaacacattcacatatcagaactttccttactcatatatcccagtaacatattcttcgttccgattcgttaaccattcgaccgacttgaaaattttactggaggttcctagtacataaatatacgtnttgaccgtggggatctgctagaaaatgtctataacccaatatgtacta

SEQ ID NO: 174318 - DNA, 371 bp, Glycine max
cgcagcagcaagcagccccaagaggccaggaagagatattgtcttagaaccacccccgcccccagagatgacagccaccggtctacgagccccgaacaccaccaacgctatcaggccaacaagggaaagtcatttctcccggagcgacacgcccagctcatggaccatgaacatacccgattccacgacgagaatagaccgcccggcggcgggcactattagggtacccccatggccaagtgcgacccacacaagtcctcgaaattatgcccatgcttggcctaccgaggacgagcggcgagatatgagatccagggtgagggggcaaaggaccccgctcgatgcggaagccatcacccaagacccgggac

SEQ ID NO: 174319 - DNA, 410 bp, Glycine max
gatgacacaaagctcaaaggtcaattcatgataatcaaagaatgagttcaagatgttcaagattgaatcatgaacacttcaaggttcaagaagaccattgatctcaagaatctagattctaggttcaagatttcaagaatcccgatcaagattctagactctagactcaagaatcatgagaagaattactcaccataagtatgaaaaagttttttcaaaaactgacgtgcacatggatttttctcataacttcgttaccaaaaagcttttactctttggtgatcgattaccagattcttgtaatcgattaccacgagcaaaatgttgttgagaaaggttctaactgaatctacaacgttccaattgagttctaaacacttgtatcgattacaatgttctgtaatcgatta

SEQ ID NO: 174320 - DNA, 410 bp, Glycine max
  unsure (1)..(410): unsure at all n locations
agctngttggtggaaagaaatcctttgagttttttctttttttttagagcacaagtattcagcttcttctcctacccagaaagggtaacgtatattgtttactttcacaccctccctgctctaactatctgtctccatctttgtctattcgtttgtcactctgggcggtatgctttcatatgtgtttgaccatatgtgtgctgttcagtgttgagtatgatattttagattttactgtacctcaatgtgattttcagatatcatataatttctgtagattggagcattttctgtataatattatcttcgcatttcttacctatatttggattttcttcttcttttaaacttacatctggtcttctgtgctaatcaattgaagttagatgaaaaagacattaacactagtg

SEQ ID NO: 174321 - DNA, 469 bp, Glycine max
  unsure (1)..(469): unsure at all n locations
cttagtcaagaagaagatcaatatgggcagtaatatggtccttatcatcganaatggaagggaaaagaaggaagattaattaacaaataataagaagaaaaagacctttccatagataaagctttggtgcttcgatattgtcctggcatcacattgacatgggccgtaaaacaaggatatccgatgaaatgtggagttcagcccttcacatacacagtcctaatggttaattaatatgaacctgccaccaccactatagataatgctaacctctatatcttttgcatgcatcgatcaaaaatcttaaccttttgatttccggaggacattaacagtgatttcaaatctatggatcttttttttatctttctcttaataactgaaggagggaaaatgaagtggatatgaagaaataaatggggagttatgaagtctaaatgtttgagaatanggaaatcaatccaagttt

SEQ ID NO: 174322 - DNA, 286 bp, Glycine max
ccgatcacctacattgaactttatgcctttgattttatcgcggatggctatccacgccacgacaatatctatcttaggatgcctcattgcattaccacattaattgtcgcagcacggatgacgtcatgatactaaaatctacaatctgacacaatattgcacgagtttctccttcgcaaatgaaccgaattgcgacccagggcatacatgtgtgggtactataagacgagcatagagacgttttacaattgtagtatacgttacgatggagaaatacgagaattga

SEQ ID NO: 174323 - DNA, 338 bp, Glycine max
  unsure (1)..(338): unsure at all n locations
gcttcacacctaaagggaggagagagagttatttatttttttctcangggcattaaccattgctttcaatctacttattaaacttaaacttcggaaaatatcaaatgaaacatttcattgaagccaaaacttctcgcatatgtaatgaggatcacatcaatgtctccattccaaaacaatatagagggtgaaactcccatacttggcttctaaggtggttaaaccatattactcttttattctacgtggaaaaccctttatctgactcattcctttaagaggcaaagaaatcttcactgctatagccactaaaggggaaacccttttgtttatacttt

SEQ ID NO: 174324 - DNA, 367 bp, Glycine max
  unsure (1)..(367): unsure at all n locations
gcatatacgataagcttagtgcatatgatgttgcttttgcctcaccaangtccaaatgtattgtgtctacattgacatatcctcgtgagtcatgaggtatgttctgaatgattcagcttagttgaagatattaatgatgcatatcgcatagtcatacttatatgcgcctacccttgtgaatgaaacaacctaaccattcccataattcaattttaatgcttaaagcattttataatatggaaaactgtattcagctccattggactctgggtcatattaataatccatcacaaacttatagttgtctcaattgtttcttaacctttaactattagatagatgctccttatcagctgttgttggtcag

SEQ ID NO: 174325 - DNA, 276 bp, Glycine max
ctgcactgccacctgatggaatttttttagaccccacaaacattttggtaaaaagaacctatcaaaggagttaaatagacttaaattctaagcctttgagatgcttcgcactatatagaaaaacaggtggccacaaattattcattgtattaccattcctttaaaatttaaagcaaatcccattaattttaaaaattttgctaaaacaaacaaaaatgtaaatgtttttatagtattaccaactcttttaaaacctggtgagctctattttttcaa

SEQ ID NO: 174326 - DNA, 322 bp, Glycine max
  unsure (1)..(322): unsure at all n locations
gcgaacgcgngagccaaaaccgagcaaagggagtgcaaataccaacaaccgcataaacccgaacacaccatatgggggaaaccaggaagaaaccgaaaaaaccaaaaagcccacaacatgaaaagcgaaaacagagacgaaagacccaaacaagggaaatgaagataacgggtcaagagaaaaaaacacccagctctaaacgcactgtccccaaaaaaaaacagacacccatataagcacagttttggaagactcggctggaatagcaagatcatcaatacacagacgcaagggccttagatcctactctggaacgaaagga

SEQ ID NO: 174327 - DNA, 402 bp, Glycine max
aagctttggcacaaagaagaagaagaagtttaaatatattcaaggcttgtaaaggattgtattagattgattggaaaagtattcaagattgaaagaatgaatttattgaaaatgccaaacaaagccttgcttttatagactcttcatgtctgaacaagaagaccttttataagagttataactttttagaaaaacttaaaaccaatttgaaaaagtcaaaaaccttttgaagagatacatcttttgatgtattcagaaacaatcattggtgatcgattaccaaataagtgtaatcgattacacaaagcttttatgtgaaagggtgtgactcttcacctctgaattcaaatttcaacattcaaaggcactgggtattgattaccaaaacattgtaatcgatta

SEQ ID NO: 174328 - DNA, 478 bp, Glycine max
  unsure (1)..(478): unsure at all n locations
ntgctngattagttttcgccgatgaaaggatcgaagcttgtcttatgagatgcaaatntaatcatcctacttggacgaatgagaaaactggggcaaatgaagagggtgagaatgaaggagaaacccatgctgcgattgccgttcctacatggaaacttcccatttgccaaacaatgtcattactcagccaataaaaacccttctccttacccaccacccgtttatccataaaggccatccttaaatcaaccacataacccaccttccacacaaccaatgccaaacaccaccttgagcactaaccaaaacaccaaccacaaagggatgttgcagcaaaaagcctgtaggattcaccccanattctggtgtcatatgctaacttgctcccatatctactcgacaattcaatggttgccataacccctgctaggtttccttaacctccattgttncgaggatacaactcgtacgcaacatg

SEQ ID NO: 174329 - DNA, 408 bp, Glycine max
  unsure (1)..(408): unsure at all n locations
agctcccacaggcctaagagagaggttctttttancttatgggcgccctaaacaataaacttaaagtccttatttaaattggggactggattggattacagaataatcatactagtaattcaattaaattttgtcggtctccattttagttaaacaaaaagaaagaccctcaggaatgaaaggattatattttattttgaccggatttgaacatcgaatggcatgatcccaattccttctctcaagtctccctgtccctgactttatgaagcattcggatagcacctttttttacaaataatattaagaaaatgcttattttaccgaaaatgaaaaagtaaataattgacctacatcaggatctttgctgaaatgggaatcgaattccctgcagtttcaaaataaact

SEQ ID NO: 174330 - DNA, 316 bp, Glycine max
  unsure (1)..(316): unsure at all n locations
atcctccatcncnctctctctagcgtgcactctgagtgtgtgtgagcgagagagagaataatgtgtaactccaactccgagagtgtctattctctattttggtgataaatctaaccgatctgattctgcagaacctttctgtttactttctctctctaactccaacacacaccacactttctcgctctagaaaacaccctggagctcttatatattgcaacaacgaatcggggaagatgcactcaaccaaaaaggcagggatatagctcgcaagcgtgccacgccaccggtatccgatgcacttcccgttcatcct

SEQ ID NO: 174331 - DNA, 53 bp, Glycine max
ctcagcttgctgcctgcagacgctctagaggagcacgggtcttttctctattc

SEQ ID NO: 174332 - DNA, 399 bp, Glycine max
  unsure (1)..(399): unsure at all n locations
agctttgaatagatggagttgtggggggtgcttatagtagataaaagaagaaagagaaaagaatgaactgttggtgccattaaaaatcacctttgatgacgctgctcggtggtccgaggcgatacctgtggtgtatgtaattgagtggttgtttcttcaacaaagaaggtaggggtgaatcgagaaacgagaaagaggaaaaaaatatttaatataaaaaagttaacaatctcagttattaattacaaattaataatcccatggtgaatattgtgtttctattgtgggagacatacttangttttccacctacctatatctttttttattaattaaagaaacacatgaagtagctatggaacaatattgttgggggtcattgtcaattttaaaaattta

SEQ ID NO: 174333 - DNA, 475 bp, Glycine max
  unsure (1)..(475): unsure at all n locations
tccacaatatccaagcaattcaatttccaatctcaagatctattccttaaccaagagaatagggcagactcctatcaatttagtggattttcaaggtttgagaagtgaaaatgagaattgggtaattttggggtaaactctcatgtcaaacaagtctataacattaatttagacttgctcaaactgattttaaggcgaaaactccaccgattcaagatttgacccctcaacacccaatttaccctagaaatgactcttgctttcacatttgtcactcatttttttctcatttgctcttgcccaggctttcttacaagtcctaattgacattttaaactaggatcaactcactttagcctccaattaccactaaccccgaaattagcntttcataccctcaaaatctcacatttgtccactcacatcactaccattctcacatttaaccctaggttaactcttcccatcatctcta

SEQ ID NO: 174334 - DNA, 404 bp, Glycine max
agcttttccaaagtggtcttcggcatcacattttaacttgatccattgtcgataagtacctttgcgacaacgtgatccatacatctcaccgacacatgtagagccttgttgttccctctcccctcgacgggaatctcttcttccgcaaacgcgatgtagttgttggtggttatatgattaacgatgccttcgaaaccctccactgagatattatgtgctacatgggcatcgttaagaaccttcatcaacagcgcacgatgaggctcggagtttatgagtagttcaagcaaagagatcctagctggagtgttattcagctgctcgactaccttaaactcgctttgttggatgaggcggaggaactcatgggcctcttccaaagtcaccgtttttccttgaagtcc

SEQ ID NO: 174335 - DNA, 413 bp, Glycine max
  unsure (1)..(413): unsure at all n locations
ngagatgaagaagtgtagaaaggtgaaacttcctgcttttattcgttgaccacagagtggtacctggagatatgtcgcgggggtcaggagaccttggggacgtcaggtggggtgctattgcccaaaaccaagcttgaccaatcccgacccaacccgggcatagtcagtcagtgagaacctgtgatgtacctaaacaggcgagctcctggcagtcaacagataaaaggaacaaagaccacaaagcaaggaggcttgtggtggttggccagctgtgaatcttgtgtgatatatgggttatggcctctggtaatcgattaccaagggtgggtaatcgattataaggcttataaatgaaaacaggaggctaagatggtctctggtaatcgattaccaacggggtgtaatcgattacc

SEQ ID NO: 174336 - DNA, 387 bp, Glycine max
attattaagaaagcgtgaattattcataaccacaagcatgatatcctaattacttgcaagaaaaaagaatgaaaaatacgtaagggaaagacaagttgggttgtcatccagtatacgctcttttaacggcactagcttgacgcttcgtcctgttatccaggatccaaaagagttcttacttaaaggagctttttctcaggtcttttttactccattatatgcactttaatacagacatattggctaggtggatacttgtccttctcaaacaaaccaagttgagcttctgcatcattatgccaatatcagtaattacttccccatgctaccacatagcgtgcagaaatattaatggtcggccaataatgaaagcgatttctaactgga

SEQ ID NO: 174337 - DNA, 222 bp, Glycine max
  unsure (1)..(222): unsure at all n locations
tccatcaggtggtgccgtanaacaacgagtgaagtaatattcttataagtttcaaaataaaaaaaaaagttaaataaaagagcatttgattgactgtgttttcaagacgttcatgtgacctcattttatcattccggaaagtttgtatttttagaaagaagtgagttatcaagaataggatgttggacaaatggcctcagttatcttaagaggggggggggg

SEQ ID NO: 174338 - DNA, 407 bp, Glycine max
agcttggttatctccttcttcactacatcatgttattatcgggtgagtcttctctgtggctgtcttactggtttagctccatcctctaaatttattcgatgcatacatgtggatgggctaataccaggaatgtccgccagggtccaccctatagccttcttatgcttcttgagaactgacaacaacttctcctcttgctcatcagcaagggaggcagatataataactggaaaactcttgctatcatccaagtaagcgtattttaaatttgatggcagaggcttcaattctggtgtggtcggctggacagtggtagaaagagatggtttctcaacctttacctcgtaatgaaaggcagaggtatgtgtactttctgaaacatggctagtcctatctgactctataaa

SEQ ID NO: 174339 - DNA, 469 bp, Glycine max
  unsure (1)..(469): unsure at all n locations
tactcagcttaaagatgcccgagtcattcatccctatgagatgttgtttatttattggcgatcagaattgtcattccttggattatagggttgaaccaagctcatgcttttacaaaaaggttcatcaagtcaagttgaaatatggaagtaaccgtcttgcaaaattggggcaaaagatgaatcgagtcacatcactgcttcgtctactgccaaacatatntaggattgttgatgtccttgttacttccagtttcaccttgacaaagatgtcatggaccatgttgaaaatctaaattgattcaaccccatatcctgcgtaaaaattcgcaatacttcaactgtacatcattcgcatacatccatgcttttcattggttgcattgctcattgcattctttccttttgaaaataaatanataanaataaattaaaatgaacttaatcgttattatcaaaaaggaaaaaacac

SEQ ID NO: 174340 - DNA, 312 bp, Glycine max
  unsure (1)..(312): unsure at all n locations
gaaccatcacaagattttgatgaaaggaccacatggatacattccaatggtggaagagtcatagccaaagttttccaaaactgtatgtaatgggtagggacttgctgagcattcctactggtagagacgcgactgaatcttcattagcataggaacttaacaagggtaagaaccatgctctgcctaaaaatgaagaaacaattatctgtactcctagtggacaacacaactctgcggatgataatgcatttgagctaatnggaacgattgtttatatcgatacaacttcgtacatgttattacgattacttc

SEQ ID NO: 174341 - DNA, 471 bp, Glycine max
  unsure (1)..(471): unsure at all n locations
ntaggaatagttggtttgggacanacataagaaacatgtacatcttgcaaggtaagcaaatgatgaaaatacggggaaagacacaaaaaagaactcccaaccaaaattctctcagaaatgaaatggaaccatagtacattccaaaataagtaaagaaaagaaagagggtagagagacaaatttccaagaactcaatttaatagcaaaaacccaaaatttaacatccacaaccatgctaatgaaaccatattagctcttgatcaactaccttgccgctagggcaacatttatgaacactattcctaaatcctaatcctccatctatcataggcttatgcattacacacacaacccaactaattaaatattgcctcctactatccaccacagcacagtcaagttgtagagtatgaagggttcaatgatcaataaaaagttatacaagtttcactcatgtgattaaagaacaag

SEQ ID NO: 174342 - DNA, 245 bp, Glycine max
agacttggggaccgccgactatgttgaaagggattttttctatggaggggacaggttggaccaggtctataccactgttttaattctcaatgtacacagtggtcttcattgttggtgatggaaataaggaaatcaccgtcttcattgggagagaaaaggtgttaggagaacaaagggaataatcttttggcacctctttgtctttaaaaaaaaaattatcttgcattatctgattaacaaaatta

SEQ ID NO: 174343 - DNA, 488 bp, Glycine max
  unsure (1)..(488): unsure at all n locations
tacggacctatgaatctcagctttatcatngcttagaatagggtagtacgatgtcatacattgttatctctcagttgaggggtggcccattcgaaagtgccataggtctatgggaaggatattgcacttatggtgaacaacggttgaacatatagttttggtggttagcacgtctggtattagatgataaagaccatgtctcgcttcaactataccaatcttcatacgtttgttcgtatcctgcaacatgcatgaattggaagaaaatatcaatgcacaatcagtagatgatacgagttttgaaatggaaataatattgaatgtgaatgtgggtataaataagacattaaacagtgttatagtgggtgagaggtgtacgattccggaatgagtagcgtggacatgatgaccgttaggaagctttacagtgactggattgatgcattcatatgaatgaagattgtcgagagatgaagtaacgtgatctg

SEQ ID NO: 174344 - DNA, 374 bp, Glycine max
ggacatcggggattattcctccttgtgcggagaagatttcttgcagttcgtcctctccaacatcttttgggagattcttcacgcatatcctcgacctgcacaaaagtttaatcgttcattggttctcattcagtgtggagtttttacctttttattaattaagatagagatgtgaacgagttgggaagggtgcacttacatgacgcggtcgcacttgttacaacaaaacttcacacaggggaataggctaaggtgatgagaatcatgaaacatgtcaaatagagtctaaaggtccaaggataaagccaccgagaaggatgaaggcccatgtagagaatgatgaaagcacagaggcagagacactatcaagatca

SEQ ID NO: 174345 - DNA, 482 bp, Glycine max
  unsure (1)..(482): unsure at all n locations
ctcagctgttttgagaggctttcctttaacctgcaatattttgttagatgaaaacattgacttagacaaagtaagttacttgctacttattcgtccaaaacccatttaattggtttttactttatctttgtgttttcttgcatgtatgatccatgaaccacaataattgaaccaatgatctatggttgaataaattgttcaccaaatagatatatccttgcaattttctacaggaattgttgaatctatacgaggagggagcaagcagagggaatcatgttcccagattttcaatgaaaggaagactataaaattggctgttggaaaatatggaacgctgcacaagtacaactacaagtacaaaggaggagagaaaaacgcaatatactgtaagattaaactataaataatttaaatgtagaataagattatatattnttaatgatgttcttattccatcattatagttcacatcttaacat

SEQ ID NO: 174346 - DNA, 399 bp, Glycine max
agcttggataggttgatggggacccggtgcttatatgaacgaggagaagggctacgtacgtgtgtgtgagctcaatttaaaggtgggcaattggggatggtgtacttatgcctgggcttgtagaaatgggatatttgttttgcgccatcgcccgattgccacctaataccacatatgaagggtgccccataacccaataatccatgtgtgagaaagcgtggaagagtcagtcttccaacttttattagttgaccacagagtggtacctgaggatatgtcgtgggggtcaagagaccttggggacgtcaggtggggtgctattgcccaaaaccaagcttggccaatcccgacccaacccgggcatagtcagccagtgagaacctgtgacgtacctaagca

SEQ ID NO: 174347 - DNA, 487 bp, Glycine max
  unsure (1)..(487): unsure at all n locations
nggcgtaacctttagaaatgtaaagacaagagaagctctcttaacatatatctctagggatctatttgaaaagcacaaaagggacccctcgcaagaagttgaacctccgaagagtgaatttcaaaagaaggtgaatttatggacgcatatcacaaagcttttaccagtgcatccagctgatcttaatctaacctangaagaatacttatctcttggaaatcttcatgcacaaatgtatgaaagagatcaagccactgcctacccttttggtctacacatctcaagggtcatcaatgtcaagataatagttgacaaggtgtattcatgtctctctgtttgggatgctactaaaaagaaagtcttcaagttgtactacaatgaggagatgcctttaaggaaaataagttggaaatagtcaatcacccgcataatnggagctttctgtttagcatgaaaagagcttgttcgtgctcctaatgcttatgat

SEQ ID NO: 174348 - DNA, 268 bp, Glycine max
  unsure (1)..(268): unsure at all n locations
agctcgcnaggagaagagcacacgcgttctaattcttcttaattataaaaaaaaggctatcatcaatcaagaaaacccccttcttttaacataaccattgaaaaatattccaactccataatggtaggcccaattcttggaggacaacccaaacaccccccgactaatatctgatcaattttaagatataagaatctagagggccccttaattaccctgccagggaaacacctggggtgccctagggaaacaaaatattccggaccaa

SEQ ID NO: 174349 - DNA, 499 bp, Glycine max
  unsure (1)..(499): unsure at all n locations
ggaccttaaatctcaagctgggtaaatctttnnttgtagagatagaagtggtcatgtcataatacttgtaacttgtgaagttagtggaactatgtggtttgccaagaactggacatagtctcagtggtagaaacgaaccagtataattccttgtgtttgatctttatttgctttctttttgctttaactaacctaaagtttgaatttatttttagacattcgaaaatatcttttgtttggcaaaataatgtttcatcgtccaactgtgttttcgaaaatgttatctattttacaaagtttttcttttagacgaaaactttttttgattgcgaaaaagactttataaaaattctaaaatcacaattcaacccccctcttgtgatatttntctttacacaatgcatggtcgatccaataggcaacttgatccactcagacctncaagtcgtggttgaaccggtccgaccgatcaagttgatccgggttgtaaagcattgat

SEQ ID NO: 174350 - DNA, 285 bp, Glycine max
  unsure (1)..(285): unsure at all n locations
agcttgcctgcccggtgcagcagtgatgattgttctttttatgttggggaacgggtaccaacccggaatgggtttatgcaaagacaacggcggcataactagcctgataaatgccaaaggaaattgtgggaagtattggttaagctataagcccactcaggcagatatcaaaagaaacatctcgggaaagaagagcggtaatcaaaactcgccggtgagacaagaaggtgaaagaagcccaccctgccacataagtaggagctttataaacgcangtctggggga

SEQ ID NO: 174351 - DNA, 299 bp, Glycine max
  unsure (1)..(299): unsure at all n locations
ccgtcagcgtgacgtacaagtcagtatgacagatcttgtgagcacggaagatgacgttaatctctgcgtgtcaacaggcttgtcgatcgcgattgacgaaggccgcctaagacgacgttgggctctacgtgctatcaagctttttgtcttacagacagcaganagtttatacggataaccactcgggtattttcgcccgtcagcgtgactcaaaagtcagtatgacagatcttgtgagcgcggtagatgacgtaaatctccacgtgtcaacgggattgtcggccgcgattgacgaatgg

SEQ ID NO: 174352 - DNA, 443 bp, Glycine max
  unsure (1)..(443): unsure at all n locations
gtttgaacagtaattccaaaaccgtatacacaataatgttcttacagtattctttatcaatacatcaagtacatcctcatgaaaccacaatcgactttgcttcccaggttcaataaaaggttcctttattgaacttccacgaattatctctcttcccatttgttgaagcaaaggatgcattccaagtttgttgttcttttcaatttttatgaagctacgctctataagaacaggtattccaatatcatcatgtagtccacagccgtttagtatatctgtaacataggctatgtctntaccaataaagaaacaacatacatcagaaaatatatccttttccatgtgatcacgtaaaccatcaaagcttatttttaatatttcttgaacttcattattgggaatttgcttagttttgaaacacacttttcattcttcattactct

SEQ ID NO: 174353 - DNA, 114 bp, Glycine max
  unsure (1)..(114): unsure at all n locations
agcttntagctcgtccttcaagatcatgccttttatccatgatgattcctttcacctcttcagagcttgagctcactattgttgccctataaaacccctcaaaactttgctttg

SEQ ID NO: 174354 - DNA, 417 bp, Glycine max
  unsure (1)..(417): unsure at all n locations
ntaatgaacttcgaactttgctagagggtatattctctccaaccactaaggtgataattgctccacttaagagccaccatattttggaatccctcgtcctgcatccaccaatccatgattttgaaaggcttatgtccccagtcaatgattttggatctcaaaagaataaggcagtggtctgaaaaattcctatccaacacaaactgggtggtatcaggccattgaaccagccaattttcagataagaaaaacctgtccagcttactcatggcacttccattatgtctgaaccaagtgaacattctgccaatagatctaacctcctctaaggccataagtgaaatccaagagttgaattcagcaatgctagaggagttgaccacattctgagatgaactcactctctcattntgatgt

SEQ ID NO: 174355 - DNA, 378 bp, Glycine max
  unsure (1)..(378): unsure at all n locations
catgcaagcctatgctaaatatttcacatgttacttattttatgatgttagttaactacctatgaattgacatggtgttgttaattgtattaatacatattgaaaggaaataagaatcactagaaatagggatggaacatataacatgcttacatattaccaattatttgctgagaatgtatgtatacatgantttgatgatgccaaagaagaatcaaataagactgttacatttgcttcaagattaatacaagattgtttcaacaaacaaagccttgcttcaagatttcttcaagatcaagtcttgtcttaaaacaaagggtttcaaagacatccaaggctctggtaatcgattaccattcctggtaatcgattacc

SEQ ID NO: 174356 - DNA, 476 bp, Glycine max
  unsure (1)..(476): unsure at all n locations
ggaaagcgacagacgactcgcttagcgagctgataacgctctaatcgcatgcttgcgtagcagatgcctttccagattcccctttactcactaagtgcactggtgctaggcttagccattgatgcgcgctaagcgcattgagctcacttagcacgatgactcctttggcacttcttcaaaatagctcctttttgtctgaaattgaataaaatttaacattaattccatgtaaagaggcttctactgagcagagatcaaaacaaagaaattntatttataatcctaccaaaaagaaccataaattgggagatttatatacattntggaaaacttttctatacaaaagttagtcgtaaatgacgactaatagtgatcagcatgagtctcaagagagtttcagaccgagtgacttgccccaagtacaagtattctccctcatgagaaactacaagtacttactaatcaaagttatatta

SEQ ID NO: 174357 - DNA, 396 bp, Glycine max
  unsure (1)..(396): unsure at all n locations
atttaaccttaaggatgagattgttattattatgaagacgcattacaaacaaacaaacaaatcttttattatataagagtaaaaaaacaagaatattctttagttgcttaagagggacaaatacagcaaactagaagcaacaagtcacccattacatacctttttctgacttgatcccggaggagtgcaaagcaatgtccgtgatgccattgtcggaagagtggaggtggcatccataattgatggttggagtcagaatgttggaattaaaactggaaagaacccaagtgcaagtagaagaagagtctcacaagtcaaaactcatatataaataaagcatcatcctttgatgaccattgcatttgatggcctatatatngtgataactcatgctca

SEQ ID NO: 174358 - DNA, 454 bp, Glycine max
  unsure (1)..(454): unsure at all n locations
ngaagaattttacaactacacaataaggtgtgttcgttctattccttatntntggtatcttagttttctgatcttggttaaggttaccaagaaaggtgttgagttgtagggttcatctcatagtttttctcttgtaggtgtgacatcctggaaatttctacccggaatttttgaaaacgatgtattttgaatgattatatatatataagtattattcagtgtatatgcatatatgttcttggtagaagtaggaatagtgggggcaagatacgcgggttaggctaattaaggaagagaaatccataactgggaggttatgggttaattcttaattaattagtctaaaaatcatcgttttgcgtgcgacttanaatttaacgaaaccaacctctgaaacacgcttggngttttattctgagcgttttgatatatatattgcctactttcgaaaact

SEQ ID NO: 174359 - DNA, 195 bp, Glycine max
agcttattccaagcccctcgaattgatgggcgatcatgcttttcttaccgatgaggccggagccccatgaattgattgcctacctctgttcgtgcattctacatcatcaaatcctatgccgagcccgatgaattgattgtggtctatgcattctccaccatatagagccgagcctttaaaaatgaatggcaactc

SEQ ID NO: 174360 - DNA, 407 bp, Glycine max
  unsure (1)..(407): unsure at all n locations
ggaatgtgctcaaatatgtggggcaattttggtttgttttcttgcttgattaggttgaattgggggtttgtatgggatggccctatgcctataatgcattttgaagcaatggggcatgccacattgtccccgttctcttgctattgatgcctaaacgcgcgcccaccaagtgttcggtgaaatgcctcaatggcattagcgcgtgactnttgtaaggaaacaacccatggggcatattggtttgcacatattctctattttttgggacatgcattcattcccgataaaggctagagtaattgccccacatatatgctaggcctagaaaccaaagattttatgcaagagaacacaagaagaggtgcatgttgggtaaagataccctatattgccatcaatcatctatg

SEQ ID NO: 174361 - DNA, 394 bp, Glycine max
  unsure (1)..(394): unsure at all n locations
atcttgtactgtnntanaattgtggcggtcatgaccttatgggctcatattgggaaccgcgacaggtacacttgggatatttcgaatatatatgctactatatttagaatttttcttgccaaatccatgaacgaacagataaagatcttcctcgcatgtgaacgcgtcttccagagaacaagtcattttaccctacccatttgtttattttaagatcttattaatgactagcctaagaatgtatcaattaaaaatatgtgatgtatctttatttttaatcgctttaaaattgtatattgaacattgtttattttaatataaaaaacattttattaaatactgtggtaatttattttttagtcacatctttaaataaatgaattaacagtattta

SEQ ID NO: 174362 - DNA, 468 bp, Glycine max
  unsure (1)..(468): unsure at all n locations
gacctataaaactcaagctgacaagacttcanattcaagaatgcactatgctcattttttctaattcacttccacatccatcgtatctatttgcatttntttacaataatatttctcccattttgcaactctaccttatatatgattcaaaaatcacattttcccaatatgttttcttcattaaagttctcagtagtgtccctcaaaacttgaaatgaaagcaacatattaccattgagatgtagtggtgaagaaataattccttccccataatctccagttggatttttagcatccttcactctgcatgcttccatacaaccccaagagcaaggaaaacaaccactaccactaccacaattctaaccatgaatgcattattatgtgttgtaccattacctttagaacccaaaccacttattgtaatcccttgaagaatagttaaagatagttttcttatatgcctca

SEQ ID NO: 174363 - DNA, 406 bp, Glycine max
tccttgagaagctagagcttagctacacacacccatctatatcttatctcacctccttgacaaaatacatgataatacaaaataaaagtccctactacaaagactactcaaaatgccctgaaatacaaggctaaaaccctatactactagaatggccaaaatacaaggcccaaaagaaggaaaaacctattctaatatttacaaagaatagtggatccaaccttgacccatgggctcaaaaatctaccctaatgttcatgagaaccctatggccttctttagtagttctagcccaagcctcttatggtcttctatccaatacccttgggggcaggattgcatcaagttacaaggttgaaaagaaatctcaacgaccgtatgtcgctcgtggactggatgtatgcac

SEQ ID NO: 174364 - DNA, 408 bp, Glycine max
  unsure (1)..(408): unsure at all n locations
agctntagtaaaattctaatgagtaactgttatttatatccattattggtctcttattgggcaagactaaggcacattgtcattcataagggtataatagtatgattatcaaatagatgtgcattttgtcccaatcccaataaagaaacaagtggttatcccttctggtgtactaagagaatgcgtttatgcttatttctttagtctgtatatttacactttaaattacgcattatgttcacactaaatcaactatcaggcttttaggagaattatttattgacatgaaactagaacctttatgaccatgtcatcaagagttcaaccttatgcttgtaaatgaaattgaatttcagtcaaagatagaagaagcctttgagttgcatgcatttcaaagtccaaagaact

SEQ ID NO: 174365 - DNA, 506 bp, Glycine max
  unsure (1)..(506): unsure at all n locations
tcacggacacttaaatctcagcttgcacatcggagaacatgataaagtgtcttcgcagtttctttatagggaaagatgtgaaaacccagttacctaggggaatgttgcgatccgctccgagtaaactacactagtttggcactaggtttgatgacatgtcaatgagttacttacagaaatgatccaacaattgaatcagctcggctaatggtctggttttcgattcaaccagccgggccgagccgagtttaataacactgattgggtgggttccttacttagtattgaaaatcctgctctcaatttgatagtaggtagtaaagctcttcttcatggagtatgtctcattaagattctcccgcatttcacaaatggaggtagaaaacatacaattacagcttattntttgaatcagagtgccataaccaggtttatgataagagcatcctcattatcccaggcctcatactatggaccaccactctcaatatggcttaacatcatat

SEQ ID NO: 174366 - DNA, 345 bp, Glycine max
agcttgtgaaagaaggagggaaacgactattgttattggtgccggtgagagcatgtgggtcccacaacccaatggccaatgtctatatccaactgaaaaatttcagtttatggaaaagccctgaaccccacatttaggacattatgcgtgtgtcttaaccaaatatttttaacttaatataataggattactttatactataataatatttctataatttcttataattgcgcgtctaaaataaagtgattattatcacatatgtaaaaaaaatgacttctcctaaataatttaatttgtttttaaacaacctgaattctacaatattaaactattccaaattaa

SEQ ID NO: 174367 - DNA, 459 bp, Glycine max
  unsure (1)..(459): unsure at all n locations
tgtcagcactatcatntccctcacgagagataagagagactactaagttcatagatttcctgagatcaatacacctcttccaacgattccaaatccgccaagggacactgacaacagaagagaagggagcaacctcgctagtggaatcacattctaaccatatcctttgccatcctttatcaaatgccatctcaatagcaatcatggccgtaagcagctcatcattaagagaaaacgaaaccctaaagacttggcaaaaaaccaataatcaaacccaaagagtttctaaaaatacctccacaagccgcaagccccgaagaacccctgcaagctccatccgtgttacacttgatccatccttgcaagggaggctaccaagtaacctgaataatcttgggagctttgtgacatggcatttacccgacaagaatgagaatggaaaatccaccatagagtgag

SEQ ID NO: 174368 - DNA, 400 bp, Glycine max
agctttggatttaatcctctgaatgttcaaatattggacgaattatctcacccaatagtcatatcttatcacttatccgaaataacaactaacatcctttatgtgaagtttttaacttgattcattcggctaattgaaaatattttaaccagtaacaccttgtaaagttagtagttttctagcctactcaactgcactctgtgtgtcctttatttaattggtacaaagaatatatccacttgcatactgctgctactatctgattgtgtctcccaccgttgcataaaaaagctggttagaattcactttctcgtcaccctcttctttgtctcattttgactttcagagacatttaatgccatgctcacaattttatagatatacgactatgcctctatcc

SEQ ID NO: 174369 - DNA, 401 bp, Glycine max
  unsure (1)..(401): unsure at all n locations
tgctcatgcagctggaacatggaaaagagatagtatatactatgcattgaagatntctcanaccttatcacccatatcggctattagaaaagcttttaatggaagctaggagaatgaaagtacactgaaacccttatgctgaaacaaaaattatgattgggtgaaagatatcgtaagtatctttgggaagaccccaaagaaagaatcatttgagaagaacatatggaagaaaaggtcaatattctttgatcttccatactggtctgatttagatgtacggcaatgtagagacataatgcatgtcaatattctatgaagtcatgaattccatactcgattagaggctgtcgtcccatgtgacaggcgcgtgggatgcttatacctttcttgtgcgtaaaaaa

SEQ ID NO: 174370 - DNA, 476 bp, Glycine max
  unsure (1)..(476): unsure at all n locations
ntaagtggaaaaccatgatatcaccatatccttaatgaattttggagctttggaattgttttgggaataagtgtgggggatttttgtttcactggataacatgttttgttggctatgattcatgatgtattttgggccatacttgatgtacattttatattggttaaatgttggacatgctaaatgagatgctatttctcaaaggctacagagcaaaaaaaaaaaatcgaaagaaaaagaaaagcaataaagttgagtgaataagatcttaaatggcaaaagaatgattagactcttggttctattctttatgtnttaaatttatctttagttctttntatatttttttcatttttttcttaatatgcacttattccccattgctcctttattcctttgggatttagccacttattccatttattttcataccttgtccttcccccatacaaccttataagacctttgatctcatg

SEQ ID NO: 174371 - DNA, 407 bp, Glycine max
agcttcttatcgaaggcaattcttggtggttattctccttcttccttggcttattccctagtggatggtgcctcccctctcctcttctcctttgccttccgctgcatctccatggtgaaaaatcagcattgaaggacctcattgaagctcaaagatccagcctccatagaagctccacaagcaagcttccatcaagtggtaattagagcacaagagcttcaagtaggtgctccttaaacctccattaatttttttttctttaccttctcttccattggtggttcttcatttttctccattgtatctcctcacatgtcttgttctaaatgttgttaacatgattctttatagtttccactgattaaacttgctatagaagttagatttgattttctatggttcaaatt

SEQ ID NO: 174372 - DNA, 378 bp, Glycine max
  unsure (1)..(378): unsure at all n locations
tcttatccaggcactctctctagaaattaacatgctttcatgcttatttgtntgtcatattgttgtgcacttctcattacattcattccttgaaatcagaaaaaagtaatcattgtgctaataaagcaagactacactttaaaacacccttactagacgcgtgccaagacaaggataatgcgtgacatagaacaagtatagagcaaatgaaggtcgatatggagaccatgaaggagcagatgacaatgatgatggaagcaataataagcatgaggaagatgatggaggtcaatgttgctacaactgttgttgctagtactactattgagagggacctgattcacacgcccgattcaatcaagagagtcatccagtctc

SEQ ID NO: 174373 - DNA, 468 bp, Glycine max
gacactatgaaactaagctaataattatattggttgaacaagccttctgtcttgtgtccttaagtttcatgggataatttcttcattagcttttgatgaaaaccccatggatcaatgcatatacctcaaggttagtgggagtgaaatatgttttcttgttttatatgtaggtgatattttacttgcagccaatgatcagggtttgctacatgaggtgaaacaatttctctctaagaattttgacatgaaggatatggatgatgcatcttacgtcatcggcattaagattcatagagatagacctcaaggtattttaaatctatcatatgaaacctatattaacaaaatttttgagagattttggatgatagattgttcaccaagtgtcgctcccattgtaagggtgtaggttaatttgaccaatgctaagaatgactttaaggacaatgaaaaattctatgctagtgt

SEQ ID NO: 174374 - DNA, 467 bp, Glycine max
tgctagtagaggtagatagaagtagattatatcttttttttaatcattctacagattggaatattacctcttcaccatcagagttggcaatgtcatcacgctgagagtcctcatcatctaaacttacgtccagtgttgggtctgccttgctggtgaacacattggccattagacatatgttggcttcttcttcaccatcctcgtcagatgaggaattgtccaggtcctcccaagtgctcatgaggctcgtctatttgggcttgaagaatttcttcttcttatcctttagctcttcaaggtcaggacattccaacttgaagtgccctagtttctaacattcatcccatatgattggatttttctctttcttatggaaagatcatttggataatccgtggaagctgagagaagtcttaatttttcacactcttatgatctctcttgagaccggacttatctcatcatct

SEQ ID NO: 174375 - DNA, 333 bp, Glycine max
gcaaaagcagacaactctgcccataacacaactcataatcacagctgtacacatacaaaaaccccccgaacatatactttggtccaattcgctaaccgacggagcgacacgaatatcatactggaaagatctaaatacataagcctacaatttgaccgccgggaacagcgaacaaacagccagaactcagacatcactacccgtggcacaagcaaccacacacaaacaagtctctgcacacagacaaaatgctgtggacctatttgacacaaaactctgataagacagatttcgaaaccacacttcctcaacaaacttgccaaaaaaaactaa

SEQ ID NO: 174376 - DNA, 404 bp, Glycine max
  unsure (1)..(404): unsure at all n locations
agcttctaccataggctggaatgctatctattatattcttatttggcttttgggttgctgccatggaggttctctctgcctctctctctattaatcaagcatccatacagcttagtataaattttctagacaaatgcttggtatcgtattctgttatgcgtgcgtgactctgtgttcgcgtattattctacagcgttttttagcatacttaaagtatgtgtattttattagccaccatgctcctgctacatgtagtaatgccatctaccatatttatggcagattttgggcttgttggttgctgccatgggctgctattcgccattaacaattaaaaaattgccccaaaatgttattttgattataaaatggactcaacaatatntctccttcccaccccaccc

SEQ ID NO: 174377 - DNA, 477 bp, Glycine max
  unsure (1)..(477): unsure at all n locations
taatgccaacaacagaaaaagaagattttcttataccacgatatatattacacaaatggcagaagagaacagagcaagacggagcataccaagcggaatcaaacaatggcacttccacctccaccggaactcgaagcagagttaaccactctctcttcctcatattccttatcatccgttggtagctcatacctgcaaacagggcaagaatttcgagaactcaaccaaggaacaatgcaatctccatgatacccatgcccgcacggcaacctcttcgccaagactccaacaccgagcaaatccttacatatagcgcacgccacggcttcgctttcggacacaatcttcaccgtcntgaacgcctccaccgccgccttcgacgccggcggcgctcctgtcctacctccgacgtcgcttttcgcaagcgtatgcagcagcgcctcgtactccgccgcgtcgacgtaatcctgcggattc

SEQ ID NO: 174378 - DNA, 407 bp, Glycine max
agcttgctctaaatttacattgatgttggtatttatgggaggaggctgtatgtcatttttgttttaagagtactgtcccgctggtaaaactaactttccaaatgtttgccttcgcaagaaatggccccgaggaagcttgcctcaaagaggtccaggaatgacaaggcaaccgaaggaactatttccgctccggagtatgataatcaccgctttatgagtgctgtacaccatcaacgctttgaggccatcaagggatgggcgtttcttcgggagcgacgcgttcagctcagggacgacgagtatactgatttccaagatgaaatatggcgttggcggtgggcaccactggttactcctatggtcaagtctgaatccaaaataatccttgagttttatgcccatgcttg

SEQ ID NO: 174379 - DNA, 329 bp, Glycine max
agctttgagccaaaatcctgactcattattattcttgtcccaggtgagaatgtcaatccttaccctcggaagcaaaaaagaatagaaggaaaatttccaatcaaaaaagaatagaaggaaaatttccaatgaaagcctataaagaaaagaaggaaaattccccaatcaaagagtgggagaaagcaaaaagaaaagaaaggaaattcccactcaaagaatgggagaaagtaaaaaaggaagaacaagaaggaaagatagctccttgtcagggatcgaaggaaaaacagaagaaatgtgccgagaggtctttagaccagacaatatctgaa

SEQ ID NO: 174380 - DNA, 378 bp, Glycine max
tcttatccaaagctcatcttggtggtgaagctccttctttcatggcttattccctagtggatggcgcctcctctcacctattctcctttgtcttccgctgcatctccatggtggaaaatcaccattaaaggacctcattgaagctcaaagatccagcctccatagaagccccacaagcaagcttccatcaccaatgcgttgtgagtaagaagagatgatcttccgggatcttgtgcctgtaaaatgcatttgtgtcatgcatagcataaacattccctcatgcattcatcatatttcctccatgataaggtgtcaaagtattaaatcaacaaagttttcattctagcaaacatgggatcaaatcaagtaccctctttg

SEQ ID NO: 174381 - DNA, 411 bp, Glycine max
  unsure (1)..(411): unsure at all n locations
agcttaacaattntgtaagtatgtaatatttttttattaatctcttatggatgatatgatgcatgatttgcataatacacttaatgaaattatctatatggattttaagtaagaccgattgtatgagattgtgatgataacctattaacacaacatagccacaagaatcatagagatatactttgattggtacatgccaaatgttttatattcaatacttcactactcctactagattatattgtatattatgtctgatcaattaatgtctaattcaataacttattacactaggatggatgcattataattcatatgaacccaataacttactattcataaagaacatctcaacctatcttattctacgttttgtaatatggagagatcgtagtaatttgaagtatataa

SEQ ID NO: 174382 - DNA, 429 bp, Glycine max
acccttcaattattgactagtcatggtgaaagtgaaaatggttccatttattatattgcatactatatttcattatttcgataatgtcttaatttgtacttctattttaaaccctcattttttttctttttcttttaaatatcttattgagatttatatttttttatggtcaactaggttaactcactatagatatcttgttggccttgtgttagccatgatcatgtgtatgattatccttaaccatataagataattaatacaaatttattttagtttaactagtgattataaacttaaattcttaatatatatattggcgtcaaattcttagaatagagaccgtatccacccgctgtgagtcttttcactataataagaattggtttccacataagatgctctgaatgaattagtctattaatatat

SEQ ID NO: 174383 - DNA, 410 bp, Glycine max
cagcttggcttagcgtttatgcgagacggagaccatcttgcttgctatcatcgccaagtaccaagaagagttaggtctagccgcggcccaccagcattggattgcggacgaatatgcccaagtatacgcggaagaagaggctagaggaagggtgatcgactctttacaccaagaggcaaccatgtggatggatcggtttgctcttaccttgaacgggagtcaagaacttccccgaatgttagccaaggccaaggcgatggcagacacctactccgcccccgaagagattcatgggcttctcggctattgtcagcatatgatagacttaatggcccacataattagaaatcgttaggaaacttgtatggtctctaagaccttgactagatacgacttcctttttgaaataa

SEQ ID NO: 174384 - DNA, 490 bp, Glycine max
  unsure (1)..(490): unsure at all n locations
ctcagctntcagacttgnttaaaagtttgtgttgtgcaaaataattgcttaaagttttcaaagttcatatactcactattcaattcatcttctagtgtgtttcttttatttcaatttctacatcacaagcacaacacaaaacaatattttcaattaaatttcaatttgaggaagtcaaaaacaaatttgtgaaataatattgttgaaaatccaattcaccttcctcttatattgatagtcatgctttttctaacataagcatatttgagtaaaaagtattttacatacctaagcttccctagcacaataccaattctggtggttcttttatgtccaatttcctcaggagatattgtttcatatgtacctttatgtttaagcattccatcctacaaagtagaanataaaataataaanaaatggataaaatataaaggagaagtttcatatagtcttagagctaacttcactagacanataacacccgtga

SEQ ID NO: 174385 - DNA, 200 bp, Glycine max
agctttacaattatgggaaaaattctatttattaaaaacataatctaatctttattttcaatgattacaaaaataatatcaatataaacattacaataagtaagaaaaataagtgtaagttagaacaacataataaaaaaaatatttctatgtattggagataaaaaataattatttaactgttaataaatttaaacttt

SEQ ID NO: 174386 - DNA, 478 bp, Glycine max
  unsure (1)..(478): unsure at all n locations
tgataacaagagcccaactaacaagcaactaccttgtgttctgacccaganagaatagnggttatcaagagaacagatgttgtgcgactaaatctaattggagcaatttcctatccaaaacaacagattaaaagagtaatcaattttcagttatctatcacggatcatcctatcttgacgggcatgtcttttagaaattaaatttgatgtattttaaataagttatattttgtataaaatggcactattatatatacattagggtgatttatcttgaaatatatataattagctatacatttaattatatactagtgaattggatcgaatattgagtatacggatgtagatttgcatgaaggctatgggaaaaaagaattacaggctctgttctgaattatagtctctacactgtaatactaatgtgatacnggtttcactgggatctgactatttctctacacatggaacaatgact

SEQ ID NO: 174387 - DNA, 390 bp, Glycine max
agcttggctgcctttacttgcagtatactgatatggtctcaccttactcgagggttccacttgcggagaaggtattcttttattgtcaagtagtattcactttttagcacctcttctcaatgttaataatttttgtctgtatgttacactcacaataaatacatcacttttgattgtctcttgtttcagatagacgagttaactcgaaatcacccggcattattaacattgaagagtgtggatctttccccaacaagttggatggctgtttcttggtgagcatagaatgttgctccttgtacatgtaatatttttcctgtatgaaatatggaactgttacattgtctctaaacattttattttgtaaaatatctttgaaatttggcttta

SEQ ID NO: 174388 - DNA, 488 bp, Glycine max
  unsure (1)..(488): unsure at all n locations
tgaaacatcgcatgaccatagtatgaactatgttttttatatgagtatgaactaatattttaatatcaaataaattgaagctattctgttgattgaagttcatcaagcaattcccttattcctttgggatatgtttcatgtttggaactgtagttttaaagggaaaaaaaaaaaagaaagaaagaagagaaggccaatttgatagtttaaaaataaaagataaaaatcttaataatcatataattctcttaattntaaaacaaaaacttgccttactcttcctatccttttaaaattttacttccaagcaaatctttaatggttaaagtgttaaactatatattctttgtctatctatttctctaccccaaaaaaatactggatataataataatnttgttgacaaattctttaattcaagccatatcaacattaatcgatgaatgaatctaaatcaattttcttacaacatctttctatacaatttt

SEQ ID NO: 174389 - DNA, 403 bp, Glycine max
  unsure (1)..(403): unsure at all n locations
agctctgcggatttggtcttcaccggggaaatgatctaagcgggtatgaaaagaggcaaatttgatcatcttgcttggacgaatgagaaaactggggccaatgaagagggtgagaatgaatgagaaacccatgctgcgactgccgttccttcatggaaaatcctccaccagctcaacaacgtcattactcagccaatattagcccttcttattacccaccacccagtcattcacaaaagccattcccaaaatagccacaaggcctgcctgcttaccacacgcccaatgcgccaaccctaccttttgctataaccaaaaaggaattnttgccgcaaaagactataagattcaccccaaatttcgggggcatatgctnacctgctcccatatttacttgataatg

SEQ ID NO: 174390 - DNA, 408 bp, Glycine max
  unsure (1)..(408): unsure at all n locations
tagcagccaactcctgagggtgatgccgtangagtgcttttctataataagcacaaagtgttacccctcttccacaacaacaggggtcttcaagaaagtgttaagcgtatcctcatcatacttaatcaaatgacctctcaccctcacctgcttatgtgatatgtcctcggggtcatagaggttggtgtagaactccttcacaatggcaacatcaatgttaccgtcaatgaaatcagtcaactccttatcccagtggcgtctctcgagttcctccctgaactcatcaaactttgtatagtagaccaccacattcctctctggcaaaagcttgctaggcacaataacatcagtgtatctttcccaaccctcttgcgaagtgaatctggatctgtaaaatctaacttgggt

SEQ ID NO: 174391 - DNA, 258 bp, Glycine max
  unsure (1)..(258): unsure at all n locations
gatcctttaaagtcacctgtccgcctgccagctttcaccttgaattcggcatcttccggtttatttttntctgcgccctcgcgctgaatctggccgtgttacttctgggtgggaaaacctttgctttgaccatgaatgtggcttgggttctcaaagattggttgctcattgcgtactctcggcctgttattaatgacaccgtgaccccgaataatttgttcggctacaggcttgcctttctcggtgtggcctattata

SEQ ID NO: 174392 - DNA, 424 bp, Glycine max
  unsure (1)..(424): unsure at all n locations
ctgcttctcctaaatatcaaattcattgtgggaaaatgatatggacaaattangattggttagaagggcactaactgaaattaaattgaatttgaatttatgaatgtaggcaacattatgcaagattaaggtattggttaagcaaactgaaccaatggcaaggataggtataacatcaatgttaggcaaagttatagttttattagaaacaagctgataagatcgaaaatgataaagagaacaagtaatgtgaatgcttgcaccataatctataagtcaacaatcatgaagaaaattagaagtgagagtagaaaggatcatatcattggcaatagaaacaccttgatggatgacaacattggtaggatgactctctaaaagattcatcaattggctatattgctgggcagtaagttgaaactgg

SEQ ID NO: 174393 - DNA, 398 bp, Glycine max
cagcttcaatggagcttacatcatgtggtatcaagagcatcttcatctaggtggatgttcttttgcttcctctatctttttgttcgaagaattctctttaattccctggtcttcatcttattctccatgtatatcctccactgtcttgtgggttgtttctgtttagaatagattcaaaaaaataaaccgattaaatcttagatctacacttgttcctgcatttctatggttcaaaatttggggatctactcttgaatcatgtttttgtgttgattttaagttctatcatttttcattcataatattctcgtgctgaaccttaaatatatattttcctccaaaatattgattagaaaaaaaacacaaaaatctaagtggaaactacttaattcatgttg

SEQ ID NO: 174394 - DNA, 429 bp, Glycine max
  unsure (1)..(429): unsure at all n locations
tgtcaaattaaagtagaagagagatatgtngcttgttgtaactactattagaaaatacactntcaacatctgttatttatggtcttctacatcggttgtaaaaccgatgttgaaagcaccgatgtagaatgtattgttgttaacatcgattttaaaaaaccgatgttaacataaaaatgttaacatcggttntataaataactgatgttataaagaaagaagtacaacaaaataagtgtatgcgtgagggacgttgacatcggttttctgctaaaaccaatgttaatatgttaatatgttatattaacatcagtttttagaggaaaccgatgtgaacgttcatcattcatgcancctatttgctgaataatttatgtataacatcgattatttattaaataaccgtgttaacctatgtacattaacatc

SEQ ID NO: 174395 - DNA, 290 bp, Glycine max
aacccatcctacagggcccccgacccaaaggagtaacaagagccacaccagagtccaattggatacacgcccaggacatagggaactaagactcattcatgtgctgccaagcaaagctcaaccacatcctcgaccaagaaacaaggcacattaatgatgcaccactcaaacatttaagcacaagtggttctatcgaacctcacatcatacatagtgagcccaaactcgtgccataaaggctacgtaactcatggtcaaaatagcaccccgacccaatctcgcccacaaaa

SEQ ID NO: 174396 - DNA, 333 bp, Glycine max
ttatccgaatcatctcacgttaattaatgatatggcccatgaagtggatatatgtaaggaaccacatcaccgcatgatccaccttttggtgttaagttatattcaaattaagattctaagatgatacgagagtttatactaataattggtgttgagtctatcaagccatccaatgtcgaattaccacaaatgtcttatcttgcaaattccctgtctaaatgtctactgtctagtactaagcccgctggaggctcgaaagacacctcacattgatcagtgatttagtcaaaatagattatataagtaaagagcaattctcattgcattatctag

SEQ ID NO: 174397 - DNA, 220 bp, Glycine max
ttcacccatgatcaaaacatagtcaataacgataacttttccaataccctcgtcatttgttcagaccccaatccgtatattgccttataagagtgataagcgcttagtcaacaacgaaagtcgtcatgggtgtgttaatgtaacctttgtgggatcgacgtgagtgccgctataagaatcatggatgggatagatctcctctgtcgaccaataaaggatg

SEQ ID NO: 174398 - DNA, 401 bp, Glycine max
  unsure (1)..(401): unsure at all n locations
ctgcagcttatgtagttttctaaagaacaggttttttttttacctcatcttcccggattgactcagaacccttagaagccatttcttccctcaaacctatgtggcttctcatggtcatcgagagggtcatcagtcctcccatgtcataaaaccttcatctttaaacttacaaaagaatattgtatcttgacttttctctagatatggacattcttacttgaaatgtctaagcttttttctctcatagaaaactacaaagcttttgtctttatccctcttgtctcggggcattcttcttaaagagtttctccacttggacccacctttgtgtgtacatatcatgcngatattgtgagagatgaaggcgagctcatcttcatttgagtcttctttagattcat

SEQ ID NO: 174399 - DNA, 370 bp, Glycine max
  unsure (1)..(370): unsure at all n locations
gccgtgatggatgagatagacatacccattctgtcttaatgttcttgcgacgatgcncgcgatgnttatatgccgaaaatacttttggaaaactgttatagattacatgtagagttatcctatggttaaaaagtgagaatgtgatgtatgactggtaaaagagtgaggctttaagattcggtaggcttactttgaattctatggtaaatggacgttaaagtgagttaatactagcttgaaatgtcctttatgacttgcgagaaagctcggactgtgctagagagagaaacgattgcctgagtgaacaaagagccatttctatggcaaatatgggtgtttaagagtcctattatgattcagtgagacttta

SEQ ID NO: 174400 - DNA, 384 bp, Glycine max
agtaactttggagtacttgtcaagtagctctttaacatctcgcacaagaaccttcaacttatctatttcctctggggagctattcaaggtcctgttcaactggttaaacttttgtactcgaaaaaaataagaatcgaagggttctctggttcttttcagggtgggtcggaactcgtaaccgctgcgaatgatttcaagagcccctttcaacaactctcccgcagcagctccagcgaacggctctgccatcactactcacacacacccgtggaatgaaatgaaagcaaacgaataatatgtactactcacaagacacaccaaacccgcgttttttcccgtgacgatgactacgctactttcttttagctcgcataatcaaaacat

SEQ ID NO: 174401 - DNA, 426 bp, Glycine max
  unsure (1)..(426): unsure at all n locations
gtgatntgttatagatgctagatagaagcgagagactatattcctgcgtggaaaccctctgtgaggtgaaaatctatggtcgtgcacttttaaacacaaaaaccccttcgttgctgtaagtcaaacaatggttgtcaaggttaaaatcccgtactgttgttggtctaattgaagctaagttgaaagtcttatagaagattaacagggtgtcgaaaattcacgggtggtagagcttgcgaaatctcatcttaaagggcgaggactatgcgtatctcaagcttgggctgaaccagtataaaaatcaatgtgcactctttattctttctcctatttgcactatttttgaacacaattgtgtactagttatgttaatctttaaaacagaaaaaactctctcaatacacaaaaaaccgtactaagattatc

SEQ ID NO: 174402 - DNA, 412 bp, Glycine max
  unsure (1)..(412): unsure at all n locations
ggatcttcttcattatgtgagtctttngcttcttgaagatcaatgacaacataatggagaaggaagaaagatgattggagaagccacttcaaggagaagatgagtcaagaagaagctcaccaccataggaaaccatggataagagcttgaaggtagaagaagatgagtggagggagagaaagagcacgaatttttgtacttaaatgaggtatgaaatttgaagtgtaattctcaaatgatcaaagttgaaaaaaatgcacacacatgacctctatttatagcctaagtgtcacacaaaattggagggaaatntgaatttctattcgtatttcacttggaatttgaaatgaatntgtggagtcaaactatggagccaaaatttcactaattatgattagtggaatttagatat

SEQ ID NO: 174403 - DNA, 449 bp, Glycine max
tgtgactcttcacaattgattctgtatttctttgttcagatacactggtaatcgattaccaatatcttgtaatcgattacaccattctgaaatcaattggaacattgcaaatttagttaaaagcttttgaaatcaaattttgccactgtgaatcgattacaggatactggaatctattaccagagagtaaaaactctggtaacttataaaatattgagaaaaactcttttgaaaaacaaaattgtgctgtgtttgattttgaaaaatctgttcaatacttcccttttgaagtcttcttgatttcttttcttgaatcttgaatacattttttctgaatcttgaatcaaacttctcttgaatcttgaatcttcttgatttcttttcatgacacttgaaattaatcttgatcctgaacttgttgactcaatttgaaatattctcttgacttt

SEQ ID NO: 174404 - DNA, 418 bp, Glycine max
gctttgatgaggtcactacttgcaagagcattctatagaaggttggacttaagggatatcaagtaactgttatcaggtaactgctaaaacaatatcagggattatgatgagaaaattactagagaagcgcaagcacgtatgatatgattaatcttatgtattatatcatataatgttattcttgtaagacggttctaaaggatacaacaacagttctaaagggtttacataaatggttttcaaccgttttagaagcttatgtcttggaaagtacttttccacgactattatttgactgtctttgtatagccataggtctacgatggttttaaatctaaaccgtcttataatagggtttgaaaaaaaaaatacgtatgtctaagacaattttcaggaaaatcatattagaaattggaca

SEQ ID NO: 174405 - DNA, 469 bp, Glycine max
tcttgatgcaacatttggagatgttgatgaaacaactatatatgcgctctatgagagggtggatcaaatggagaatagagatcataatgaagaagaaaggatgagaagagggaatgatggtgttcctatacaaaaccgaattgatggtattaaactcaacattcctcccattaaaggaaagaatgatccggaagcctacttggagtgggagatgaaaatatagcatgttttctcatgcaacaactatgatgaggaccaaaaggtgaagcttgccgccacggagttttccgactatgctcttgtgtggtggaacaagctacaataggagagagcaagaaatgaagagccaatggttgatacatgggcggagatgaaaatgatcacgacgaagcggtatgtgcctgcttgttactcaatggatttgaaatcaagctccaaaactaacccatagcgcaaggtggttgaggag

SEQ ID NO: 174406 - DNA, 405 bp, Glycine max
agctttaacctcatcgttcctcacagtctttatatttgggagccaatccaatccttgtgttcggactctcaaccacttatgatagccgccgatgatcccattactgcttcccctaagctctctgtcctttcttcacgccgcatcccatgccttgcgaactccttggagtaccctcgcgttgtggtcactaaaaccccgtgcgatgaaaggcgtgatgctttcgtctaatggcgctcctctcatggggtagccaagctgtcttatggtgagaacgggattataattaatacaaccccttgttcccatcaagggaacatttggacatccttcgcatgaagatagaatcttgattcttccttccttctagcgagggaaccaattaacagacgccccccccatgctagc

SEQ ID NO: 174407 - DNA, 390 bp, Glycine max
  unsure (1)..(390): unsure at all n locations
attgcgtgttgaagaatcaaattttgattctgtagagttttcttcgtaaaaccaccttgagcgagtttaaattaatgttatagactttgttgagatgacagtctgcttcacaattaccccattcttatattcacttctcaaaccttgaaaatccactaaattgaggggttttagatacctacattttgagtcgctttggtctgaagcttgtctttggtttagatatgatttatacatgatttacgacttgtaggatccaatntgggcaaaaattggatgaaggcaagagtgatttcgaaaatctgcacttttatgcagaatattgctgttgaaatgtgcagcagaattttgtgcttgttgcaaaaatgcttatgtatggttggttgtgga

SEQ ID NO: 174408 - DNA, 396 bp, Glycine max
  unsure (1)..(396): unsure at all n locations
tatggggtacccgtcatatgttgtactatgtggcgattgggcgatggtgcaaatcatctcttccacatccacaaatcaaacatgaacccaccatccccagttgcccaccttcaactgagctcacgtacccccacgtagcccttattcttgttcctcttagcacggggtccccatcaaacccttcaagcttccaaaatatccaagaaattcaatatccaaacttcatgaactaccctaaaccaagaaaacagggcagaagtagaaaactctgcccaaaacacagtccaataccacaactttccctactcaaataccccagtaacatgcgttacgattctntaaccgttggatcgacaagaaaattttactggatgtccctagtacataattctacat

SEQ ID NO: 174409 - DNA, 390 bp, Glycine max
  unsure (1)..(390): unsure at all n locations
tcagcgtagttgatagcagaagattccaatcattggaagcctggtaccgatataccgaccacattntgctggaaccgatataccgacaacattttggaccaaaagatccttttggaaaggaatgttaagatttatcatactgagttcgaccagtttaaagcagagttggagaggcgaaactttcacaaacgcctctccaaccttcaagaagggagcatagatgtggcggtggttaaagaattttatgcaaatttgtatagtccagatgaccaagcttccaagtgtgctagagtaagaggccatttaatcaagatagatgcaaatagcccgaatgaggctcttcatactctatgtgtactagaggagggggaaattttacccacttactct

SEQ ID NO: 174410 - DNA, 376 bp, Glycine max
  unsure (1)..(376): unsure at all n locations
agctntataagtgcgggttaagactctttgccaagtcaccgcgatatgcgaggatgactccccgaggagatcggttttggtacgaccatgtcctcccggtttccgactaagaaattggcgagtggaggaatgcccagacgtttacgcgacaagcataatgtaaccttttgtagctttaaaactctacggttgggcctaggctttagagtttccttttgttaaggcattatgtcttttgttcttgaagttataatacaaagatctttcttcatctgtttcggcgcctctacccattctcattcatttgcatgtttatttctttacgcttaaaacgccagatccgacaacgagtccctcgaaggtactaatacccggg

SEQ ID NO: 174411 - DNA, 412 bp, Glycine max
  unsure (1)..(412): unsure at all n locations
acaaactcaagctntanggacatcctctgttatgactgaatgtatatatgttggagcactcaattcactccgaaactacttatttntatacgtaagaggacaacacaagaaaattacttaccctggaaagaaaatgcagaccatggcagaacgatttgaagaagcattatggacatcctctgttatcactgaagggacacatgttggagcacttaattcattgaggcataaaatagtagtaacttcctgccttcttatgcaatataaaaatataattcagtgcctgggtatcttgccaaattgtgcacacctggaatatttggataactacagcagatgatgctgaaagaaaaagaaacagacatggacttctggatacagatcaagccgaagctcgccagatagtaaaact

SEQ ID NO: 174412 - DNA, 252 bp, Glycine max
gtaattatatcgagatgctctaaattgaaaacgaaagctcgtaacagatgccaaccaaaataacttctgactcggatttccgattaagtcccgtaatatatcgtgacgcttcaaagtgagaacaatagctcttagaaaatattaatgaccataactctttactccgatgtccgattgcgacccgtaatatatctagactctccacatggaaacagaagctccaagcaaattcgaaacacaataatttcttac

SEQ ID NO: 174413 - DNA, 383 bp, Glycine max
ttggtggtgaccacagagtggtacctggagatatgtcgtgggggtcaagagaccttggggactgtcataccctaatttcgtccgggaacctttgctcgatgacgtgcgaccattctttggtcctcgtgaggtgcttggcacccatcattaggcaatttgtgaaatttcaggacatgccggaaaaccaaaaaaatattgatgcacaatccgtaagtttccgtgacacaccggaaatcaaaagggagcgtcgttgcataattaagtgaggttccgtaacattccgtaagtcaaaaaggggatgattatgtaatccgcaaggttccgtaacaattacggaaagaaaacaagtatctgtacgaaattcgtaagtttccgtaacttta

SEQ ID NO: 174414 - DNA, 472 bp, Glycine max
  unsure (1)..(472): unsure at all n locations
gacaatgcacacatcctctantttcaggtcctttttctctngaatatatatcatttgtccaattagtagaatcttgggtgctttataaagtttgtgaactctctacttcaaccattttctcttttagttcatcctacataaatacactttataaactattaccatgcatcaatatcaatacttcaatgtcactaaacacaactcatctcctcattagttactcctccttacaccataaccttctattagaaaattgagaaaaacaaagagaaagtattgaaataaaaattaaaattcttacaattacagtagcagccttttcaataacaatgcttccatcttttcgagttcgagtgtcaatataaatttctacccgagaaggttgcactcccttagcctttggtgtctaccattagttaaagaaaataatcatcctattggtattaagcaatctaatattaaaacaatataa

SEQ ID NO: 174415 - DNA, 412 bp, Glycine max
  unsure (1)..(412): unsure at all n locations
agagacaaacatgtgttttgtactttgactgaaatgttagtcagtttgtcagattgattgtggaggaatgcattgatcgtatcccagtaagagtggggtccttaaattttgagagaaacgactatcatttagtactgatttttgcatgaatctctaaaatatggactgaatgcatgaattgaggattgtgaaggccatgtttgattgtgatagccacttagccaaaaagctgaccacgtgcttaaatgatttatcccttgcacccagtttaagctgaatgaattattgattgattgaaccttgagcctatacagtgttatctcctactaccttgtcttaggttgtaggagagcattatccataggaagctnggttaaagcaaatttgtcccaaatttgagggagtaattatc

SEQ ID NO: 174416 - DNA, 319 bp, Glycine max
  unsure (1)..(319): unsure at all n locations
cccaacacaagaggaacaaagttgttgtttggccatggngcacaacaagaatcccacatacacaatggcgcgcataatacccaccatcctcctgttgcccacctccaactgagcacacgtacgcccacagtacccaaatcctactttccctcaaaaccgggtacccaacaattctctcaagatccgacacattcaaagcaaacaaccatcaaacagcaataggctatcacagccaagcaaaacagagcaaatgcagaaaactctgctcacacatcaaccaaaatcacagctntgcacactaaaagaccacacgaacaaa

SEQ ID NO: 174417 - DNA, 391 bp, Glycine max
  unsure (1)..(391): unsure at all n locations
agtctaaacctaggatggtctgtttaattgagcctaatccaacaagagggatatgaagaccaagcttggattgattcaatctaactagggatcgaggtttaataacttaagctaccacatagaacacaaaagcatgattgattaaagaaatatctttatatgcattagctggtctattaaaaagacccaacacttctacctactgttgtcaattttacttacttgcattttttactgtttttagcctagacttaatttaatcctgttttaaatcatcaattatcaatgtttctttcaacaatgccttatttctgaatntaaccctatcttagactagttccctaagttcgatactcggattcctcaattttaattttaaatacttgataat

SEQ ID NO: 174418 - DNA, 471 bp, Glycine max
  unsure (1)..(471): unsure at all n locations
tataagaacaataatgcctaaatcatctgcaaatatgcatgtgtattatgaagcatcaacaagaatcaagccaatgctattgtgcaagcaatcaatggggcaaaacacaccaaaagattatgatgatggatggctcaaattctcacaaaggtaaacttatcactttcaaattgagctttcaaaactatcatgacatgtagaggaaaaacaaggatttcaaatcacaaaatgtcaagagacttttattttcagaataattacccatttcttgaacatatcctataattcaaagaaaaatatgcaaagttgcacatgctgacagaattgacctaaaatattaaactagaaacccaacaaaactaacaaaattaacacaactaacaaaattaacaanacttacaaaactagcaaaaccaaaaccaaagaacactccccccatacttaaacaacacattgtcctcaatgtagcac

SEQ ID NO: 174419 - DNA, 365 bp, Glycine max
  unsure (1)..(365): unsure at all n locations
ttcttcgntgcttcctgctattaatgcgaagcggtttgccatggttcatggtttggtggtcatggtggggttttgaagttgaaaggtgcaccggtgtgcttgggtttctgaaccacaaggtaacgggccatggtatgttggtggtggtttggttgggtttaaaattaaaaagcttcttttgttggtaagttttggatgagtaaaatggatgtattgaaagtaactgcgcagttgtatcatcaataaatagagaaaccataaaatcttattcacgtcagatattgagaagaatagtaaaatgtcccaacccgtgcactattgaagagacatcaaagggggtaaatatcatgaactacaaagaaaag

SEQ ID NO: 174420 - DNA, 381 bp, Glycine max
ttccctaggttcttaagtcgcttaaacattcttcacaattaattgtccttctccctgcctgaatgtgcttggggtattgtgcgaataacttacctcagtttcatatgtacagataaatctctaactctactctcatattatcatatatagtgaaatgaaatgaaatattgaatcaagcttatgtgtgaaccctgcaaatataattaattgcatgaataacgcgaaaatgaaagatggcatggaatggaacaatccctagtgctaaataaagacttacaagtccttactgtttatgagatgtggatatggaatcacatcaactaagtcctccgtgaatataacctaaatcaaagttttataaacccatatacaatctatcat

SEQ ID NO: 174421 - DNA, 360 bp, Glycine max
  unsure (1)..(360): unsure at all n locations
atgactaaaaatgttagttagtttgtcagattgattatgaaggaatgcattgaccatatcccggtgagagtgtgatccttataatttaagagaaacgactatcatttagtactaatttttgcatgaatctttgaagtatggattgaatgcatgaaattgaggatgatcaaggccatgtttgattgtgatagccacttagccaaaaagctgaccacgtgcttgaatgaattatcccttgctcccagtttgagttgaatgaattattgattgattgaaccctgagcctatacaatgttatatcctgctaccttggattaggtngtaggagagcctcatccacaggaaatgtggttcaaagca

SEQ ID NO: 174422 - DNA, 440 bp, Glycine max
  unsure (1)..(440): unsure at all n locations
tatgcacatatttgcttacgaacgttcacttgcacaagacatcctttctactaagaaaaatgcacccatatacaatcaaagttgcttcattacctacattatttacatgtacttgcaaggcgtatttgttatttacatcacacactcctacttggctgaatttacaaacatgcatactcaaagcattttggggtagcgaaaactgcacatgcgcctatcttggtatttctaattaccatacgtattcaaacctttcgatgaatcttgactacctacacaataaagtgctacattttatgctcttnatcaagtttttgtaactaaagtcacatgctactttaagcatatattccttttgctgactatattggtacaaattataaggatatattttttgaacaagtttcgtccataaatgcacacattaattattttttgga

SEQ ID NO: 174423 - DNA, 394 bp, Glycine max
  unsure (1)..(394): unsure at all n locations
cgtgattnggaatctggtcgggatcgaaaacgccacagtgaacgcgatcgtgattatgatattgacagggatcatgattatgacagaaatcgagattgggactgggatcgagatcatgatcgtgatcgagacagggatcgtgaccgtcgccgtgatcgtgatgggtcacatgtggatgatagaagtggtagaggcaaagagagtggaacaaagaaaaggactttggatgatcgcgatgattatagcgactctaaatctacagctgttaagagctactatcttgattctgataagaggagtgtgagcaccagcagagctgaatctgatgttacagaagaagatctctacctcaacaagcttatgcagattcatctggaactagcaataaacacag

SEQ ID NO: 174424 - DNA, 236 bp, Glycine max
ggactgggaacgagatcatgaacgcgatcgagacaaggatcgcgacacgccccacgaacgggaagggacacacgtggatgatcgaagcggcagacgcaaagagaggggaacaaagaaaaagacggtggaccaccgcgacgatgacagcgactcaaaaactagagcggggaagagccactagcccgaagccgagaagacgagatcgaccaccaccagaaccgaatgaaatgttgaca

SEQ ID NO: 174425 - DNA, 464 bp, Glycine max
  unsure (1)..(464): unsure at all n locations
gacacaaaaactcactctctgcgacagnnnnattgatgctcaagcattattgtttggaaatcaaccgaatagatcgggtatggatcgttattgatgattacctagtctccaatctcaatttacttggaggggtcttgtattaataatataacatacagctacattttatttgtcaattacgaaaccgacttgcgtcacactcgcaaaaatacagaatttatttgctgcaaataggtggagctaagaagcatgctccaggtacactactaaaggtgatccctaaacaacaccatatatttttgccaggctgtggaaatcgtagtcatgcacatatcagatgatgaacaaactatagatctcatctagctacaattaccatctgacgagggttgaagcttcactcttttcgaacgttttcaacctgtaaagtcttcttctatatgccgcagtcactactgggctct

SEQ ID NO: 174426 - DNA, 189 bp, Glycine max
ctcaatcttcacagttacacaagtggttcacatgtttatatttatagaccagggtacttccctgagaagctcttttgagaaaacatccttgagaacttctttggaaaacttcctgagaagctacagcttagctacatacacccctctaatactcaactcattccatgagaaacttcctgataaattcct

SEQ ID NO: 174427 - DNA, 457 bp, Glycine max
cttgcttacaaactcttcaatcccctcaacaaaagactctttctaaccggttttaccactataacatctatcatacatccaatgatgatttcaaaattagaaaccttgatgtttagtcatgcatactcttagagtgatctccattatatattggtagcaagaattattatcatactttatgtgaaaacaatggcatacatataatgtttgactttctaaactcaccaagtatggaatataaataacataaccacaatcaaatatatatatatacttaacacatttagtataaaaaatttcaaacaagtacaataaaagacctcaactaacctaaacaatagaacctaagtgtgagtaataaagcaatcactcaagacagactaactatgaacctgataataaaagagaaagagacaagttaaaaatcattatctaaatatttctacactttatattg

SEQ ID NO: 174428 - DNA, 422 bp, Glycine max
agcttttaatttttattatcaagaaagttgtttatctttataaagccaattacacaaagcttataaaatgaaaaacatacaacataagaaagaaaagccagaacatagattgtactctgaatatgtgttcttcctctcaaatttttgaaatgatgatcgaaggcaagcaattgattgcattgtttttttgtttttcatctcctgcatagcacatcaatagttaatatattaaagttagcaataacacttcttataaattacatgttataaaattagagttatacctctgcttcttaataatccccaacaacaatttgcattttggcaaggttaaaatcaatagggtagcatttgccaagcctcacgagtagctgaaaattatagattggagatgaaaatgatacaacgacaaagtatttgag

SEQ ID NO: 174429 - DNA, 456 bp, Glycine max
  unsure (1)..(456): unsure at all n locations
acatgaaactcagctcgtcagttgtagatccaatacatgacaggatgatgatctatctttgcattgtggaatggttcctgtcaacttgttgagagacaaccatgacaatctcaattgcacttgcattgcaaattgaggaagagaacccaccactgattgattttaaactaatatcaaggcaaagaacttgttgggttcacgagaattggcccaatgattgcgtcaatatgctatgagagaggtccaattcatataacgactattcatgtaaccaatttggcactctacctctaagttgtagtnggacaaatggagccatttcacaattgggactttccccgataattctggaaactcatttaaatccctatatgaaagtcctaactaaaatattggagaaatatacctgcattggtctgaacttaatgatactgccattctgataacgtgaagctt

SEQ ID NO: 174430 - DNA, 430 bp, Glycine max
agcttatctggctaagcccagaaactttttttattttggaaatgccatctcgcgctaagcgcagccatcctgagctaagcgctattccttgcagcctgcattgggctaagcaagcttgaactcgctaagctcatataacttaaacaattttttttatttttgccttgcgctaagcgcctcacttttgcactaagcgttattcatcgcgggttgtataaagctaagcgagacttgctcgctaagcccaatagcgtctagtagtcgagtcgcgctaagcgagcacctctcgctaagcgcatgtttaaaactgtttttccctgagcttagagagtgcctatctcgctaagccaattatgcagaaaagaatttctgtcataactcgctaagcctatgagttatttctcataaagcacgctaagcgagcatgatc

SEQ ID NO: 174431 - DNA, 400 bp, Glycine max
  unsure (1)..(400): unsure at all n locations
tgcttgtggagcttctatggaggctggatcgttgagcttctataagatccttcaatggtgatcttccaccatggagatgtagtggaagacaaaggagacaaagtgagaggaggcgccatccactatggaataagccatggaagaaggagcttccccactaagagagtgccttgtataaaaagattggagagggtgcttctatggaggcaacataatagagagagaaagaaaaacgggggagcacgaaattgtagaaagaaaatacgaagagaagttgaacttctgaaaacttaatgcttgagaaagctttttgagaaacttncttgatatcctaagtaacttccttgagaagctctcttgagaagcatacaacaagtgttacacatgcttctatttatag

SEQ ID NO: 174432 - DNA, 395 bp, Glycine max
  unsure (1)..(395): unsure at all n locations
agcttcttatccaaggctcatcttggtggtgtatctccttcttccatggcttattccctagtggatggcgcctcctctcacctcttctcttttgtcttccgctgcatctccatggtggaaaatcaccattaaaggaactcattgaagctcaaagatccagcctccatagaagctctacaagcaagcttccatcaagtggtaatcagagcacaaaagcttcaagtaggtgctccttaaacatccattaactttttgctttaccttctcttccattggtgtttcttcatttttctccatgtatctcctcacatgtcttgtgctaaatgttgttaacatgattctttagagtttccaccgattaaacttgctataaaagctagatttngatttctatg

SEQ ID NO: 174433 - DNA, 395 bp, Glycine max
  unsure (1)..(395): unsure at all n locations
tgtgctcttacgaaaaggattatcgagtttagttgttnttggtaagtaccatcttgcataaatcgtggcaaaagatggatcatgttacatcgctgcttcgtctactgccaaacacatttatggttgtcaatgtccctgttacttccagtttcacctctgatggatatgtcatggaccatgttgaaaatataaattggatcatccccatatcctgtgaaaaattcgcaatacttcaactgtgcatcattcacatacattcatgcttttcattgggtgcattgctcattgcgctctttccttgaaaaaaaaacttaatcattgttataaaaaagataagagcacgctttacggtgcctctaccgaacccgtgccagaactatagtaatgtgtgaagt

SEQ ID NO: 174434 - DNA, 401 bp, Glycine max
agcttttcgtgcaaatggccagaccactgtcttggtttgctgtgggaccacgatgttcacttgcatcatctgggctgtcaattgccagattgctctgacaatgaaccatttcacatggattcaacacctctttgtgtggggcagcataaccacttggtacgtttttctcttgttatatggaatgcttccaccacaatattccaagtctgcctaccaactattggttgaggttcttgctcctgctcctatttattgggcagcaaccctattagtaacaatcgcatgcgttcttccttatcttgcccacatatccttccaaagatgttttaatcccatggatcatcacattatccaagaaatcaagttctacaagaaagacatttgaaatcaacacatgtgga

SEQ ID NO: 174435 - DNA, 442 bp, Glycine max
ttaagaatagccagagaaagtgagggtgaggaaacccattatcttcatcttgcagaggttcgtgtggcttcaatgcttttcttgttctcatctttctttgctgcttgtgagtttcttctgtttttggtataattgactatctgaattcctcaaactatgtcttttctcaacaggaaagaggccttcacttacatgaagcctttgatattgatgaagaaactacattctcttcagtctatacgggtaaacatgttgatgacagtggatttgatgaggacatactgtttgattcacacaattctgaaacttttggtgatgaaacttttggtggtgtgtttggttcggtcgttaagaggcctggtgaaataagtggtggaaaaggatatgatggagctctaacattggctaattcttcctccatggtattaaatcattcatgcat

SEQ ID NO: 174436 - DNA, 291 bp, Glycine max
tacctaatgagagtgacctgacttactagagtgtggtttgtcttgtcatgtacctctagggcccgatgaggttttcactatcatggtaccccattgcatatatgattgagtcttagtgtatctattgcataacgcctgtgtaatgatcattgtgacttggtatataatggtgtgtaatgaattgtgtgtgagatgcggtattatatgtacgatgtgtgtgcttgaatatgagattaatcgtgtgtcataccctaatttcatccaaggactattgtttgatggcatgcaacc

SEQ ID NO: 174437 - DNA, 467 bp, Glycine max
  unsure (1)..(467): unsure at all n locations
tattgcactagctgcactctgcctctggtcgtaccacattatttcgtgggagacccaactttccgcaaagctaacaagggaggataataccctctnttatataccttacctcttgacttcaacagtactgccactattattcattagacacgctggcctgactcttcttgaaaaaattctttgtgctatcatcaacttcatgatgtttggaaggcaaaacaccttcgacaacacgatcttgcctcatcaaccttcgctgctcttgaacttgtatggcatgtagcacttctgtcaatgtgatctacgacaaatcctttgtgttctccaatgaagctatagatgctctatacttgtccagcacgttaccagaaatttctctacaactctcgaataagcaaaatcaactaccgacaactctatcttgtgagcataccaaacatatgccgacattccttattgcacagact

SEQ ID NO: 174438 - DNA, 391 bp, Glycine max
  unsure (1)..(391): unsure at all n locations
ctcgtaatcgattacacaggtggttctaagacaatgactgatttattcaggagtctctactttaattggttaccatgtgatataatcgattatttctccttctttgagtagttcagaagtgaaaagaacactttaattgattactctgagtatctaatcgattacattgttcttgagttgttttcaggtgtttggaataacactttttcaattaaaaagatagtctaattgattacttcattgaattaatcgattaccttgtagatttaatcgaatacaggcagttgtaactatnttctctataaataactaactggtgttctcttcaaaacaatctcaaaaataacacaataagcctctaaatgagctaagatcaagtattgttattaag

SEQ ID NO: 174439 - DNA, 450 bp, Glycine max
  unsure (1)..(450): unsure at all n locations
agaaccatggaaagattgggctaggatattatcctacacccatcgatgtgaggagaagtgccctagaaaggaggggcataagcatgggccagtcgcaaggactgcaaatgataggggttcccttgtgtcacatcaacgaaagctntgtcagcacgggttggatgtgtgaaggtcatgtcaccatgacacatgaagaggcccctcaagagcaaccaaaccgggtgcattcgtgccctcctgagttcgagttgggaaactggcgaattgtcgaacaacctggaatttctgtgacaaacacaatgtaattcgttagtcctaaccctattgttgggccaaggctttagggtttntcctccctgtttggggatgtctcttgctatcanaatatataaatatacgatccttcttcatttgctctagcactatcatccatattcattcttctgcata

SEQ ID NO: 174440 - DNA, 437 bp, Glycine max
cacctgcggcatgcagcttccaaggtccttccaccggttagacatgacacttgttcaaacaacatcttttgtatcggtaaactgcatcatatggagcaaaacacaatttggtaactggcaaaacctattcttctcatcttttctaactcttctacttctaccaagcttctggttcttgttcattttcaccaacaaacttcccctcatttacaatgtcacatttttacctcgtaagctatattatatatataggtaatggcacgggaataagagtaagaatgatgggcataggagaaagtgtatacgggtagtaatattttgaaaacttgaaattgtgcatatcccataaatgaagttttatttaatgagttttgaatttgaaattgttatacgttaacagctactatatctaaagactattcaatatgagtttttca

SEQ ID NO: 174441 - DNA, 458 bp, Glycine max
  unsure (1)..(458): unsure at all n locations
tttgagggccaatggaatcgagaaggcggaatgtctgaggagctagagttccttccatggtgttgaggataatctgggaaatgagtgaaaggtcacggtcatgggtgatgtctgggccagcaatgtcttcattcgcaagaagcaggtttaaatgggacttgcaacggtggccgtgagaccatttatcatcgcaatggttacacaggccctggtctcagcgaattgcaagctcttctgccgataaacatttgacgggatttttggtataggggagggaaagtgtattataaggtttacgggaaaaggttgaaggggtcgtgggaaaatggaaaggtgttggggaggatgtgtgggcaccgttttctcttgatnggtccaacattttatccacctggaaacgtgccatctcaattgtctgtggaagcgagatagtgcgcaacacatggacctcgctgtga

SEQ ID NO: 174442 - DNA, 283 bp, Glycine max
ctcacactttttggattctttgggaccaggcattgaagcacactttgaactttggtgggatccatcgccacaccctcgagggagattatgtgtcccaaatattcaaccaaaatctgaccaaatgaagatctttttctattagccacctggtgagtctgcaacagctctaacaccatggttaagtgcctcatatgcgactcccaatctgggctataaaccaggatgttgtcgaaaaacaccaatatgaatttcctcatcacatccccgaaaattgtattcatga

SEQ ID NO: 174443 - DNA, 428 bp, Glycine max
  unsure (1)..(428): unsure at all n locations
ctctntatgtaggtcaactgtcaaaatattttctaaagggtaataaatctacaattctaatacattataacaatttcaatataataataatataaacaaaaaatataatttatatttacttaaataggttgacctcttaagcctataaggcttttaaatggcgtaaagtttgtcttttttaatcaaatagacttttataaaaacctaggtctcgtttatttatgaaaaagtctgacttggcttgaacctgatgtaagctgggtcgtaggcgtttgttgggcagctaggtctattcgtacccctagcttgcatgagtgttgtcggagttctaacacttttttgagattcatgatatttgcgtgaagtatttaccgactttgttatgactaatctttgcaaaaaatatgaatgtcacctttagttgagta

SEQ ID NO: 174444 - DNA, 439 bp, Glycine max
agctttcacttaaatcacccacccaaagaaaattccttacaaccaaataaccacaacttcttaacggcataaagtgtaccacgacctcacgaaatggacccctatctatgtattggtatcaaccatcatctactcatacatgttaatctgtgaaactaacgtacaactcaaagatgaaagaaaaaaatgtaagttgttctttcactcacttgaggaaatttcaaagattgtgcttgtgtgaaacaatttatcttcgattcagtcaatgcattttaacaatttttatcttccttacaaaaataggaaataaaagaaacaattattattcaattgttgttacctgaaaatgatgcagagtcggaaaggacacagtatcctccgcgacggcgagatccacggagttggacgaacaggcacaggcgcacaccttcggcggact

SEQ ID NO: 174445 - DNA, 423 bp, Glycine max
tgaacgaatgtaagacacatcttcttcaaccttggtgagttttgactccatctcattgaagcgcatatccacttgtaattccatattgcaaacctttcaccaacaaaggattgaaggccatcaaacctgtccaaaatctttgaaagaagagatgaatcttctccatcatgtccttctttaccaacatgtcgagcacccttcttcacccaagagtaatcatgctctttttgataaccaaaggatgttatgactgaagcgcctataatgaaagatctcttgattggaacatatggttcataatcaagagggatgttgaagtgttgaacgaaaagggtgactatatgatggttatgcaaatgagcattcaatcgcaatgccttatgcatgcgatatctaacaagatgtgcccaatctatttgtaaa

SEQ ID NO: 174446 - DNA, 381 bp, Glycine max
  unsure (1)..(381): unsure at all n locations
aaccgagcccttcaatagtgggattaacatagagatctcaaacaccatattctcaaagatgcttgatccgactaccctgtatcaaggagtatccaacttccgacctcatcaccggctaaagaagacatcctggttatttcctatacaggagtactttctgaacacagaacagagtggttgcacccagtagatacaccgggtaaatattaaaaatatcaaaaaacattctctatgaactttaagctaagtcatgacatggaatagaggactaaaactgcgcacagcanggcctactgattgaaatatctacctatggctctatttgccaatatttggggaaaaataaagcaaccccccaaaataaaccacaaaaccccaacc

SEQ ID NO: 174447 - DNA, 447 bp, Glycine max
  unsure (1)..(447): unsure at all n locations
gtggggattaacattgcagtaagagacagaagtggttatgttcaacacttgtaactntattaaagttagtggaaacttggtgggttaccaaaaatggacatactcttagtgatagagacgaacatgtactaaaaatttgggcctgattcatttctattatctattgataaccgaccaagagtttgcaaaaattcgtatgtatcatatgacccatcttgtctgtgaaaaaattgtcttcatattttgaacattattagtcagtagcttttttttgtcaaaaaagctcgtgaaaatttttaaatcacaacatagctctccttgttgtgatatttgcctttataagtgtgtcacaatagtagtatcatagtagttcgattcaaactgagttgtgccttatgcatctctcgtgtgcgtttccatgagaattgagtgaagcttctagacatt

SEQ ID NO: 174448 - DNA, 365 bp, Glycine max
acgtaagtcatgttgtggcaaggtttgaaatgtcaaagaaacaaaatatgggagcaatgagtgataatggaataagccgcaacagaaagaagtcatcatcaagagggcaccacaggtttgtaggggttcgacaaaggccatcatggagatgggtggctgagatcaaagactctctacaaaaagttaggctttggcttggaacatatgacactgctgaggatgcagctcgagcatatgataatgctgcacgagccttgagaggttccaatgctaaaaccaactttgagttgcctgagtcagcttcttctggtggtgctaataagcgtggtggttccaaagttgtgcctgaatgcacttgacccttt

SEQ ID NO: 174449 - DNA, 421 bp, Glycine max
ttgtctagtcttctagattcaatgagagtgtgacactcttttattatagtctctccttcccactcaacaagattgtttagtctttccttcttcctcattcttatattagaaataggttatctgtcatttaattttcctattacattcttttatatctcacagcaaaggaagtttaagaaactggaccttaggttaattaagcttggctttagcaacgagctttgctactgcgcgcgccttgtttataacatactataaacagtgaaaaaggctaataggttacttagccagttcttcttctcggtcagcttctgatttctctactctttcgtccagattcattaacttataatatgtgtgtgctgatgaatttgaatccccatttgcgatgtgtagacctgaactctgacgtcatgtttca

SEQ ID NO: 174450 - DNA, 374 bp, Glycine max
ctaactaatggtataataatgatgtagggattaagtgggtctaacttatgtcttatatgtcatcaagaaaagaaactcttttccatcttttttgtgattgtatggatactaagttgatgtggcaattttttattcgagtataaggttcaatacaacatcaattctttcataaccaattgtcgcaacctacccttttgcgggtgtcgcaacatgcccttttgcgggcgagcgaaggcgaggctcacgggtgcgctttccaaaggaggaaagatgcgcggagtcgccaccaacgtttatttgtgggaaacgtcggaaaaaccgaaggaaaccggtcgaaatgaaaattctaagttcgggagttgtatttacgtttc

SEQ ID NO: 174451 - DNA, 321 bp, Glycine max
  unsure (1)..(321): unsure at all n locations
tcttcttccgcgctntgaaattnggttcccttctcctccacaggtattggcatcctccattgactagctttgttcgattcttctgccatctaagttagtgttctaacctcgtgtcttcatttggaagtgttaatggccgcatgattgacgacatgagtgatgtgtggcggctgaggttgaagactaatgttcttccgcgagaagaaccttctttcgctcatgtgggaggggcagttggatattgaagcggaagaaggagttcttctgcgggaatctgcggaataaaggggataaggttcttcctcccgttctggcggaaga

SEQ ID NO: 174452 - DNA, 276 bp, Glycine max
gtgcctacccttgctctgcgggccctacatgcggcctgtctctcattgcactggcgagatccagtccatgtcacccatatatcactcgtcaaaccaacgacactgccatgcatatgtctctgccattgggcctggggtgtttcgccacgcggttcaccacgcccattttgcattgcggctggaaaatgggttaaggttcctccaaaccaacccccttggtttagtttggatcaaacccatttggaaatgttctaaactacccattgggcaattgcc

SEQ ID NO: 174453 - DNA, 416 bp, Glycine max
  unsure (1)..(416): unsure at all n locations
agcttaagctccttcaactgcacaaggctcttaatatttgaagagtatcattggggaaccttcacccgacgaagacactaacaaaaacttttcttctccttcttggacaaagtatggcaggctgggggtaaataaattttcttcccatcagaccttggatacaactgtgatcatatacccatatcaactagatcttgacgggtattcaagtcatccttcgtcttgccttgaatgttaaggagcgtctcaatcacactgtcacaaacattttttcttcttttagttattttgtgtttaaggaaattagatgggttgttgaatttgttgtattagcaaactgtcagaccctttaatngttataagatgaagttggataagtgggctgctattagaaagcttaattaaaagataaagtg

SEQ ID NO: 174454 - DNA, 462 bp, Glycine max
  unsure (1)..(462): unsure at all n locations
cgggtacacaaggaacacacaccatatcctgaaacctcaagactccatcagttcccactctaaaactactctctctccctgcgactatgatctctaactgagctgacaagaatgagtcagacttctgaccctcacgaatctcgctcaagagttcgctgatgactctcaacatacccaacttaatgctaatagaggtgatatcacatgcccagctcatgtctctaaactgctctaagagatccaactctctaaccatcaaagcagacatttgaagggattttctacttaaggcatcagctactacattggctgtacctggatgatagctaagctcataatcgtaatccttaaggaactctaaccatcttctctgcctcatggtaagctctctntgatcaaacaaatatctaaggctcttatccctacacatattcactctaatccgcaagcgtgagtaactca

SEQ ID NO: 174455 - DNA, 365 bp, Glycine max
gcgatcgggcgatggtgcaagtcgactcttcacattcacaaatcacacataaatccaccatccccagttggccaccttcaactgagctcacgtactcccacgtagcccttatcctcgttcctctcaacaccgggttcccatcaatccctccaagcttccacaacatccaagcaattcaacatccaaatatcatgaactatccaaaaccaataaaatagggcaaaggcataaaactctgcccaaaacacattccaataccacaactttccttactcaaataccccagtaacattctcttcgttccaattcgttaaccggtggatcaactcgagaatattactggagggtcctaatacataaatcta

SEQ ID NO: 174456 - DNA, 481 bp, Glycine max
  unsure (1)..(481): unsure at all n locations
ccttaaatctaagcttaaattgaattaanatgtcaataactgctggtaatctattaccatatatgtgtaatcgattacacagtgcanaatttgaattcaaattttaatagctgttgtaaatcatttatggccactggtaatcgattacatcctctggtaatcgattaccatagagtaaatctcttgaaaaagactttttatcttaaaattcttggccaaaccttttgctacttcagttaggaattcccttcctatttaatatacccttcctaagactctagagactgtcttgatcatccatcttgaatatctttaatttctttgtcttgaataaagctttgagaagcatgtgatcctttggcatcatcaaaacattcagcttgatcctttgtctacaatctcccnctctttgatgatgacaatccctggaatcaagacaagctatatacaagatgatagcatgttcacacaacccttactc

SEQ ID NO: 174457 - DNA, 266 bp, Glycine max
  unsure (1)..(266): unsure at all n locations
tgcttttttctgtccgcctgagtgggcttataacctaaaccatacttcccaccatttccttgggtatctatcaagctaattatgcagccgttgtttttgcctaaacccatccccgtattcataaccgttccccaacataactcgggccatcattaccgctgcatcggacagacaaggctgcccanagagggagtccacggaggaaatgctgaccacctcaaaagactggaaagcaagttctaacgattcttctgcggcttccacat

SEQ ID NO: 174458 - DNA, 259 bp, Glycine max
  unsure (1)..(259): unsure at all n locations
tttccaaaatctgcacctatgcagaattttgctggcaaaataggtgcgccagattttggctttgtgcaaaaaaatgcttgtgtgtggtgggctgtggaaagagtantacaaaatgagttatggacgtttgctagtagatcccaacggtcacaatgtaggcttatgtacgatagactntcagtaaaattttggagtcgatccaacggttaacgaattggatcgaaggaatttgtactggggtctttgagtgagaaaagct

SEQ ID NO: 174459 - DNA, 459 bp, Glycine max
  unsure (1)..(459): unsure at all n locations
tcgctgacgaaaggatcgaagtgggtcttaatagaggcaaatttaatcatcctgcttggacgaatgagaaaactggggcaaatgaagagggtgagaatgacggagaaaccctttctatgactgccattcctacacggtcaaatttcccatcagcctaacaatgtcattactcagccaataacagtccctctcaccgaatcatccacaaaggctatccctaaatcaaccacaaagcctgtctaccgcacttccaataacgaacaccacctttagcacaaaccaaaacaccaaccaagaaatgaagtttgcaatgaaaaagcctatataattcaccctaattccggtgtcctatgctgacttgctcccatatccactcgataattcaatggtagccataaccccaaccaaggttcctcaacctccatttcttcgagaatacgactngaacgcaacgtgtgc

SEQ ID NO: 174460 - DNA, 366 bp, Glycine max
acaaccacattagctcgtctttcagccactataagtttgaaaaccataacctcgtcatcctcctcttcttcaatggactgttggtggtctggatgaccgattccgacttttgtcttggctactacggggttggctttcaataaatcttctgcattaggcatacctgaataggaggaaataacaaaatcatctgagatttgaggctgaacaccaattacaaatgtctttccctttgagtcaaaatatatcattttctgatcaatcctaacaacattggctaaagcctttccggcagccaaaatccttttgacccgagcttttctttccttttcactgtcactgccgaggttattcttccttgaaaaa

SEQ ID NO: 174461 - DNA, 404 bp, Glycine max
gaatgcaccttctttacattccaaccacacatcctggccctattatagcacgagagcacgctggaagcgattttttgcccactacaaagcaacatggagtacacgattgaaaaataaaacatttctgtctaactccatttcactatcctcctcattatccacttgctcagacaaacactgtctgagtatgtatggattaacactggatggactagaattgctttgaaatactagctaacatgatattaagtgtccactttttcatacaagcataagctacgcatgtatgaattaacattggattatctagaattacgttgaaatacttacatgatgttaagaatgacccatgtctggttcatgataagatggcctaaataattttgattgagcatctacatact

SEQ ID NO: 174462 - DNA, 450 bp, Glycine max
  unsure (1)..(450): unsure at all n locations
tctcccccaattgtcttaaatagggggagaagtgaagtgtgtataggctcatccccttaagcacttctctctctctcgaatatgcttacaaaaatagttttcgtgaagaatatccaagccgaggcgctttcgtaatgtttccgtaacgtttccgtgagtgatttcgcgaaggttttcgaccgttcttcgacgttcttaattcgttcttcatcgctcttcggtcttcaacgggtaagtacctcaaaccaagctcttcgattcattctatgtacccgcggtggtccacattgtgtttcgtgcattttccctactcgtttcatatactttccggaccccttctgacgtgcttaagccatcttatttacgtcatttctcgcttaacctataaataaaataaatttccaccgatcaantgaatttgattatccgttacttctggtaaacgaattc

SEQ ID NO: 174463 - DNA, 382 bp, Glycine max
  unsure (1)..(382): unsure at all n locations
cagacatcgtttgtatggaattgtttcttttcttcttgcataactttgacccaattctcatcttccatatcatcttcaatatgttntggttttacttctgagatgagagttgtgcaaccttgttgtctaagggatgctcttgtttgaactttggttgagggatcacaaatgatttgactctttggatggttctttttgaggattcattctgttggttgtctctcctcctgggactgttacattacttgattggacgtgtctacttttgtagattgttttgttagtggtccaatgtcatcatccagtcttagatctgcattaggctcatccagctcttatatctctgtatcaggcatggtataattaaatcttacatggatag

SEQ ID NO: 174464 - DNA, 480 bp, Glycine max
gaccataaaactaacttcacaatcctatactcttccctgaccctcttatttcatgctggctaatcaccttgcaggcgctcttagttgagtactgaccagctgggtcaaattcccacacccactgatcaccaattaatggtctgattctgattccctccagctcttggataaatgcgactgccatgtccatctcattgtcgaaaaatgatcttcgccatttaaattcccactcccagccatcatctttgtgatttcccaagttctgtattaatcggttgtgctgctccgatatggtgtatagccgggggtacttctctaataaattagtctcacctcctatccatgaatcctcccagaattttgcttggtttccacacccaacctgccatcttattgaattgttcaaaagctgcctctgctatgtgtgttgacacaatctcttcaaatctctccaccatatagattctctagcaactctcg

SEQ ID NO: 174465 - DNA, 440 bp, Glycine max
ttaagtcacctgaggcatgcaagcttaccctcttaagcatgaagctgttattgaatcagtaaaagttaatagacatgtatttaaactaatgaaacaagatttgaaatacaaagtagaaaccatataaaagtaaaataaaaaataaaaacaaaagggagaagtacagagtaagttcaaagaggaacactataaaatttcttattcttttcacagtcaaatcaaactcaacaagtctcacgggcttacaggctcacaaaaccttgcatgtggtctcaaactcaaaggctatcgtccttacctttcccgtggcatatgcattgttaatcaaattctgaagcctctgccctccactggcagaaatgtactgctgcaatatgtactaagcagaagaagtcttctacaagataaaaaaaagtgataatactcattcacacacattt

SEQ ID NO: 174466 - DNA, 347 bp, Glycine max
ctgttcaaacacgccttttgtacaccctgatatatataactatatattaataattatgtttgatgtttgattgtatttgttgtgttattttatccgcaattattttcaaggaggttaatttagttaatagaaaggtgtgggtagataaagatctatcttctcaaagaagcctcttgagaaagcttctgaaagatgccacggggaaacttcttgaggaaacctcttaatgaagcttattgaggaagctacatgaagctgcctcggtaacaatgatacccaaccttcgctaacccgtggatcttctcgaaatgcggtcttcatcctcacaagacatttgtccacaatct

SEQ ID NO: 174467 - DNA, 408 bp, Glycine max
  unsure (1)..(408): unsure at all n locations
agcttctcccctattttcctataaatagggggagaagngaagggaaaaaatgttcagtcctcctggtagttcgagatcacttgaaattagtgaaaaaaattgtttccgggaagaaaatccaagccgaggcgcttccgtaacgtttccgtggttgatttcgcgaagattatcaaccgttcttcgacgttcttcgttcattcttcgtcgttcttcggtcttcaaccagtaagttcctgaaatcaaacttttcaattcattcaatgtacccttagtggtccccacttgtttcgcgtgcttttattttcattttatttactttccgtactcccttttgacgtgctttagtcatttactgaagtcattttctcgcctaatcaaaaaataaaataaatttccaccaatcatttg

SEQ ID NO: 174468 - DNA, 382 bp, Glycine max
  unsure (1)..(382): unsure at all n locations
tatcctgaagagggtgttccatatgttctcaagactggactaatgcatctgttgcccaagttttatggtcttgcaggcgaagatcctcataagcatcttaaggagttccatattgtttgttccaccatgaagccccctgatgtccaagaagatcatatctttctaaaggcttttcctcattctttggaaggagtggcaaaagattggctatactaccttgctcccangtccattttcagctaggatgaccttaagagggtgttcttggagaaattcttccctgcatctaggaccacgaccattagaaaagacatttcatgcattatgcaacttagtggagaaagcgtgtatgagtactgggaaagaatcaagaaattgtgtg

SEQ ID NO: 174469 - DNA, 404 bp, Glycine max
agcttcaggctgttcaattgcttcagattgttgctcagaagggcaaaggtctgtatggtggtcggcagaggagcatataccatagagtctggcgataggtgcagatttttaattcacggccagttgggttaccaagttaaccaaggcatctagtttaccttcaagcttcttagtctcagctgatggagatgaattcatggctacttcatgcactcctctaatgacaatagcatcacttctggcactaaattgttgggagtttgaagccatcttctcaattaaatttctggcttcagcaggggtcatgtctccaaggactccaccactgccagcatctatcatacttctctccatgttactgagtcgggcataaaaatattggagaagaagctgctctgaaatct

SEQ ID NO: 174470 - DNA, 419 bp, Glycine max
  unsure (1)..(419): unsure at all n locations
tcgcacttgataatggagacacaaaaacagcgctaggcaatgacattcatggtgctccgaacaatggtggagtatggaggattgccttgaaggtccgcacttatgcaatcatgaaactcatctccaaactcgaaaatggaggacacatgaacaaccctaagcaatagcattcatgtggctttggaacangataagaatggaggattgccttgagggtcctctcttatgcaatcatgaaactcaactccaaactctaaagtggagaacacatgaacagccctaagcaataacattcatgtggctcccgaacatgacgagaatggaggattgccttgagggtcctctcttacgcaatcatgaaactcaactccaaactcataagtggagaacacatgaatagtcctaagcaataacattca

SEQ ID NO: 174471 - DNA, 439 bp, Glycine max
  unsure (1)..(439): unsure at all n locations
ggatcttaagcactgggctgcagctgaggggcgcttactaaatttatggaatgaaaacaattggtggacaagtggcctcaataacttaagaggggggctgaattaagtttcaaaaatntttcactaacaaacttttaatccccttgtaaatgatacgctcagaatgcaaaagaagaagcaaaagtaatcaatttaacaatgttgttttaaatgggcaagacaaagtaaactatagtaaaataactgagataagggaagaaagaaatacaaactcaatttatactggttcggccaattcccgtgcctacgtcccaattaacaatgttctntgtaaaaatcctttntacaacttctgaacacccgagggatccctttcccttgtgcttaggaaactcacaattcaagagacaaagaacctcttgaaatcttggatgaattc

SEQ ID NO: 174472 - DNA, 438 bp, Glycine max
  unsure (1)..(438): unsure at all n locations
tttatgtgaaaggatgtgactcttcacatttgtatttgattttcaatgttcaaaggcactagtnatcgattaccaaaacattgtaattgattacagctttttgaaatttattggaacgttgtaaattcaatttgaaaatttttcaaaacaattctgctactggtaatcgattacaacaatctggtaatcgattaccagagagtaaaaactctgtggtaaacatgtcttgagaaaaatcatgtgctactcaatatttgagaaaaacttttcatacttatcttgattaaaccttctcttgattcttgaatcttgagtcttgaatcttgatcttgattcttgagatcttgaaccttgaatcttcattcttaactntcttcttgagtcttaaattcttcttgattctatcttgaactcttgaattgtcttgattcactcgag

SEQ ID NO: 174473 - DNA, 369 bp, Glycine max
  unsure (1)..(369): unsure at all n locations
agcttntacatgcatgttgacatcatattttctatacttcgaacaactgatgcaatctatttgattgaaaagataatttatattactcttctaatggagtcgacaactaaaaaaaaatataacagaaagtaatgcttaggccaatctaatcaagtcattttgaatctcgtcattactatcatgcatctcaaagagaaggagaatcaggcatcgtaatacatagcacaacaaaacattaaaagaaaacatgccttccaaagccaaccaaggttaaaatgtattcatatttggtgaactttttcaaaataataacacatatatataaacatggtggaacaatctgaccacatgcacaacacattccacaca

SEQ ID NO: 174474 - DNA, 436 bp, Glycine max
  unsure (1)..(436): unsure at all n locations
tatgtatactccagctntgaagttctaggcatcatgtacgcgccaattttgtttcatatgatcancagcatcttcctatgacattctcataaaaaaatcccaaataaccattactacacatttattcatattaaaagtgaattgaagtgcttgtaaaattaattatgaattaacatggttctatagaattgattgtagtaaacatcagtttgtagtatataatatgattattgtttggaaattagctaccaaaactgatattgtgggcaatcactaaaatgacttgagttcaagagtacacattgaacaaatagcctgactaataatacgactcaagttagtgctgattcaaaagctatttctaaaagcttcacaatcaatgaaaagtctacaacgtacaatcatggtttttaaacaatgttaaataaatatcata

SEQ ID NO: 174475 - DNA, 362 bp, Glycine max
gcctatgcatatttcatacgtaagggatgccatatagcaggggtgtcattattatctaagattctagagtatctaactggaaaataactgcactgacataataataaataaagattaaatgagaagccatttactactaggtactgtaagcattgcttcatttgaaggcaaataatctctaatcccgagtagctctctgcaagctttagctaatagtagctacctgcttctgccatcttcaatagtttctctcttcacccttttcatctattactacctacttatagttaagaaaaaaaaaacccacagaaatcaaatatacatattcttttgttttatgctacaggatatataaacaaaac

SEQ ID NO: 174476 - DNA, 456 bp, Glycine max
  unsure (1)..(456): unsure at all n locations
tatacacaactcaagcatgagagatatgcagactctcacagaaactatgatggcacttatcgttcacttgtcaactcaaacaatagatcaaatgataaagatgcaagttgaacgacccggctcagaaagttgaccttaaaattgagacctacaagttgcagcaaaggatgctccaaaggttgatcgaaattcacgctatcacagcataattattcttgataaaataagaacgatgatttggattaaaaaggaaaggaaggttaccacagagaggagaagaaacatggaaaggaggctaatcgactggagtatgtatcttcattgttcacaacttaataaaagacgaaatgggttggctacgtcaaaatagaaaaggcctggatgaccattntaccctgaccggttcagaccgggaacaggacttgaccggcgaattaagaagaacactaacaaaca

SEQ ID NO: 174477 - DNA, 117 bp, Glycine max
  unsure (1)..(117): unsure at all n locations
aaaaaaaaggcgcggagccnaccgaaaaagaggctttttccccccccaaccaagggggcaccgcgaaaagaaccccccccccccccaacccaaacagcccccggaccccaccaagca

SEQ ID NO: 174478 - DNA, 352 bp, Glycine max
  unsure (1)..(352): unsure at all n locations
attttttgctttaccttcttctccattgtttttcttcattttttctccatggatctcctcaaatgtcttgtgctaaatgttgttaacatgattctttagagttttcaccgattaaacttgctatagaagctagatttaattttctatggttcaaatttcttgttcttgttcttgaaccatgaattgtgttgagtttaggttcctttgagttttgtcttgttattttttgtggctgaaacctaaaccataaaattcttacaaaaatattaaagtagaagaaaacctcaaaanattagagtgacttgctcacctattgtagttttgtcatagaagtcatgtctagtcatgaaac

SEQ ID NO: 174479 - DNA, 474 bp, Glycine max
  unsure (1)..(474): unsure at all n locations
tgagccaanatcctgactcaccataaaccttgacccagtgtgataatgtcaatccttaccctcggaagcaaaaaaaagaagggaaggaaaatttccaatcaaaggaaaaaagagaggaaaggaaattcccaatcaaagaatgggagaaagcaaaaagagaggaaaggaaattcccaatcaaagaatgggagaaagcaaatagaaaagaaagaaaattcccaatcaaagaatgggagaaagaaaaaaagagagaaggagaagaaggaaagaaagctcctgatcaaagatcgaaagaaaacagaagaaatgtgcagagaggtctttggaccagacaatatctgaacaatacggaattgtcaccaaatgaacaaaagatagaataggaaaccataacctaaaagtggtcttctccctttgattaccaaccaaaatactgtgcgtcggtgacttgttcgcctcgcgtcaacaaaaaca

SEQ ID NO: 174480 - DNA, 425 bp, Glycine max
  unsure (1)..(425): unsure at all n locations
agcttggagaggatgcttctatggaggaaaagaatgaggggaggaaagagagagggggagcccgaaattggaggaagaaaaagggagagaagttggactttgagttgtgtctcacaagactcttattcatcaaagttacaacaaggggtacatatgcttctatatatagacaaagtagcttccttgagaatctttcttagaaaacttccttgagaagcttctttgagaaaacttccttgagaagctagagcttagctatacacacccctttaataactaagattacttccttgagaaacgtccttgagaagcttctttgagaagattcctagagaagctagagcttagctacacacacncctctaataacgaagctcacctncttgagaaacttccttgataagattcctagagaagctttgagc

SEQ ID NO: 174481 - DNA, 447 bp, Glycine max
agcttgatgacttgtcagaaacaatgtgttgactatcgtctatttacaaattaaacctggacatcttttataaatgcttgttaagtcaacacaggtacaaaaccagcgtctccatttgggacctactgctcagtaaatctgttgagggaaaaactcacagcctccgtcttaacatcaatggggttctgaatccattcacactgaataagaattccttgaagaccattataatgtcttctgaaattgatgactttatggaaatacgttgagttgctgtctccttcttttatccatgtagctctagatttctgccttaataagaatcataagctatcgaggcctcccacaattcttgttgtattctctcttagcctatatctcatcatcacataggcttctattagatgctaaatcctcactttcttgagcttcttctgatattgtgat

SEQ ID NO: 174482 - DNA, 420 bp, Glycine max
agcttcgtatgcaacaatgcaatgcaatggaatattgtacaatgttcatgacattctttcctatttttggtgatttgattttgatttttttgcttctttttgtggaaaacacaaattgactgtccttgtttttttttaaaaaaaaaagatgtgataactcatacaacctcatcctatcttttgcaaatatcttcgggaactcccccagagtttatgttctgtttgatttagtcacttgacaattttagatgacggcaatggagccgtttgacatttaatcaatcaattgaaatattgatcctagggctcgtccctttaaaaaaagaaaaagaaaacatcgatcattctgcacagcaagagagatataaggccttgggaccaatcacatgcaccattgaaggatggcgatggatcattaca

SEQ ID NO: 174483 - DNA, 385 bp, Glycine max
tctcactttcacgaagaacacaacgggaacgatgaatgatatcttactccaaacgctttctagttcaactggtaccccatacagatctcgaccgattattctctaatcttaaaatcagacgaacacgatgcattcttttgtttacccaaaagatgtttcactttcgcaccctataaatctccttaatgataatgccttgtcgcattcttccatgttttgaataggaaagatatgctatgtcttttttatgctacgtcgttgactcttgacaagcgtactattttataaatgtagtgatattacagtaagacctgagtttaagttcacaacagactatatatatatatatatatacacaaccgttaagtaatctgtgactcaaatc

SEQ ID NO: 174484 - DNA, 429 bp, Glycine max
  unsure (1)..(429): unsure at all n locations
agcttantatgccctctccactcggcttgtgatctcttcttcggcaaaagcgagataattgttgacggtgatattattaacaagccctttaagccttccatagagatatcttgggccacgtgggcctccgtcaaaacctttacaagcaaagccctatgaggttccgagctcatgagtaattccaacagcgagaccctggccggggttttgttgagctgctaaataaccttgaactcgctctgctgaattatgcggagaaattcgctggcttcctctagtgacacctccttcttgccataaccatcccttttctccggaggacctttcgccggaatatcctcgttcggagtgtggggggttttatcatcttgttctttcaccacctttgccttccccttgacgntcgtgggctgaaatggtaggtcgggg

SEQ ID NO: 174485 - DNA, 430 bp, Glycine max
  unsure (1)..(430): unsure at all n locations
acggaccttnaaactcagctgatccatgatctgatcttgaatcactttctctttatcttgaagtgttcttcaactttcctcttgaatcttgaagtgttcttgattctatcttgaatatcttgaactcattctttgattgaccattgagctttttgtcatcacctttgtcatcatgttttgttatcatcaaaacatctttgaatcactcttgattcatcatgaagctttgcttctacattctatttttgatgaatttctgaaacttcttcacaaagagtaagaagtcttcttcatcatcagattcttcttcttcttcttcttcttcttcttcttcttcttcttcttcttgcattgaggaggaggctttgagtgctatgcttcttctcctcttctcggtctcttcattttggttgagacgttgaagtttcat

SEQ ID NO: 174486 - DNA, 413 bp, Glycine max
  unsure (1)..(413): unsure at all n locations
agctttggcttcaaatgtaccttgccgcaatatctagttgctcaaattgtttcgatatgggttccatctcctcagtcatggtcacctcaacctcacataacccttgatctgaaaaactaagtctacgccaaaaaatgtggattgtctctaatggtatggagccaacaacatatttaaacaactaacatgcacatggaaaatcgtgggtagtcctcatgacacatccacaacatgaagggttcttgcttgcataaggtacacgctcatactcaccagcaatttcatttaaagcgtaccttgataccatgtcaaatagtnttttgtacaaggtaactttaaacacatgtcgaaccatgtgcgtacttgtctcaaaagatgctttaaattggtgtgttgaagtgcatcatgttgtc

SEQ ID NO: 174487 - DNA, 450 bp, Glycine max
agaatataatttattgggactattctatctatatcatttgtttcactattccatctaatgttggtacttatctgtcttccataattttcctgtctctttccaataacagtttatctgggaatattcctcattccttgtgcaataattcaaatctgctagttctggatgtttcctataatcagttcaatgggaaaattccggagtgcttaacacagagtgacacacttgtggtattaaatctgcaacataaccagttcaatggcagcattccagataaatttccactatcttgtgctttaaagactctggatctcaatagtaatctattgaggggcccaattcccaaatctctagcacattgcacatcattagaagtgttcgatcttggaaacaatcacgtagatgatggatttccatgcttcttaaaacaatatccacactgtgtgtcat

SEQ ID NO: 174488 - DNA, 413 bp, Glycine max
  unsure (1)..(413): unsure at all n locations
ggatcttaagtcaccgcggctgcagctttacaatcgtatatagggtnttcttcttcaattgccttgagttgcttcatttctggattaaatccggcgatctgccgtgaggtccaagttctgcaaccagtttcgttgagtcaggaagtagcatatgctaggttgcaagaagaaaagcagaacgatgcatgaaggacatttcgaccttcgtcagttgtaggagcttcctcaagctctcgaccatcgctattacccactccatccaccaaccccccactgttaccaacaccggcacaaacagcttcttccagcattccattcaagagactaactccagaagaattggccttatggcaagaaaagggactatggtttcagtgtgatgaaaaatacttgagaggacataagtgttcctc

SEQ ID NO: 174489 - DNA, 363 bp, Glycine max
aatgaatatacctagtatttattacctatacttaacagaaaatacttataaccttacaaaataaccataaattaagagagtctgatacaatttatacaagttttatacacaaaagttagttatttttaccgactaacaactcccccaaatttacagttatgcttgtcctcaagcaaaaagagaacaactcacttgtcctcaagtgacaatgacatgcagtgattatgtacgaaggtgtatgctacaaagtgactgattgcatgataagagaatggagtaaaatgccctcatcacttgtcattcacaaggtatgcagttattcaaagagaagaataaaatgtatcctgaacaaatagatgaagt

SEQ ID NO: 174490 - DNA, 403 bp, Glycine max
  unsure (1)..(403): unsure at all n locations
agcttgaataactgatttagttaagctcactctttctgctatgtacaattggaaaaccttacaattactcaactgttgagacgccttatagagtaggacctgtgattttgctttgaaactctacgtgatggaaaggaacacccaaatattttcccatgtccggtggtctttgatacccaaggttttgaacaatttgatctcctccaatgtgaactatcaatacatataaagggaggataagtttttggagaataagatctcatctgatgtgaactatcaatacgtatgatgnttttgaatgtgaacttatcttacctggtgtgatagtgatgttgcataagctcttaaactgtgtaagactctaaaggtaacatggttataaaatgctaattctatgaaaatg

SEQ ID NO: 174491 - DNA, 408 bp, Glycine max
tcaacctagaagagacggaccattccaagtgttggagaatatcaacgacaatgcccacacgaatgacttgcctagtgagtataatgcaagtgtcacttttaatgtgtctgatttatctcttattgatgcagatggacgagccttgaatttgaggacaaatccttttcaagaatgagggagtgatgatgacacaactaacggcaaggaccatgaagcacttgaaaggcccatgaccaaaggcagacttaaacaggcccaacacgtcatagagacaacgctggttatttgtatagctgccattgatgatgattgaacgcccatgtttccattatctttattcttaatctatcatctttctatttgttattcaatcatttaataattgcaatcaaataaaaaaattggtgg

SEQ ID NO: 174492 - DNA, 403 bp, Glycine max
agcttcatctcccaaaacagtgttgccagctaccaaacgtccctttccctgaggacttccctgaataccccacaaagtttcagttcataagctaccttgaaagctatgccaagcacttcagcatagccccacagttcaatgaaacagtgcagtctgcaaagtacgatgagacctttggcctgtggaggatcaagaccatcaggaagatcaagaaattaggaggactctcttcaggtggttgtgctgagtgtgaggttgagtacatttgcaggtcgcttgtggtcgccaccggggaaaactcggagaaagtggtgcctgagtttgaagggttgggagagtttggtggccatgttatgcatgcctgtgattataaatctggggaaggtatggtggaaaaaagtgc

SEQ ID NO: 174493 - DNA, 455 bp, Glycine max
  unsure (1)..(455): unsure at all n locations
aagctnttacatggatacaatctacaatgtctgttttttattattatctgtatagcgttaaattgataaggtttttctcaatccaatctgatatggaccatattatggcatggaattattgtgaaagggtgaattcctgcttttcgtgctaaatatgtgcctattggaaaagttatgtatataccgcgagtatattaatgcaactaaaataaaatagtgtgaaactagctctaattgtcatcaaaatagattaactaagcacctaagaaaagactaaataacttctctgtccgtaacctagagatggagatatcaacatgtattatcttggcgggattgaaaagtaagtgggaaaagtcctctactgtagatattaatataatatatgtttctctggaagataagtgaaataatctataaatttacaattatcgtaaagcctttcttactacacg

SEQ ID NO: 174494 - DNA, 320 bp, Glycine max
cgtacccgggatctctaagtcacctgcagctgcagcttatatagaagagagctttttttttgcggggagattactttggaggctatttgcccatggctagcgaggatcaagccttccgcccacgggccacaaatagggaacgacctgccaaaataattgagatctattcgaatggtgcttatgaattataagaattaacccctcacaatcctacttagacatctatgggccgtgtttgaagaaataaaccccactgctcgatgttaaacagcctttaattgataattcatggcacttaattggcgttctctgaaattgca

SEQ ID NO: 174495 - DNA, 449 bp, Glycine max
  unsure (1)..(449): unsure at all n locations
ttaatcgatcgattaaaccgttatctggcctaataaatgataaaatcaatttcaaccgatcatttgtgttgtaatgtcgtttaatcaatgttaaaacaaaatctaaccgatcgttcacgctgtaacctcgggtaagtcaacatacgccaaataataataataaaataatcaaaatatcttgaaaaaaataataatcaaataatcaaaatatctttgaataaaataatcaaaaaaatcaatcggacgtttttctttgaaagcttccttgaatgaattgactaataaccaaagtgaaactaaggctaatatcaactcacaaatcaagctgtgtctgcaaaagtgactcaaaaccgtcttaaggtcccacgccttaaaatgtcctctttgttatattggtanaatggaccgtcaaagatataataacacataacttatcgctttgcagacta

SEQ ID NO: 174496 - DNA, 397 bp, Glycine max
  unsure (1)..(397): unsure at all n locations
agcnngaaagtaatttaaagatggtccttttttatattgngngaattattaatgcgaggaaaaaagggggaactaatacacattgtgtaataccccattttctgtaaaataaattaaaaagggatttttatttaaaaataaatagagttttagaaaaatgatgagttttttataattaaataaataaggagaagtagatttattaattaaaataatggtttgaaagaaaataaaaaagatattttatttattcattttataggaaataaaatagatttcatgtttataaaataaaaaaatagagtaaataatagagcgagagtaccctaactataaatagagacacgagttangttagttttcaaactgatgatacatncctatgtgacaccctcta

SEQ ID NO: 174497 - DNA, 438 bp, Glycine max
tagttcaagtagtcttaacctaggaaggctgtcttaattgtatcctagctcaacaagagggatctaatgatgaagcttggattgattcaccctaactagggatcgcagtgtagtaatttatgctactacatataacacataaacatgatcgattagaacaacatctttatatacatcagttgtgttgttaaaaagacccaacatctttatttactgctgtcaattatacttgcatctttactgtctttatcctacacttagtttaattctgttccaaataatcaattatcaatgtttctttcaacaatgccttatttctgaatttaacctgtgttaagactatttccttgagttcgatactcggattcactcgctttaatcttatatactagacaactcggtgcgctttccgtcacaccaaaattttcttgagcatat

SEQ ID NO: 174498 - DNA, 365 bp, Glycine max
  unsure (1)..(365): unsure at all n locations
cataatcaccagccagatatcctaattacatggcagaaataagaatgaaaaatatgaaagggaaagaaaagtgggttgccttccagtaagcgctcttttaacggcactagcttgacgcatcgtcctgttatccaggatccaaaagaagtcttacttcaaggaccttcttctcaggtctcttttcctccatcacatgcactttaatacagacattttggctaggtggatctttgtcctcctagaacaaatcaaagttgatcttctgatcttctatgcctatctacagtatcttcttccccatgtctaccacacaacttgcagtagacatgaatgggcggncaagaatgagagcgattagctaactg

SEQ ID NO: 174499 - DNA, 440 bp, Glycine max
  unsure (1)..(440): unsure at all n locations
atcttaagcaccgcggctgcagctgactctttgctatgatgtgattcatgtcattcttgagtagncatcaattatggacaaaaaataccttccaccacctaaaggaagtactcttgcaggcccccaacggtcagcatgaatgtaatcaagagttcttttggtggtgtgaattgctttaaaaaatttaatcctatgttgcttgccgaaaacacagtgctcacagaantttagttcatctagtttctgatttccctacacctgctatttttgaagtatcatcatacctttttcactcatatgacctagcctcatgtgccacaattgagttaagttaggtatgctcttattggatctcgaagcaacatctactagaccatcctcaacacatgttgtacctcgaactatatagatattacccctcttatacccttcatcaccat

SEQ ID NO: 174500 - DNA, 430 bp, Glycine max
  unsure (1)..(430): unsure at all n locations
cagcttgcttgtggggcttctatggaggcttgttcttttancttcaatgagggcctttaatggtgattttccacccatgagatgcagcggaaaaacaaagataaaaggtgaaaggaggtgccatccactcaggaataagccatggaagaaagagcttcaccaccaagatgagccttggataagaagcttggaaggatgcttcaatggaggaaaagaaagagggagagaaagagagaggggggagcacgaaattgaaggaataaaagagggagagaagtggaactttgaagtgtgtctcacaagactctcattcatcaaagttacaacaagtgttacacatgcttctatttatagactaggtagcttccttgagaatatntcttgagaaaacttccttgagaagcttctttgaataaacttccttgaaagc

SEQ ID NO: 174501 - DNA, 321 bp, Glycine max
  unsure (1)..(321): unsure at all n locations
tagcacacaaggcacgcttagctngactacaaaaacttataagacagtgagggagttgagcttatcgcagcggtgcgcttaactcaacacacaacacaagggcttagcgcacagacgtgcttaaccttattactaaggaaaacatatagaagcaaagtggtgcttagccgtacaagtctggcttatcgctgaacaaaaattatcaaaaccctaaatgtcagaacacttggctcgcttaacgcattgatatgcttggcaggcttatcacttaagttcattagcagggatgaacgcactcatcgcgacatgagtcactatgca

SEQ ID NO: 174502 - DNA, 379 bp, Glycine max
  unsure (1)..(379): unsure at all n locations
catgaagngtgcttgactgtgcttgatctttgagctttttgtcatcacctttgtcatcatcttggttatcatcaaaacatctttgaatcaatcctgattcatcatgaagatttgcttctacatcgattacatgctcatggaaatcgattacaacttttgtaaatcagtttgaaaagaatgttggctactgtgaattgattactgccttctggtaatcgattaccagagagtaaaactctttggtaaatatttttctttgaaaaattcatttgaacaaaattgtgctattcaattatttgaataaccattttaatacttatcttaattgagtcttctcttgagttcttacttgaatctaggatcttgattgagcgactct

SEQ ID NO: 174503 - DNA, 473 bp, Glycine max
  unsure (1)..(473): unsure at all n locations
tggtactggcctatgtgtaccaccagtggtgtgtggtgtgtatgtcattgntgcgattcgggtaagtattattgctggtggagcagcctatggatttcttccacccatattggctacctttgaagatgtacaccaaggaaaagtgacaaatttatccacaggagagtcattgtatgtgtacattcattagttactactaaactttatttgcttctctttctaagtgttcttttatgaatttcgtcaaaatcggtggcaggtttttcaataatagactctaaagagtcttccaaacttgtgcctccttctgttagttcccctctctattcaatgcctatatatggggaggcttctaatcataggtattggttaataatggtaggtgtattctctcatgggtattggtagaattgcacttcataagttatgtgattntggtgtagagcccttgtaagaagtatgcgttgatatta

SEQ ID NO: 174504 - DNA, 442 bp, Glycine max
atcttaagtcacctgcagctgcagcttgatgattacattctcccctttctattcaaattcttaattcttcttgacatcatcaaaatcttcatgatttacattctccccctttttgatgatgacaaccacctgtagggtaggagcaacaacaaagaaaaaatatctatttgcatatagtttactcccccttggttttgcaatgattgcttatatgagaaagttgaagatttcatatttttcatatgtaaacaaattgtctcataaacaatagataatttttcttactattttatcttttatctttctctccccctttgtcaacatcaaaaataaatcatgaatagagaggagaaagatgttaccacttcgtgcaatgtatgagaatcaagtgataccaaaagacattaaaacaatcattcaatattaatcaagcaaaaacaag

SEQ ID NO: 174505 - DNA, 447 bp, Glycine max
  unsure (1)..(447): unsure at all n locations
tggcagcgttgcaatcacatggtgatgtcatgcctcactcgttccatgagtcctactatcaaacaatctgatgtggatggattcagcttttgaaatctggaaagatctcaaagatcaattttcacattctaataagtttcgcattgttgatcttcaagatcaaatctagaatggtaagcaaggtaactcaagcatttatgagtactatattcgtctaaagattctatgaaaagaactagaattgtataaatgtttcttgttgtgtacatgttctagtccttgttcttgtgggctcatttcaaaacttaagaaagaatgtgaagatgactatgtgatccatttttttgcgtggcctcaatgatgtgtatgcacctgtcagatctcaagtcatgcttatggaacctatgtcttccttggttaaaactntttctcttgtgcttcaccatg

SEQ ID NO: 174506 - DNA, 387 bp, Glycine max
gctttcatcaactgggctgtaagacctacttttttttattgatcacgctagagaggaaaggaagttgcaactaagtgagctagatgagatccggttagaagcctatgagaattccaaattctacagagagaaaaccaagaagttccatgacaacttgatagctaaaaaggacttcgtggttggacagaaagttttattgtataactctaggctcggaatcatgagtggtaagttaaggtcaaagtggattggtccttttgtggtgactaatttttttccttatggtacagttgagatcaaaagtgaatccacagataagagcttcaaggtcaatggacaccgactgaaaccattccttacaaatccctacttagtggatgtagtagt

SEQ ID NO: 174507 - DNA, 348 bp, Glycine max
cccttaatactaacattatatctaaatttagagcgagcttatgcgcctattttcttacaaaccttcgcttgcacaagacaatttaccgataaatatgccgcaattacaattaatgcaactttcgtacctagattattaacacgtacctccaaggtgtatttgttacttacatcacacacatatcctaggctaaactcacattcatgcatactcaagcatcttggggcaccaaaaatttgccatgtgcacatcttggcatttatatacctcatacgcaacatttgaagaatcttgactatctacacaataggtgtcattcatgctcttttaagctttgctctaaagccg

SEQ ID NO: 174508 - DNA, 338 bp, Glycine max
attcatcattcatgaacagggtaagctatttggctaaatggctaattcaatcaatcacaaccttcatcatttccaaatcatgcattcattaagtattcagagattcatgcaaaaattggtactcaatgctagtcgttctctcacaattaaagttcacacaactcactgggttatggctaatgattacattcactatttatctgtcaaacaaactaacaatttcactcacgcccctaattcatgttctttctcttctaattacctcatacttattcaaagcacgtgatctaacattgcaattcactcaagtcatgcaatcaatcaaatttcaaacccat

SEQ ID NO: 174509 - DNA, 355 bp, Glycine max
gaacataaaactcagcttatgcttaatttgaacatattgcattccttatgtattccgacatttctttacttgatatacaggaaatcagatctgaagagagtcttgttttgctcatgcttttcgaaagcgcttttaattcaacaggaatttttggcctaggtaataatctgaacaggcccctaaagacctcggaatgtcatgctaatgacataagactcatgcaattgagtgactacctctcataaggtcctctggcagaagtctggaatctatgaaagggggttctcacccttatgtatgttagaacatgcagcagacaatttgctggtctctctagccttaaaattgcacctta

SEQ ID NO: 174510 - DNA, 365 bp, Glycine max
tcttaactttgaagtagctgaatgtcttcttctaacttattataattcaccaaatgaaaccttttagaacataaaaccatcaactaatttttattgaaagaggcttttttgggaccttgatcaattcatagcacagtttaagaagaaaaaaactccccacgtgataggacaaataaagtgtgtatttacaaactggaagcagctagctactccaaaccgcgacaatattaaatggagctaacggattataggaagcatattacggaaggcactgctaataaaagaaaatgaagccttttgttaacagaacagacgcaccatctgctattgtcccattataatacgagctagctatgatatccaat

SEQ ID NO: 174511 - DNA, 421 bp, Glycine max
  unsure (1)..(421): unsure at all n locations
agcttgccaacccatggaagctcctaatatctcccacacttnttggggggggccattcttggatggccttcattntctcagggtccacttgaaccccatttctaccaactacaaaccctaagaaaaatatattatctacacaaaaagtacacttctctatatttgcataaaggatgtttttcctaaggactgaaagaacttgcctgagatatcctaagtgatcatctaggctcctactgtacactaaaatatcatcaaaataaacaactacaaatctacctatgaaatcccttaagacatgatgcataagcctcgtaaaggtgcttggtgcattagtgagcccaaaaggcatcactagccattcatacaaaccaaacttggtcttgaaagccggtttccactcatcaccctttttcatcct

SEQ ID NO: 174512 - DNA, 369 bp, Glycine max
  unsure (1)..(369): unsure at all n locations
agcttncacttattattattattaggttntttttaacctatgtaactntgcacaggttaaacctcattaatgacctattttaaagcaacttaatttactataatttattggcaaaaacaattatctttcctatttatgttgnggactcattttaatgtagtctttcgattctttccattaaaataataataatactaataactaagaaaaaaaatcttattattattattattattagtaggcgtcaaagcaaataattttatgttttcttctgcttattcatttcttctactaaagttaaagttgaatcgtttgatagtatttaaatntaattcttgataaaaataaatttttggtagactttattta

SEQ ID NO: 174513 - DNA, 397 bp, Glycine max
  unsure (1)..(397): unsure at all n locations
tgcgcaagcactatgntggtctgggggatcatccaccatatacaggatgaggtgagaggtctaaattatgttccttctgttattttaatttggaagcattttctttatcagacaaatctttcaatattcattgaatatacactaaatacttgtggttgagcacgtgattagttctctcatcatatttttcaaacagatatggaagtggcaaaagactggacgcaaatatcttgctggggagattgcatgtgttgttgggctagtcatttgggtcacttcacttccccaaattataaagagaaagtttgaaatcttctactacacacattattggtatgcattctttccagtatttttcttggttcatgctcgcgataggcacttttatccggtcttt

SEQ ID NO: 174514 - DNA, 365 bp, Glycine max
  unsure (1)..(365): unsure at all n locations
agcttctntgagaagacttccttgagaagcttgagcttagatacacacacccctctcataactaagctcacctccttgagaagcttccttaagaagattcctaaagaagctagagcttagctacacacacctctctaatagctaagctcacctccttgacatgagaagttagagcttagctacacaccccctataatagctaagctcaaccccattccaaaaatacatgaaaatacaaaaaaaagtccctactacaaagactactcaaaatgccctgaaatacaaggctaaaaccctatactactagaatggccaaaatacaaggcccaaaagaagggataatctattctaatatttacaaagaa

SEQ ID NO: 174515 - DNA, 389 bp, Glycine max
aacctccacttcgaacgtgactttcaaattggtctgaacttcaaacacaattttccatgatctgaccgttgggatctttgcgaatatgtctgaagagtgcgtgacatttccgtgttctaaaccattttctcacttgagcgttttcagcctttgctttcttgtagcttacgaaaaaacaccatttcttcttctttgtttcttctcaaaccatttctaatgtcgcaagcactttttccattacccactaccaccattagccaccacaaaccatcggtgttctgcattgacaccacacaccgtgagaaacctccttactgaattggaatcttccaacttgccttgcggtctctgtaaagaacaaaacactaatccgaccctatctttccttt

SEQ ID NO: 174516 - DNA, 385 bp, Glycine max
  unsure (1)..(385): unsure at all n locations
tttttcgcacctaagcactgcgctgcagctagccaaattcacatgtactatgtttttgtttttcactacctatgaattgacctggtgttggtaattggcttaatacatatgaagtgaaataagaatcaccttaaatagggatggaacatataacatgcttacatattaccaattatttgctgagaatgtatgtctacatgattttgatgatgccaaagaaaaatcaaataagactggttcatttgcttcaagattaatacaagatggtttcaacaaacaaagccttgcttcaagatttcttcaagatcaagtcttgtctcaaaacaaagggtttcaaagtcatccaaggctctggtaatcgattancattcctggtaatcgatta

SEQ ID NO: 174517 - DNA, 458 bp, Glycine max
tggcaagcgacagacgactcgctcagcgagccgataacgctcttatctctgcttgcgtagcatatgcctctgcagattcacctttactcactaagtgcactggtgctaggcttagccaatgatgcgcgctaagcgcactgagctcacttagcacgatgactcctttggcacttcttcaaaagagctcctttttgtgtgaaattgaataatacttaacatgaattccatgtgaagaggcttctactgagcatagatcaaaacaaagaaattttatctataatcctaccacaaagaaccatatatctgggagatctatatacattctggaaaacttttctatacaaaagttagtcgcatatgacgactaatactgatcagcatgagtctcaagagagttcaaaccgagtgattgccccaagacacgtattctgcctcatgagagactacagtacttacta

SEQ ID NO: 174518 - DNA, 393 bp, Glycine max
  unsure (1)..(393): unsure at all n locations
agctttgagaagtngtttcttgaaattcatttctttttttctcctttnnttgctccttaattggacattattcatacatgtggttgtngaagcttgcaacagaanatatgggcagcatccctcatgatgagtacaccctacacataactgtaggcttcaacagcatattacaatgaaactatgcgacttaatctaccggagaaaagttaaacaataataaatttgaagactcggcgtttcagctattctagctacctatacattgttatagtgtgttatgtcgctcttacacaacaatcatggtttgcctgtagagcataagaatatgaatgctgaatgctgatcctacaattctagaaacttctattgcgctgacttgcattatattaaaac

SEQ ID NO: 174519 - DNA, 449 bp, Glycine max
aggggacgaggactacttgttactctttacatcagacacactcgtgtctctgaagatagaatatccaattgattgttgcaattgttaagcattgcacacagattttgattaacatgcaatacctcttggtgtggccagaagcatgatattgacaatgtgcatatgtgttactgtatattatatattggaggtacaatcagagctacaaccaaattctaggtgcggtgaggggctttgaggattttttctttgagaggggctttgaggattaatcttgctcatacgaaataaatacaaaattgtacaacacatttaatgaatgcgttctttttgaaaattatcttcccagggacaaattcagtctgctaactacagttgtctagcctctaggaaatctacattaggttctcaaaatattgcctcaattcttactgtacactgtttttata

SEQ ID NO: 174520 - DNA, 379 bp, Glycine max
accctcctggttatttgagatacctgaaagtcgagaaaaatattgtttttctgaagaacatccaagccgaggtgcttccgtaacgattccaggggtaatttcgcgaagattgtcaactgttcttcgacgttcttcgttcgatcatcggtcttcaacccggtagtgtccaaaatctaactttctaattcattctatgtacccttagtggtcctcatttgtttcgcgcactttaattcttctttgacttactttccgcacccctcttttgacgtgcgtgcatcatttacttaaggcattttctcgcctaataaaaaataaaatgaatgtccaccgatcatgtgtattataacatccgcttaattctgttaaaatgaaattc

SEQ ID NO: 174521 - DNA, 465 bp, Glycine max
  unsure (1)..(465): unsure at all n locations
tcctcggtgccatttcctgcgaaggcaaacatgtggaaagttatttttaccaagaaatgctactcttaaaacgaaaatggcatacaacctcctccaataaacacaaacatcaatgtaaatnttgagcaaactcatgcacatacttccttacgaacattcactcgcacaagatattcttctaactaaaaaaatgcacccatgcacaatcaaggcaccttcgttacctagatcacttatatgcacttccaaggtgtatttgctacctacatcacatgcatttcctttgctaaatntacatacatgcatactcaaggcactntggctaccgaaaaatgcatacgtgcacattcaggtatttctaatacctatacatacacaaacttcgtgatgaatcttggctacctacacaataaggtgctacatntcatgctntattcaagtgttttggctacctcaagccgcatg

SEQ ID NO: 174522 - DNA, 421 bp, Glycine max
gcttactatgtaaacattagttgagttattataatacatattctatcaaacatctattgtttgtgaaagctaggagtgacttcgtgacaaaaaatacttggctcttattctcaagaggagattaaaggtagtgccagaagtggcctaaagagtacttgttgtagccagaagtggcataaagaatacttgttgtaatcaaagttttgattagtgaaacccttcaagttttgaaagagaattggacgtaacccaagagttagggtgaactagtataaaacctctgggttttctttattgcttttatataactagtttctttctatagtttacttctacgttattgtgtccaagtcttgtgagctggtttttaaacacaaagtaattttgaacccttggacaaaacccatcatccattgatatc

SEQ ID NO: 174523 - DNA, 444 bp, Glycine max
  unsure (1)..(444): unsure at all n locations
taaccattataggttntattttcttgcataaagaaaatatatgtgggaaggctgtggcatgatctttggctctagaatcaagaatccactcatcttggctagtcttgctaacactgcaagtaacagataatatactacctttgttagtagctgtaccaatctgatttatttgtgaattgttttggactagaggttgttgtggtaatgacatcaaggctttatattgttgagtagttaatcttacatcttcatttcgtgtctcttgatttcgatctaagggtgaaccatcaccttcttctcttatactactagcattattgatgtttggattttgaaccttgtaaagtttatgtccaggtgggtacccatgcttcttgtaacaatcatttatggtatggttagaaaaaccacaatatgtgcagaccttgtttccttttactcctg

SEQ ID NO: 174524 - DNA, 410 bp, Glycine max
ctgcagcttccccctatattgtatagatgggggtaaattgaaaggaaaaaaggcttatccctcctggtaatttgagaatacttgaaattagtgaaaaaaaatgttttcctgaagaaaatcctagccgaggtgcttccgtaacgtttccgtgggtgattttgcgaagattttccactggtcttcgacgttcttcggtcgttcttcggtcttcaaccgggaagttcccaaaatctaacttttcaattcattctatgtacccttagtggtcctcatttgtttcgcgcacttttattttcgtttcatttactttccgcacccccttttgacgtgctttagtcatttacttaaatcattttctcgcctaattaagaaataaaataaatttccacccgacctttgaattataacat

SEQ ID NO: 174525 - DNA, 329 bp, Glycine max
ccaaaaacgctactcctaagacgaaaatggcatacaacctccatcaataaacacaaacatcaatgttaattttgagcaaactcatgcacaatactaccttacgaacatactcacgcacaagatactcttctaactaaaaaaatgcgcccatgcacaaacaaagcacactgcgtacctagatcactcatatgcactagcaaggtgtatgtgcatccgacatcacatgcatgaactttgctgaaataacactcatgcatactcaaggcactgaagctactcgaaatagcatacgtgcacattcacgattattaataccatgcaacacaaac

SEQ ID NO: 174526 - DNA, 390 bp, Glycine max
  unsure (1)..(390): unsure at all n locations
cttcaattaaataaaatttaattgaatttctaaaagcccaatccaattaaattttaaagggggaggtgagcatttggttactacacctcattgccacattatatggtcacacgttgtgcatgtccttcatgctttacatgcctcatgccacctaagcacacttaatggagaatcttggaattgatcttggattagtgggctaaaccataactaaaattcactaatcataattagtgaaattttgtctccaaagtttgggtccacaaattcaatttcaaattcaagtgaaatttgaatngaaattcaaatntccctccaattttgtgtgacacttaagctataaatagaggtcatgtgtgtgcattntttcaactttgatcattccaaaaa

SEQ ID NO: 174527 - DNA, 345 bp, Glycine max
atgtggtaccatcctcaaggaaatagcctaagcgtgttcacacgacactctcacttatgaaaactacgtagtaagtgtcgaggtcaccctgttgtgcataagcaactccccccctcccccatggtgatcaacctgattctcaagggagttccaaaccgagtgacctgcgtccaagtacaagtattcctcctcatgagaaactacaagtactaactgacaaagtttatactatctccatgcaatatgaagtatgacacatgggcaccatcaatacacttaccgtggataattaaagattctaagtcatccctcttcagagatgctgaaaactctttaaccactcta

SEQ ID NO: 174528 - DNA, 387 bp, Glycine max
tctgaaaatatccaaaaatctcgccagatgacgatctttttctttcttggaaggcaccacaaggtaagtacgtccacaccttcatccataactttttccctcctacttttatttgcattcttattattttgtttcttctttgtcatttttttcattatctatttctttttctttttcttgggccttcaattgtttattcttgaccattatttgttcctctttttcttgattactttcacctctcacctcatttttcttgccattaatacttttcttgtcagcatatttcttctcatgcacaacattatcctcatccttaacctctacagaccttttactccttgtcattaccaggtttcatatctccttgggattttgtttgtattt

SEQ ID NO: 174529 - DNA, 478 bp, Glycine max
acacttataatactaagcttggcatgacttccttcaatctattggtggagctctctattttggtatttctatcataaaaattaggcttctagaatggtggatttccttgtgggaagattgatgttgttcatcacactgttcatagctaaatacctggtgtgatgtgttttgtacgaactggagctgcttaggaagatagatgtttcttccttttctccacaaacaaattattactcaattctcttttttctccaaaaaaaattacacattactcgatatcacttcaaggtccaatgccttaagcaattctctcatctattttcttataattcaacgttacttcatggtctaacgcctgaatgaatcttttgcaaacaattaatacaaatctttctaaaaatatatcaacccaacacactagttgtgttctaccctaagaactacttaagtatgattttctcattgcacccgacgatac

SEQ ID NO: 174530 - DNA, 339 bp, Glycine max
  unsure (1)..(339): unsure at all n locations
ctctaaatgggcttgggagggtgatgaaagtgatgatgaacaaaggagaaatggaaaaaatatcggcttaagctactcatcttctggtagtgagaacgtgggtgatggtcttgctaaagctgatgaatcagagtctgcagctgatacacgtttttcagctcatgctgacagtggaatgaatgaagagcacaggttggattatattttgccttaaattgctgcctctctcaatcctttaatagtagatagtattgctagtagtgtatgtctatggtacccattatgtctctaaaatactgcctgcatttactgactttngattgttctgtgtttcattct

SEQ ID NO: 174531 - DNA, 483 bp, Glycine max
  unsure (1)..(483): unsure at all n locations
cattacggacctataaaactcagcttttaggggcccaaggtctgaaaatgcctccatatgaccattttacccttgcttttgggtatttgttggattctttgccgcanctggtattaagcanctcaattcggctggcaagaattgatatatttgcaaatgatcattcccggacgaaattanggattgacaattnnccnctctttacttattcttttaattgaaaatgaaaaggtaggtaaagataaagacactattttcatcctagcaatctcgctatccgaccggccactagcggaaacccacgcantgaaactattcaaaagaaagagtgtaagaggcatcacgtatagnnnacatgatgcaatcctacccccccaacggcattggacagaagactccaagaagattgtgacaaagatgcaagagaaagccctagggtgctcatgggcctcangggagatntcgggcacatgggctaagtat

SEQ ID NO: 174532 - DNA, 355 bp, Glycine max
tatgcgagacggagaccaatatgctagctatcatcgccaagtaccaaaaagagttaggtctagccgcggcccacgagcataggattgcggacgaatatgcccaagtatacgccgaaaaagaggctagaggaaaggtgatcgactctttacaccaagaggcaaccatgtggatggatcggtttgctcttaccttgaacgggagtcaagaactttcccgattgttagccaaggccaaggcgatggcagacacctactccgcccccgaagagattcatgggcttctcggctattgtcagcatatgatagacttaatggcccacataattagaaattcgtaggaaacttgtatggtctc

SEQ ID NO: 174533 - DNA, 462 bp, Glycine max
  unsure (1)..(462): unsure at all n locations
ctctactatgggcaggcgggcttccttactttcttgtcnctacgcgagctctgaccactgttctttcttcccgcgatgcttcttttcatgtccgcctgagtgggcttataacctaaaccatactttccacgaattccttgggtatttatcacgctagttatgccaccgttgtctttgcctaaacccatcccgggttcataaccgttccccaacataactcgggccatcattaccgctgcatcggacagacaaggctgcccaaagagggagtccacggaggaaatgctgaccacctcaaaagactggaaagcagtttctaacgattcttcttgcggcttcacataaggcatggaggatgggcagcctaacaagatatcttcctcgcctgacacgatgaccaagtgccccctcactacgaatttcagcttttggtggagtgtagaaaggcacaactccactgag

SEQ ID NO: 174534 - DNA, 420 bp, Glycine max
  unsure (1)..(420): unsure at all n locations
agcttctaccataggctggaatgctatctattatattcttatttggcctttggggtgctggcatgggatgttcttttctggcctctctctttattaaatcaagcatccatacagctttantataaatttttctagacaaatgcttggtatcgtattctgttatgcgtgtgtgactctgtgtttgtgtattattctacagggctttttagcatacttaaggtatgtgtattttattagccaccatgctcctgctacatgtagtaatgccatctaccacttttatggcagatttttggctttgtggttgctgccatgggctgctattcgccatttacaattataaaattgccccacaatgtgattttgtttataaaatggactcaacaatatttcttcgtccccccccaccccacccacact

SEQ ID NO: 174535 - DNA, 389 bp, Glycine max
agccactgatgcatatttttttctcttttacatagctcacactcccgcaattatttcttgactagctctatttatccctggattgcaacaccaagaggagcaacatacataggtataatcttctcattttccacacccttgttgtctgttctggatttcataggctgaactgtgctctccaagtgctgctctaccagaatgatcaacgctgtaaaccaagcagcattccactcaacaccctttggctgtgctacatgctacacttgctcctccaagaacggagagcctagctgagttctgcgaaaccaaaaccaacaaacacttatattgatctacacatattgaatacatatcccacaatgactagtgataaggtcaaataatgatat

SEQ ID NO: 174536 - DNA, 391 bp, Glycine max
ttcatccactacaatctaagttctcgaaccagattcaaagcttgcattcctttgattttttcactgccttcatactcttccttcaaaaaattatagattttgtgggccattttcatcgtcattattctgttaaaaatgactagagatacaactgtgaacaaaattgatttggctttggactttcgaagccttctttctttgtgacttttcatttgggcaacaatgagattatttggcaaaggaggaacttcgtagtcctcttctactgcttcccatacatcattagcatcaagatatgcttccattttgacaacccacatttgatagtttagtccatcaaatacgggtacaaaaatggtagtaaaggagttttcatattccatcttatgtg

SEQ ID NO: 174537 - DNA, 417 bp, Glycine max
ctatcaatactcagccttagaaatgctagttgaggtagatagaaggtgatatatcttttaatttattattctacagatctgaatattacctcttcaccatcagagttggcaatgtcatcaagctgagagtgctcatcatctaaacttacgtccagtgttgggtctgccttgctggtgaacgcattggccattagacataggttggcttcttcttcaccatgcttgtcagatgaggaattgtccaggtcctcccaagtgctcatgaggctcgtctctttgggcttgaagaatatattcttcttatcctttagcttttcaaggccaagacattccagcttgaagtgccctagtttctatcattcattccatatgaatggatgttgtacttcttatggaaagatcttttggataattcga

SEQ ID NO: 174538 - DNA, 432 bp, Glycine max
  unsure (1)..(432): unsure at all n locations
tgcaagctttgaagatatggaagccccgcaatattttctatctttgaaaaattggaaataatattgtaggaaacatcaagtccttcaagtgacttcaaattctcaatcccacgcaaagtagttagagcattgttcctcaaaactagtttaaaaataagacaggaaacatgcatggtccaacaaaattgtatatgggtctccagagcaaatccctaaatgaaaggcatataactaaaaaaaagatattaacttttctacaaataagttggtttcattgcatttaaggatcctgtcatccaactttcaatcctgaaatatcaatccattttccatgaatcatagaagtcagcacagcaagaaaattaagacatgttgttggcgacattaatgaaatcatttagatctcattgtanagagaatgtatgagaactg

SEQ ID NO: 174539 - DNA, 468 bp, Glycine max
  unsure (1)..(468): unsure at all n locations
acactatgatactaagcttgattaatccctagccacacaaaaagaattttctaaaccacganatatattacacaaatggctgaagagaacagagcaagacggagcataccaagcggaatcaaacaatggcactttcacctccaccggaactcgaagcagagttaaccactctctcttcctcatattccttatcatccgttggtagctcatacctgcaaacagggcaagaatttcgagaactcaacctaggaacaatgcaatctccatgatacccatgcccgcacggcaacctcttcgccaagtctccaacaccgagcaaatccttacatatagcgcacgccacggcttcgctttcggacgcaatcttcaccgtcggcgacgcctccaccgtcgccttcgacgccggcggcgctcctcttctacctccggcgtcgctttccgcaagcgtatgcagcagcgcctcgtact

SEQ ID NO: 174540 - DNA, 484 bp, Glycine max
cctaagacaactttgagtcaatcagtctacgataagggctgtaatcttattcatacaaagacttttgcctcttgaagaaacattctaacttagaaactatcttctcacttactcatgatgatgcatgatgcacaagagatatgatctgaactaagatgaaacattcaatattacaaccaatacaaatgttactcaaaggagttgggcatgtaatagacaaaacatcttcaagctttcttccaagcttcaaactttactcttcatgtagctcatgttgctccccctatctcttacaaaaattgcacttactcctagaaaggaacatgttcttataacaaattaagtaattttcactagatgattttattaacacataaatgttaaagatgagacatagaatccattctcgattgtaagatcttgttaatctaacagataagctcataattttcaacttatcagagaagtggctaatacttaatat

SEQ ID NO: 174541 - DNA, 349 bp, Glycine max
gttaagcctggtaatcgattacataaccttggtaatcgattaccagaaaccatctgtactacttgggttcctcttaagccttgttatcgatacccacccttgagattcgattaccacacgcgctagtgccgtatattacacaataaacagcagtggtcagtcagcacacaattccccttgctattggggaattgctcttttatcggtagaccgccaggagcgcgcctgattaggtacatcacatgttcttactgactgactatgcccgggttgggtctggattggttaaacttggttttgggcgaggcaccccacctgacgtcctcatgtcttctgaccgcgcgacata

SEQ ID NO: 174542 - DNA, 374 bp, Glycine max
tgaaacttgaccagttcaggtgcaggtgctgctactggtggaggcacttcagtttgcttgccagacctcaaggtgatgacacttacatttcttggattctgcacagtttgtgaaagcaatttgtcaaaattttgggactgagcttggtttaactaagtagccatctgccctatctgatttgtcagactctgaatgggggctcttgtctcttgctgaaatttcatattctaaatggtcatttgtctcactaactcttctaaggaaggttgaggaggagcctcaggttcttgttgtcttttgtggtgctgctgctgcaatggaggaggaacgtatggcttgcttggaccacacacattttggaagggagggacagg

SEQ ID NO: 174543 - DNA, 466 bp, Glycine max
ttttgatgagtatgtgaaagtaagttccacttcattgagtacatcaacaagttctcaacttgttcctttagttgaacaaaatttcaatttagaggaaatccaagggatggaagaattagatccataggttgtaagttaattgatttgttaatttcttatatcttgtgtttgttaattatctgatatcttgtgtttattaatgtattttgcttgtcttataatgtcatgggaatatatcagtcatgtgaatgaaaatgttaatgtgaatgacaatagtgagttggatctttatttggctagacagattgagttgagccaaagttttatccaaagttggatgttttaagctattggaaggactgctaagaatgttatcaaaatctttgtaggttagcatgcaaagtgttaagcataccaattacaaccgttgctagtgagtctgcacttaacattggtggtcatgtgc

SEQ ID NO: 174544 - DNA, 394 bp, Glycine max
  unsure (1)..(394): unsure at all n locations
gctttncactttatcatcaacagatctccttatgggcttcttttgtattttatctacttactccgcccgtgcccatttataagacccaatctcctaattcatcaagattaagaaaagtggataatttaggttatagcaatacacttatctggaatttatgactttttacacaactatccttatcattaatactcctctctcttctaattgtctgccactacattccctctcttttaattaagggtattttagtcttaaaataatcaattgcaagaaacattatagattgagtcttattaaaagaaacaagcattatttcaaacttgggtcttatcaataggaacggagggagtatcatttaattaattacaggaagctccatacggataacagt

SEQ ID NO: 174545 - DNA, 366 bp, Glycine max
  unsure (1)..(366): unsure at all n locations
aaccagctgcatgcaagcttatgccatacttttacgaacagttttttctcaagacattcctataactaagaaaaatgcacccatatacaatccatgcaccttcattacctaaaataattacatgtatntccaaagtgtatttgttacctacatcacacacatttcctttgctaaattcacatacatgcatactctaagcactttggctatcaaaaatngcatacgtgcacatcttggtatttctaatacctatacatacacaaacttcatgatgaatcttgactatctacacaataaggtgctacatttcatgcttctctttttttttttcaagatttttttttttttactacctaaagccgcatg

SEQ ID NO: 174546 - DNA, 450 bp, Glycine max
  unsure (1)..(450): unsure at all n locations
ggatcaacacaacaaatatataccagtatacaatgctttattcatggacaaagtaaagctccaattcaaatcccaaattgagaaatcgaaaagctatcccataagtttactcttctacccatgcgagaatgtgttggtatattttgaaacatattttctggtaaaacaaagcaataatataaattatcagattaattgcggtttagtgataacagctaatagacaaccaaccaatttatgcccacacaagcatgtgtgctacaatgcaacacgagaaaattcacttccacgtgagtttaacattatttctcaaaggcatgtgatagctaactttntgaagagcaccaaacaattgataaactaacaagaaacaaaccttattgttttgaagttttgaggcttcttcaaactctcctttaaagccatctcctgctgcagagtaatgcaaga

SEQ ID NO: 174547 - DNA, 413 bp, Glycine max
  unsure (1)..(413): unsure at all n locations
agcttattngctctagtattctggatctaattattgtgtgtattcattaagggcatttcctattctgtgaaataaagtgtatgctttttaattggtccagtaaaattatttccaaaattaatgatttattttttttcaattgttcataaattgtcttctaaatttatataagttcaatatattttggtttcaaaatcatatctctggttccagtttcctagttttctccaagaaggttgctaagttgttgcaaaacttggcttatttaaatgtttatagtgtatagtaactgaataagttcttcattttggtcttctattaattttagcatttacctctactgatgggatgaaaaactggataattactttcatattnttgtaattacttatagaccttttattgctgtacca

SEQ ID NO: 174548 - DNA, 447 bp, Glycine max
  unsure (1)..(447): unsure at all n locations
ttgcagcatccccaaatctactcttagtccttctctgaaacagatattccatgctcatgacacttgtcaagctgtgtgggacgaggcgaagagtctttacacaccctcaacgcttatatgggatttgccaaaacctcatgagtgtcgttgctcctagacaatttgatggaacaatggttgactatttatgcaaagtcaatggccttctctttgatttcaatgaactcttgccctcaacttccactcctaacaaggaacatgagcaagaacaatccttcttcatgttattagttntgtatggactacttactgagtattcattgtgtcgggatcatattttgggcttttcgaatattcccacctattattctgcatggtccacgttgctgcatgtaccagacaaaccatttgttgatgtggatgtgcctccaccacatgttgactcat

SEQ ID NO: 174549 - DNA, 373 bp, Glycine max
ccctcctgagagtgatccaagtgttggattttcgtttcacccagctcgtgtgttagcctgtgcttatttctacccttttccgctagggtttttgccattgatcagaaatgacttctgctggacttgcctactacttttctggaaccccaactatcacgactgcaaaactaaactggaagaactatttgtcttgggctgcttccgatgagctgtggattctcggccaaagacaccataaccacttggaaaaaggtattgatactgttccaagtgacaaaaaatctgaatgggaaaagctggattatcagctatgcgctgtcttatggcaatcagtcgacgcggatgttttgagatccttatataatcaaaacat

SEQ ID NO: 174550 - DNA, 401 bp, Glycine max
  unsure (1)..(401): unsure at all n locations
atctgcatatgtttantttgtcatcaaaatctgattgtactgttagggttatagcaaaagacattgttaattctcaaaatccaaatgtatctctttgcttactctttactctgttatctttagagcagcctcaaatcatggaaccatgtgcacttgcggcgaatagattattgaacattttggttttaatgatcgtttgtttcatgaacatgcaatattttactatatacatccttgctatattaatctgagtgccttgattgttgctaaattatactttgcttaattcatgatggaagccatagtctctaactatttacccctttctgccttggggtcacttgaaatgaatgggactatctatgcttttcctgtttacgtaacaaaacatctatcatgtt

SEQ ID NO: 174551 - DNA, 322 bp, Glycine max
agacaactaagaatttcttaaaatgttcctcaagtttcagcaaatgctattttaacggatgtaagctctcttgcttttccacgtggtttcttaattgttttctggggtaatttccctccaattgactaaaaaaatgtttatctccaataactccttaaattaagtcattatatattagtgttcattataatgttgttgtcatttcagttcaattaactcaaatatattgataaacagaacaaagagaagaaagataatacgtgtaaaaagtttcacacacagttatcctattatcatttatcatatataatagaggtattga

SEQ ID NO: 174552 - DNA, 299 bp, Glycine max
  unsure (1)..(299): unsure at all n locations
tgcaagctngagatgaggaagtgtanaaaggtgtttctttctgcttttattcgttgaccacagagtggtacctggagatatgtcgcgggggtcaagagaccttggggacgtcaagtggggtgctattgcccaaaaccaagcttgaccaatcccgacccaacccgggcatagtcagtcagtgagaacctgtgatgtacctaaacaggtgagctcctggcagtcaacagaataaaggaacaaagaccacaaagcaaggaggcttgtggtggttggccagctatgaacttgattgatgtgtg

SEQ ID NO: 174553 - DNA, 363 bp, Glycine max
  unsure (1)..(363): unsure at all n locations
ttctgaacacactgagttaaggattttcactgaatatctgaacacagaaaatccgtactttagatgagagtctgagtctggctatctaaactaaagaaactctctctgtngagaaactaaggaaagaagtagaatgccatacttaataatatgggaaattcttggaaagttcatagactctcaccactcttttgaaattccatcaacatacccttgacatgtctagcctgggctttgaaataggaagcacattctctaagtcacagcctatcttgcacaaatttgacttctatggtaagactggacactccatgttcaatgcatctattagaagatacaaatgtgttacggttcttaccatgt

SEQ ID NO: 174554 - DNA, 152 bp, Glycine max
ctaaagaaaaaaataatgacaaaagcttttaatgggacgtataggatcatacaagaaactttttggaccaggcctttgcctttatgtggagtacatgacatgcaggtcaaaaattgttgttaaaatgacacggacccaaaaagaatgccaac

SEQ ID NO: 174555 - DNA, 440 bp, Glycine max
  unsure (1)..(440): unsure at all n locations
agcttgtcgttctcctaattttcacttaaagaatntgattctagtcccccttcatattcaggtacatagtcttcatcatcatcgttggccttctttttatcctttttcttagcttttcgaattttatccttgaaaatgatggccaatttggacaaccctaaaacttttatttttttcttgattctctggaattatttgcattctaagttccttgtacttggaagcttcaacctttgacattattttctccttcttcactatgagggaaggtaacttctttgtgtgggtgcttttgggttggtttagacgcactacgtgcaaggttataggtgagttttttttataattattttttacacaacttggtgagagaattgatgatttactaagagagtgggtgagagaggttaattaataatggggaagttataactttttct

SEQ ID NO: 174556 - DNA, 423 bp, Glycine max
tctgcatcctttgctatataacctctccttcagtgtgtttcaggtagtttaagtagaaaattgcatgcattaaattattgcattttcccaaagttgaaattaatggcagattggtttggttggcaagtatgcagtctcaattgttgtttctgaaaagtcaaggttgcatgggcgttagaatcattggcaaggtacacgggtgtgcaagcggctaaagggttatttgtgcatagtaaataattatatcataaatggttttaatgctacacattttgtgtgtcaactggatttgacaattgggccagcaacatgatcaaacaatgcagactgagggttgtcacttgctttctaatttaatgaacttgggctgatattgagaatttgtttaaaaaaatgcagagtagaggataacaacattctaaa

SEQ ID NO: 174557 - DNA, 373 bp, Glycine max
  unsure (1)..(373): unsure at all n locations
agctntgcatgtctagggtttctagagagtgataggtctctttttcttagaggtgngagagattctgctgcgtgaagatctgcagagaccagagcttgaagcaggagccggtttgagagcttgagatgagtttgtgagtgattgtgagatcctagaggtgaaggagacatcctcaccacttgtatttttgcaatctttcatcttgttcttttcttagttgctaagaaggcttcctggtatggaaagctaaatcctttgttggatcttccctgtaggcacctgacgtaaatatatttctatctatttaatgatgtgttgtgtgttggctgtgctatctgcttttcattccagtatgtatttaccttgatcacgt

SEQ ID NO: 174558 - DNA, 446 bp, Glycine max
  unsure (1)..(446): unsure at all n locations
cttaggatcaaagtcttttctctctttttctctcaattgttcttcattcttctttctcttttcacttcttttctttcttcctcatgctcaaattatgtggctttttcattggtgatgatcatggaaggctaaacacttaatcaatccaaggatccattccaaacaaagctgaatttaagttctgatttagtattnctaatcatttcctaatttcaaaatttcatcacagattttttggatgattttccatcctaatttgcgatcttaaacaatatagggattgattgattgaactatctctaatgcatttgaccgaactttcatactttgaacatcattcgtagttattgtgataattcaattcgcattgatttgggaattggattgatgctattacacttgatacatatattggctggttcctcatctttgatttctatttcgca

SEQ ID NO: 174559 - DNA, 428 bp, Glycine max
  unsure (1)..(428): unsure at all n locations
agcttgaaatcagatttagaaggggattttggccatnttctgaagaagcttctgcatgtgagagattctagagagagaaaggtccaagttccagagagtttgagagattttgttgtgtgaagatctgcagagaccagagcttgaagaggaagccctcctaagagcttgagatgagtttgttgtgattgcgaggtcctagaggtggaggagacatccccactacttgtatttttgcaatctttcatctttctcttctctttgttggaaaggaagcttcccagttatggaaagctaaatcctctattggatcttccttgtaggtatttgatgtaaatatctctttatctatttaatgatgttttctgtgttcactgtgctatcagaacttcattctaccatgcttatgccttgatcacgcagatgcatgt

SEQ ID NO: 174560 - DNA, 432 bp, Glycine max
cttcaaactaagcttctaaggaagctacctagtctataaatagaagcatgtgttacacttgttgtaactttgatgaatgagagttttgtgagacacaactcaaagttcaacttctctccctttttcttccttcaatttcgtgctcccccctctctctttctctccctctttcttttcctccattgaagcatcctctctaagcttcttatccaaggctcatcttggtggagaagctccttcttccatgaattattccctagtggatggcgcctcctctcacctcttctcctttgtcttccgctgcatctccatggtggaaaatcaccattaaaggacctcattgaagctcaaagatccagcctccatagaagccccacaagcaagcttccatcagtcctggctaatagggctggctcttgtgctgcctcactt

SEQ ID NO: 174561 - DNA, 356 bp, Glycine max
aaccgcggaatattagacagtttgtacgctttgatggaccacaccaaaactgtataagaaatggtcatgggttgagtatctctagggttgcctcctactctgttgcgtttaatagtgactcatataactctctaacttatgtaagtatcacatgttgcttgtatatccaaaaatatgttaattgtgagtcagttagcaaaggataactttgattctctgtatttcatcctaactatatgctagaaaatctcagggaacaataacgccttctttaagagatgtggtgtaatggctctatcattcctagcatatgctttaaaagactttactagctgttgcaactttcattctactta

SEQ ID NO: 174562 - DNA, 434 bp, Glycine max
  unsure (1)..(434): unsure at all n locations
accagcgaactacaagactgggagaattcnacgggcaaaattttgactttttgttctattgaggcccataatatatcatggcgctcgatagttgatgtggaatgcccaccctaattcggacaaccatgagtttcgacacagatgtttgattgatgtttatgatatatagctgacgctcgttgttgaaaaatgaagctcatttgaagtccaaacggccataacattctctgcggatctttgcataaagccggaatccttttgagacacccagaaatcaacatggaagactcgtgcgaatttcgacgaacaaaagttttgactctgttgtacaattgttgccatatatatgtaatggcgctcgtaagaggaaatcatatgcccatgctaatttggaatgtcacttactttgacatggatgtcccatcgatggttgt

SEQ ID NO: 174563 - DNA, 439 bp, Glycine max
  unsure (1)..(439): unsure at all n locations
agcttttntatttcttcagcatcagaaactgttattttaaccacacctggagaaaccctagaaccaaaataaaccgcaaaataatttagcatttcaacataataaaaatttcaattacagcaacaaaagtaacattcatggtatgcatttgtctcattaccaattgctgaaaccagtggaaaataaaaaacactaaagatactccaattacaatccggatttatgacaaaagaaaaacatgcaaaagctgctctagttaacgtcaccaaataaaaaacacctccggtatccaacaccgttagttctttcaaaacttagaatcaaatgcatatgacacaagctgttgaaaaaaggggaaaaaaacaattaaacacgcataaaacgctctatataaacaaattccaacagtaaaccctcnaagaccagattcacgagcaat

SEQ ID NO: 174564 - DNA, 441 bp, Glycine max
tctatcaatttagtcctgaatttaccaagtgactgttgtttttattctttatgtgattaaatgatagtaattctagtcttgaaattaaaaacaaaagataaaatgattgatgaataataattctagagactacaatgtcttttcaataaatttagtttataatttggtgtgtaaatgtattgctttgaattcataatcatgatttctaacgggtggtgatacgaagatatttggtaattggtgtgcaatcgatactgtttacactgatgataaatttgaccggtgtacatcttcgatttcattagtttcactctctaaagttcagttaaaaaacaaaatcaagattaatactcccgtatccttggtactcttgctaccaatcgaattaaataaagacattcaccatggtaatgaatgcccttgttgattcaatattgagta

SEQ ID NO: 174565 - DNA, 376 bp, Glycine max
accttcaaactcccggttacaatatcagataacacggtgtttctttttttcacaaccccgaggatgtgtgacaaagaaatggaaaaaacctccctcacagcgactaactgatgacaggcgtttcaacggcagtagaaaactgaactatacctaagagtggctgaacgaacgagacatacaaatcttggtaacgagctggaagataggaagaggccaacaactggagcaattataccgtgaggaaaggactcctgtcagcgggaaatcattagtggtaaatatggtctggaggggtcacaccacaaaactaattgaatagatctattaatcgaactcggatcaggacatgaatcagcattgaatagcaagtaattca

SEQ ID NO: 174566 - DNA, 401 bp, Glycine max
agctttcaagtgtaatcaaattacttgacttatgcacgcaacataagaataggttgcactagaattagaaggtatgatcaaaagagtattccctattaaatatatcttgatatgagtcactcaactatagagtatcagcatcactaagaataagaaatcacaaacaacagtactatctatgcaattaaggccaaatgccatactaaaagcatacacggaattatatggttcctataaccagtatataacatacatatatgaataaagaattgaatagtcgctaaggatgtatttaacaaatcacaagtttcaacaatcccgtttatgataacgcactaaggaaaaaaaggattagccaacacgtgttaacacatcgattaaacacacttattcacaacaca

SEQ ID NO: 174567 - DNA, 447 bp, Glycine max
  unsure (1)..(447): unsure at all n locations
tgaagacaagactatacgaggtatctttcttgggtatagtaatatctctaagggctaccgtgtctacaacttgcaaactaagaaactcgtcatcagtcgagatgttgaagttgatgaatatgcttcatggtattgggatgaagaaaaagtggagaagaacgttcttatacccgttcaactacctcaagaagaagatgaggaagaaaacccaggtgaaccaccttcacctccatcacaacaacaagatcaagaactatcgtcaccagagtctactccaagacgagtgagatctttggtagacatatatgaaacctgtaacttggccatacttgaaactggaagctttgaagaagcgtcaaagcaggaagtatgggtcaaggcaatggaagaagagatacaaatgattgagaaanacaacacatgggagttagttaattgtccccatgg

SEQ ID NO: 174568 - DNA, 431 bp, Glycine max
  unsure (1)..(431): unsure at all n locations
agcttggcaanaatcttttggatgggtctttggcgcctcgcccaataggtattgggggtgtctccccgttctatcacttttattcacaaaaaagagagaaagaaagaaagtgagaacatgtgtggcaagggtggccagcaaacctccccctttgaatatgtccctgtttgggcctatctactcatacaagcaacttaatatatttggtagttaataaaacaaattttgtagtgataatgacaaaatatgcacaagcacaacccataaaagatcaagattcaaagccataaacatggattcatgaaccgacaatatgttaggtgaagacacataaatggttttaaccccctccacatgaatggatttgtcataaacaagggttagatgaagatacccgactatgtntatattatatttctaacatgccccct

SEQ ID NO: 174569 - DNA, 302 bp, Glycine max
gccaattgctgtggtgatgaatgagatgggagtgggagagttgatggtcttctatggaacaaggatttggggaaccacctttatggggaattctcaatggctgtggttcacgccaattgttcattagaggatcgaggtgaacttgagtctggaccctcgagttctaatcacctgggtcctcatgggacttttatatgtgtttatgatggccatggtggacgtgacgcttctcaattagtcagagacaatctcttctgtatctctaaagtatgcttctcatcttttattacgaacatatagat

SEQ ID NO: 174570 - DNA, 417 bp, Glycine max
agcttatgctcttactgtgacatttatttttataatgaatggtacgtgttcttcaattgtgagcaagttaagagtgtttatgcagtagcgggtaattggaacaaggtttgttctcaaatgcaaacttctgaatctgaaaatgaactaatcttcaacatgttagacacattgtgatcacaacaacaaagggttttatccatcactctatgaagcatatggaagcgacaaaatgacatattatgggaggacaaaaatcctcctccaatgttgtccataaatcaagctatgtaggtcctagaagaatggttcacgttgaggaaatctcatccaacatatactagtaaatacatcaaccaaaagaccccttcatcagcttggacaatatcacagcatggctttatgaagatcaacatggat

SEQ ID NO: 174571 - DNA, 439 bp, Glycine max
  unsure (1)..(439): unsure at all n locations
agaatactaagcttcttgagcagttaaaaatgggaagaagatattttgtttcttggacaaagttttgtaaataatgaaacggattcagatgacactgatgaagaaaatgaatatgttttcagacaaagactattttcttcaatagataaagaaaattctgatgaagataagattgaagatttactgacaaagattgatttaaataaattttacgaaaatgaaatcaactttaaacaaatgtttaataaaaattctgaagttaatgaaacagaatcattgatatcattttctgaaactcacaggggatgtatgaatgaagctnctagcccaacatttaacccctaattcgattacattatagaagattataacatgggatgcccccctcgtggaaaagtcattactccaatagatttgactctaggagaaaatataaaat

SEQ ID NO: 174572 - DNA, 382 bp, Glycine max
ttttttgagggggcgccgggcaatccgcctttatttttttgtgtgccgatgtctatctgaggtcttgggtctcatcttacccttgaccggcttctagtgtgctcttcttgaacacttgaacgtgggcacttcccaactccacccaaacagttgtgctatggtgacgacctttaagaatttgtgccctttcttcaacatttgacctaacgtgcttgttttcttgaaaaacaaatgttaacgaaactttgctaacatcggtttttatagaaaccgatgttaacaaaacatgttaacaacatttaaagcttacttttactttttctatacgcgacgctatcagctcgcttttactcctactctctctatttttgacctgggtggc

SEQ ID NO: 174573 - DNA, 260 bp, Glycine max
  unsure (1)..(260): unsure at all n locations
cgttcgcacatcgntcgcgtgtatgacatccactctcatttgntcgaagcagaggagacctccaatcctattattcaacgaggcggacaatagtgggcagttgacttgaatggacattattctcaatgcgcgatgattcaacgcttcacagtccatgttcacatatcattacagcctgtggataccatagcctggactactacccatgtgtacaatgctgtcatacaaatgagcacatcttataagcttctctccactat

SEQ ID NO: 174574 - DNA, 394 bp, Glycine max
acctgcagctgcagcttggaagcctgccaagcggaaatgcgacagggtagaaaaaccttcttttttttttatttaatatcaacgctttaagcacacacaagaaaactcataagtgaggcatactatttgagaatataatcttataagcagatcatgattcaaattctgcggcaaaattttgggtactacgattaatgaacgatcacatgaactggatgttgccggtgcttggcgcattgggattgaactctactacgctactttctagcgaaagttcgagcgcttacctactttttttttgtgtgagaaaagaattactgttgactacatgtaaatctccctcttaatgaggctcccctgagatgatcaaaagggaatgtgccatgagttttga

SEQ ID NO: 174575 - DNA, 319 bp, Glycine max
actcaagcttcctagtgtgcccagcggctgtaaaatgcccacaaagtgtcccttttgccctttctctactgagaatgatgcacatctccttccgaaacgccaaaaaatcttatggattgcgcgacaataggtgttaaacagctcaattcgggtggcaagaatccaaatgtttgcatatgatactctctggaagacattagggtatgacaatgttcaattgatgggaatatcatgttattgagagagtcatgttaattgcgaacaaaacgtcattcaagaagttggaccttgagactatgttttgaattctgaacagcat

SEQ ID NO: 174576 - DNA, 441 bp, Glycine max
  unsure (1)..(441): unsure at all n locations
agctnttacatccattaatcaacaatttatttcgtatatgagatcaaatttcctttttagagctatacttactaaaatctagagttgtcccttgtcagggtggacgtggccaaggtaggctctaagatctcgcacgtcgaactgagagtagcctttgttaaaaggacaagaggggggacctgcaaaataaaggacttcgacactgaagtaagtacgagagttaggtgagaataaattttgtaaaagggtgagatagaacctggtacttatagagtggagtggaagctgcgggtccttattggttgggattgttacggtgttgtaacaacccttgcagataatgactagcttgtagataattgtagcttacagataatgtgtaccttgtagataattgaatacctgccacgagataaaaaggtcacaacatattcaaataat

SEQ ID NO: 174577 - DNA, 462 bp, Glycine max
cgtaggagtatggggcacccatcacatgtggtgctaggtgtgcggcattcgatggcgcacaacaagattgccacatgcgcaatgcgcgcataaacccaccataccatggtgcccacctgcaactgagctcacgttctcccacgaagcccatatgctcatttctgtcagcaccggggccccatcaatcctcccaagcttgcgcgacatccaagcgaaacaacattcaaacaggacaagctatcacagtgcaagcaaaacaaggcagaggcaaaaaactctgctcaacacaacaaccaaaatcacagcttttctgacttatagaccccaataacaattccttcgatccaattcgtttaccgtgggagcgactccagagatttactggaagttgatagtacatcagcctacattatgaccgctgggatctgctatcagacatacagaactcattctatattactc

SEQ ID NO: 174578 - DNA, 394 bp, Glycine max
agcttgaaagagcccgggtagtcaaagagattttcaagtccatagccatcaaagtctgaagagagtatgatgaactaagggacgtcaatatggccaccgatgaagccttggaatgagaaaccaagaaggcccgaaaggaagaacacgaccaaaacaagttttgaggggctttatagggcagcaatagtgagctcaaactctgaagaggtgaaaggaagcatcacgggtcaaaggcatgatctggaaggacgagctaaaggcttgccttatgtcgaaaagaaatttgtcccaacagttaaggtgagactgaagggaatatgtgggccatcatcgatgagtgcaaagaaaagctaaatctagcggcgactcacgagcaaaggctagaggatgagta

SEQ ID NO: 174579 - DNA, 466 bp, Glycine max
tgcttgtggggcttctatggaggctggatctttgagcttaatggggttctttaatggtgattttccaccatggagatgcagcggaagacaaaggaaaagaggtgagaggaggcgccatccattaaggaataagctatggaagaaggagcttcaccaccaagatgagccttggataagaagcttcgagaggatgcttcaatggaggaaaagaaagagggagagaaagagagaggggggagcacgaaatcgaaggaagaaaaagggagagaagttgaactttgagttgtgtctcacaagactctcattcatcaaagttacaacaagtgttacacatgcttctatttatagactaagtagcttccttgagaagctctcttaagaaaactttcttgagaagcttctttgagaaaacttcctttgagagctagagcttatctacacacacccatctaaaaactaagctcac

SEQ ID NO: 174580 - DNA, 427 bp, Glycine max
  unsure (1)..(427): unsure at all n locations
agcttgtagacaacattgcggntgcaacattcaatgctgaccttttccaacctccgtcgcccttgttgcccaaattccttttatctctcagtgcatcagccaatacacgttccatctccaaattccatgtaaaataactctttgtttcctcattattttttcctaaaacttttcttttgcccgtcattttttcattagatgactccattgaagttaatgtcacttatttaacctgcacatgacaaatattagatagaacctactttattcatttgattagtccactgcacaatcatagaaaacatttcaagcaaagtttttatgcaatagcaaagtacataaaagtctatcttcaatagcaaagtacaatagtaacaaagcacacaaagtttgtctgcaatagcaaattacatntaaaaaagaacta

SEQ ID NO: 174581 - DNA, 465 bp, Glycine max
  unsure (1)..(465): unsure at all n locations
tgaaccttgaatcttgattcttgattcttgaaatcaaatttcctcttgtaccttgaagtgttcttaattcaatcttgaacatcttgaactcattctttgattcttgagatcatcatctttgttatcatgaattgttcttgatctttgagctttttgtcatcacctttgttatcataaaaaattctttgaatcaatcttgattcatcatgaagcttgcttctacatccatatcatttttatcccatgtaatgtaggccttcttagctttcttatcattaaaagctttcttttcagatttctccattcttttcttgaaaattggacaatcaaccctcagatgtcctggttgattgcattcataacattntggagtagaggatgaatcttttgcccttttctttgatttgaaatttggtcttctntgatttcctctaactcttagaaatnntgtgaatcaatttacaa

SEQ ID NO: 174582 - DNA, 436 bp, Glycine max
  unsure (1)..(436): unsure at all n locations
agctngcaaccaaacacgcacgtttctctctccactacttcacctccaaagacttccctctttgtgatatatgccaagtactctcactccttcctactttcttctctcttccattttctaccaccatcttctcaaatgattcaaagtaattttttcaggaattcgatccatgagtctgtctatacgtacacgtgaaaaaatatctcttacaaaaagtttatctatttatatataaaaaaatatgtggtggaagaggtcactctcttatccatgtctccacgtctgtgtgtataaaaagcatctgttaaaaaacaatctcttgcatgaatctttttatttctagacattnagttttgagtctcggactccgttatatccttgatataaaaataataaaaaatatttgttaaaagacgtaatcatttatttatttaac

SEQ ID NO: 174583 - DNA, 446 bp, Glycine max
tcggaccaagcattccggccatttcggtgggacttcagtagagaaggggaagtttgggctgaccaccgctcagattcttagggttgtgaagaacctggacctcgcgggcatgctggattgcctgcaactgctgcattttcatattggttctcagattccctcaacagcgttgcttgctgatggtgtgggagaggctgcgcagatctactgcgagttggttcggctcggggcgaacatgcgagtcatcgatattggaggtggactgggcatagattacgacggttccaaatcgtgtgactctgatatttccgttgagtacagtctcgaggattatgcagtcgcggttgttcacgcggttcactgtgtgtgcgaccgaaagtccgtgatacacccagttatctgcagcgagagtgggagagccatcgtgtctcatcattcggtcttga

SEQ ID NO: 174584 - DNA, 394 bp, Glycine max
  unsure (1)..(394): unsure at all n locations
agcttttgggactctgatgtttggtctcttcacaagaaccttgntntctcatctgggtgtgttgcttttgcctctgttggctcgatatgagtgtggaaaaccaaagggaagatgggggttgtgatcattttcctgtgggtatgcgtgttcttgctgaggatgacaacccaatttgccttaacgtgttggagaatctccttcgcagatgctaatattattttttaaaaattaaaaactaaacaaaaatgaatgatgtgaataggattgtgttatgtgactagtgactaaatataatgacgtgatattttatttactatatcatcatttagaggatattatcttaccgcagatcataaaataaaatgcaaaaaatgaatggtagttatgtttttga

SEQ ID NO: 174585 - DNA, 457 bp, Glycine max
  unsure (1)..(457): unsure at all n locations
tgaagatngcatctttgttaaacaagtttctcaatggtttggctattntagacaagcccttaatgaacctccgatagaagcctacatgtccaagaaaactcttgatacccttatcatttactggtggtggtaacttcttgatgacatttatttttgctttgtccacctcaatgcctcgggttgtactatcccttcttgaaccatgaagtgacacttctctaaatttagtactagatttgcttcaacacatctttgcagcacaagctctaaattagtcaagcaacagtcaaaggagggtgcaaaaactgagaaatcgtctatgaaggcctctatgtacttctttaccatgttagcaaagatggtcagcatgcctctctggaaagtgcgtggtgcattacataacccacatggcacccttctgtaggcaaagacgccataaaggcatatgaacgtcatc

SEQ ID NO: 174586 - DNA, 434 bp, Glycine max
  unsure (1)..(434): unsure at all n locations
agcttggntcgaggtacttattcgttgatgatcgaagaacgacgaagaacgaatgaagaacgtcgaagaacggtcgaaaccttcgcgaaattccttacggaaacgtttcggaagcgcctcggcttggattttcttcacggaaacaatttttccaagcaaattcgaaagagagagaagtgcctaaggggctgaacccttttccacttcacttcctcccctatttatagcaaaataggggagatgcttgccgcccagctcgcccaggcgagcagggttgcttcctccagaagcaacagccttctggaggaatcttctggagggcccaagtgggcctagttgcctattgcacccccatttntactaagtacacccctctgcttttattggtgattcttttttcgtaaaggtacggaaactaatgattttcgtaacga

SEQ ID NO: 174587 - DNA, 461 bp, Glycine max
  unsure (1)..(461): unsure at all n locations
tgtagggccttgatcttcttcattaatagagtctcttgtttcttgaagatcaatggaagtggaatagagaaggaggaaaggtgattggagatgccacttcaaggagaagatgagtcaagaacaagctcactaccataggaagccatggataagagcttgaaggtaggagaaaatgagtggagggagaggcagagaggggggaacaaaatttatgcctcaaatgaggtcagaactttgaagtctaatttctcaaatgatcaaagttgaaaaaattcacacacaaggcctctatttatagcctaagtgtcacacaaaattggagggaaatntgaatctctattcanaattatcttgaatctgaatttgacattttggagccaaatttggagccaaaatttcactaattatgattagtgaatttcagctatggttcaacccactaatctaagatcaagtccaag

SEQ ID NO: 174588 - DNA, 309 bp, Glycine max
acactatcaagactcacgcgtactactcatgggactagacaccaagcttgtgttgctctactttaaagcgaacttgagacaagttgtgatcatgttcgaaactattgctcactctcccaaaaaaattattcatgcatgaaggagaattgcttgaccaaagaacctacgacggcaacgaatgtatggataacaactgatgtgaggatcctgacttccaaatatagatgcgcgatatcattctacatgggtgtacgcatgtcgcagagcgacatatgtgtgctattgatgaatacacttaacccccactac

SEQ ID NO: 174589 - DNA, 289 bp, Glycine max
agccgatgaaccaaaccaccctacaactacaagcactacaaacctctacaatggctctgagccaatgatgcacggaagctcatcatgctctcaagagaaccaaaagtattcaaaagctaaatcaaattgtgatgatagtgggtcaaaaatgatcgcgaaagctagctacaggggcgacactattcgcttcaagaacgatccatctccacgttgcttccaccatataaagacagtgcagcaaggctcaaatccgcaagaggaccactcccactcacacatcttgatgatg

SEQ ID NO: 174590 - DNA, 413 bp, Glycine max
  unsure (1)..(413): unsure at all n locations
tgacaactntgagcatgcaactatgaaatacaccttgttttgtttgctggcaactacctctccactgagatgactgaatcacttgaccgtttctacagctatgatgggatacttgcatcctcggtgattagtcaagagccattgcttctccattttcactccacagaccatgttggacttgaaggccattaccactggctgctgcagctcatactgcttgtctcactagtatcatctctggctgcaactatttgtcctaacaattacaacgcggctctcgtgctttctatatcactcatcttccaatgatgttagtttataaacatggagnttatgctatggatctcatctctaggccctgaacggtgtgcggtgaatttggccactccaagtggtcatgagatcattggagc

SEQ ID NO: 174591 - DNA, 434 bp, Glycine max
  unsure (1)..(434): unsure at all n locations
agctttaaaatttgaattatatcgttcattatctgctggtagncaattaccatatatgtgtaatcgattacacagtgcaaattttgaattcaaattttaatagctgttgtaaatcagttttggccactggtaatcgattacatcctctggtaatcaattaccagagagtaaatttcttgtaaaagacttttttaacttaaatttcttggccaaaccttttgctacttcaattggaattgccctcctatttaatataccctttctaagactagagacttgtcttggtcatccatcttgaatatctttaatttctttgtcttgaataaagctttgagacgcatgtgaacctttggcatcatcaaaacattcagcttgatgctttgtttacaactaaggctaaaatcaactcacanatcaaactttgtcaaagtcac

SEQ ID NO: 174592 - DNA, 415 bp, Glycine max
  unsure (1)..(415): unsure at all n locations
ntatcacttttcattcttgagctgattatctattttgttatgattgggttgcttggatgattttcatgaatgtcttgactttttggatctccttatgttagatgttacccattcctttcattccttgatgttcattgagaaatatgtgaatagttttgtttgtctccctttcatatccttggattctgttctttgtttcattttgcccaggagtgcaaaaggctaagtatggggggttttgatgtgccatcatattcttctattttctaaacccttcttgcaccattttaattattgattggtcttaattgtcaattaattaggcacgtttattatttgggctcatttagctaatttgatgtttttaatctaatctcacgaattaatgaaacattgggcttaatccggattttgg

SEQ ID NO: 174593 - DNA, 347 bp, Glycine max
tatcttaagaagggggggccgaattaatatattcaaaccctcctcgccctcactaaaaatgtatctctctttttattcaaattatgaattcccttaatgacaatattcataagtcttaagtgcataactcattctgaatatcaatctcaaccacttataactaaatgagattaaaggaagagaacatgcaactcagttaatactggttgctgcacaccattgagcctacgtccagagccaatatcacccggtcgaaactccactatttgtaaattcctcttacagttactaactcacaccgacaatcttctttttgtttaaattcttacaacagaacccacgttttt

SEQ ID NO: 174594 - DNA, 428 bp, Glycine max
  unsure (1)..(428): unsure at all n locations
ntacaaacgaataacacttggacttttacagattttcttgctattaagaaagctatcgcgtgtcggtggatttataagactaagtatcatgcttatggctccgttgaacgatataatgctcgacttgtagcccaagggtatactcaaatggaaggactagatttccttgatactttctctcgagttgcgaagctcacaacagtccgattattgctagcattggctgctattcatgggtggcaccttcctcagcttgatgttaacaatgcattccctcatgaagaattaactgtagaagtctatttgcaactgcctccaggaatgcaagtctcacactctaatcaagtgtgcaattacaacgatcactttatggtttgaaacaagctagtcgacagtggtttcatcgcntgtcctcatttcttcttact

SEQ ID NO: 174595 - DNA, 413 bp, Glycine max
agcttcttatccaatgctcatcttggtggtgaagctccttcttccatggcttattccctagtggatgacgcctcctctcacctcttctcttttgtcttccgctgcatctccatggtggaaaatcaccattgaaggacctcatttaagctcaaagatctagtctccatagaagccccacaagcaagcttccatcaagtggtaatcagagcacaagagcttcaagtaggtgctccttaaacctccattaatttttttgctttaccttctcttccattgttgtttcttcatttttttctccatgtatctcctcacatgtcttgtgctaaatgttgttaacacgattctatagagtttccaccgattaaacctgctatagaagctagaattgattttctatggttcaaattcttgta

SEQ ID NO: 174596 - DNA, 433 bp, Glycine max
  unsure (1)..(433): unsure at all n locations
tcaatagaaggttcgttcctaatttctctacaattgcatcacctctcaatgagctggtgaaaaagaatgtggcatttacctgtggtgaaaaacaagagcaagcctttgctttgcttaaagaaaagcttactaaggcacctgttctatctcttcctgacttttctaaaacttttgagctagaatgtgatgcctctggagtgggagttggagctgtattgttacaaggtgggcaccctattgcttattttagtgaaaaacttcatagtgttaccctcaactaccccatctatgataaagagctntatgccttaataagagccctccaaacttgngaacattaccttgtttccaaggaatttgtcattcatagtgatcatcaatcacttaagtacattagagggcaaatcaagtatacaaaagacatgccaaatgg

SEQ ID NO: 174597 - DNA, 446 bp, Glycine max
agcacctgagctgcaacttaagtacgacgcgtctcatatattatatttatttcatatagcacgaaacaaaaggaaaaagcatgcataataattgatggtgataaataacaagcaagagaatcccccactttctttatcttctctacccggcgcaacaaccggatacccccatgtgcttttctcttcccccactctctatttatagctcaattgtgataggctctctcacacatgtcttgttcttgttaagttaaatgctacaatttttcaatattgttgacatgggaaactgtttgaggaacaacaaaatatcatcacaaaatcatgagaactatgatgatgccctactaattgatgccaaggttgataaggtaaaggcactttctttgtcaagatggaagatacaccaacgatggaacaaagccataagaagaaggtgaggttca

SEQ ID NO: 174598 - DNA, 301 bp, Glycine max
  unsure (1)..(301): unsure at all n locations
ttatagatnnggaatggacagtcaatttcaaacataccttttgtgaatgctttatgtatgccgatnggtttaccaaatatggtgccatgcatggagaaacttttctcatttggaatgttttcccaacttagtattcccttgtgtgttgactgattaagtgggtgtggttcacattacgctttaattttctctgtcattgtcgttttttctttgtataaaaaaaatgactaaagaacctctctagtcctttatattttaggtaatatttgttctatcctttatatctctaagtttatgttct

SEQ ID NO: 174599 - DNA, 420 bp, Glycine max
agcttgtgctctctatccaagacaacatcttttttagtttatccatacccaaggagcccaagcaagaggcttatgcctcccaaaaaaaagctccatattttgtttagtgctaatatatctcagaaaaattattgttaaattatatttaaaaataaattttaattaaaatattataagtaactattaatctttttattaataatgtagataacaataacataacgataattattcaccaatatcataatttttttagaaaaaaagagatttaataattaataagcaaaaaaattcaaattttttttattttataaataaataaaaaatatcattcttaaatttcgtttaaatctctcaattggtgaggcgactgatccaaaacaataattttaaaaattaaacacgaatggatcaggggcg

SEQ ID NO: 174600 - DNA, 413 bp, Glycine max
aactcaagcttcgcacactctcttcgggtaacttacctaagggtaatttttgattattattctaagaacatagaagtcagtgcaaatcgatcaatcttcataacacaaaccattacttagcatccttacatgagaggtgccacagaaatggtttgacacaaagagaatgggtgggtaatcactgaaaaccttgaaagtattgatgtcatctgttctatctcaaatccattgaaagatgctctttatatggaagtcgaatccattggagactctcaaccaacatattctaaaaagtcttattcacgagggtattgatagttcatacatgaagatcaactcgcataaaccatgatgaggcgtgatcgaactgactctgtacatgatttctaatataactaacacctacgatttga

SEQ ID NO: 174601 - DNA, 401 bp, Glycine max
  unsure (1)..(401): unsure at all n locations
agcttgttatcaaggtacatgaactatgtttttttaatttattctcacgcagcaaaaagagctcttanatatgttaaaggcacaattgattttggaataagataccattatgttaaaaacttcagacttcatggttatactgatagtgattgggctggatgtgctgatgatatgagaagtacttcaggttatctttttagctttggttctggaatcttctcattgtattcaaagaaacaggaagtaatagctcaatccatagcagaagcagaatatgttgttgcaactgctgctgtaaatcaagctctttagatcagaaagcttatgacagatttgcatatggaacaacaagacaatacgcaaatatttggcgataatcaaactgcaatttcaatttcaaa

SEQ ID NO: 174602 - DNA, 442 bp, Glycine max
  unsure (1)..(442): unsure at all n locations
tgtaatcgattacacaaatactgtaatcgattaccagatctgattntcttaaaatattctcaacagtcacatctttntatttggttcttgaatggctatcaaaggcttatatatatgtgacttgagacacgaatttgctaagagtttttcagaacaaaaaggtcttatcctcttaaaaagcaaaatcgttttatcctcttacaaattccttggccaaaacacttgtgattcaataaggaattatttgagtgctcaaattgttcaatctatctctttcaagagagatttcttcttctcttcttctgtattctgaaaagggattaagagactgagggtctcttgttgtgaaagaattctaaacacaaaggaaggattgtccttgtgtgtttagaacttgtcaaaggaatntacaagatagtggaactctcaagcgggttgcttg

SEQ ID NO: 174603 - DNA, 424 bp, Glycine max
  unsure (1)..(424): unsure at all n locations
agcttcaacattcaacttcgagcgtcttgtttattactggactatatcagacatccgagtaaaaatttattgtcgtttgaatttgctcagagcttcaacattcaatttcgagcgtgtcgatatattacgggactgaatcagacatccgagtaaaaagttattgtcgtttgaatttgctcaaagcttcaacattcaacttcgagcgtctcgttatattatacgactcaattagacatccgagtaaaaagttattgtcgtttgaatttgctcagagcttcaacattcaatttcgagcgtctcaatatatgacgggactcaatcagacatccgagtaaaaagatattgtcgtattaattggctcagagcttctacattcaatttggagcgtctcgatatatgacgggactncatcagacatccgagt

SEQ ID NO: 174604 - DNA, 466 bp, Glycine max
  unsure (1)..(466): unsure at all n locations
tgccttgccccttgatatatttgagggactcatggtcactatgaatgttttattccttgggataaaggtagtgttgccatgttttcaaagcccgtactaagacatacaattccttatcataagttgaatagttaagggtaggaccacttaacttttcactaaaataagcaattggatggccttcttgcatcaacacaccgtataactccttaaaattttatttatgtgcttgtatctctttaattatagttgtctttattttatgcagatttcttaaattataattataattattgttatgctttgttcttatttaattaattacgtgccatttgattgtatatggctaagattaaaaggatgatccagtttcgaaagaaggatgcagaaagtattttatggctataattagtagcagaattactatattaattaattgaagacttaaacacattntgatatgtgg

SEQ ID NO: 174605 - DNA, 439 bp, Glycine max
agcttgagatgaggaagtgttgaagggtttatcttcctgcttttattgttgaccacagagtggtacctggagatatgtcgcgggggtcaagagaccttggggacgtcaggtggggtgctattgcccaaaaccaagcttgaccaatcccgacccaacccgggcatagtcggtcagtgagaacctgtgatgtacctaagcaggcgagctcctggcagtcaacagataaaaggaacaaagaccacatagcaaggaggcttgtggtggctggccagctgtgaaacttgattgatatgtgagatatggtctctggtaatcgattaccaagggtgggtaatcgattacaaggcttacaaatgaagacagggggctaagatggtctttggtaatccattaccacgcttgaaaacgaaaacaggaagctaagggagcctctggtaat

SEQ ID NO: 174606 - DNA, 468 bp, Glycine max
  unsure (1)..(468): unsure at all n locations
tcttgagatgcctttcagttttctcattagaggctnttgttagtctactttctcattagaaacatcgatattgaaataatcaatgaatcttgaggtcaaaattgcatatgaaaatttataatccactagtcgacgacttttcaacaatcaatagtacccaaatcatttgaatacctaattttggcccatatatgatatgcaagtcgtcatcggtgacttgagcatgattgctagatcttggtgccagaatatatgtaatgatataaaccaaaattntgtcttccattgtagaccaccaatacccaatattttctttctaaaacatgtaaaagccaaaacttctaaaacatcttcaagcttttccttgagcttcaagctntagcctttgattgctccatgttgtggcttcccttatctccaacattatgtaaatgaaggatccaacgtgaagggaagtgtggtgagcat

SEQ ID NO: 174607 - DNA, 436 bp, Glycine max
  unsure (1)..(436): unsure at all n locations
agcttggtatgcaaaataattactgtnaatataaataatcaataaatctaaaaattacgaaaaaaatttggagactcaaaaaaatatatagaagattgtggtaacattagtttggtctaatctaatttcctcctaattaactattaaaaattattttaccaactaataattataaaaaaaattaaaataatttttatggtcaatagaccagcttgcacgaaaatcatgtggtttaattaaaagttcacaaattcttaatataatgaattttgaacaaaaacttaaataaaaaggcttaattctctttttatatgtaccaaattcacttttttccccttttctacctcttcttactttgcagaaacacactctccctccctctccatgacttccttctaaattttcttctctcatttttcatcacacataacacttt

SEQ ID NO: 174608 - DNA, 460 bp, Glycine max
  unsure (1)..(460): unsure at all n locations
tctaaggaagctacctagtctataaatagaagcatgtgtaacacttgttgtaactttgatgaatgagagtcttgtgagacacaactcaaagttcaacttctctccatttttcttccatcaatttcgtgctcccccctctctctttctctccctctntcttttcctccattgaagcatcctctccaagcttcttatccaaggctcatcttggtggtgaagctctttcttccatggcttattccctagtggatggcgcctcctctcacctcttctcatttgtcttccgctgcatctccatggtggaaaatcaccattaaaggacctcattgaagctcaagatccagcctccataaaagccccacaagcaagcttccatcaagtggtatcagagcacaagagcttcaagtaggtgctgccttaaaccttcattattttnttgctntaccttctcttccattgt

SEQ ID NO: 174609 - DNA, 351 bp, Glycine max
cctatgaaactaacgcttttggagccttgctgttggagattatatatacttattttcaatcaaaaacacggaaaaatggcgacctaatgctggaagaccaacgaattccatgagctttcgactttgaaagaaggggggagagtgaccaggtacataatacctccaactacccctttgaacgcctcttatgcaagacatagcccgtcaacattataaatttgatgaagaaactagtacatctttctacaggacaggcgttcgctaactacaacccccttcaagatgattatagcatccagttttactttaaagacacaacacaaataacttccgggaatataaatgatactt

SEQ ID NO: 174610 - DNA, 336 bp, Glycine max
catgttgggagcataccgtgcaaaaacataacgaataccatagtgaagctgaaatcaccttatgccatgaacatgtcgaaatgactgtagagaggaagtataaactgggtgatgtttctttaataaaactggtggatatagagaagcacatgtacatggcaatggcacctgacccacacatcttgatccgaacttctggagaggctcgactcagcaattttcttctttggcagactaataccctgcctttgtatgcgccaactgcactttggcctgaaatatgcctaagacacttggtctgggcagtattgaattttcagagacaccatttttatt

SEQ ID NO: 174611 - DNA, 432 bp, Glycine max
  unsure (1)..(432): unsure at all n locations
tgtataaggagatgttaactgataatgttttatagngttttcctctaacccgataacgnngaataccatgttgaattcttattgcaagctggggaacatggctgtggcgaggcttttcttcgttaggatactgagatgtgagcctggtcctgatatgtttacgtacacttccttggttttgggttattgtagaaacgatgatgttgagagagcttgtggagttttttgtgttatgccgcggaggaatgcggtttcgtatactaatcttatacacgggctctgtgaggctgggaagcttcacgaggctcttgagttctgggcgcggatgatggaggatggttgtttcctcacggtcaggacttataccgttcttgttttgcgcgtgtgtgagtctgggagggagctaaatgctttgagtctctttgggagatg

SEQ ID NO: 174612 - DNA, 347 bp, Glycine max
gagctgtgaagatatatactgtattactatatgtatgcatacatgcttgttgcatttgtataaaatttaacttggataaatatcttgcatttgtaaattaagcttcaatcacatttagagcttctttgataaacacagccttgagtttgagaaggcttgaactgatcctggccttctaagcctgaaaaggcctgctaagtttgactctgattacatcttctataagaattaagatgaactctggaatttgagcttggcttgacttgattacaccgcttattaaagttgagcataaacacactcttatttgacaaatttatgcctaaaggctgtctttcatgtaactt

SEQ ID NO: 174613 - DNA, 447 bp, Glycine max
taaagaaaaggatgaaaaatctttataggagatttaattctggggcagaaactctgaaaagataaaataagaatctgaggaggagaatgataagagagtcgagaatgcaaaagtacatgttgcttccctccaaaagcaacctgcagatctattacttgaatatgactgattcttggaagacaaccaaaccttcatgctcaaccattaggacataagagctgaggaaagactgagatgcattgataaacaaagtttggggggatgatatccaatcatgaccatcccgtgttgcacagaatcatcttaattttgggaaaaaatggttattttctgcacctttttgaaactgcaagattgtacaaaataactctggtcaacgctatagattatgctgtgcttgatcagtatgcttcaattttgtttagatcatagctagcaacccatcta

SEQ ID NO: 174614 - DNA, 364 bp, Glycine max
agcttgactagattcttgtttgttgcttgcttgtatattaactaaagtttgtccatcatttgtgacttatcatgctacttgtagaggtgatttatgtgaattttaactcttgtaagctgatgttataattctcctatgcatgtggtgaggttgttctttcaatgtttatacatatattggcatgttgatagtagtacatggtaaaaaattaatctccttggtatatggtaagtgttgaaggctgggattactttcaatggtaactttattttatgcacgtgaatcagagactcaatccaagatcacctttactaaaccaaagctctttctactcgaaatttggtattgtgaattgcttcaaatg

SEQ ID NO: 174615 - DNA, 388 bp, Glycine max
  unsure (1)..(388): unsure at all n locations
tggagtcaatgttattttggcagtgtcacatatttgttttaggntgctgctatagtgaagaaaattcctctgtacaaggtatgcgaggtttcattcagggttttcttgctagctatgttggtgctacgaagtaagcatgtatgatggtgacccatccttgctacatatttggggacatgtctaatataatgaaactctttcatccactttcttatatcgatcaaaatggaattcatatgttaattgactacgtgagaaagtaagaaacttaaacttcttatttcattctttttagtgatggcaataccctctcatgaagatttgtttctttggtcaaatctataaacatgtgttntatatttatgcttcttttcaatatcaaaatttg

SEQ ID NO: 174616 - DNA, 363 bp, Glycine max
agcttagccctagaggggatggacctttttatgttttggagaggatcaataacaatgcctataggttggacctcccagaagagtatggcgtcagcaccacttttaacatttctgatttaactccttttgcaggtggagctgatattgaggaggaggaactaacagatttgaggtcaaatcctcttcaaggggaaggggatgatgcaatcctccctaggaagggaccaatcacaagaaccatgagcaagaggctccaagaagattgggctagagctgctgaagaaggccctacggttctcatgaaccttagggtaaatttctgagcccatgggccaaggttgggtccaattatctttgtacata

SEQ ID NO: 174617 - DNA, 472 bp, Glycine max
  unsure (1)..(472): unsure at all n locations
actcagctnttacacccttgtgcggttttcccctatgtggttggacttgtttcttctattgctcctttataaaaaaaatgcaaattttttaaatctcattattggttatgagaaattctatttgtatgctttcattcctccttcgccgcattttttatttagaaaaataatgtgtgttgttctaagcgttttgggggttagtttctttaccaagcgtgttcgcattttagtgaaagttttcagggactccaatgtcttcagtctttacatttcaagacttcaatgtcttcagcctttacatttgaaaacttcaatgtcttcagtctttacatattcaagacttcaatgtcttcagcctttacattttcaagacttcgatgccttcagtctttacataccaagacgtcaatgtcttcaggctttcaagacttcaatgctttcaatccttactttacaagacttccatgtcttc

SEQ ID NO: 174618 - DNA, 446 bp, Glycine max
  unsure (1)..(446): unsure at all n locations
agcttgagatgaggaagtgttgaagggtgtaacttcctgcttttattgntgaccacagagtggtacctggagatatgtcgcgggggtcaggagaccttggggacgtcaggtggggtgctattgcccaaaaccaagcttgaccaatcccgacccaacccgggcatagtcggtcagtgagaacctatgatgtacctaagcaggcgagctcctggcagtcaacagataaaaggaacaaagaccacaaagcaaggaggcttgtggtagctggccagttgtgaaacttgactgatatgtgagatatggtctctggtaatcgattaccaagggtgggtaatcgattacaaggcttaaaaaatgaagacaggaggctaagatggtctctggtaatcgattaccaaggggtgtaatcgattaccaggcttgaaaacgaagtcaggaaacttacg

SEQ ID NO: 174619 - DNA, 460 bp, Glycine max
  unsure (1)..(460): unsure at all n locations
tgatggtgttgagaagaaatcacatgtttgtcatcatttaaaaggcatagaatgtgaatgtatgtatacatgattttgatgatgtcaaaagaagaatcaaacaaggctcatcttgtttcaagattaatacaagattgtttcaacaaacaaagccttgattcaagatttcttcaagatcaagccttgcctcacaatgaaaggtttcaagtcattcaaggcacatgtaatcgattaccaatacatgtaatcgattacaaatggtttgaaagtgtgtaatcgattacacatcatatgtaatcgattaccaaagactctgaacgttaggaatntcaaatttaaatgaagggttacaactgttcaagaaaaacaactgtgaaatcgattacactaattctgtaatcgattactagagaggattttcaaggaatatcaccaacagtcacatcttatcattttgatt

SEQ ID NO: 174620 - DNA, 402 bp, Glycine max
  unsure (1)..(402): unsure at all n locations
agctttaacctcatcgtctctcacagtctttatatttgggagcctatccaatccttgtgttcggactctcagccagttacgatagccgccgatgatcccattactgcttcccctaagctctctgtcctttcttcacgccgcatcccatgccttgcgaactccttggagtaccctcgcgttgtggtcactgaaaccccgtgcgatgaaaggcgtgatgctttcgtctgatggcactcctttcatggggtagccaagctgtcttatggcgaggacgggatttataattaatacaagcccttgttcccatcaagggaacatttggacatccttcgcatgaagatagaatcctgattcttccttccttccagcgagggaaccaattaacagacgcccctncatgct

SEQ ID NO: 174621 - DNA, 449 bp, Glycine max
  unsure (1)..(449): unsure at all n locations
tatccttatggcttgcctccggacttcagcccccgtactaccccggaatatttaagccaagcccctacttttgaggggcaactcccgccttatgacgactatcccgggcaagacgatgaggaaggagatacccatcttggccccctgctccacctcaaagatccgtccccacatgaactaccccaaccgaacatagttcgccatatcctggcctcacccacacccgtaaaagaatctgttcccttcgtggaagataagggaaagattgaggcgcttgaagagaggttaagagcagtcgagggccttggcaattacccattctcggatttggcggatttgtgtctcgtgcccaacatcgtcatccctcccaagttcaaagtaccagactntgataagtacaaagggacgacatgtccaaaagggcatctccggatgtattgccgaaagat

SEQ ID NO: 174622 - DNA, 415 bp, Glycine max
  unsure (1)..(415): unsure at all n locations
agcttngataccatcttagaattagggtgtagtactttttcaccaaactttccaacacacccactcaagcccatgactacaggcctgaaggggcctatagcatggcaatgcaggtggtacaacaatggatctagaatagactctaataccattttaggatttgtggttaaaacctaactcaaccccacaaaactggctattaaggtgaggactatactgcacaagccttataagctctacttaggccatatctctgtcaattttctacccaagaaaatgataatatacacaaatatgtttagtccattgttgaattatacaaaatatgcatagctgattgactatcatatcttaatcctaactggggagcagttggctaatgcaaattaccaccatctggaatgcatatatatat

SEQ ID NO: 174623 - DNA, 462 bp, Glycine max
actcaagcttctatttcccatttcgagagtctcgatatattatgggacttaatcgaatattctaagaaaaagttattgttgtttgaatttgctacgagcttccgttatcaactttgagcgtctcgatgtattataggactcaatcggacatctgagtaaaacgttattgtcgttagaatttactctgagcttctattttcaatttcgagcatcttaatatatttcgggactcaatcgggcatccgggtaaaaagttattgtcgttagaattttctcagagcttctgttttcaattttgagcatctcgatatattacgggactcaattggacatccgagttaaaacttattgtcgtttgaatttgctacgagctttcattttcaattttgagcgtctcgatatattatgggactcaatcggacatctgagtagaaagttattcttgttagaaatacaaggagt

SEQ ID NO: 174624 - DNA, 465 bp, Glycine max
  unsure (1)..(465): unsure at all n locations
taagggactccctanatgatcaaagagtgagaccatggtatgggatgaggcctatatggatcacccaaaagatgtagaaatctccatggagtcgagtcagcatgatattacttgatgtaaattgcatatgagattgaaatataaattgatgaatgtgttattgtattatgttatttgattcatgattgttgattgattcaaaattttctttatgttaattttatccttcttttacacttttatataattatgtttctttgatatataaccttacccttgcattttgcgtttatatttgtattgtgtgactgcaatgatcatgtgattggcatgggagtaggtaatgatgatgttgcatatatgttcttaagtagcttatgactggtgggtgtagatgatgaagatgaaatgagatccctattntgatctttcctttgatatatctatatatagtggggatcaact

SEQ ID NO: 174625 - DNA, 289 bp, Glycine max
tttttggcaaaaactcaaatgcccccttgtcatgcttgagtatttccttaagtccaaggattgctaataaactaggcctattctaatgtaacttaagaaacttgatgagaaataagaagcggaaatcttaaaggtactaggctgcctactaatagcgcctttttaacgtcttgacccggacctgggatgatgatctattgatcgcgggcccagcacctactcgtacctgcccctaatctcttgaatacaagaattgacatcatgccctaaatgctaaaacacatcacca

SEQ ID NO: 174626 - DNA, 354 bp, Glycine max
tgcctcaaagagatccaggagggataaatctggttgatttataccagttccgctcccgaatatgacaggcaccgttttatgagcgctgagcaccaccaacgtcttgaggccaccaagggatggtcatttctccgggagcgacgtgtccagctcacggacgacgagtataccgacttcctagatgagatagttcgtcggcggtgggcatcactggttacccccatggccaaattcgacccagacatagtcctcgagttttatgccaatgcttggcctatacaggagggcgtgcgagatatgcgaacctgcgtgaatggtcagtggatccctttctatgcggatgctctcagtcaa

SEQ ID NO: 174627 - DNA, 310 bp, Glycine max
aagtttgaaggaagtgagatcaaaactaaatgcacgaacaggttttcaccgagctctagcttaagtgccttctagtttgataccaagctagacattgtcattatggactccctaatataattgttcccttcttttgttaaccaaaataaaaaactaaaacaaaaaaccgcatgcgcaaaaaacttccttatatatattacgaacagtagccatgaagaaaagtccgtcacaaaaataaagtattgatgccaaaaaacaaaatgcacttgaatttaaatcaaatatccaatatgacaggtataattagaat

SEQ ID NO: 174628 - DNA, 443 bp, Glycine max
cttagaaactaagcttcctacataatggtcccttattattttcattcaaatttggttagaaagtggcatcaaagaggttgttgttgatgttgttctctgagttgaaagtatgcaactgatgatggaagttgcggcttgttgaggatgatatggtagtaaccatagttgaaggaaatcaaagttgttggtaaaaaccaaaaagagaaaatagaaccaaattggagatagataggttaatagaataggcaagaagaacaaattatatgcaaaatgaaaatgaatgaaaagaacaacacatatataggatcaataaaacaactgatgattatgtgaaagttgatcatataaagggcttgaaatatatgcagcaattccctatgtgcttgttgaggatcaaagttgagtgataacaaaacttatttatgaaatgaaaatgcaaagcg

SEQ ID NO: 174629 - DNA, 368 bp, Glycine max
  unsure (1)..(368): unsure at all n locations
agcttaagctccttcaactgttctaagctcttaatattngaagagtatccttgtggaaccttcacccgacgaaaacactgacaaaaacttatcttctcattcttggacaaagtatggcaggctgggggcaagtaaattttcttcccatcagaccttggatgcaactgtgatcgtatacccatatcagctagatcttgacgggtattcaagccatccttcatcttgccttgaatgttaaggagcgtcccaatcacactgtcacaaacatttttctccacatgcataacatcaatacaatgtctaacgtcaagatcataccagtacggaagatcaaagaaaatggacctcttcttccatatgcaactcta

SEQ ID NO: 174630 - DNA, 86 bp, Glycine max
ctcagcttctcgtagtacgcaccactggattatctacttacatactctagactactctgaactgagtacaatactcacatagggat

SEQ ID NO: 174631 - DNA, 413 bp, Glycine max
ggacccaagcaccgcggctgcagctgaaattgacaacgtatctctttataaactcaaagggcacaacttatcacacggacgttcgaatcaagcgcttaatgtatccagaccctggaaattgaacaacgtatggtcttcataaattaataaggtcgtaacttgccacacgaaagttcgattctcgcgcatcacttatcgagatgctctgaatagaaaactggcagcactcgagaaatggaaatggggataaattctcacacataagctcgattcaggcgcataatatatttagatgctcctaattgtacaacgtatgctcgtcaaaattctattggcactacttgaccacagattccgattatgcgcataattttttgacgctcggaaataacaactccgctctcagaatttac

SEQ ID NO: 174632 - DNA, 303 bp, Glycine max
  unsure (1)..(303): unsure at all n locations
tganattgagcaacagaagctctcgagatattcaaatgtttcatttcttgtcacacgaaggccgatccaagcgcctaaattttcgcgaaatccaacatggtcataacttggcacacgaaggccgattcaagcgcattatatattgagacgctcgtaattgaacaacagaaacgctctagaaatgcaaatggtcagaacctctcacacgatgggcgattcaagtgcgtattataccaagacgctggaaattgaacaacggcagctcaccggaaattccaatggtgataacctatgcacactgaa

SEQ ID NO: 174633 - DNA, 422 bp, Glycine max
agctttataagcgcgggtctaggggacgaatgtcaagtggtcgcgatatacgaagatgatgttccgagtacattggatttggtacgaccatgccctcccgatttccagctgggaaattggcgagtggaggaacgctccgacatttacgcaacgagcataatgtaaacctttacggttttgaaaactctatagttaggcctaggctttagagtttcttttgttaaggctttgtgtcttttgttttgaatttataatacaagggtctttcttcatatgttcctacgtctctacccattctcatccatttgcatgtttacttctttatttctgaaacggcagatccgatgacgagtcccccgaaggtactaatacctgggacccgcctatcaacttcgagcaagaaacgaatcaaacggaagatg

SEQ ID NO: 174634 - DNA, 460 bp, Glycine max
  unsure (1)..(460): unsure at all n locations
ntntggagtagaaacatgggaccaacttattttattttttaaagaaagtcgtatctagtcaaggtctgagagaccatacaagtttcctaacgatttctaattatgtgggccattaagtctatcatatgctgacaatagccgagaagcccatgaatctcttcgggggcggagtaggtgtctgccatcgccttggccttggctaacaagcggggaagttcttgactcccgttcaaggtaagagcaaaccgatccatccacatggttgcctcttggtgtaaagagtcgatcacccttcctctagcctctttttccgcgtatacttgagcatactcgtccgcgattctatgctcgtgggccgtggctagacctaactcttcttggtacttggcaatgatagctagcatgttggtctccgtctcgcataaacgctgagacaagcttcttttggaccttgaacaag

SEQ ID NO: 174635 - DNA, 404 bp, Glycine max
  unsure (1)..(404): unsure at all n locations
nttgaatcgccacgtcatgcagcacctgatcatatgtttgttgcaggaaagtggagtaaatcgcgacaatgggtttgtacccaccaatcgccagacccgcagcaaaggtcaccgcgtgttgctcggcaattgccacgtcgaagtagcgatccgggaatatacgtgaaaactcgaccatgccggaaccttcacgcatcgccggagtaatcgccatcagcttggtgtctatcgctgtcgtttgcacaaccagtcgccaaagatttttgaatagctcggcaaaccgccgctacttttcggcaaacaaccgctggagggatcaaatttatgcacggcgtggaaagtgatcgggtctctttctggcagctcattaccacgaccttttctggtcatgatatgcacgaact

SEQ ID NO: 174636 - DNA, 396 bp, Glycine max
  unsure (1)..(396): unsure at all n locations
agactgnctcgtatttaccaagaaaaatcaataaatagatgaaagagaataataattttataaattaattttatcatgatttattcattttgtttttgtagcccacatcattaatattataagagttataggtggaaaaacattagttaattttacattgaaaatttgaaatgacaattatttcaaaataaattttttacatgatgattattatgggattgaggaactactctcttttatttaataatgttagttttttaaaattatttttttcacctatttattagtcttaggttgtttcacctatttttaaaaattattataaataaagaataataattttacaaaactaaccttattaaataaacgaaagaaagtactccctccatccatact

SEQ ID NO: 174637 - DNA, 448 bp, Glycine max
  unsure (1)..(448): unsure at all n locations
ntacaaatccacaattccttaattgttgcctttctcttataaagtccccagtggagtcgccaactgtcgcaacgtgcccttcgcgggcgagcgagaggcgaggctcacgggtgcgctttccaaaggaggaaaagtgtgcggagttcccaccaacgtttatttgtggaaaacgtcgggaaaaccgaaggaaaccggtcaaaatgagaattctaagttcgggagttgtatttacacttgaggaagggattaacacctcttacgtttgtctcgaaagacaacagccttatttctagaattgtggaattgtgttaccttaacttttatttctttttattttttgaggtcgaacaaaagcggagctttttgctctacgcaccccttctttggagaagaaatcagacctacgtagttcttccttatgcatggatcaagagattctctttacttg

SEQ ID NO: 174638 - DNA, 430 bp, Glycine max
  unsure (1)..(430): unsure at all n locations
gatgccactctactttatattcttgaaagatatgnnaacaaggaagcataaatatattcatcaggaaaacatcatagtggaaggaaattgcagtgttgtgatccaaaagatccttccacctaagcataaagatcctgggagtgtaactattccttgttcaactagagaagtcaatgtgggaaaagctcttattgacctaggagctagtatcaatttgatgccactctccatgtgcagaagattgggagagttggagataatgcccactcgaatgacattacaattagctgaccgctccattaccaggccatatggagtaattgaagatgtgttggtcatagtgaaacattttatcttcccggcagactttgtggtaatggatatctctaaagatactggcatccctataatattgggaaggacattcatg

SEQ ID NO: 174639 - DNA, 419 bp, Glycine max
  unsure (1)..(419): unsure at all n locations
agctttgcggatttggtcttcaccggggtattgatcattgcgggtctgaaaagaggcaaatttgatcatcctgctttgatgaatgagaaaactgggacaaatgaagaggatgagaatgagggagaaacccttgctatgactgccattcctacacagtcaaatttcccatcagtccaacaatgtcattactcagccaatatcagctcctctcattacccatcacccaatcatccacaaaggccatccctaaatcaaccacaaagtctgtctaccacacttccaatgacgtacaccacctatagcgcaaaccaaaaaggaattttgcagcanaaagcctgtaggattcaccccaaatttcgatgccatatgctaacttgctcccatatctacttgataatgcaatggtagccataaccgct

SEQ ID NO: 174640 - DNA, 454 bp, Glycine max
  unsure (1)..(454): unsure at all n locations
ntctttggacctcgaacaagcaattaactcctctntcataaccatgctatgtgctcgcgactggtctctttcttcccttcgcaacttgagttcactattgctaccccacagagctccgcgaaatttgttccggccatactcttccttgcgagccctcttggtctcttgttcaagggctcttgcggtaattgcattctcctcccgtaacccggcacactctttccgaatgtgtgttgcggccaacttgaacttctccttggcaaatttcgcctttcctaacttcgctttgagagcttggacttcttcgtcctcttccggtgcttcaaaactctcttcgctgatgacttttaacttggcgagccaatctaaacttcgtatatgaactctcagccattcgtggtacccatcaatgatgccattacgaatgcctctaagttcttgatctttccttaac

SEQ ID NO: 174641 - DNA, 294 bp, Glycine max
cccgaccctaagaaccattgaagtgtttgcaatgaaacgggcaggcttggggtgtgtgttatcaggagggaagagtttggctatgcttcagccaatacgccctctgaagtaactatccgacccatgacttgaactagaacggtggctttgcttaaagattgggaggacaattaatatggacatgtttgaagtttcagcgaaacaagagcctaaatacttgttgatcagaaggaactcatctgaggtcacgaaatggatagagtcctcaggttatgatttggctttcctccatcc

SEQ ID NO: 174642 - DNA, 347 bp, Glycine max
tgtgatagaattccttcaagactttgctcattaggtctttttcctgcttcaactctacagggccgaaagacaagtgatcatgatttgaagccacgagcaagcctgttaaaggcgatgctggagggagcggtgtgacgacgtggatcgtgacctggactccaccctcctctttgttatgggtaatgatgggacaaccgggagcatccgggcaaattgagatatcattaatcagctgcagattgatacttaagacaatgtgaaaggcctatccttgtactctacaaacaaaagagtggtagttatacctcatatggatctcagacgcaaatcggactatcatcaggagt

SEQ ID NO: 174643 - DNA, 405 bp, Glycine max
  unsure (1)..(405): unsure at all n locations
agcttgtcaacaatttcctttgctacctcttacgtcatttttccaggntcccgggggcaggccatcttccacttcacgtgtcgtctgatgggaaatggaggatcaaccacgatgtcagtgcttccggattgagcagcttcctccacttttttctttttcttctcctccatcaacttgttttctagatattcataaccccaacgagacaacacgtgaggggaagtgttttgtttctggatgacctatgccttttttcgcacatcctataaaaattaaatgttattgaaagctatcattacaatgtataatagtaagtgaatttaaagtttaaaacaatgaaaatcagaaacttaactcccacgaagggtctctacgagtctgacaaaattgggtccacttctcctt

SEQ ID NO: 174644 - DNA, 429 bp, Glycine max
tagcatgggtcaatattgtaaacataatgcttggaagattgtcgtacttttccattgaatcgatggggtcaaagtgactctgttagaagctaatcactgtcctgatgcagctctgatatactttgacctaccatatggccgacgctatttgcacactggggattttatagcatgtgaactaatgcatagcttaccatgcttcttgtaaatcaacgtgtgaatgtactctatttggataccacatattgctacccaaaatacatgtaacacactgagctggtttgtataggtcttgtcatttggttacaatatataatcgttggctctatcaacctctgttgatggttctaagcgacaaatatctgcttcaggttccacttcatggaagaagtgctcaattatgttgtcagaatcacaaagaaccacctc

SEQ ID NO: 174645 - DNA, 391 bp, Glycine max
taccttgtgcatgattgatttatcccttgccccattttgtgctgaatgtatgattgctcgattgaaccttgagcatgtacagtttatatccttctaccttgtcttaagttgtaggagagcatcattcataaaaggaaattttggttcaaagcaaatttgcccaaatttgggggaattatggggtgaaagcttgtaatggtaagaaaagagcaacacacacagtcatcaaaaaagaaaaaagtattaaaaaaaactgtaagtataaataaacgtgtgtgtgctgctaattaagaaaaagaaaagctaagtgacaaaaagcaagtaatagagctggaataaaaagaaaaaggttgatctaaggatgaatgctcttctagaacctaagcttttg

SEQ ID NO: 174646 - DNA, 405 bp, Glycine max
  unsure (1)..(405): unsure at all n locations
aaactcaactatcaatgaagatcttatctcatcatatgtatgcatttgtggtaaactctattaaagtctgatacttagaaaaccaacaacaactcatggcctatcaaacatgttcgctgcagcttgctcctctcttattagctaatgttataagtcaagaagttgcattattaatgtataatagtttaaaaattatatattctaaaaacatataatattagatcgaattagaataatctgaagtataattaaaacttggtctcaaaatgctttaagtgattttctatatctaaacccgtcaaaantttcaaggagtccatttgagtcaactgggacatgaggagtgataataccccctattagaagtttaagaattatatattgttctttattcataaatattta

SEQ ID NO: 174647 - DNA, 362 bp, Glycine max
gttacattgtctgctaccttgatggcatagaacataaaaatgtccattgttttttccttaaaagattaagaattgaatatttacaaataatttgaaagaataaacaatatatattaacttttattctttattaatgaacaaaaatgagtataatataaataaaaagtattaattaaaattctcttagatcaataacacttatacattgtgagtaagattaatttctctggaaaatatccataatttcttgcccaaaatttaaaaaaaaatataagtttgaccacttgactaaaaagctttatttgttggcaagttccctctaaccttgctcgactctaccctataggtaattggtgcttcgt

SEQ ID NO: 174648 - DNA, 453 bp, Glycine max
  unsure (1)..(453): unsure at all n locations
tgctatctgatacacaaaagacgaaggatgaagacgaatctntttgtaaggagaagaacgaaagcacggaagaagaagcttgtggggaggttgctgggtgcacgggagaagaaggaaagcgcggaagaaaacgttttttaaaacggaagaagaagaaaatgttttttttttaaaatatattaacttttattttttaaatgaagagtatttttgaaagttcattcaattgctgggtgcacctagcaacaccctcgccgttactttcccctgtaacacctggtaaaaccccttcccccattcttttgtgttcctctttattttccccctgattttcataattattaaaaaaagaaaagaaaagaatagaaaagattagaagagcaaaccgtgagggtttgagtgatctgcaaccatcatcgacccctgggttgcgattattaatataacatttct

SEQ ID NO: 174649 - DNA, 360 bp, Glycine max
agcttgagccaaaacctttctaccatttaccttgacccagggtgagaatgccaatccttaccctcggaagcaaaaaaagaatagaggggaaatttccgatcaaagaaaaagagaaggaaaatttccaatgaaagcaaaaaagaaatgaaggaaaattccccaatcaaagagtgggagaaagcaaaaaaaggaaaagaaggaaaattccccaatcaaagagtgggagaaagcaaaaagaaaagaaaggaaaattcccaatcaaagaatgggagaaagtaaaaaaggaagaagaagaaggaaagaaagctcctgatcaaggatcgaaagaaaccagaagaaatgtgcagagaggtctttgga

SEQ ID NO: 174650 - DNA, 460 bp, Glycine max
  unsure (1)..(460): unsure at all n locations
tccatcaacatcttttntcccatatctactacgcagcttgtagtagacatgaatggccgaccaagaatgagaggaatatatgcatcctcttctatgtctatcacaacaaaatcagttgggaatataaggtgtttcaccttcactaaaacatcttcaatcactccatacggtcttgtgatggatcgatttgccaactaaagggtcatgcgtgtaggcattatctcaagctctccaagtcgccggcacatgaagagaggcattagattgatactagctcccaaatctatgagagcttttcctatagcaacctcaccaatagaacatgatattgtgacaactccaggatctntgtgcttaggaggaaaaatgcattgaatcacagcactacaattgccttccaccataattcaatcatttgtggatgtaccggtcttcttcgtaacatatctttaaaaatttg

SEQ ID NO: 174651 - DNA, 367 bp, Glycine max
ggaccttaagcaccgcagctgcaagcttatacaaccgaaacttggtaaattatgtgttcaccaggcatcgacgttttctaaaaccttatcacccttatagacaattagaaaaaactcttaatggaagtcaagagcacgaaattgcactgataccgtcgattggtgagcaggttttccagcgagttgaacacctgaatactatatttggaaagacccaaaagaaggataaaaggaagatttgcatatggaagaagaggtccattttctttgatcttccgtataggtctgatctacatgttagacgtcgtatcgatgttatgcatgtggagaacaaattatgtgacagtgtcattgggacgccttttaa

SEQ ID NO: 174652 - DNA, 428 bp, Glycine max
  unsure (1)..(428): unsure at all n locations
ctgcggatntggtcttcaccggcaaaatgatcgaagcttgtcttaatagaggcaaattngatcatcctactttgataagtgagaaagctggggcaaatgaagaggatgagaatgagggagaaacccatgctgcgactgtcattcctacatggccaaacttcccaccagcccaacaatgttattactcaaccaatatcaactcttctcattacccaccacccaatcatccacaaaggccatccctaaatcaattacaaagcctgtctaccgcacgcccaatgcccaaacaccacctttagtgaaaaccaaaatagaattttgcagcaaaaagcctgtaggattcaccccaaattctggcgttatatgctaacttgctcccatatctacttgataatgcaatggtagacataactcctgctaagtttcct

SEQ ID NO: 174653 - DNA, 433 bp, Glycine max
agcttgactcataccaaacatgacaaatttatcatgctttcatcaaatttcttcacaaataactatcataaggcataaacctagtaaaactacccattatatctcccaaaacccaatacccacgaaaatttatgtgagaagaagtctacccaaacctgaaatgtgaagtcccacaatggagaggtgcgcttcacgactccgaaaatggcttcctttcgcgatttggagcagaaatggtgtacaaaggttggagctttgatggagcttcaatggtgaggaagaagaaaggaatagcaacgtgagaaagagagggagaaaagcttctgatattttggggctgagtgaggagagagagagaacgtggctggtgttaaaaggcttcctcttttcttttctttttaaacaaaagatgtgcacatgtcttcttttgagt

SEQ ID NO: 174654 - DNA, 419 bp, Glycine max
  unsure (1)..(419): unsure at all n locations
ntttatgtgaaaggatgtgactcttcacatttgaatttgtttttctacggtcaaaggcactggtaatcgattaccaaaacattgtaatcgattacatcttttttgaaatcaattggaacattgtaaattcatttgaaaactttttcaaattcattttgctactggtaatcaattacaataatctggtaatcgggtaccagagagtaaaaactctttggtaaacatgttttgagaaaaatccatgtgctactcagtttttgaaaaaaccttttcatacttatcttgattaagccttctcttgattcttgaatcttgatcttgattcttggaagctcgatccttgaatcttgattctagattcttgaaatcaacatttctcttgaatcttgtagcgttcttgactctatacttgacatctt

SEQ ID NO: 174655 - DNA, 398 bp, Glycine max
  unsure (1)..(398): unsure at all n locations
agcttccacgtgtatgttccatcttcattttgttggangggcttacacatgtccagtgcccatgaagtcgccatgggagcttgcgttttgcatgcattttgcatgcagaccacgtagaaaacaacaccatggcagaaattgttcaaaaacgaccccatttggggaataagttngcaaaaggacctcaaatggggaaatttgccactatattcagtgaataggcgtcttgtatgaaaagataagtgtggactatgaacaggtttgtaaacttactattaaaaatgaaaatcatgtgagtaatgatgtgtgaaacaagtcgaaatgggttgatttcctattagggcctgaagtattaagatattcttacttaacctgctatgtgtttaggggtctttgaa

SEQ ID NO: 174656 - DNA, 441 bp, Glycine max
acacaagaaactcagctggagaggagcttaatggagtaagaaattggattatttagagaggggggagcacaaaattgaaggaataaaaagcgagagaagttgaactttgagttgtgtctcgcaagactctcattcatcaaagttacaacaagtgttacacatgcttctatttatagactaggtagcttccttgagaagctttcttgagaaaactttcttgagaagcttctttgagaaatattccttgagaagttagagcttagctacacacacccctctcataactaagctcacctccttgagaaagtttcttaagaagattcctaaagaagctagagcttagctacacatacctctctaatagctaagctcacctccttgagatgagaagctatgagctagctacacaccccctattatagctaagctcacccccatgac

SEQ ID NO: 174657 - DNA, 405 bp, Glycine max
  unsure (1)..(405): unsure at all n locations
acccggatccctaagtcacctgcggcatgcaacttncgcctttatgtgctatcctattaagagacgaacatctcgcttagcaagctgatctcgtgcttagcgtgcggccttgatccttgtgctcttccaaattcctttgtcacgctaagcgcgctaaagttgcgcttagcaatggatgcacgttgagcccaaatggtccgcttagcgcgactgttccttttagcacttcaagattttagcctcttttgacttgaaattgaacagatttcatcattaaatcaaatggaaaatattctagagacaactataacaataaaacaagatttatttacaaatccctacaaataactataaattggggaaactatacaagttttgaaaatggtttctatcaaaagttatcgg

SEQ ID NO: 174658 - DNA, 392 bp, Glycine max
  unsure (1)..(392): unsure at all n locations
ntttcttaagcntttgctacaatctttttctcctcctttggcaacatcaaaaagccaaagaactcggaaatcaactcagttataacaatggagtagcaagatataagtatcagagtattaaatacaataagccaaactcataatcaagaaataatcaaaccagaattcaaataacataaaatgtcaacaaccacaaaatatccaagactgaaatttaaaaacacaagataaataagcaaagtacttagcataataatgtaaattctaagaaactaaaagccaaaatacacggcttataaaagataaataatcagaatctaaaagctaagaagacggaggaggtggtggaagatcgaaactctgacgaatgtatccgacatcctctgcaagct

SEQ ID NO: 174659 - DNA, 378 bp, Glycine max
  unsure (1)..(378): unsure at all n locations
agcttatagaattactngaaattcaatttttgatcatacttaataatgattccttagcacaagcactacgtaattttttatcatactgctaattctatttgaagcatttctttctatgtgagacgatgccgcaagcagagctggaaatgaggtaagactttctagagatagccttcctaactaaatcttttgatgggatcttctttagctgaacctgagttcgattaaagttggcctgcacctaagaataaccatttttgacctctcccattgttcgagctacttcgtaacctctccttcaaggatagaagctagaagcagatagcagccatatggataggtattcaatcgcttgctttaaaaggtatgagattgctt

SEQ ID NO: 174660 - DNA, 440 bp, Glycine max
agtgaagaaattcacccgttgggagacaacatacactttgactatgttcctattcataaacattcattgtctttgtgttaaaaactctgtataaatgtctatataactccgcaaaataactggattatcttaagagaaatgactaagggctaagattgtatatttgtttgtgagacaattaagagccggtcattgtgcacacaaacaacaaatgtgtttgatttatataagggctaataagattgtatattcgtgtgtaagaagattaaaagctagccattgtacaaacaaacaacaaattcatttgatttatatagagtcaacagtggctttgtaggacaaaaatatcgagttctaacaaagatggggtacagtgtgtcttgtgtagtaaagtgtggtcgtgacaaaatactcataactatgaaagagttattgaaact

SEQ ID NO: 174661 - DNA, 428 bp, Glycine max
agcttattgctgatacttaggccatcccatttagtggatgcttcatgcaaattctgaaacaaaagttaaagaatgtaaaggcggcttttaaactctggaacaaaaatgtttttggtaacgtacatcataacccaacctaagatataaaaaaaaaatgtcagatattcaactccaaatatagtagaatgggttctctgaagatatgcataacatagaggagaaagctcaatcatagttacaacttgctttttcctttgaagaagcattctataaagaaacatgccttctaaaatggttttctcaaggggatcgcaatactaccttcttccactgagtcactaaacaaaggcatgcaatcaaccaaatcaaccttctcaaggatggtggccgaatcctcgattccatatatcaaatctaggaacatgcca

SEQ ID NO: 174662 - DNA, 452 bp, Glycine max
  unsure (1)..(452): unsure at all n locations
tacatttaagcatatatctgctntatctcctaactcatacacttacttgtgcatcaaagtcttttggtttgcagatcccccctcctgtcctcttaacaaaggtgcctttcgaaactgatgtgtgaagtccgagagtccaccttagccacgtccaccccgacatgtgtcagctccggattttgataagtataattatattgttgaaatatttaattcgcatgttatttatagatattatgttattatttttatatgaagtggactcgtacgagtctacaagttgagtttactagtcgagtttatagaattttcacgagtctacgtaaactctcgagtttgataaccttgactctttatgagattgtcactattattcaaaggcaagttgatgttattgttggtggggtttttttttttttttttggcattgtagtgctaatgtaataatcact

SEQ ID NO: 174663 - DNA, 380 bp, Glycine max
ctccttaaacctccattaattttttgctttaccttctcttccattgttttttattcattttttctccatgtatctcctcaaatgtcttgtgctaaatgttgttaacatgattctttagagttttcaccgattaaacttgctatagaagctagattttattttctatggttcaaatttcttgttcttgttcttgaaccatgaattgtgttgagtttaggttcctttgagttttgtcttgttattttttgtggctgaaacctaaaccataaaattcttacaaaaatatttaagtagaagaaaacctcaaaaatctagagtgactctgtcacctcattgtagtttgtcataaaagtaatgtctagtcatgaaacttgtcacat

SEQ ID NO: 174664 - DNA, 469 bp, Glycine max
tgaaatgaggaagtgtagaagggtgaaacttcctgcttttattcgttgtccacagagtggtacctggagatatgtcgcgggggtcaggagaccttggggatgtcaggtggggtgctattgcccaaaaccaagcttgaccaatcccgacccaacccgggcatagttagtcagtgagaacctgtgatgtacctaagcaggcgagctcctggcagtcaatagataaaaggaactaagaccacaaagcaaggaggcttgtgtggtggctggccagctgtgaactttgagtgttacatgggatatggcctctggtaatcgattaccaagggtgggtaatcgattacaaggcttaaaagtgaagacaggaagctaagatggtctctggtaatcgattaccaatggagtgtaatcgattaccacgcttgaaaacgaggtcaggaagctaggagggcttctagtaatcgattaccaa

SEQ ID NO: 174665 - DNA, 463 bp, Glycine max
  unsure (1)..(463): unsure at all n locations
tcaagagctggcaaggtagagaatgtacttccttatattatatctatgtcttattntatatttctgctcatagtgtcatatcctatgaagtgtgttacattcaaattatatatgtacctaacagtgcaggtatttcatccatcaattcactatcatggtgaaaaagactattttattttttttattagtgtgagcgcaattttcataaattattttgtactgtgtacaagcatatgtataaagcttgaatgaatagttcagcttatacgtaaatatatttaggctcctgcccatgatctcaatagaaacctttctttaatcctttagaatcagagtaacatttgttggatgatttccagaattaattaaattcaactgcatttcttacttactactagtggccagtcagtcaatggaaccacaaaatatacgtctcagtggtttatctactattatgtgttct

SEQ ID NO: 174666 - DNA, 427 bp, Glycine max
  unsure (1)..(427): unsure at all n locations
catgcaatctcgatatacctcgctttgttttgttgtgtatccgctcgggngggatctgtacaaatcactcaactcttccaatatcacaacactccggaagaagatagaatcaccgtggcttgtctgtatctcgacgacgccgccttaagctggtaccaatggatgttcagcaatggtctcatcacaatatggaacgcctatctcgaagctctagaatcccgatttgcacctacgtgttatgatgatccaaaaggtgctctgttcaagttaatgcaaagaggcactgttaatgaatttttgaccgaagtcgaacggttagcgaattgcgtgataggcctccctactacattccttctgagctgtttcagtctaaggttaaaccctgatattcgacgagaagtccttgtttaaacctatttctctctta

SEQ ID NO: 174667 - DNA, 376 bp, Glycine max
aaactcaagctgtcggattatcggaggctcttgattaagtctgttgctgtgtgcgaagttagagcataacccaatcccctatttggtaattaacgtcacagtgtcgagtatctgcgtgttgattcattatagcctgagccttgatcagcttcttttagatgtagctgaagatgacttccctatgggccaatattgcatcgacgacagcaacgtgtgaagttcctattccgggaaattaaaaggcttatggacaaacattatttcatatggggtagtgtcggtgccgacattccacgaggtattatacgaacactcgacccaaaggagtcatttgtgttatgtccccggtcatcggagaacagaagtgcacaatact

SEQ ID NO: 174668 - DNA, 406 bp, Glycine max
agcttcttagtttcagatgatgcagatgtgtttgtatctacctcatgcactcctctaatgactatggcatcatttctggcactaaactgctgggagttggaggccatcttctcaattaaatttttggcttcagcaggagtcatgtctccaagggctccaccactggcagcatctatcatacttctctccatattactgagtccttcataaaaatattggagaagaagctgttctgaaatctgatggcgggggcaactggcacatagattcttaaatctctcccagtactcatacaggctctctccactgagttgtctaatacctgagatatccttcctgatggctggggtcctggaagcacggaaaattttttctacaatactctcttaagggcatcccaactcgt

SEQ ID NO: 174669 - DNA, 419 bp, Glycine max
  unsure (1)..(419): unsure at all n locations
ntgtggatttagttttcgctggcaaaatgatcgaagtgtgtcttataagaggcaaatttgatcatcctgctttaacaaataaaaagcctgtggcaaatagagaggatgagaaggaggaaggaacccatgctgtgactaccgttcctacatggccaaatctcccaccagctcaacaatgtcattactcagccaatatcagcccttctaattaccaccacacaatcaaccacaaatgccacccctaaatcagccacgaagcccgcctactgcacattcagtaccaaacgccacccttaatactaaccaaaacaccaagcagggaaggaatgttccagaaaataagcctgcagaattcaccccaatttcaaatgccatatgctgacttgctccctatctgctcgacaatgcaatggtagtta

SEQ ID NO: 174670 - DNA, 391 bp, Glycine max
  unsure (1)..(391): unsure at all n locations
agcttccaatttccaggcattgtttgcttatgtgtaacntcgnnagaggcagagtatagacacattaaatgctctctttgtaagacactttactgagattattatctttaagattttggaataaatgcataatatttatttattaaattttttccaaaagtattcttagtaatatacaaatttaaacagtattctagacagtactgtttggatcacattattgtgtattatggaaagtacattatggaatgatgtttaaattttttgtattctggaaactactttctagagtataaaaattaaaatagtattttggaatgtatttttctggaatgatagtgaatatttgatagtatggggattgtacttaaaaaaaaaagcgacgtatata

SEQ ID NO: 174671 - DNA, 468 bp, Glycine max
gacactataaaactcaacttgagctcgtactactgcccatagagcttctcgacttgatctactccattcttctttttggactttatgtttcctactctaacacttcaaccgtggtcaggttgacatctttcacctcatcatactctttcctgaccctagtgattgtcgtctttagcttcactttcaccactcttgtgtgttttagctctactttcaaaacttgcacttcttcattttcctcaagaatttcagcctttgttccacttagactttttaactttgggagccaagttatcccttgcattctagacttcaaccacttgtgatagccgccgatgtcaccattgctacttcctttaagctccttatctatccttcccactctattccacgctttacgaatattctgaagtatcttcagactagcttcattgaagcctcgcatgatgaatagcatgatgacttcct

SEQ ID NO: 174672 - DNA, 162 bp, Glycine max
caaaacaaaccccaaaaatgcctcctgccccgccccacacaagccgctagatcctccgctatcctaaaccaagccagcggggcggcaacgccacgcaaaactatagcgccacaaacttagcatgaaaggaccagccggacatcaggagcacgacaacccatt

SEQ ID NO: 174673 - DNA, 464 bp, Glycine max
ggacacaagaaactaagctgaaatgaacaagtaccctatatcacagattggttcatgctcccgcaccgaggcagtgattataagatctacggtatttattattagcaaaggcaaacacctaaatatcccgtacatagggacataaactaacattaattagatttgaaattgaaattaatacatttaatttaattaatagcgtatcctaaatgccaaggaagatgcttcaagtgcggctgcaatctcaggttttagaaacaaagtacgaggttcgaagagtgtccatgactccatgtcttctggtctctcccaacaatcgtgatcggcattgggattgccaacttgcgccacaactacattacgatatattgtggctataatgaaataaatacttctccaccggattgcttcccatgcattatgcaactctgaacccatcagatcttcacatctaagacactcaa

SEQ ID NO: 174674 - DNA, 311 bp, Glycine max
ctgcagcttatgaaaaaggtttctaattttttgaacaacgacaacttttcttaaaaaggcttaacgcttgccatatgctctggtttgatttcaatgtcacttagacaaccaatttcgcttttggattcccattgaagctcaatatcagtaatttgatatcatagccagaggaccaattcaacaatattgattaaagacactatacacattgttccaagaaccaatacccattgtcaattgaatgaaacaatccgctaagacatcacaaaggtttcaataaaaattctcatatatattaaaggcttgcttcc

SEQ ID NO: 174675 - DNA, 459 bp, Glycine max
  unsure (1)..(459): unsure at all n locations
tccttggggccatttcctgtgaaagccattatttggaatttagttntacaagataatgcttatcttaacgcaaaaaatgtcatgctaatccctctgattttagaacaaactcatgtaatctatttatgcacacgcgtacatgtggaatatcctaccatttatatcaacatagaggccatccaacacattctaattgtcacacacatatatgaatttgaaaagaacatacattcttacgctcaaggcattgcgtcaaaattcacacctaatttatatcctaaacatttgctattacaaactacctacatatatttgaaatatatatcatacaaatttttattgtttcactcacatttattcatattggcaagctatntacattatgcacacacttgcattcaaaagggaatttcgtgctatcatacattcatttangaagcgacctcaatattcattcac

SEQ ID NO: 174676 - DNA, 339 bp, Glycine max
agcttccacagcatctacaagcgataagttcttctcactcttctgagatgcaggtagggggatgccttacatgtagaggaatacatgatcctggacaatgcacgatccaagaagaccctcccagggaagtcaactacatgggtataccaaatcgccacggattccaaggttacaaccaaggaggtccgtctggattcaatcaaggatcaaccggatttaatagtggcccatctggattcaaccaaggaaggaactttacacaaggctcaagttggaggaatcacccatggaatcaatacaacaaggagcaacatagtctgcctgcccaaatctcaacca

SEQ ID NO: 174677 - DNA, 451 bp, Glycine max
taggatacctcagcttcaagcttattggacactgttttatatgcaagcaggtcagcacttgaatctgctaaaatttgaactcttctccgaatttccaccgtgatagcatcaccataatccccactgttagaaacaaaatatcaagaaatgtgacactaaaaaatatataatatctatcagtgctgagaacagcagcaaaactttatcaaaccccaacctttctaaaatgtaaacgatcctatgcaggaaaaagcttatataggtaaaagcacaagatggaccttgaaattcatttcatacaactttctgataccattccctttaagaacaagaaagatttgacaaaaataaccaatgcaaagctaaatacacgacctgtgaagcacaacatttaataatcatggatatcatctcgattgttagtcaataaatgggctacataatagataca

SEQ ID NO: 174678 - DNA, 355 bp, Glycine max
  unsure (1)..(355): unsure at all n locations
agcttatacgcatatctttttactagcgttcacttgcacaagacattcttataactaagaaaaatgcacccatatacaatcaaggcaccttcgttacctagattatttatatgtacttccaaggtgtatttgttacctacatcacacgcatttcctttgctaaatttacatacatgcatactcaaagcactttggctatcaaaaatagcatatgtgcacattctggtatttctaatacctatacatacacaaactttatgatgaatcttgactatctacacaataaggtggctacattcatgctnttttcaagtgtttttactacctaaagccgcatgcaaattcaagtatattt

SEQ ID NO: 174679 - DNA, 450 bp, Glycine max
  unsure (1)..(450): unsure at all n locations
tcaaaccacaacaacacanaatctatgtgtcaattacttctcaatttaatggattttctaggcttgagaagtgaaatttagaatgaggtaaatttgaagcaaactctcacctcacagaagtccataacatcaatctaaacttgctcaaactctatttacacctaaaattccaccgaatcaaaatttgactcctcaacacacaattttgccctagaaatggctcttggttcactttggtcatttgtttttctccctagcacagtccaagctttctcataagtcctaaatgacatttcaagctagaattaactcactttaacctccatttaccacagaatccagaattaaccttccaactctcaaagcctcactctttttccactcataacaccacattctcactttctaaccctaggttaattctaccctgcatctctaacaagttttcat

SEQ ID NO: 174680 - DNA, 457 bp, Glycine max
acctgaggcatgcagcttgaaggatgcttaatgcaggaatttatagagggagagttatagagaggggggagcatgaaattgaaggaataaaagagggagagaagtggaactttgaagtatgtctcacaagactctcattcatcaaagttacaacaagtgttacacatgcttctatttatagactaggtagcttccttgagaagctttcttgagaaaacttccttgagaagcttctttgagaaaacttccttgaaaagctagagcttagctacacacacccctctaataactaagctcacctccttgagaagcttccttgagaagattcctaaagaagctagagcttagctacacacaccccatataatagctaagttgaccccatgccaaaatacatgaaaatataaaaaaatagtccctattacaaagactacttataatgccctgaaatacaagg

SEQ ID NO: 174681 - DNA, 465 bp, Glycine max
  unsure (1)..(465): unsure at all n locations
taagctctntcaactgcacaaggctcttaatatttgaagtgtatccttgtggtttcttcacccgatgaagacactgacaaaaacttatcttctcctttttggacaaagtatgacaagttgggggcaagtaaattatcttcccatcagaccttggatgcaactgtgatcgtatccacatctctgctagattttgacgagtattcaagccatccttcgtcttgccctaaatgttaaggagcgttccaatcacactgtcacatacatttttctcgacatgcataacatcaatacaatgtctaacatctagatcagaccactacggatgatcaaagaaagttgacctcttcttccatatgcaagtctgactcttatacttctatggggtctttccaaatacagtattcacgtgttgaacccgctggtatacctgctcactagtcaacggtgtcagcacaatattgtgct

SEQ ID NO: 174682 - DNA, 413 bp, Glycine max
agcttgcctaattaacctaaaattgagaattattgattattaaacacacacaatgaaaatactaagtatttattacctatacttaacagaaaatacttataaccttacaaaataaccataaattgggagagtttgatacaatttatacaagttttatacacaaaagttagtcgtcttcaccgactagcactaagccagatagtccgccaaggcacttccttttatatccttttgagtgacatagacaatgtcaaactcagatagcaggacctgccatcggccgatccatcttgtaagagcgggtttctaaaaaatgtacttgacagggtccatcttggataccaaccaagtagtatggcttaacatatactgccttagacgatgggatgctcataccaaggcataataacgtc

SEQ ID NO: 174683 - DNA, 435 bp, Glycine max
  unsure (1)..(435): unsure at all n locations
nntgcggattggtcttcgctagcaaaaggatcgatgttttccgaaatttgcaaatttaatcatcctgcttggacgaatgagaaaactagggcaaatgaagagggtgagaatgagagagaaacccatgctgtgactgccattcctatacgaccaagtttcccaccaacccaacaatgtcattactcagccaataacaacccatcttcttacccaccacccagttatccacaaaggccatctctaaatcaaccataaaacccacctaccacacaaccaatgctaaacaccacttttagcacgaaccaaaacaccaaccaagaaggaattntgcagcaaaaagcctatagaattcaccccaattctggggtcctatgctaacttgctcccttatctacttgataatgcaatggaatcataacccctgctaggtttctc

SEQ ID NO: 174684 - DNA, 172 bp, Glycine max
cacgagagcatgagtggacaatagactttctctcccgttaacgggcaaggcaccaaaatgagtcatactcttgctaatgctgggggggggcaatcctaatcctctgacattcgggattttccttccacttaaataactcatgcctcaataacgataacctaggaagagtctt

SEQ ID NO: 174685 - DNA, 428 bp, Glycine max
aagcttctacaagaagagataaccaagaggaagaaggatggaattctcatcaattgcatggaaggggaaaaccatgatgagccgaattggagccctttgaaaaatattgaactgctcgcttaacagcaattaagcttagtgcgagtgtctatcttaacacctgcgcttagcgcgagctatctagctgagcccaattccaacccaaggaaaaactggacttagcgcaagatgtctggcttaacgcaaaccttcagcgtgaatttactaaaattagtatctcttgtttatttgtgtaaagggctagagcatgatgtaaatatgacctatgaaaggctggcagaactactcaagcctattatataaatacttagaaactattaatcatgaaatatacccgtgactagagagagtctaccctcttcttgatt

SEQ ID NO: 174686 - DNA, 434 bp, Glycine max
  unsure (1)..(434): unsure at all n locations
agctngcatctttcatctactggacttattgttcaagatagaagtttaactttcccatcatagacatctcaaattctatctacatacaacttgaaaattccttacacaaagtttcattagtagaactaaatataatattatcaacatatatttgaacaattaacaactcattgtttactttcttaataaacaatgtttaatcaacttggtctctagtgaaagattgctcaagtagaaaactgctcaatctatcaaaccatgaccttggttcttctttcaaaccatactttttcagtctatagacatgggtaggatgttagtagtccacaaaacctggtggatgatctacataaacttcttcttcaatgagaccattaaggaagaaacacttcacatccacctgaaaaagtctaaaatccatgatacatgcaaat

SEQ ID NO: 174687 - DNA, 478 bp, Glycine max
ggactacccaaactcaagctggttagtggttaattcatctcccctctatgttattgttgtccttgtcaacagtcatatgaaagatagatatatttagacatttattgaattggtctttgctacaagggagattgatgaaatgggcaacaaaattaagtgccttttaaagaatttatgttcctttgcatgcggttaaaagtaaggtatgagctgattttttggctgaacattgatgtgtagaaattgaggatgttgtttttgaaatgaataactatattggtttacaaccttgtgttttaatgtttaatggatctaatacaagggatgacactagagtaggaattaacgttacagatccctaaggaaaggtgtatcgattggttaactggattgcagcaaattcaaccaataatcaagtcgaatatgaagcattaattaccatgggagctcaatatgtacacatactatgagattctca

SEQ ID NO: 174688 - DNA, 427 bp, Glycine max
  unsure (1)..(427): unsure at all n locations
agctttctcgcgctaagcgcaaagaccctttattgattgtttgaatgattcanctaagcgcacatcgctgcgctaagcccaacatcttcactgtaagttgtaccttaagcagtgggcttaacgtggatgatgcgctaagcgccacttcctctttgtgaaaatttatcatagtcgtgctaagcacgccatcctgtgctaagccccagattcattctgtaagttgagttttcaagctgggcttagcgggaaaggatacgctaagcgtcaacatcattctattttgaaatcattggaagtgcgcttagcgcaagtagtggcgctaagcctgaatcactcactgtaagatgaagcttgatgtacgctaagcctcgcatctcaggctaagcgcatgttgcagaaagatttttggtgttgcagaaagcgctaa

SEQ ID NO: 174689 - DNA, 400 bp, Glycine max
aaacatgcagaatctactgagaatttattaccatatatgtgtaatcgattacgcagggcaaattctgaatacaaattttaatagctgttgtgaatcaggttgggccactggtaatcgaatacatcctctggtaatcgataccagaagtaattctggtaaagattttactaaatttgtggcaaaccttttgctacttcaactggaattcccttcctatattaatataccctttctaagactctatagacggtcttgatcatccatcttgaatatctttaattgctctggcttgaataaagctttgagacgcatgtgatcttttggcatcatcgaaacatcggcttgatcctatgtctacatagaagtggacccctaacaggtgaaggccatacttgagatg

SEQ ID NO: 174690 - DNA, 455 bp, Glycine max
  unsure (1)..(455): unsure at all n locations
accctgaggcacctgcgcgcgtgcaagctcttggatgaaaagcattcttctatttattatatagctgccgacaaaagctatcacttgaagatgaaagcatctaggttcattttcagtgaaataagccaaaagtttcccatcatgcccttctctgcaaggttagcttgatatgataatctaaatgtttccacactttgtttaacctgaaagttttgaatttgggttctctttgctgcacattaaatcttatctgtttcataatacggctttggaagagaaaagaactcgtttgggcttaactggaatgtgtgaatcatgagctcctgcaaccttatcctggtctgcatgaaaagccctgtaatatatttgctttgggactttatgtacacccccattggcatattttntacactcgacatgtctcacattcttgggtatttttaagggattatgtg

SEQ ID NO: 174691 - DNA, 434 bp, Glycine max
  unsure (1)..(434): unsure at all n locations
tactgttttagtttctcaaactagattgtctagcatattagtctacttcgattagngaaacagaattgtgagtgttgtaaagtcgctcatattatcttcaattcttaccgatcaaatgaaaaactaaagggtatgtctttttgtctcctaaataaaaatttatatttttttattccttaaaatcaaaaactgttctttttaattccttttcccaaacaaaattttgcatttttttagtcagggagtgaggtatgctttntgggaaggtgcaaagaagatatgacgtatgcagttatttaataatcttgcttataggttgacctttgtttatgtcgctcagtaaacatagaaataaaaggatctaacagtttcaggtgaaattgtctcaatgatttgtgttagtggttaaatttaatttttttgtggcgttgggg

SEQ ID NO: 174692 - DNA, 394 bp, Glycine max
  unsure (1)..(394): unsure at all n locations
agtcttgtctagaacctttttttggtttagatttacatcaaacaacattattgtaacaacatacttaaaaccaaaacttaatccgcagatccctcttgtaagacaaagattcaattctgtttcattcaagttgtagggcaacaatacatttctcaacgctaaagtcacctaactaggcacacaaatggttgattagaccaagagcatacaaaatttaagcactgaaagaagcattgtacacaagaaacacaatcaattagatattaaaataattacatcnagtgttcattagaaatccccaacatgggtgtttagccagccattacgaaaaaatccctaataataataacgagaatacaaaacctaggtatctctgcaaaagctgctcctcttg

SEQ ID NO: 174693 - DNA, 452 bp, Glycine max
  unsure (1)..(452): unsure at all n locations
taatggcagagcctactattgcttctctctttggcgattctgtttctacctaccctacaacgggcatgcggacataaagcaaaagtgcgtcttctaaaaagaaaacgcgtgagagtcgccaccaacatttatttaatgaaaacgttagaaaaaaccaaagagaggtttgcaagttcagaagttgttttacgcatagggaaggtattagcacccacctacccgccacaaggggcggcagcctttaatcgagtgtgcacaacgtgacttaaaaaattatntatttttacctttttatatttctttatttttagggttgacaaaggggctgcccttgctcctacatatcctcaggtgcgatgaggaattcagacttacgtagttctttaaattgagaaagattgcatatcgagatggtgttatgctcttgaaagatcattctaattacaaacaaa

SEQ ID NO: 174694 - DNA, 379 bp, Glycine max
ttctaggtatgagaagctatttttatttctttagaataacggctccaaaagaggaaaagtggacacttcacccttcctcaacttgatatctagttcaagtatatgtggacgacatcatatatgattctactaatgaatctttgggtgaggatttttcaaggcttatgcatacaaagtctaaaatgagcatgacagaagaattgaagttcttccttggaatttagatcaaacaaacaaaggattatatgtccaccacatcaagtatgcaaaagaacctttgaagaaatttaacatggacaaggttaaggaaatgaatactctgatgcatccaaccacatatcttggactgcatgacgaattgacaaatgtgagccacact

SEQ ID NO: 174695 - DNA, 458 bp, Glycine max
tgcacacaagattctccttgcctggcactttataaccttctggttgggtcatatagatgtcttcctctaaatccccatgcaagaatgcagttataacatttaactgctcaaagtgaagattctctacagctgctatactcagaataactctgatggtagtcatctttacaactggagagaagatctttgtgaaatcaattccttgtttctgctgaaaccctttcaccacaagtctctccttgtatcttcttctaccgtcagattctttctttagcctatagacccacctattctgtaacgctttctttccttctggaaatttagataaagaccacgttgtattcttctgaatggatgtcatctcatctttcatcgctagctcccacttaatagtgtcattcccctgtgtagcctcactgaaacattctggctcaccagcatcgagtaacaacagataa

SEQ ID NO: 174696 - DNA, 385 bp, Glycine max
  unsure (1)..(385): unsure at all n locations
tatagttcaaatcagaagacatnnngtttaatgntgataatctcgnctagagaacngagttcttctttttcatcttatctagttcatcattagaaaaggggcatacttttttaactaacagcttttgtttaagcatttccttgcacccttctttcgaatctttaagagctgagattaaggatttcaccctttcttccaagtcttgaatatccttaagaaactttttgcatccactagataccttttcgtacagtagtgccttgacgtgctcacaaacagaggcatcttatacattactaagagaagtggtttccagacaaactcaactaatgaactgatgaagtcctgagatcctatgcttctttaagatgtaaacttcgttaat

SEQ ID NO: 174697 - DNA, 420 bp, Glycine max
agcttgatcacattctgcgacttttaactatttcacatttatgatgcatgtgccaaacattcaaaaacaagtgcttgtattcaacctcatctcaaacatagtgagtccattttcgccccacatcggctaggtgactcacaatcaaaataccatctgggcccattctcttcctcacataggctaggtcacccatctcaatggcatctaaccacaactcaatggaacatggtgatcccagctccatgttgggattttggcaagagtaccaaatcgcttaagtaccacaatgataagtaaagtatcttctttcgatggacttgtgcaatcattgggtaattaatagacaaattatacaagaattaagcaatctaggaacccaaattaaagaaaattgcaacaaaataaaagagaaatttgatt

SEQ ID NO: 174698 - DNA, 382 bp, Glycine max
tccttttagtgcgtgacgtttaatatcgagctctatggtggtgcgagcctccgatggtactcggcaggaagtaatggaagaatatcacattcccattcacataggcccccacactcgcaatgtggtgctttaagtaatggatataaatccaccctatagctgccttttgggaagaccgaggattcatgccctgggagtggacccttcgacgctctactagaaaatgaaattcacaaagggtggacttttactcatagtgtccggtgaagaggacatgttaatgagctgccccttctccgcaccatacgtagaagcggcggaagaatcattggaaacggctttccaatactttgaagtggagagctacgcctctatggaacca

SEQ ID NO: 174699 - DNA, 343 bp, Glycine max
agcttaaagatcctacctccatagaagctttctaagcaagcttccatcaaaatcttcttctcatcaacctcttcatttcttcccaactatccaccaagggttcttcatatcttgccctttttcctttgaaattggttccaccagatgagagtatagtcagtgaattccatggctaccaccttcatctttttatcctcggtgtaattatggcatgcaaatagttgtttaattttcatttcccactccaaatacgcttttggatcactttttccttgaaaaggggtattttcaactttactccttcaattctatcctctctagaatcaccctcactatttctcca

SEQ ID NO: 174700 - DNA, 443 bp, Glycine max
  unsure (1)..(443): unsure at all n locations
cttgatgatgtcgaaaagaaatcacatgtttgtcatcattaataagggggagaatgtgaatgtatgtatacatgattttgatgatgccaaagaagaatcaaacaaggctgcttcaaatgataagcatttgcttcaagaataattcaagattgcttcaacaaacaaagccttgtttcaagatttacaaaagaccaagccttgccttaaaacaaagtgctttcaagacaggcaaggctatggtaatcgattaccaggaagtgtaatcgattaccagaagatatggttgagaaatagctgttgaaaaaggttttgaatttgaatttttaacatgtaatcgattaccatatgtctgtaatcgattaccagcaacgaaactttggaaatccaaattaanaatcataacccttcaatttaactgtgaatcgatacacaaacattatatc

SEQ ID NO: 174701 - DNA, 331 bp, Glycine max
  unsure (1)..(331): unsure at all n locations
agcttttatcctatttcctacagttaatttgtgagtcccatccaggtagttccaaagaacaccggcctcaccgtgataaaaaatgagaaggaggagctgattcctactcgggtgcagaacagttggagagtatgcatcaactataggaggctgaaccaggttaccaaaaaggaccattttccactgccattcattgaccacatgcttgaacgcctggcaagtaaatctcactactggttccttgatggtntttctggttatttgcatatcactattactcctgaggataaggaaaagaccacattcacctgcctcttctgcacttttacct

SEQ ID NO: 174702 - DNA, 382 bp, Glycine max
tgaacaaagaccctgaggggtcctcatactgacttgtttcaaaacgattttgcagtgcctgtagaaatacaggccaggaggtgaattgtccgttgcttgacatccactggaaccaagcaagggctcttccctccatgtaaaatgctgcaatggtgatgcggtcgtgatccggggtaccgtggtactcaaagaactgggtgattttaaaaatccacccaagaggatccgtaccatcaaatctcggtacatctaacttcattctatgtgaatgtgcaggtatcgggctaccatgtggaaaggaaggggaagcagatggggtaacgtgttgcagaaagtcctctatgcgtgaagttagtctggctaaagcatgctcgacacgatc

SEQ ID NO: 174703 - DNA, 421 bp, Glycine max
  unsure (1)..(421): unsure at all n locations
agcttgcttctatagagtatgagccaacttatgttaatgttactttcatcaacgncgcagggtcactctcacccacatggattgcccttctacttataatcattacagctttacactcctccttgggatttttctctgtattacctataaaactgcttgatgatctatccgccaattgctatgcaagctatcccacttggacctccatattttttatggccgactctatgctcttctggttggacataaaaacccgcatgaatataacctagagtctcttccagcttcgttgtgcgatcatatacactacgcctttattggtgtggacttgtggatggtccacctaagaccccactaaatagattcctaggcgggatcctccattgtccctcgatgtgactgtattgcctgccatgtggga

SEQ ID NO: 174704 - DNA, 465 bp, Glycine max
aactcaagcttagaacaatacttcattctgaattgactcattgggaacttatttactttcttttttattttcaacccacccttcttgcggtatctatgacacttcactatatctacctttgaatcaatttagcaagttgaactttggagtggatgataaaacactcacatccgagaggatgaaagaatgaaatattgcgtcttccttggtgtagagtctttctgatcaaagggttgatcaatattatgttttttaacataccaacctgcatgtgtctatttctcctttccataagtgctccacgagaggactttcatatagcatgggcatatgcatatcttgtagagatattattttactatcaactaccccattatagtgaagcgttctcggagaataagagcatgggctaatatcatatattgcacgtattgatcctaactcaacaattctaactcatcacat

SEQ ID NO: 174705 - DNA, 377 bp, Glycine max
aaaaaaacgtttccgatcattaattgaatgacccgacatgctaaaacaatgactgagactgtgaatgggtaactggtccctcatgcccctagacagacacgtaaaccacaacaagagatggttgggtgatagcaacgttaaccgacactaccctttaacgaagagggccccaagaacataccatgagagggttgcctatattctgtcctgaatccaaccacagctggagtactaaagaaaatctcacatttacactcttgggtggaaatatacactactaatctccaaacaccgtgtatgacgaggaaactcacttatggtacataccaaagcaacatttgaaaactcctagcctaatgataacagttgaaaattta

SEQ ID NO: 174706 - DNA, 403 bp, Glycine max
aagcttgtatatagctgaaaactatggcaaggcgcgcacgcttacaccatatcactattgcgccacggcgataccatggtggttgacgaccgattcaacgacgttatgcaccctaatagagtcatcactacatcatgattccaatagcaacttattattaataatgaggatacggcgatagcatgctgttggtgctaaacctatatccagttatcttttcccaacattgatgtccataagcttggacattacaagggaaatcaccgccgtgaatggactacacacataaactttagaatctatatatccaacggtctaactttgactaaaataggttgggaacacatgccgacgctcgatgtttttaaaccgaaatagtgacaaaaataccttaaacttgtta

SEQ ID NO: 174707 - DNA, 378 bp, Glycine max
caaccacctgatgcatgcagcttaagtgcagcagaacgccgtctttttatcttattgttaaagactaggactttatccaaagacacatggccactctatattatggatctgagggttgagatgttggattagaacggttgtcaaggaagggatactgaaaaaaaggagagttgctccaatgcacaagaggttgcagtgttttatgacgaagattggtctgataaggatactcctatctatgggacacaatcaaggtgggatgaaagccttgactctcttaaagatttgtcccctacaacatatacaaaggtgaaatatttgttctaatttcatcttctgctacacacattgtatttataataaccataacacttctca

SEQ ID NO: 174708 - DNA, 412 bp, Glycine max
  unsure (1)..(412): unsure at all n locations
aagcttaataaggccatctatggtcttaaacatgcccctagagtttggttngtttaactcaaggggcacttctgaagtttgaatgtaagtccagcaagtgtgatccctctctatttgtctactccaaggggtcctcaacaacctatatgcttgtttatgtagatgatatcatcataacagggaataatccttccttaatcaagcaactcatctctaagctaaatacttttttctttcttaaagatcttggttctctatactatttcttgggaatcgaggtaaaacatcaatctgatggatctattgttctcactcaaggaaaatacattagagacttgctggcctaaactaatatgatcaaagctaaaccttttttttacctatggctactggatgtaatcttacttaaagt

SEQ ID NO: 174709 - DNA, 453 bp, Glycine max
  unsure (1)..(453): unsure at all n locations
gacctgcggcatgcaagcttgtgatgaacttagntgtatnggttttattatgttcttgttgnctagaatatttgattataatttatttaaaatttatttgatgcttttattggtaagaaaatatataattgacttcactaaacgaggcataatctgatcaaggttaacataaaaataaaattaatctttgtcccattataattgacttcttagattattttacacaaataaagaaaaaataataaataaataaaagagagtaatatttttataaaattaatcttatatatgtcctcattaatttatttataaattctttattaatattatatgaaatataagtaaaaataaataaatcaatattacattaaaaaattaaaatgataactatcttaatatttttttctctcatacgattattataataagagagaagtatatgtngacataaat

SEQ ID NO: 174710 - DNA, 466 bp, Glycine max
tagctgaaaggagtttgttgtaatttctaaaagagtggttaaatttgttcgttatagaagataatttgattaatattttaaaaattcagataaaaaaactcagaagataagcacatcaaattttgagtcatggctaaaatcatgagattttggataaaattagttgaaaacatgaaaatcacatgatctaggaagtggttcctaaaaaatcgaaactaggggaatgcaccttacttctgtttagccaaaataccaataaactagtcaaaattagttgaaaatgaaggaatcatgtacaaacgtgggtaaacacgatttaggtttaattaggttggattttaccgtataaatagttgtttctgaaacatttataaggactttcaatataaaaaaaacaactaacctaaccacaaacagagtgttctcattctatccatttgtgctctagtaagactattatgcatga

SEQ ID NO: 174711 - DNA, 417 bp, Glycine max
  unsure (1)..(417): unsure at all n locations
agctacaaggggtttgtgattcataggtgttttgangataacaatgatgacaacaaaagatgatgacaaatgtgatgaacaaaaagctcaaagatcaaagaacaactcaaagtgaatcaaagaacatctcaagtgaatcaagaacaagtcaagagttcaagaatcaagaagaattcaagactcaagaagaaagcctagaatcaagaatcaagattcaagatctcaagaatcaagatcaagattcaagactcangattcaagaatgaagaaaagacccaatcaagataagtattaaaaagttttttcaaaactttgaatagcacatgagtttttgacaaaacctttaccaaagaagttttactctctggtaatcgattaccatattgttgtaatgattaccagtaccaaaatgagttt

SEQ ID NO: 174712 - DNA, 427 bp, Glycine max
tgcaacccagctcgcccaggcgatcaagggtgcttccttcataacaacagccttctggaggaatcttctggagggcccaagtgggcctggttgctatttgcacccccatttttactaaatacaccccctgccttttttttggtgattcttttttcgtaaagttacggaaacttacgaatttcgtaaggatacttgttttctttccgtaatgttacgaaaccttgcggattacataatcatccccttttttgacttacggaatgttacgaaacctcactatttgtgcaacgatgcattcttttgatttccggtgtgtcacggaaccttaccgattgtgcatctatattttcttctgatttccggcacgtcacgaaatttcacacattggcttatgatgggtgcctagcaccttaaaatgaccaaacac

SEQ ID NO: 174713 - DNA, 178 bp, Glycine max
aaagggggccattggataaaggaaagacttaggttctatagactatttaagtcaacggtcctgttatttactgactcctgaaactttgaaaactcgaactttgaaaactcttgagtgatattcccccctatacaccactctgaaatctaaaattaaactagttctcctctttatctac

SEQ ID NO: 174714 - DNA, 427 bp, Glycine max
  unsure (1)..(427): unsure at all n locations
tgatctngattcttgagatcttgaattctttngattttatcttgaactctcgaatagcgcttgattgctctttgatgtacttgagttgttctttgattgatctttgagctttctgtcatcacctttgtcatcatatgttatcatcatcattgctatcatcaaaacacctttgaatcacctttgattcaccatgaagctttgcttctacagtaatcaattacaacaatctggtaatcgattaccagagagtaaaaactcttgggtaaacatgttttgagaaaaatccatgtgctactcagttattgaataaacactttcatacttatcttgattaagtcttctcttgattcttgaatcttgagtcttgaatctgatcttgattctggaagctcgtccttgatttgatcttgaatcaacatcctttgaa

SEQ ID NO: 174715 - DNA, 435 bp, Glycine max
  unsure (1)..(435): unsure at all n locations
catgcaagcttctagcgtacccgctattggngcnctttattatcccaaaaccaacccctcttattactagctattttgaattctttagttcctgaatgtacaaccttcaaatggttgctcgttcccgtatttggtttttgcaaaaaataaaattaatctgaaacaattcaggctgaattgttatcgttattattactcaaaccataaggaataacagctaaacaagtaatttaaaatgtaacttttaaattatgtggtatttttttaattacaattttacttcaatatctaattttgttaatctacttacgtcggtttttaaatataaatatgaatttaaaggtgatctactgataatataaagtacttgctaatcacaaattatgatacctattcatttacatttaacctaatttataatattaataatttata

SEQ ID NO: 174716 - DNA, 453 bp, Glycine max
  unsure (1)..(453): unsure at all n locations
ggacctatgaatctaagcttgagcatgattagtgaacgaacagcttgatcgacatatattttttgcatgatacgacattcaaaagagaatgaaccatcaaacaattgaccaatcatatcagcattttcattgcaaaccattttgcaggcatcatgatttgaataaatatgctttcggtcatcaaccaaagtgctctcaaaaggtacaccttgattgcctaattttgtatatgaatataataaagactgatcaaccacaatgggaattttatgcacctcagaaaagataacatcatcccgaatcttcagataattataaaagatacggtctaactcaagataagttggcagnttgagagcatcaaatcgatcattcacattttgaaagacttgatacaataaaaaagatctctcttcaaagactataatgtctaatattgggataagaatactc

SEQ ID NO: 174717 - DNA, 168 bp, Glycine max
gaagatggcgggtctattggtttgggtgattgaaggcctgatcttcaaagaaaatcttagcactcttggcccaatgaaagtcccagaggtaataatgtgattcatgtgacggcactattatagaaatgattttcgttcatatgaatataattcatcccattcataact

SEQ ID NO: 174718 - DNA, 385 bp, Glycine max
  unsure (1)..(385): unsure at all n locations
gaatactacgcttaagaagtctgacatccaacggncctttttccngtttgatataatgaggggcagacatgaaagaaacatattattccgccgctagatgaactttagttcaaaaagacttcagagtacccaacattggagagcttatttatgaatatcatatcatagcatatcataactttgtaatcctagagatggaattatatcacctaatttagcctgaattcctgcttgaactaaacgacaggtgaattatctaaattatgtgctataacttgaactatgctaaaaccaacagaaatagtgtctcacgaacgtatctatacatttcacttttgcaagcaagatataagtcatttatgtggatctaatgatcaattgacaa

SEQ ID NO: 174719 - DNA, 446 bp, Glycine max
cctaagaaactaagctttatatgggccttgcatctcaacgaatattttttgactcaaaagaagtagccaaaagttataaaacattcacaatacctgcttctggtccaatctctgattcagaaaaccgttcacgaagaagccatgtcaatccctgtccacattttcaacccctcaattagataactattcacaaaaaactccacaacaaactatgtttcaacacaatgcctccatagacttgaagaaacagaaaacaacaatcacagcaaaacaggtcgctgatttcattttctaagatcactttcactaattatattttcattaacagccacaaaattccaaattgttagaatttacaaatgaaacaacgaaatcaggatcattattgaaaaaagcaaaacaaaatagcacctaatgcaacaaatagagccaaattataaacccac

SEQ ID NO: 174720 - DNA, 361 bp, Glycine max
agctttgagccaatatcatgactcaccatataccttgacccagggtgagaatgccaatccttaccctcggaagcaaaaaacgaagagaaggaaaatttccaatcaaaggaaaaaggagaagggaaatttccaatcaaagaggaagcaaaaaaagggagagaaggaaaatttccaatcaaaggaaaaaagagaggaaaggaaattcccaatcaaagagtgggagaaagtaaaaaaggaagagagaaaaggaaagaaagctcctgatcaaggatcgaaagaaaacaagaaaaatatgcagaaaggtctttggaccagacaatatctgaacatatacagaattgtcaccaaatgaacaaaaaaa

SEQ ID NO: 174721 - DNA, 448 bp, Glycine max
  unsure (1)..(448): unsure at all n locations
ttgaatgaggctgaagaagctgctgctcatgttcaacttgatccggtggagattaatttatctcagcctcatttgtcacaagatagtgacatggagttgatggtaaatatttgtcacaacaaagtagttttatctgaacctaatttgttgcagcactccatttttatatattacaattattcatgtttggcatttacatgtaggtcccagcaactactgttccaccaatagcaaggaataagctagccataacaagagccaaacaaaggaagggtgctgataaagatgatgcagaaaattgaagaagcattttttgttgcattttgaaggttgctgaagacccattttttgttgcgcatcttgaaggttgctgagttngaaaggtgctgatgaagaatactgaagaaagcatttttgtgcattttgaattacgatgtgtagttgtata

SEQ ID NO: 174722 - DNA, 464 bp, Glycine max
  unsure (1)..(464): unsure at all n locations
catccgaggcatgcaagctngtcgnnctcctaatattcacttaattaatntgttctcatgtcccncttcatattcaagtacatagtcttcatcatcatcgtaggccttcttttatcctttttcttagcttttcgaattttatccttgaaaatgatggccaatttggacaaccctaaaacttttatttttttcttgattctctgtaattatttgcattctaagttccttgtacttggaagcttcaacctttgacattattttctccttcttcactatgagggaaggtaacttctttgtgtgggtgcttttggtttggtttagacgcactaggtgcaaggttataggtgagttttttttataattatatttaaacaacttgttgagagaattgatgaattactaagagagtgggtgagagaggttaattaataatggggaagttataactttcttctttatctaat

SEQ ID NO: 174723 - DNA, 365 bp, Glycine max
  unsure (1)..(365): unsure at all n locations
gctattacctctcttcaggtgttctgtagctgtgnnaaaatcgctgcttaaatattgcgtttcccaagccaaattatggcacatgtgtcggtgcaatttgccactccttgcccttctaaaagtcaaagtgccttgtccgtaaatcattggcaagtacacgggtgtgcacctgctaaaggttatttggcgtagtaataattaatcataaacggtttaatgctcacattctgtgtgcaactggatttgacaattgggccatctcatgatcaacaatgcgactgaggtttgtcacttgcttctaattaatgaactgggctgatttgagaattgtgttaaaaatgcaagtgaggatacatcatctaatt

SEQ ID NO: 174724 - DNA, 107 bp, Glycine max
cctgtcccctacctataaactacgtgggccttctgctaccgtaagaaaaatcacagataacgaccctccccgcttgccacagatggtaagatcacgcaatgtaatta

SEQ ID NO: 174725 - DNA, 318 bp, Glycine max
aagaaaatgacaaataacttcaaagtaaaactgggcaaggtggttttggctctgtctacaaaggaaagctacccaatggcgcttctgtggctgtaaaaatattgaatgcatcaaaaaaagatggtgaataatttatgaacgaggttgctaacattaacacaacttctcatattaatgtatgcactcttcttgggttcactttggaaggcccgaagagagttctcatctatgaatttatgcccaatgggtcccttgacaagctcatttatagaaaaagaccctaaaccatagcaccctttgattgggacattatatatg

SEQ ID NO: 174726 - DNA, 422 bp, Glycine max
  unsure (1)..(422): unsure at all n locations
actaagctntgcaacgatctgtgcactctcctgtacatggacatgggtatgatgattatttcaaacttgctgaccaaccgtctgtttgctctgcttcccattaagatggacatcccatttgatatacaacgcactcctttcctcctggacaaacgtgatgtcaacttttggctataatattcctttcttgttaccaagctcttatgctgcctattatgcaatgtatattcaatgaacaattctcattcataatgatgcttaataactctactacacatctatctatattactacacagtgcgagatatagtatactcgatgaaattttcggatccctttaaggacttttatatgagagagtgaaccttgaacacatgatatagtaggtcttctccacatgaagagcttggctgcttaccaat

SEQ ID NO: 174727 - DNA, 438 bp, Glycine max
  unsure (1)..(438): unsure at all n locations
agcttaataatcaagagcggaaatcaaacattgtttaaccactctttattaaagnacataacaatgagaatgcttaacaaccataaggcatatcaaaaaagtttcatgatcaggattgattttggatgaaaaacatgatgtgattatgaagaagttttttgctagttgttattctgttttagtttgttgttgttacagtttggtttgtttttaataagtcctagtctgtaggatttagttgcttttgaattattccaatgaatcatgcagttattcatgagatattctcttgtattttgtttagatttgtaaaggctatataatagcctctttgaattcaataaacatagcaatcagttttgcaagagtttgaataattgcatacctttattatcttcaaactggtatcagagcccccactgggcctgatacatacat

SEQ ID NO: 174728 - DNA, 436 bp, Glycine max
  unsure (1)..(436): unsure at all n locations
ccagctgctaatcgcatcccaaagactagaaggttattattttgtgttaagagagaaacagcccaaacagtaaaaatacagaaaggcatatttccttgatatagaagattaaaacacatggtacagaataatcatgaaaaaaagagagctctcttgctctgatattaattaaaactgataaataagtaaaattacaaaagtcgcattgtgaacttgaatcataatattgtgcaattacacaacatattcaagcaaaagccccagagattatggactgtgaatgatgcttaaaagattaattgcacagatagataatatttaagatacaagaaaaaacattaaatgtaaacactctgtcgatcttcanaaggatcttgctattngttaacaagcagcaggctttcagaatgtagtgttgacattacaatatccacag

SEQ ID NO: 174729 - DNA, 445 bp, Glycine max
  unsure (1)..(445): unsure at all n locations
agcttcggaagaaagtgatgatgtacaagtctctaaaggcagagccttgaagagcccgagtagtcgaagagaagttcaagtccatagcctcaaagtctgaaaagagtatgatgaactaagggacgtcaatatggccaccgctgatgccttggaacgagaaaccaagaaggcccgaaaggaagaacacgtgccagcaaagttttgaggggctntatagggcagcaatagtaagctcaagctccgaagaggtgaaaggaatcatcacgggtcaaaggcatgatcttgaaggacgagctaaaggcttaccttatgtcgaaaagaaatttgtcccaacagttaagcaagactgaagggaatatgtgggccgtcatcgatgagtgcaaagagaagctaaatctagtggcgacttacgagcaaaggctagaggatgagtacgccaagatat

SEQ ID NO: 174730 - DNA, 344 bp, Glycine max
ttacaaaggatattctaaatcctttttttatcaactaacttattgctagaaaatttcggtcaatatcgaggtcataaagaaaatttgagattgtctttatacctaaatatgttgagattatgatggttccatttccttgtgctaaaatatagccactgttcctaattctgacttttgagactttagtacgcttcaaatccttgaagagtgtcttgtcatatgtcatgtggtttgtacaaccactgtcaatgcgctagcattctaaactactccttgctgaaaaagatgctgccacaaacatttgatcttcttcgtcttgctctatgacctgagcattgtcttca

SEQ ID NO: 174731 - DNA, 330 bp, Glycine max
  unsure (1)..(330): unsure at all n locations
gagacataaaatggatccttacatttcattagttcaccaggggttttggtttgaaaagaaaagcatggagtggtgaaagattggcagaaactcccttatacttcaccttacatcaatgcctctatttggatccccgtactgatgtattgagaaaagatagttggagtcttcatgagctccttcatctcacactccataagcaaactgagcgcaaaacgttacaacttgntagacccttggccctacctagaagttactaaagtatttgagcgtatcctgtatttttatantccaagggagtgatcccaacagtgttttaggaggctatat

SEQ ID NO: 174732 - DNA, 410 bp, Glycine max
tggcattcattctggacagaccagtgagccttatgttcttttgtgagctactacttgaggtgcacaggtatggctttcctgatggtggagcttgggctgatgggaaccctaaccaagtatgtggaaaagtgactgctgatatatagcaaacatttaccttcttagtggaccaaggatggccattgtttgtgagtgaatttggtggagacttgacaagtaccaatgtgaatgacaatcgataccttaactgttttttggcactggtagctgagcttgacttggattgggcctattggactccttgtggtagttactactttatagaaagggttataggaatggaagaagtttatggccttctcacttgtgattggactcatgttatgagtaccactatcttaaatagaatc

SEQ ID NO: 174733 - DNA, 434 bp, Glycine max
  unsure (1)..(434): unsure at all n locations
agcttgtaacacttgagattgactgtaatatattgagccaaaaaaaataagcttggccttatttgtttattaaaccaaacgattttatcagatataaattttgaaataaaataaagttcaattcagtattttttagtatgtttttaaaataactatatgttaataataatttttttaaaattaattaataatattttatataatatgatattttatttatattgaaatatattttgtgaaatatatcttaaatataattataattttatattctaacaatatgaaatattaaaaattatatattattggtgattttgtttcatatatattattcggttaggtaatgataaaaataaatttgtttccatctgtataaaacttaaaacttanaagatactcctgcacaagcaattatcttttttgctgagttctgg

SEQ ID NO: 174734 - DNA, 434 bp, Glycine max
  unsure (1)..(434): unsure at all n locations
ttggtngccacctatactaatggactatgattatgggatataatgaaatcaagtgggaagggatgggggtgggtgtttgcaaaatattccaagaaggggagaggaagaggaaaggggaaggctatttatgaaatgagagaagggtaatttacagttttaatagattttgaaaaacatgggggttaaagtagtaaaattagggcgagaatagtaacaccttggttaaattaacactgccttgtttggattgggccatttgcttgctacactttgtaggtcttgcaaaaccctttgaaacctacctgaaaagaaaattatatntttgcaccattgttttcctttgtaagttacactgttcttgaattattttaaaatgtttattcttanattattcttatatataatagagcgtgtacattttaccagcactgtga

SEQ ID NO: 174735 - DNA, 437 bp, Glycine max
  unsure (1)..(437): unsure at all n locations
agctngcttattgttcttctatggaggctggatctttgagcttcaataaggtcctttaatggtgattttccaccatggaatgcagcggaagacaaaggagaagaggtgagaggaggcgccatccactagggaataagccatggaagaaggagcttcaccaccaagatgaaccttggataagaagcttggaaggaagcttcaatggaggaaaagaaagagggagagaaagggagaggggggagcacgaaattgaaggaataaaagaaggagagaagtggaactttgaagtatgtctcacaagactctcattcatcaaagttacaacaagtgttacacatgcttctatttatagactaggtagcttccttgagaagctttcttaagaaaacttccttgagaagcttctttgagaaaacttccttgagaagctagagctt

SEQ ID NO: 174736 - DNA, 429 bp, Glycine max
  unsure (1)..(429): unsure at all n locations
gcttctactgagcagagatcacaacaaagcaatnttatttactatcctattaaaaggaaccataaattgggagacttatatacattttggaaaacttttctatacaaaagttagtcgtaaacgacaactaacaaactcccccaaatttatagttttgcttgtcctcgagcaaagaaagaagagttcacttgtccttaagtgacaaaaattcacagtggttcttcacaaatgtgtttattccaaagaattcaatcacatgacttgaatggcattcaatgtttccatcaaaaacttctcacaagacatgcagtttttcatagacaggaacatgattattatgaaacacagctgagataagttagtatgaatgacggatatcaaggaaggatcatcaaccaaagcctcacggacactatttcactcaataac

SEQ ID NO: 174737 - DNA, 333 bp, Glycine max
gcatttgctaatggatcacatcacactgctaatgccagggggctttaatctggttattaacagatactatatgcctttcaacaagatgtgctcatcgttttctgctcaaaatttgtacaaatacacttcactgtcagtctcagataaaaataaatgtgtgctaatctatggtaaatgttaaatcatataaaaaaaaacaatattttcgttgtaatataatgttattctgattcactatgccagagaagtgttgatgacttatagtgataaacaaaccagatgacactatttaccatgatctacatttcctttgttacaacaatatgacaatct

SEQ ID NO: 174738 - DNA, 439 bp, Glycine max
  unsure (1)..(439): unsure at all n locations
agcttcacaagccatgaaagaaatagantcttttactattctaggactaggaagtcaacatattttatccgaatgaaccaattgacttgggtatggtaccaagcaaaaaacaaagtatgctctggcaatcacacaaaacaggttttatggccttttcacgacttgtccgcctcatatacattcatacatacatgatattcgtccaactcttatatcggaaaaatatcgatttcaattaaaccattgcaggctgcaatatcatatatatattcatatacacaaacaatatcttcctgtgacagcaactgtggagatgcgtcatgacgagaactggaccttttatatgtgatgatgttatttcttatccgatgtaacgccaacaacaacattgctcacctgttacatgtcacatatattataaggaaaacttgctatgctc

SEQ ID NO: 174739 - DNA, 381 bp, Glycine max
  unsure (1)..(381): unsure at all n locations
agcttccattttcaagaacgcgcgactcgatatattactgtactcaancggacatccaagagacatgctattgtcgatagaatattctcccagcttcggtgtccattgccagtgtctgcatatataacgggtatcattcagacatacgagaaaaatgttattggtctttgaggtatgccagagcttctgatcgtaatgtcggagactcaatatcctacgggtcgcaatcgagcatactaatagagagatattgtcatctgaatctgctcagagcttttggtttaacttcagcgtcttgatgtattgtcgacagattatggtcagagcttctttactgaatctcgaacgtctagatatacttctggacacaatcagacatct

SEQ ID NO: 174740 - DNA, 316 bp, Glycine max
atcgagacgctggaatatgaatatcgaagctgtgagcaacatccacacgaagataaccttttactaatctatcgagactctcgaaatccttaattgaatctctgagcacattcggacgataataactttaacttggatgtccgattgcgtgcagtaattcattgagacagtccgaattgagaacagcaatctcaaacagacacaagccgcaatatcttttaacgcggatgtccgattgtgtcccgcacatatcaagaagctcgaaaacatgcacttaagatcttttaaaatacagacgacccgaactctttacttg

SEQ ID NO: 174741 - DNA, 439 bp, Glycine max
  unsure (1)..(439): unsure at all n locations
caagctttaataaaaaaattattacaccatgttctcattgtgcactgtcttcgcaccccttacagatctgcctcatccttggccactttgaccgtcctatttgccaccgcgtcgccctctccatggctttttgtaagcccttggtcctctcctttctcttgattactcttcaatgttgctctttgtatgacaaaatctacatttctgtatgttcataaggttgttttctgggaacctgaggacgggcttcttctgttgntaaaaggatgaagcgaagtcgaacggtagaaattcattgatgaatgcgcatctccacaaagccgtcaatgtgtccaagtacttcttgttgaggattgcgagtccatttgttactgcagttgagaaactcctgtcgttgttcaaggattcttgtaaggaacttgtactgcaaatctttcta

SEQ ID NO: 174742 - DNA, 422 bp, Glycine max
cctacaattgagagagaatgagcattaaatacaccatatggtagttctacagattcattacctatacttatcagaaaatacttataacactacataataaccataaattggacgagtttggtacactttacacaagttttattcaccgactgacacacataacagatggtacccctaagggtacataaatcacattcaatccctaaaaaataaactaatcgacgggcgacgaagaacactaaacatgagaacactgtagggaatgatcacggtctccattcgataacgcctgggctttgatatctcttctctctcaataccctcaagtactaaacctttgaacccgttgaaacacacctacgatgcctatttataggcaaaaggccactatggggccgttgcagctcgaccagtcgagctaa

SEQ ID NO: 174743 - DNA, 438 bp, Glycine max
  unsure (1)..(438): unsure at all n locations
agcttctccacaatgacctgcttctgctgctcctcaatcttaanaactatgaaacggggtgtcctctttgtcttcagctccaaaaacctaacttgcagtcatcatggactgccataccaaatgcggcgtttgcctatagaattgcagttgcagacacacaccaccatggtcatcaataccaagtaattgtgcacaaatatgttgttaatctttttttttcccatttaaattgttactccaggaaagaaaaaaaacaaagggttgttaacttgttaacataattgggttgaaatatgccataaagtaaatcaaatggcttaccaaaaaaaaaagactaaattcgtagattgataacaatgaaatattataggaatatgcgaccaactaaataagtaaataatacttccacaaacacggtatcttccaaatcaaggggat

SEQ ID NO: 174744 - DNA, 304 bp, Glycine max
gatcatcgagcaacagcagcggctcagtggcgttctttcagaaactcctggctctggggttgcagacagtgctccaggggatgcatgcccgaacctgaacaacaactgacccgtcaacccctgaccctgaaaatgccgccaaagaccgtgactccacgccaaaatgtgtttcaacttgaatctttttaatatcaccttgaaccgatgacaccagatactggctgccatgttggttcccctgctagaagccctaaacgtgagagatcaaccgcgaagcaacgagtaatcatggatggcgagtatt

SEQ ID NO: 174745 - DNA, 457 bp, Glycine max
  unsure (1)..(457): unsure at all n locations
ctgaggcatgcaagcttgaagaacggggaatccttagggataatccatgtttctgttcatgtncattcaataaataaaatcattctttgggttgcaaacaaactggaatatatctaagcccctatagtgatctatcttctcaacctcacccaagtacacacataaaatgatcaaatgggaaagaaagtcaaactatcaaacaccataccggcaaagtttaataagtttcaatgaggagaaaacagaataaaagtcgcccacctagaacctgaacagcaataatgtgtttctttggatcctttataagcattttgccaacaaggtccttagcactgtttgatatgcttggtcatggaatactntcaaaatcaatatgaccttgcaatatggcatcaaatattcccttttccgtctctacaacacatattttataagaaataagtcaactgtaaaacag

SEQ ID NO: 174746 - DNA, 446 bp, Glycine max
  unsure (1)..(446): unsure at all n locations
tacctttaaactcagctttncttacatagactacaagctttagaatttttaaataatactctgaaacagtgtagctccagaataagaactcttctgtgaagaaacattgtaccatactcttgaattgattgggttcaatcataattcataaatacaaaaaagcaagatgtaatattaacctctaccatagagtcacaagatctttcaacatacataaaacttgatagtttcagaaaaaaaaagagattcagatcaacatttaggatgttgcttatgctttagttttttaacatttggtaaaagaattgtatttgggctgagtggtggattaggatcactatttactaattatgtggcgtattgataaacttaactaaataatgttaacaattacacagagaaactgcttctcaactatctcaagccacactcattctatccttatt

SEQ ID NO: 174747 - DNA, 348 bp, Glycine max
  unsure (1)..(348): unsure at all n locations
aaacccatgctaccttcagctcaatatatcctgtgtaattagtgtacgcatgttttattntttacccatctaattgtctagttacattcatagaatttgccaaattttcatgcggtatgtacatttatctgcatgccttatgccttgggatgcacatgctttatgtaatcaagtgattctagatgtgcgagtttgttaactctctgtcctaacaaacacaagtcaattagtaaaatatttctcccttaaaaactaacccctanttgtctttaattaatgttgtcaattatatattataggcgagacatgctcaaattcttgaaaatggacgagttgaaactaagtgtt

SEQ ID NO: 174748 - DNA, 443 bp, Glycine max
  unsure (1)..(443): unsure at all n locations
agcttgtcaaatcacaagagataaatctgttacaaaatgaacaaagtgatgtattgttgtcagtgtactggatgaaggaaacttgacaaattgagtgaatcttggttttgctaagttagcgagtttcattatattcaagtctattgtgtaaacactctttgagtgattagaatatattttctatcaaacatatattgtttgtgaaagccaagagtagcttagtgacaaagaatactcaggtcttaatcttaaggggagattaagtgaagtgtcaggagtgacctanagagtattcgttgtaatcaaagaattgattaatggaacccttcatggtttataggagaactggacatagcccaagagttggggtgaaatagtatntgtgttttctttactgcttctatataattaattntttttctataagttactcttacactact

SEQ ID NO: 174749 - DNA, 409 bp, Glycine max
tgaagaccatatgcatactgggcaacatttgtacggtctattctatcaacgcagctggcgcggagaactccactctgaaaatgtggtgcatcactactcaattattatcttttttattctgatgggtcatttcagactctttgtcttgattaaccacagaatttaacatttcattactgttcccaatccttacaagaaccccagaactagctctagctctcatctttcagtgaagaatccctctaataatacaccatgagttgagagtaaaaatagaacttcctatctctaaatcttgcacttttacaattataaaatagaactgcgagtatattacatataaaaataatcccccgacataacaccggctcaatgagttgtataaatctctaacatttcattttcacta

SEQ ID NO: 174750 - DNA, 430 bp, Glycine max
  unsure (1)..(430): unsure at all n locations
agctntgatgttggggttgaatgcattaatggtaaacagaccanaatcaagaaattaggtacatatagagctacatacgtctggaattgatacatacaaacatttgtgggccatttcatacaccttcatgaaatggtcaacaatattttatatcattcatagatgattactccagatatgcatacttgtttcttatacatgtaaagtcacaatctttgggtgtgttcaaaacatttaaagttgatgatgaatattatggcagacatgacggttcaggtgaacaacgtctggggccttttgccaagtacctagaggaacgtggaatcgtcctacagtacaccatgcccggtgtcacctagcatgaatggtgtggctaaaagacaaaacagaactcttaaggatatggtaagaagcatgatttgtcattcta

SEQ ID NO: 174751 - DNA, 422 bp, Glycine max
  unsure (1)..(422): unsure at all n locations
acttctcnttctctcaactattttcattcttcttcctcttttcacttctattgcgccatttttntgcacaaaatttcgtggcttttcaattggtgatgatcatggaaggttgaacacttcatcaatccaaggatccattccaagcaaggttgaatttgagtcatggtttagcatttctaatctttgtgaatgttcatctttctcttcaatcctatttccgattttcatgattatgattatgcttatgattganaatggattacgttatggattcatttcctaatattgaaatttaatcacaaactgtttagatgattttccaacctaatttgcgatctcaaataatttagggattgattcgattgaatcttctctaatgcattgaaatttaatcacagaactgttggatgaatttccaacct

SEQ ID NO: 174752 - DNA, 434 bp, Glycine max
  unsure (1)..(434): unsure at all n locations
agctntgtaattccacttatatatngatattttaaatgatntattacacaaattttcagatgtttttcatttttggttgtgacttttcaatacattattgatttcaattagttaattaataattataaaaagtcagccccttgctcaagacagattcataatctcacaccaatgcatatacttacttgactattccaaaaagtacataaattgcaaaattagcatctgtaaagcaagcaaaagttatataatttgaaatcataatatgaattgttgaaaacgttgaaatttgaaaaacatattaatgatttcataaattgaaaaagagctagcagtggacacagactatgcatatacttttatttttccaaaaagtagacaaatcataaacttaatctcattagcattagtagaaaagtaaaagttatataatt

SEQ ID NO: 174753 - DNA, 439 bp, Glycine max
tacggacacataaaactaagcttggggaaaacttgatgccctggttaacctagtaactcatcttgccataaatcataactcagcttgccataaatcagaaattctgctgatcaccatacagatctctgtccttctttgcagctatctggagtcaatgagcaacttgaagcccatgctgcaaacatttataatagactccctcagcaacaaaaccaacaacaacagaataattatgatctttcaaacaatagatacaatccaggttggaggaatcatccaaatctgagatgggaaaatcctccacaacaacaacagcagcaacaacaacagtctgtccctcccttccagaatgttgttggtccaagcaggccatatgttcctcctccaatgcagcagcaatagcaacaacaaagacaacaaggacctgaggcccattctc

SEQ ID NO: 174754 - DNA, 384 bp, Glycine max
  unsure (1)..(384): unsure at all n locations
ctaaaaacctgcagctcngctaggtgttccaaaatgtttataatttcttcaaaancccaaanngaccttaatcactcacttaaccatgctttcaatgaattaatcactcacttaaccctgctttctagtgatttaatcattctcatttgtcatcaggctttggtggatttgtgagactcacgcatgtcaacttgtctgattctaaccttgaaggggatattgcttcccaaatctctcatctttccaaatcagtgtcacttataagcaatgcatatatcttaatttcaaagatcgaatatcctttttctaccaagtagtgcctgaaaaaacataatgcctatatgcgttagacgcatgatatttatataatgatatgagtatgga

SEQ ID NO: 174755 - DNA, 430 bp, Glycine max
  unsure (1)..(430): unsure at all n locations
agctgagccggttggcatgattatgtatggtttggtttagttaaaggataaaaatggaatgtcccacattattccatgacacaaatgcaacaatgatgatttggaaattttatgcaaaactagtcatgcatgcacctatgtcgacattcaagtgtcaaacttttatggtcatgtgatgtcagggctcaggattcatttcctctattttagtcaacccagtgtttccaaaatatgttcttttatcaatttgtgcattcatccaaatctattttgggtgttcaaaaaactttcacggcatttacccttcaggcgtacacatnttttttcaaaaactggttatgatcagtgaattctttcaaagaaaagttggaagttatctcttttcacaagcatgtngtgttttagctagacaactctttatttttattat

SEQ ID NO: 174756 - DNA, 419 bp, Glycine max
  unsure (1)..(419): unsure at all n locations
agctttagaagcattcacaatttgtcttttttaccacctccgcagcctgggtcaatgcttggtcttacttcacggacagggtgtctgcatctgacccanagtctgctcttgcattacaaagactagttcaagctgctgtaagcattactatttattcagataccttactcattctttggcttctgccacccaataaaaatgttgaagtaagtttctctcttttctgacaacttgtgctctaaggtatggtttcttggggaaaatgcaaattatgctgcttctgaatatgcttgggaatctgctaccccgcctggtactgcattgatgatgttagatgctgacaaaatgtgtgctgctgctagttcttcgtatcctactctagcaagtgccttgacaatgctccagaggggtgcattcaa

SEQ ID NO: 174757 - DNA, 272 bp, Glycine max
  unsure (1)..(272): unsure at all n locations
tnacnccccacactataccttcgtggcggagaattctgtttttattggaacgagcaccctgacatagaggatatgtagcgctgcccgaagacaattcatcgttgggggtttgcacgttctccgtgacttgaaggagcatttcacatcagaagctccataagatagaacacccctgaaatgtgatgataggtagaagaatagtattgttcatcattgccaaccacttactgccatagtgaagggctataagcactacgggcgagatgcacgcc

SEQ ID NO: 174758 - DNA, 451 bp, Glycine max
  unsure (1)..(451): unsure at all n locations
agctngtatgacatgggatgtactattattttgtacacttttttcaacattaggaagttttgaaaataagctgaataattaggataagtaggcagtatgtcaatctctctttctgaacaaggtgctatttctttaaatcttgtctgccatttaggtttatgcatgtacttatacacccaatttctagagattctgcactaccatgactaagaaaacataaaccaataacccctcccaaatgctatgactgcatagctatgccatgtaaatttacaatgtaattgttggatttcctttttaaagttattagtttaatttatgcatttatttttggttataggaagttgtgtatttatgtaaaattgggatattatatgatatngatgcgtggaatacactttgaatttcataaatctctggtgatgtcatttgatctattgtggatggatca

SEQ ID NO: 174759 - DNA, 83 bp, Glycine max
ccagattgttttttccggcaacattagtaaaacggcctataactttcgaaaaccaggctctatactatcacttatgacaaagc

SEQ ID NO: 174760 - DNA, 378 bp, Glycine max
  unsure (1)..(378): unsure at all n locations
gctcttatccaaggcactctctagatggtgaaactccttcttccgctaccattaaactttaagaagaaaaggactccattgatgaagaanaccacccctctcaagctccacattgatctacatcacttctggcttacaagtattctcaaagccactactagcacaagccttagactccccttgaatctaagaacacccatgtattgntttgcactaagacaatcatggctttcaaaacaaattttgatgtagaatcaagattatttgtcacactaaagagtaaacttatatgaacttgatctctaaaagacttttatatacaaaggacaactttttaagctcaagtgccctactaatgttttattatctgattttaaa

SEQ ID NO: 174761 - DNA, 442 bp, Glycine max
  unsure (1)..(442): unsure at all n locations
agctntntcttaagctgtttgtacaaccttttctccccctttggcaacatcaaaaagccaaagacctcggaaatcaacacagatatgacaagaagtagaaaatatataaatatcagagtataaaacacaagaagccaaactcacaaagaagaaataatctaaccagaatccaaataactgaaaatgtcaacaatcacaaaacatccaagactgaaatttaaaaaaaacacaagataaataagcaaagtacttagcataataatgtaaattctaagaaactaaaagccaaaatacacggcttatacaagataaataatcagaaactaaaatctaagaagacggacgtggtggtggaagatcgaaactctgacgaatgtatccgacatcctcttcaagctgtgtaagacgaatgtccataccggcaaagcgtgaatctaacgag

SEQ ID NO: 174762 - DNA, 248 bp, Glycine max
ccttgaaactcagctgcgacttccttcaccaacacagccggtttctgtttcgcccggatttatagcgggttgcagcaccggctccgctttcctaaccatactggaggcgggtgcacgggctttatcctctatggatctctagaggattaacatgacctcccagatggaagccatttgatcttttataaacccttatatcggccttcatttgttcctgcacaccctcttccttatccattattttggat

SEQ ID NO: 174763 - DNA, 387 bp, Glycine max
  unsure (1)..(387): unsure at all n locations
aataggangaaattaatacccgagcattggttgcaataactattggtttacaacattaagaaacatgttattcgatgtagatggcatacacaatttatttgcccctaccttcatgccttgagcattctcatttggtcaaaatagaagtataccataaataaaaattgagctggtgggggagaacttaagtgaggagctttacttgtgactaagcctcgaagcaagattagttccatagccggtccaaaggactgaagcttgtgggtctatctcgggatcccaccaaggagccaaaggccttaaatatagtggttgaattgaacaaaaaaaaactacataatagatgaccatagttacacttaacggtcataaagatgggtatagtta

SEQ ID NO: 174764 - DNA, 441 bp, Glycine max
gctttctctaaactttcgaggaggttcccagacgtacacactcttttttatgttgcctatctccgccataaccctacgagtagccgaaaacatggcataattttaaagtccctcaaaaaagggcaaatcatgctgccgcaaaacgaatataaggctcgctccgggctcagcggtttagtaactcttcaatataagaacgcatcacgtggcgtatgatgttaacaaataacgagcctatggagccctcgaacaaccccgcacacatgcggacacacacacacacagacgcgcatacacacacacatagagtcacacgcacacaataacacaaacacacacacacagagacgaacacacgctgcacgtacacagagacacacacacgtataaagagactggcacacccctacacttacccacacacagagtcacacacacaca

SEQ ID NO: 174765 - DNA, 423 bp, Glycine max
agcttctgttgttcattttcgagcgtctctatatgtgattcacctgaatcggacatccgtgtgaaaagttatgaccatttgaatttctcgagagcttccgatgtttaatttcgagcgtctcaatatatggtgagcctgaatcggagctcagtgtgaaaagttatgaccatttctatttctcgaaagcttctgtggttcagttccgagcatctcgacatattatgagcccgaatctgacctttgtgtgaaaagatatgaccatttgaatttcttgagagtttccgatgtgtaatttcgagcgcctcgatatattttacgcttgaatcggacctcagtgtaaaaagttatgaccatttaaatttctgtagagcatccgttgttcattttcgagcgtctctatatgtgatgcaccttaatcggacc

SEQ ID NO: 174766 - DNA, 425 bp, Glycine max
  unsure (1)..(425): unsure at all n locations
cgagtgcctgtatatngatgcgcctgaatcggacatccgagtgaaaagttatgaccatttgaatttctcgagagcttcctatgtttaattttgagcgtctcgatatattatacgcctgaatcgaacctcagtgtaaaaagttatgaccatttgaatttctttagagcatccggtgttcattttcgagcgtctctatatgtgatgcaccttaatcggacctccgtgtgaaaagttatgaccatttgaatttctcgagagcttccgttgttcaatttcgagcgtctcgacatattatgcgcccgaatcggacatccatgggaaaagctatgactatttgaatttctcgagagcttccgttgttcaatttcgagcgtctggacatatgatgcgcccgaatcggacatccatgggaaaagctatgacca

SEQ ID NO: 174767 - DNA, 398 bp, Glycine max
ccacatgcaagacgatagatgaattattcgaagttgtcaaaccaatcaaataggatctggatcatgaatgtatcattcctacagaaaacaaggttgacaatctaatgtaaccaatcaaaaaagagcccatcactggcataactgccggaacaacttttttccaaatgaagaagacagcattccctactagagtgaggagaaaagacccttctatttgacaaaagaaacaaacaagcatggactctaatagggtgtgtctgtgataactggtagagaagaatgacacatacgaatggtgttctgaagcactgaaaggatctgaagagaatataaagaaaatgctgatgcaacatgacatggcatgccagcacaatacattaatagccctagcattcctg

SEQ ID NO: 174768 - DNA, 366 bp, Glycine max
aacacagttgaagtagttggacctatatactctgttatttttattttcctcaaacggaatggggttcaaaagggtcacagccctcgggggtatccaaaaagttgtatctctgatcgatcaggaatcacaatctagaatcacccaacttccatggaagcctgggaattgctttaatttgagtttcatgatactgatagaactacgctcaagcttaaattcaatgaactgagttcgaagatgaaagagacgataatttctgaaatttccatcaattattgtttgcatgtattgaatcatataattaagctttggaacggagttgaatgatcaacgtgaagcggaaaaattaagattggacattgcatg

SEQ ID NO: 174769 - DNA, 440 bp, Glycine max
  unsure (1)..(440): unsure at all n locations
agcttcataccatgtaaatgaacaattcattatttccatggttcaaccaaatgataaataattctcaaatcagattctgatgaaggtaactagagccaaaggctgtggaaatgtcataaatgctaaactttttagaccaatgacaggtggcttaatattttacaagcagctcctcaacgtttgttttgtgtccggtgttgtgtgttgtgtgttctggctttttttttgggttaacgagagacccatcttagtgtaaaaaatctcctttctgctctcaatctctgaactctgagacccatcttttcgttgtcctttccatttacttgggttaatatgagagaggttaagctctggggtgtgtttgccaaaggaagaaaanattgttggttttgtgcgtgtttntgaattcgtttccgctatttactttgcaatgtcattga

SEQ ID NO: 174770 - DNA, 316 bp, Glycine max
aaaacccaagggcatcaagaagagtcagaggccagataaatcagaaaaatgagtcagaagttcagatgaatcagaacactcagaatcaggatcagctccagaatcagatcagattcagaatcagaaagatttatcagattaagattcagaatcttgatcagaaagacttatcagatagttgaaaggttttcaaaactgagtagccatggattttctcaacatgttaccaagagtttactcttggtatcgatacagaatgtgtatcgataccagggcaaatgaattgaaaagtttcaatgaattacacgtccaatga

SEQ ID NO: 174771 - DNA, 265 bp, Glycine max
cgtttgattctttcttcttcctctaacccaaatattcaaaggactaacccgctaagaaataattttgattcttcctctttcctttaaacaaaatattttaaaggactaaccgtctgagatatcttttggttccccttacaaagattcaagggactaaccgactaagaattctttgtcttaaaacattggaggttacatcctttgtggacaagtaaagggtacatctacttgggttgtgatactaagaacaagagagggtacatct

SEQ ID NO: 174772 - DNA, 381 bp, Glycine max
atgtatattctataaacaaacctcccatcttttatggactgggttaccactactagacaacccgcatgcgaatctttatagaagcgatagatttaaatatttgggaagccatagaacaaggaccttatgttccctctataatagccggatatgcaacaatagaaaaacctacagcatattggactgaggaagaaagaagattagtacaatataatttataggccagaaatattattacatctgccttaggaatagatgaatactttagggtttcaaattgtaaaagtgctaaggatatgtgggatacactacaagtaacacatgaaggcacaacagatgttaatagatctacgataaacactttcattcttgaatatgaac

SEQ ID NO: 174773 - DNA, 421 bp, Glycine max
  unsure (1)..(421): unsure at all n locations
agctttgcagaagaaaaagagaaatntaactttgtgttgctaggnnnnncatttttaatcgtaatgttagttntagggggatgtattttatgtaaaatgtgtaatagcagctcttgtagtaggaagtggctgatattgtaattgttgttttgcttttgtaatagcagcttttgtagtaggaagtggttgatatggtagtggctaatattgtaattgttgttttgctgacatggtccaggctttccagaaagtttaatcttgcgggcagccatggttctcataatataacttctaatttcttcaagcattgtgataataggctcgcatctatactgcagaattctggaattgaatacctcacaagtgttgttgcatatattgtccaccttgggtattgactaaagtgggctttgtcctgctt

SEQ ID NO: 174774 - DNA, 355 bp, Glycine max
  unsure (1)..(355): unsure at all n locations
ttgttattccttttgagcccaggntacgctttccttgatcagaagctcactacaagccttaagtgaaaaaccatgatattccatattctctaagaatattggagctttggaattgtttgggaataagtggggggggttttgtttcataggacaacattgttggtgacaatgcttcatgatgtattttgggccataccttgatgtacattgtatattggttaaaagttggacatgctgaatgaaatgttgtctctcaaagccataatataacatagaaggacacagaatcaaaaatgcatttagttgagtgaaaagatctcattggcacaaaatgatgaaactctcggtttactct

SEQ ID NO: 174775 - DNA, 438 bp, Glycine max
agcttataggattatggggcacccgtcatatgtggtactaggtggcgatcgggtgatggcgcaaatcaactctcccacttccaaagtcaaacataaacacaccatccccagttgcccacctttaaattgagctcacgcactcctacgtagcccttatcctcgttcctctcagcaccgggtctccatcaacccctccaagctttcacaatatccacacaattcgatttcatttgtcatgaaactaccctaaaccaagaaaacagagtggagtcagaaaactttgcacaaaactcattcaaattccattgttttccctactcacataccccagtaacattctcttcgttccaattcgttaaccattggatctccttgaaaattttactggaggttcctagtatataaatatacaattgaaccgttgggatcttctagaaa

SEQ ID NO: 174776 - DNA, 326 bp, Glycine max
cccggtgagagcgtgatgcttatttttgagagaaagcgaatatcatttaagactaatgactaaattcatgaaattgacgatgatgaaggccacgtttgattgcgatacgcacttaaccaaaaagctgaccatgtgcatgaaagatttatcccttgcacccagatttgagctgaatgaatgtttgattgatggaacattaagcctatgcagttttatcttctgctaccttgtcttacgttgtaggagaacatcatccacaaaatagcttgtgtcaaggaaaaattgtcccacatttgggggagacatgggggtaaaggaatgaaatg

SEQ ID NO: 174777 - DNA, 429 bp, Glycine max
  unsure (1)..(429): unsure at all n locations
agcttgtgcaaaataaccagctctgaactttatctcaaacgagagtaaaagtcaatatagtcagagtatttgaacatcaaactctgaaatcaagcaaagcaaggtacaatttaaacaagcatattataggtgtatgatacatgaaaatttagaaacatcaggaggcataaaattgactacggcactaatcattcatcatccccatggtgacggctccttctctttcctgatttattgacatccctacccttccttgaatcattatatccacttgaatcagtgtcagatgatgatgaggccctcttgttctttcgcttgtgccttctaatgaaatcttcagaggaatcangatctgatagacggcttctccttctcctcttctccttcctactctttctatgcctgcgcttatactcgtcgtcttcatct

SEQ ID NO: 174778 - DNA, 418 bp, Glycine max
agcttgcttctacaaaaaacattattaatttttcttgaacaccgactatttttccctacccctcatgtcgtaaaatttgaccaaaaatagaaattaaatcaatttgagtattgaaagattaataatattatttcatttgtttatattgtttgcaggatatgaaaagagtttaatttccatataaggataatataaaaaaattgttaaccaatcaagattcatctcaatataattttaagataattattataaaaaataataaatttatcatgcttaataacatgttattagataatacaattaaaaatctgttcatagtgtattctaataaaaattataaagatagagtaaaaagaaaaaagatttattctcagtagacgtagacaccaaagaacaatagataaaagaggggagataa

SEQ ID NO: 174779 - DNA, 406 bp, Glycine max
tgttggaatatgacgaacccgacatatgtggttctaagtgtctattgggcgacggggcaaatcaactctcccactttcacaaagcaaacatgaacccaccatccctagttgcccaccttcaactgagctcacgtagtcccacgtaacccttatcctcattactctcaacaccgggcccccatcaaccccttcaagcttgcacaatatccaagcaattcaatacccaaacatcatgaactaccctaaaccaagaaaatatggtagaggcagaaaactctgcccaaaacacattccaataccacagctttccctactcatataccccaataacattctctttgttccgattcgttaaccgttggatagactcgaaaatttactggaggttcctagtacataagtctac

SEQ ID NO: 174780 - DNA, 442 bp, Glycine max
  unsure (1)..(442): unsure at all n locations
agcttataaaaaaaggaaggcatcatggatttactacttcaaacactatnttattcaaccaacaaagaaagtagtcaaaataatagaagccaacaggatgaggttgtagtgaagatcgaggaagaggacgaggttatggacaaggacaaggccatgggcaaggctcaataaatttcaaagaggagaaatctcaacaagaggtcatggccaaggcaactcaagattaaggtatgacaagtcaaatgtgaaattttacaattgtggtaagtttggtccttatgcttctaaatgtagagctcctagcaacgatagagttgaagaaaatgaaaactacgttgaagaacaaagtaaagaaggtgaccctctattgatgacttgcatgaatgatgaaagaagaaacaataataaatggtacctagacactggtgcaagcaatcatatg

SEQ ID NO: 174781 - DNA, 381 bp, Glycine max
aaatctcgccaaatgacgggccttctctttcttggaaggtaccacaagatatggtacttccttaccttcgtttacagctttatcacttctactcttctcttcattttcatttttttcatctttttcaatttttttattttctttttctttttctacttcttttttctttttcttggtcattaaattctctttttcttgaccattatttgtttctctttttcttgattgctttcacctctcacatcatttttcttgccctcagtgcctttctttttagcagctttcttcttatgcacaacactctcctcatcctcggcctccacaaatcttttactccttgtcatcacagctttgcattcctccttgggattcttttctgta

SEQ ID NO: 174782 - DNA, 438 bp, Glycine max
  unsure (1)..(438): unsure at all n locations
agcttatggccaaatatggaaaagttatgatccctatagctaatttgtttaacctgaataatattatcttactctattgtacaagctccattgcatttctttggtttaaaagatnttgcaaaaaccgcctatgtaggtgaaaatgcaaacaatcataattcacgtggaaaggtaatatatgccatctttataaataattgattcttctgactaagttgcaatattaaatatgatatcatgacattataaaagattgcacatacatagtacatatgccatcacatatatacaatttaattctaacacatagagtgagtgggatttgaatttcttcaaaagggattacaggactttattcccctaaaagcagataacaaagcctacggttaaaatgtnattaccaaagatgaattatggtaagaccatggctcctaaatg

SEQ ID NO: 174783 - DNA, 451 bp, Glycine max
  unsure (1)..(451): unsure at all n locations
gccttgaaactcagcttctcccncattntctataaatagggggagaagtgaagttgttaaggttcantctcttacgcacttctctctctttcgaatttgcttggaaaaattgtttccgtgaagaaaattcaagccgagacgcttccgaatcgtttccgtaacggttccgtgaggaatttcgcgaaagtttcgactgttcttccacgttcttcattcgttcttcatcggtcttcaatcttcaacggggtagtacctcgaaccaagcttttcgattcattctatgtacccggggtggtccacattgtgtttcatgtatttctattctcgtttcatttacttttgatacccccttttgacgtgcttaagccattttatttaagtcatttctcgcttaacctaaaaataaaataaatttccactgatcgttngaattgtattattccgtaacttc

SEQ ID NO: 174784 - DNA, 398 bp, Glycine max
  unsure (1)..(398): unsure at all n locations
cccactttaaactccaatttccactaaccccaaatttggcttttcaaaccctcaaaatctcacacttttccactcacatcactaccattctcacatttaaccctaagttaactctccccatcatctctacccgttttctaccaacaatttcagcatacaaatatcacaaagcatcatcataaaaccctaaaacagaatgggtagctttactcacatcaaacatgtcaagtttagcatgctttcaacaaattccttcacaaataactaccataaggcattaacctagtagaactacccatcataactcccanaaacccaacacccatgaatttcatgtgagaaanagtccacccatacctgaaatttgaagccccacaacgtagaggtgtgcttcatga

SEQ ID NO: 174785 - DNA, 419 bp, Glycine max
gcttcaatgcaaggaaacatgcttatggctaggaatccaaaatttggttttagaattagaaaaaaaacatgaaaattaggatttgcttgtgagagtttttgctcgaatatgggctgccccatgtttgatactttacatagaagtagggtgaaaaacaccttgcaatagtgtgtatacataggtaaatataaggagcatgaaattcctagcaaagtgtgaatgattgtcttcctaaataaatgtatgatagtgtggaatgcctttttgaatgcaaatatgtgcaggatgtaattagctttccaatatgcatataaataaatatgagtgaaacaataaaaatttgtatggtgtacttcaaatgtatgtagttagtttgtgatagcaaatgtttacgatataaattatgtgtaaagtttgac

SEQ ID NO: 174786 - DNA, 401 bp, Glycine max
  unsure (1)..(401): unsure at all n locations
agctntaacaataccaagtcaataacttattcatttataagctntttctacaatacaagtcaacataaggcaatcttatgtgtatgttatattaccgtatatagaaatattaacttattatattttcaattctttttttcaacttttgcaaaatattggatgatatattatttaaaaacttttgaaacacttgtagtttttgaatagttgttattataagatgtatttcctacatttgaaatacgttgataatggactaacaccattttaatcttattgtatgataatgtaggtgatacatcttataaccatagatgataatctattttctaatacgtatctgatgcttttaggtaacattgaagatttagtgtttagatgactatcttagattaattggt

SEQ ID NO: 174787 - DNA, 421 bp, Glycine max
  unsure (1)..(421): unsure at all n locations
tattttcaagagaagcaagtagcaaattttttcatggactaaatantgggatacagaaaaattgtgtgtaaccattcacctctgtgttgtgctttttttcatgattagaaaaggtaaaccatcaacacttatgctgctcttcggagagaacaatggttgtgctcatatatcataaccaaccaattcccaacatacttgtccatattgcgaatcatttggttcggttgtcttttttgaccaactctgctagtggaaacattttctttgactccctaattgtagtgtaattaggctgagaccaacttttaatgtccatctttattacaaaagatgctacaataaaacttaattttaactagagaatcacagctaaaacatgacaaacgataatattatgttggccactctaatagtaaaaaat

SEQ ID NO: 174788 - DNA, 410 bp, Glycine max
  unsure (1)..(410): unsure at all n locations
agcttgtgttatgttattgtgatgttgatctaancgcgtcggtcgtgctaggctcaaatatctctctgttttcaaaaattgtggtttaggctaagcccagcttgctgcgctaagcctaatctgcaaaaaaatattttttgagtactcacgctaagcgtgtggctatcgcgcttagcccatgagtgaattttcataaggcgtgctaagcccagccttctgcgctaagctcccagtcctattttcagttctatttttctgtttttgttgagaataatcctgttttaaccctgttgtttgatctaattcttttcagatggcttctatgaagagaaaggcccctgcctcagcatcccaggcctctatgattgctctagattcacatctcacgaggcctgngatcgctattctga

SEQ ID NO: 174789 - DNA, 375 bp, Glycine max
tgaataaaaaatatgcacttgtcgctagactctgtggtttatgctcctctgccgaccaccacacagacctttgcccttctgtgcaacaatctgaagcaattgaacagcctgaagcttatgctgcaaacatctacaatagacctccttaacctcaacagcaaaatcagccattacagaacaattatgacctctccagcaacaggtacaatcccgggtggaggaatcatcccaaccttagatggtcgaatccttcacaacagcagcaacaacaacaacaaccttattttcagaatggtgctggcccaagtagaccatacgttcttccaccaatccagtagcaacaacaacaacagccctagagacaacaaacagttg

SEQ ID NO: 174790 - DNA, 421 bp, Glycine max
  unsure (1)..(421): unsure at all n locations
agcttatnttggagncgtgtctctctagttatcgattaccaaaagctataatcgattaccagaagcaaaaatgagtttgcaaagtttcagaaagtttgaatttgaatgaaatagaagatgatgattttagtttcttcgtaaagagattcaataaattcctaagaaacaaaggaaatcaaagaagatcaaacttcaaaccaaagaaaagaggagaagattcatcttctgttcctaagtgttatgagtgtaatcaaccaggacatctgagagttgattgtcggagtttcaagaaaagaatggaaagatctgaaaggaaaaccttcaatgataagaaagaaaagaaagcttgcatcacttgggaagataacgatatggattcatccgaagactcagaaaacgaagtcgtgaatctaagtcttat

SEQ ID NO: 174791 - DNA, 425 bp, Glycine max
  unsure (1)..(425): unsure at all n locations
ctcagctatggggttgctcaaagacatatttgtattctttgatgattatggggtcacctttgggatctaatatcaatctccacccgccacccttttctataggttggttccactaccacacttattaccttagtatactattttcaagtaatgaacaagtaattgttagattttttctttctttctttacgaaggaaattgttaaatttgttagcttagcttgcttgtgtgtgtgtgtggtattttcatttcttaaataaattagatggatcttgaatattgttgattgtgtttgtaacctatatccttctgattagttttacgctctgaattacgtatgttaaaaaaaaaagataagtcaattgatcggatcaagtgtctaaattattataaactctttgatactattctttatntttacatat

SEQ ID NO: 174792 - DNA, 433 bp, Glycine max
agcttgggaaaaggaagatgattccatgaatcaaagaaaggtatataagcattataaatctagcataaaccaattaagaaaaaaaacaaacaaactttcaacaataccatgcaagtttgccagattcgagacaaaccaaaaaatcatcaaaacggttttattaattttaaggcaaagcactaaaagaattccggaaaggtaataaaaaaaaaaaaccaaagagcccaaatttcctttttttttttacaaaaagaaaaacagaaaatttaggtacccacaagcgacatcatccccaccgaccaagcaacactgaaattaaggaaaagaaaggcgtacctcgtaatcatcaaagtcacgcgttctttcccaaacctaaaatcaaccaacccaccaccaatccaccccacacaagaaagcgcatgaaattggaaac

SEQ ID NO: 174793 - DNA, 427 bp, Glycine max
tctcgattcattctatgtacccatagaggttctcattgtgtttagtgcatattttcctcgtttgtttactttatataccccctgttgacgtgcttaagccattttacttaagtcatttctcgcttaacttaaaaataaaataaatttccaccgaacgtttgaattatattatccgttaacttcggttaaaatcaattccgaccgttcggtcgtgccgtaaccacgttggaaatcaaaaagaggtaaaaaataatataataatcaaaaaatatctttttagtaaaataaagcggaaaatcaatcggacgttttctctttgggatttctcattcttaatcgaatggattaataactaaggtgaaactaaggctaaaatcaactcgcctagtcaagctcgtccacaaaaataagcttttgaagattgtca

SEQ ID NO: 174794 - DNA, 420 bp, Glycine max
  unsure (1)..(420): unsure at all n locations
gcttctcgaacgtgaacaatatattcatttgtatagatngaaggatgaagttgtggtgcgtgatctgttttggtgtccccagatgcagtaaagttatgcaatgcatgtcatctagtgtattttatagacagtacctacataacaaacaggtgcagactcccactacttgactatgttggagtgacaccaacggcgatgacattctctgctgggttcgatatctggaggctgagcgtgttaataatattgtatgggctatggaacgatttcaaggtctatgtttaagacacgatcgccttcctcttgttattgtcactgacagagacctatctctgattaatgcaatgaaatatgtgtatcccgagtctactaatttggtgtgcaggtctcatatcgataataatgtgaacgcgatgtgca

SEQ ID NO: 174795 - DNA, 418 bp, Glycine max
  unsure (1)..(418): unsure at all n locations
agcttatagtcaatcgcagtttagttattttcaaaatgtattattttcgcgatcttaagtgtacagttgtcacaatcatcaacttaaattgaacttaagaaaatgaatgtaccaattaatgttcgcattcaaaaacaatgttgagtaatgaaaacatagctcaggttaccttgtgccaaaatgtgatttcactttttatttatttatttactatattattagaatatgattctttgaatactatttatttggagcaaagtaattaagtgcatgtcctgataatcattcttatgactctattgctattatttaaagttctttgatctagcaatttatgctcagttgctggaaattacttttcattntatagatagtccatgatagtcagttttatttttccctaaagacttcctttaat

SEQ ID NO: 174796 - DNA, 259 bp, Glycine max
tttcttttctttaccgaaaccggccataatggttacaaatatctttcttttccggaaccggatcccctttagtttggctattttttaaggaattaattggcttttttgtcctttcaagctttgttatagaccttaaaaaagggattattcttcatttcttttgaggttaactgattacttcccttcctgattgcattacaaaatacatttctgcatgtgcaggaaaaaactttaccgaaaaaggttggttctaataaca

SEQ ID NO: 174797 - DNA, 435 bp, Glycine max
  unsure (1)..(435): unsure at all n locations
agcttgctaagcctaattcaaaaacaaatatagaattgcgcttagcgagtgagactcgcttagcgcatgaacaaaattcagaaaacaaaattgcctttggcttagcgagactgactcgcttagcccaggcttattcaagctaaagaggcatggtggcttancgagactggcttgcttagccgccaacagaataccaaaagactcaaacactctgacctaactaaactaactcgcttagcgcgacatgccggcttagcgagttcatataaactcagaaattaaaattggaaatttaaacattcactaagcccaagtgcagtggcttagcgagttcatacaaaaaagcataaattcaacagaaatgatgaacacgcttagtgggacagggccggcttagcgagttcatcaaaaaacccagaaattcatccgaaattg

SEQ ID NO: 174798 - DNA, 338 bp, Glycine max
gggcaaccctcacaaattcactaccttttgggtcctgaactcgtgcgtcgggtttaatgactagttcagaattagagtttgcaccacattgtattatatatggtgaggacgagccgtgtttaaattggagtacattccactgtgcaacgtcatgttcagatccagatcccaaatctgttgatggcttgcgaccatgaaaaatatcttgaatggggtcatcttcttcacgaattgactgtatgataacaaaataaaggatttgggcatcaaagaaaatcaatcccaaatcactttcatcagtgcaggtctttatcatatacctaagctatagtcacaaa

SEQ ID NO: 174799 - DNA, 424 bp, Glycine max
agcttatgctgcatacatttataatagacctccttagcagcaaaaccaatagcagcagaataattatgaccttcaagaaacagatacaatccaggttggaggaatcatccaaatccgagatggacaagtcctccacaacaacaacagcctatccctcctttccagaatgttgctggtccaagcaagccatatgttcctcctccaatgcagcaacagcaacaacaacaaagacaacaagcaactgaggcccctcctcaaccttccttagaagagttagtgaggcaaatgaccatccagaatatgcaattttagcaagagacaaaagcctccattcagagtctaacaaatcagatggggctgatggctactcagttgaaccaagctcagtcccaaaattctgacaaattgccttcacaaactgtgc

SEQ ID NO: 174800 - DNA, 408 bp, Glycine max
  unsure (1)..(408): unsure at all n locations
tgaagaacacaacaaacttttttaatcaatgaattacatttaggatgaagcagaggggtagatgataaaagttttgaagtagacgaagagcaatgcttgcatcaatcagaaggactgaagattgttgaagatgagaatcgactcaatcactgcatccaacagtggatgcaagggtggttggtgctacaggggtggctggtgatggttcattatggcaaacgatgaatctacaaggatggcctgagctacagtaaagaagaggaaggatggttggggttgcaactataaagaggaggatggataagggtaccgtttgttaaaaacgtaaaacgttattgatgaaaaccatcttttnttattttgaanattgatgttaaagtggtttgaaattggagtaaataccatttt

SEQ ID NO: 174801 - DNA, 452 bp, Glycine max
  unsure (1)..(452): unsure at all n locations
agctntgagccaaaatcccaactcaccatataccttgacccatggtgagaatgcccatccttgccctcaaaagaagagaaaggaaagaaaaaaaagttttcgatcaaagatcggaagaaagcaaaagaagaaaattctcaatcaaagattagaagaattcaaaaaaagagaaaaattcccgatcaaagatcggaagaaaacgaaatatacagaagggtctttggaccagacaatatctgaacaatacagaattgtcgcaagtaaacaagaaaagaaaggaaaccacaacttgaagtggtcctctccccttgattgccaaccaaaatcctgtgtgctagcggctttttcgtttcgcactatacaaaaatagaaaaggaaaaggccaaaacactcagagccaaattcctcaccaaaacaccattcccaaaaaagtcccattgattcatgatcac

SEQ ID NO: 174802 - DNA, 355 bp, Glycine max
  unsure (1)..(355): unsure at all n locations
tacacaccttatcacgcctagacgtaagagatgaatttatcgcaattggggtcagaatgaacatgtgtaggggttcttaaaagatcaaattgagctttcttttgggatgtttattgtattaaaattcttgtataattatgtgaaattgtttgaggggttttactcctcgtggattgagaaataattttgtataatttgtttgtgttttgaataagattagcgtaataaatagttatattgggattatgaaattatgattgagattgcatataagtgataaattgaatatatgatgaattgtagaataatatattactttgagaatataatatngttatggagaatgagtataagt

SEQ ID NO: 174803 - DNA, 434 bp, Glycine max
  unsure (1)..(434): unsure at all n locations
agctttcccacaagncctatatgacatgttatactangttttactcactntagcccacaattaccactaaccccaaatttagctgttaaacctcaacctcacactgttccactcacatcactaccattgtcacatgtaaccctaggttaactctccccatcatctctaccagttttctaccaacaatttcagcccacaagcatcacaaaacatcactattaaaccctaaaacagaatgggtaaagttggctcacaacaaacatgtcaagtttagcatgctttcaacaaattctttcacaaataactaccataaggcatttatctagtaaaactacccatcatatcccccaaaacccaatacccatgaaaatcatgtgagaagaagtctacccaaacctcgaaattgaagtcccacaacgtagtggtgcgcttca

SEQ ID NO: 174804 - DNA, 386 bp, Glycine max
ctgctacctatgctaccctgctacattcaggctgcgaccctgcatgcatgcgcgccacatatgctcctagtctcgcccgcagcaatggcgagatacgttcttcacatatatcaccagccatgttagcgaaacaaagctgaatctctgcgccctaccctgcaacacctgaacctagctgggaagcctcacctgtttcgccaatgctgctggctaaacccacctccacttacacgtcacgtggtttggcaatgtcaatggcgaaacacctccacgtcagccctatctacgcaatgccaatgacgactcaactgtatcgccagcatcaatgacgacttgcatgagaaaaagaccccccatcaaaattttaagacagacgctatttgata

SEQ ID NO: 174805 - DNA, 366 bp, Glycine max
  unsure (1)..(366): unsure at all n locations
gcttgattatccttctgatcaatgctgtcatgaatgttatatgtatgacacctcaaaagaaatcttagtattcaccttacagcttgaaaaatgctgaattatccattttgggttttttttttttcttgaagcangagttctaagccgcctcacttttttcaaaatgttcttcattattaagaaaaggtaacgaagatcaaattccagctggtgttatagtccaagagacttcacttgggggattattctgcacccttatcctgagatctatataatgaagggaaccaaaaagtaccacatagttggaccatggaatggtttgtgtttcaatggcggggggccaaaaactaacaatcccatctacca

SEQ ID NO: 174806 - DNA, 426 bp, Glycine max
  unsure (1)..(426): unsure at all n locations
agctatcaccatgtctccagtgtgtgccatccacgactagcgacatgtgtggaagagcacgatgcccaaaacccaggtcggacgattcctggtcaatcctccaaagggctggcaaaacccaagatccacccttagtgagtcccactgattcacaccaccatgtctccagtacatgccactntgtaagaggcacgtatgcaagagtacgccataacgtctccagtacatgtcactcacaacgagtgtcatgtatgcaagagcacaacacctacgttgtatgcaagactcgacaaacacaagctctacgcttggtaatccttacaggttcataaaatccaaggcctgtccttggtaagcctcgacacagatccataggcttgacaaaacctagggcgaacacgtcctcaattcaaggctcgacaaacc

SEQ ID NO: 174807 - DNA, 441 bp, Glycine max
actcagcttacacaattaacataaattgtcacgcttaacgcaagacgaattattcttatcgcaaatttttgtgcttaccgtaagaggaattgtgctcaatgtaaactgtcacgctcagcacgaattgtcgcgcttagtgcaaatcccaacccaagaggatttgcactaaacgcaaaaagtcacacttatcaccaaaagtataccccgcttattgagacgagctcgctaagtatgatctgtagattataaatatgtttttcaacgtgaaaaacatgatttttcgctctcctcctctccaaacacccacccacccaaaccctaacactttcttctccaccacccacgaccattggtggccaccacgagccaccgttgcttgccgctgaaccaccacacgggaggaacgttttaattggagtggaatcctcataatctacctca

SEQ ID NO: 174808 - DNA, 432 bp, Glycine max
  unsure (1)..(432): unsure at all n locations
actcttggcaatttctttaatttactantcttttattaaggnaggagtngggaaagaatcttaataatcaagtcacttgaacatctgtgacttttggaaatgtatttttcgaaatcaatcactggtaatcgattaccattaaggtgtaatcgattacacatcaacagatgtgactcttcattttgaattttgaaagtcttaacgttttaaaacactggtaatcgattacctgagagtaaaactatgtggttatgattttgagaaaacttcttgtgctactcaatgttgtgaaaaacaaatttaatacttatcttgattgagtcttctcttgattcttgaatcttgagtcttgaatcttgatcttgattattcttgaatcatgattcttgaatcttgaatcttgaatcttggaacttgatttcttgaatcttt

SEQ ID NO: 174809 - DNA, 392 bp, Glycine max
caaacatactattgacaagatatttttttaccaaaaaagccccatatcaatcgaggcagcgttcgctacctagattatttacacgcacttccaaggtgaagttgatgcttacatcacacacatctacttggctaaatacacatacatgcatactcaaagcatgttggtgtaccaaaaaaagcacatgtgcacatcttggcacctcgaatacctatacatacacaaacttggagaggaaccttgactatctacacaatagggtgctacaatacacgctcttttccaatcttagtacacaaaacacgatgcgaaccaagtatatcttcttgctgacagaactgattaaatagaaggcgacacttaaggtacgatcttcttacaaacagcaacaa

SEQ ID NO: 174810 - DNA, 352 bp, Glycine max
agtccaggattgctatttctgtgccttctaaaactatgctcctctctcattgttgttagatgaactttgaaccatccttcactgcaagagtgaagggctgttggttataccggtcatttacaacgtagatccttctgatgtcagacaccacaaaggtagttatggagtataaatggctaagcatcataagaggttcaaagctataaaggagaagcttcagacatggaggatcgctatgaaacaagtagctgacttgtgtggatatcattctaaagatgggtatacaatcatactaatatatgttactttataatttttattggattacgtttcactcgtctattgatttaac

SEQ ID NO: 174811 - DNA, 428 bp, Glycine max
  unsure (1)..(428): unsure at all n locations
agcttactatgttgtcaagtataaacttctcttttagttagngatagacgtngnggaatttagaanagcatagtttgctatgatggtttctctctatatttatccttgtttttcttatagttgaaatcagatggattcttcattaccgaagacaacaggacattcaattactaatacctcatatgcctctaccactaaagctccattaccacatcgttcaaaagcatcaccaaagtgtaaaacttgatcagtagtgtgggataattttaaagaagattccaatgaagattataaggctgcatgcaattattgtggtacactagttaagtttaagggtggaccaattgctatgaagaatcatttattaagatgccttgataatccaaataaaggacaaaaggtgcaaagatcaaatgcttccttcttac

SEQ ID NO: 174812 - DNA, 357 bp, Glycine max
  unsure (1)..(357): unsure at all n locations
ggagttctcaaatgcttggaagcattcaaaattctcatctgagaagaactccatatctatgaattntgggtctataatgggacgagaggaaaaaagatttgtgtaccgtatacgctgttcctctgatgagaataatgacccatagggaatggaggaaggaattggagctttctgtgacccaaaatgccactgactccaactcgaagttcctttgcattttttttatggttccgccatttgaagagttttttgggatttcaattggttcaaatgaaagatattgaaaaaagatgaagtttggggtttgcggcgagtgatttgacaagaattgagtgagatatggctggaggaaaaatt

SEQ ID NO: 174813 - DNA, 376 bp, Glycine max
gaaatggaatctgtttctgatctctgctgcattgatattggaatgctgaaaaatgatttatggtataataatagaatgacaaattttggcaaagccaagaacgagatgactattataaagacaaactgacatgtaccatacatgtttaaagcaaggtacaataatcaccatatatatactcaaagcagcttccagttcaaggaatgatgccaatgaagcacagcttgatattccaatgtcttcactacaatgtggtgatccactcctccaaaacacatcttctctgtggcaaagtaaatttgttacaatatctatggatactcattcaactcttgcatcacaattttgatcattgagaggtggtcaattaacttat

SEQ ID NO: 174814 - DNA, 426 bp, Glycine max
  unsure (1)..(426): unsure at all n locations
agctttgagacttgaagaaanttttgttttttacatgtccaactccnagagtggcattggtattgattgttgcatcttacctctatcttctcatatgtacatcatgcatcatcatgtagaggtaagaagattgtttctaaagctagaaacttcttcagtgcataaaactctctgttttaatcaattacaaggctgatcgtaatcgattacacaagtgttagtagcttgcaaagagattctagttttggcttaatcgattatcagttaatcgtaatcgattacatagtttagttaagaccatgtctggtttttcatgagtctctgctttaatcgattatcaggtgatcgtaattgattactccattcttaaaggttctcccagaagtgatcaagaatactttaatcgattacatcaagaacctaatc

SEQ ID NO: 174815 - DNA, 361 bp, Glycine max
gtttcaagaatccagattcacgaataatcgagatcaagattcaagaatcaagagaagactctatctagataagttcttattttttttttcaaacattggggggcacaagaatttttcacaaaatcttttaccaaagaggtttactttctgggaatcgattaccagtagccagcattggtttcaaaactgatttgcaaagctgttatcaattaccaaaatcatgtaatcgattaccaatgttgtaaaactttagatttcaaatttcaagagtcacaactagtgataaaatattttcaaatcattttaaacttgtgtaatcgattactcaataattataattgattaccagtggttctaaacg

SEQ ID NO: 174816 - DNA, 432 bp, Glycine max
  unsure (1)..(432): unsure at all n locations
agcttccttaagaatattcctataaaagctatagcttagctacacacacctctctaatagctaagctcacctccttagatgagaagctagagcttagctacacacacctctctaatagctaagctcacctccttgagatgagaagctagagcttagctacacaccccctataatagctaagctcaccccaattccaaaaatacatggaaatacaaaaaaaaagtccatactacaaagagtactcaaaatgccctgaaatacaaggcctatactactaaaatggccaaaatacaaggcccaaaagaaggaaaaacctattctaatatntacaaagaagagtggacccaaccttggcccatgggctcaaaaatctaccctaagggtcatgagaaccctagggccttctttagtagctctagcccaatcctcttg

SEQ ID NO: 174817 - DNA, 424 bp, Glycine max
  unsure (1)..(424): unsure at all n locations
ggaatacaatggaaactcgaaacttattcaagctaagatttacttaattcgctcaagttttcattgtccagtaaactgccagtgttacactactttgttcattntgtctcagattattcccttttgattcgacaaccttaacacaaacatcttcagagctttgatccattgagagatctcagctagccgatgtctaatagatttggcacttgatacaaggccactattatgcagagagagtggggacaagaaatactttctgtaacatatctttggagaagtataatctgccagtgttgcctagtgctcagagctgactttgattgtacaaatcaaaagaaacattaacaacataagacaaaaggatataagaatgtcaagaagagataatttaaatcttcccttttgtgcgctatgacatgag

SEQ ID NO: 174818 - DNA, 427 bp, Glycine max
  unsure (1)..(427): unsure at all n locations
gattttaagcactgagctgaactactctaacaaactgtaagtcttttacagagggggttgaatggattttagaaatttaaaccttcttctaaaacaaaaatgtgttcacctgataatgaaaacgtagaagaatagagatcaaattttcgcaatgcagctcagatgataacctcggattttataaaacaaacagaaatgttaaaaagaaataatcaaatcgaagccctgagtcagtttagagcacaaaagagaaaagcangcaagataagacacaagaagttatattggtttgtcttaaccaccgagacaacgtccagttcttggcaaatcaccaagttccactaacttcaagaagttacaattattagtcactacgacttctagctatacaactcaagctctataccacactctttacaatcaatat

SEQ ID NO: 174819 - DNA, 403 bp, Glycine max
  unsure (1)..(403): unsure at all n locations
ctgtcanggttagattatgcacaatatcatactctctttatttagaggataacacctaactcgagattcaatgttattatcaatcattgttcacacatggtatactaatccttaattccttaagtgaaaagatctaagtttctccattatatgttaattccttgctcattcgacaaagaaacttgctttatgcttaatgacccaaaaataactaataactctcatcctattcctagctttgagagttaatgggtgttttaccacaaaccaagaaaaagagatatgttagacaagtggcctctgatatcttaagaagggggggggggttgcattaaaacttttcacaactatctccccattacacaatttacttttttttaatgcagtttcaactcccctaata

SEQ ID NO: 174820 - DNA, 378 bp, Glycine max
ccatgtttatggttgaaagttctgtttgaatcaatattcgatatcctatcatggagggaaataagatgaatgcatgaaggaatgcttatgctatgcatgacacaaatgcattttatggacaggagagccaggatgatcatcttttcttacttgcaacatttggcagtgcggtgccccatttatgcatttaagaaggtcatacgaaccttctgacttcccgtgatgagaccaaatgcaacacatgcatgacgatgcaatacaaaaataaatgcataaaagcacatggttgatagcaacaagaggaatgtataaccgtggcaatatcatcaaacaaacatacagcatagacgcacaagagcatgacattaaaagatatgc

SEQ ID NO: 174821 - DNA, 371 bp, Glycine max
  unsure (1)..(371): unsure at all n locations
caagtccatagccctcaaagactgaaaagagtatgatgaactaaaggatggcaatatggccaccgatgaagccctggaatgagaaaccaagaaagcccgaaaggaagaacacgaccaaagcacagctttgaggggctttatagggcagcaatagtgagctcaagctccgaagaggtgaaaggaatcatcacgggtcaaaggcatgatcttgaaggacgagctaangggttgccttatgtcgaanagaaatctggcccaacagttaagcgagactgaagggaatatgtgggccatcatcgataagtgcaaagaagagctanatctagcggcgactcacgagcaatgctagaggatgaggacgccaagatatc

SEQ ID NO: 174822 - DNA, 309 bp, Glycine max
tatcatcaacataaacaaggatagctgttatagcgttatcatctgagagtatcagaaaagagagtgatccactgataattgacgaaagccttgtgagatgaggaatgattatagcctggtgaaccattgcctacttgcttgtttaaagccatacaaggaaccttgaaggcgacaaacgaggttgggtttatccataaccaatccaaggggaggcttcatatatactctttcattgagatccccatggagaaaagcattgttgacgtctagttgtctatagtgccattttctatgaacagcaatggctat

SEQ ID NO: 174823 - DNA, 403 bp, Glycine max
  unsure (1)..(403): unsure at all n locations
ctagacctgaagaggctttgcccagagtctacatttctggctattattccaagaaganggggacccttcctcacttactatattttaaattctttaattttgactagcctaatcacactctaatgttaaattttaaagagattaaagtataatcacataaatgtaatatgctccggtttgaaacatgggtttaggtacacattatcggccttaccaataactgtgccttggggatgtatatatacaatcggtacactatttaacattataatatgttctaatgtataaatcaataagctgccaaaattttttaattcttataaaatatttgaagtattaatattactgacaattggacttatattatttatttgtgatagtttattcgaatcttatgatatat

SEQ ID NO: 174824 - DNA, 311 bp, Glycine max
aacaacaccgattggttccatttaccggacgcgcaccatttactctcatttttgcagtacctttacaggaaatctgtttttttggctccattgccaccttataatggctgcatattgataacatgctaccgggttctggagtaagaatctttgtactgtggtcggcacctgatgttttagctcggcttgcatcggtttaccaccatgtgtgcctaaatactaatatttacagctacctgaccactgatcagcttcgttaccaatgtgtcagtggtgaacatgacttacatgagatgggatcagttactcga

SEQ ID NO: 174825 - DNA, 384 bp, Glycine max
  unsure (1)..(384): unsure at all n locations
ttaatcaatcagtttgatatgattntggtgtacaataatttaatcgtgaacataatttgttgatcgcatcacacgtgtgctgaaattggttatattcaaacggtgcgttaattaattagaagatttgataattgatacgtttgtgtacttaaaagcaacgtatggtcttttgtaatcgatctagttgaagattttgaaatggacacaaactctctataatttaagttttggtcttatagtcgacagtggttaaaaaatgttattaaagctctatttactgaatgtttttgggttattagaccatgtataatgcgatattgtttaaaacatatccataactaatccttaattattgaggagaattaatagtcatgccaatacctg

SEQ ID NO: 174826 - DNA, 375 bp, Glycine max
atcatgtcatcaaaccatacactctcacatgccctcccacatgataaatgttaataaaaatttgctttataatttaaaatttatagaaatatattacttatattaattttgtttttataagataagatatttattatagaatctgttactaaaactaacattcttatcttttaggattttgtttttagctggtcaatttgatttgttaagtgtttattatgtttttttgctgcaagttggtttttaacgtttagtaggtatggtaattttactttgagtattttgtgcttctgcagaaatgggttatgcctatatatctctctcatttagtcaatgggcacaagcagaaaaacaatttatatttttttctaaatt

SEQ ID NO: 174827 - DNA, 450 bp, Glycine max
  unsure (1)..(450): unsure at all n locations
agctntcaacaagagtcttcacaaataactatcatgatgtcttanaactaacaaaactacccatcatatctcccaaaaccccatacccacgaaatcaaaggagaaagaagtccacccaaatctgaaatttcgaagtcccactcgtagacacgcacttcacgaccccgaaaatgcccttctttcacgatttggggcagaaatgatggccaaaggttgaagctctgtttggagcttcaatggagaatgaagaagaagagaatggcaacgtgagggagagagagagctgtctgaaatttttttctgttgagtgaagtgagagagagagttgctctttgattttaaaaaggctgtttcctcatttcttattattttattataaactatgccacatgtccccatttgagtggagcaaaaagggcccactttcccttttgactgtgacccatactt

SEQ ID NO: 174828 - DNA, 443 bp, Glycine max
  unsure (1)..(443): unsure at all n locations
aaactaagctgcctaattactgaatgagaaaaatgatattattttcacatttggaagtacttagnatttattacctatacttaacaaanaaatacttataacactacaaaataaccattaattggaagaagttgatacaatttacacaagctttatacacaaaagttagtcgtattcaccgactaacacttaacgacatggggggtcgcttagcggatattgcagaaaactctgcttctgcataatcggcttagcgagctactgcctgctaagcctaatgataaccgcaacaaatatgcgctaagctcaaaagggctgagcttagcggaccaataatntcagaaatntcactaagtatgggggcttagcgagctaggctcgcttagcccaatggctgccataatgaaatgagcttagcccggatatgctcggcttagcacgcg

SEQ ID NO: 174829 - DNA, 437 bp, Glycine max
  unsure (1)..(437): unsure at all n locations
taagcactgagctgcagctttttgtcggattgtctaaattattgcaatgtanttcggctaggtttcttcgtgcgagctcaaccgaagttgtattcggccgacaccggcattttgtcggccaggaaaacattaacccgcctcggccaaaaaacatgattcaccgatattgacagaaaaaaatgctagccctagtcggccaggagagatgaccgatcaaggtctaaaaaagaagcatgaccggattacgccgatcgaacatttcctaatagatatcctccacgtattattcacggattgaatggaaaaaacaatagctgacatcggtagttaaatagccgngactgacatttttcagccaacattgcgcaattttttccacacgctggccgaaatattttttactgaaaggatgctttcgttgtgggtgtcgctataaa

SEQ ID NO: 174830 - DNA, 381 bp, Glycine max
tcaacaattcatttcgagcgcctcgatgtattacgggactttatcttacatccgaagtaaaagttattgtcgtttgaatttgctgagagctccaacattcaatttcgagccgtctgatgtattacgggactcaatcagacatccgagtaaaaaggtattgtcgtttgaatttgctgagagcttcaacattcaatttcgagcgtctcgatatattacgggactcaatcagacatccgagtaaaaaggtattgtcggttgaatttactgagagcttcaacattcaatttcgagcgtctcgatatattaccggacttaatcagacatccgagtaaaaagttattgtccgttgaatttgccagagcttccacattcaatttcgag

SEQ ID NO: 174831 - DNA, 427 bp, Glycine max
agcttgtaggattatggggtacccgtcatatgtggtactaggtgtcgatcgggcaatggtgcaagtcgactctccacatcacaaatcacacataaatccaccatccctagttgcccaccttcaactgagctcacgtactcccacgtagcccttatcctcgttcctctcaacaccgggtccgcatcaatccatccaagcttccacaacatccaagcaattcaacatccaaacatcatgaactatccaaaccaagaaaatagggccgaggcagaaaactctgcccaaaacacattccaataccacagttttcctcactcaaataccccagtaacattctcttcgttttgatttgctaaccgttggatcgactctaaaattttactggaggtccctagtacataagtctacattttgaccgttgggatct

SEQ ID NO: 174832 - DNA, 423 bp, Glycine max
tcagggtgctcattgactctagattgctgcttataaggacagatgtctgtatggggatctgcagaagaacatataccacagactcttgcaacaggtgcagatttctgattcatggcaagctgagttactaagttgaccaaggcatcaagttttccttcaagctttttattttcagtagatgaagatgaattcgtggccacctcagggactcctctaagaacaataacatcatttcttgcactgaattgttgggagttggaagccatcttctcaatcaaattcctagcttcagcaggggccatatcaccaagagctccaccactggcagcatcaatcatactcctctccatgttgctaagtccctcatagaaatattgaagaaggagttgctcggaaatctggtggtgaaggcagcttgcacac

SEQ ID NO: 174833 - DNA, 424 bp, Glycine max
agcttcgcaaggaaactttcatttagtttgtgacctatgctataaatagaagaatgtgtaacatttgtcataactttgatattgagagtcttgtgagacatacttcaaagttcaacttctctccctatctttccttcattcccacgccacttttgtttctctctctctcttattattttcctccattgaagcttcttatccaagacactctcttggtggtgaagtttcttcttccatggcttattccctagtggatggtgcctcctctcacctcttctcctttatcttccgcttcaactccatggctaaatatcaccactgaaggacctcattgaagctcaaatatctagcctccatagaagcttctcaggcaagcttccatcaagtggtatcagagcacaagagcttcaagtaggttctcctt

SEQ ID NO: 174834 - DNA, 429 bp, Glycine max
  unsure (1)..(429): unsure at all n locations
tgctaagacaatgcacactgtctctatttcatgtctcttgactttngactatatatcttttgtccaatcagtagaatcttgggtgttttgtaaatttggtgaactctctgcttcaagcattttctttttttagttcatcctacataaatataccttataaattattaccatgcatcaatattcttaatacctcaatgtcaccaaacaaaactcatttcctcattagttacccccctcacaccataaccctttattagaaaattgagcaaagcaaaacacgaaacaaagagaaaatattgaaatataaaaaattcttacaattatagtagcaacattttcagtaacaatgcttccatcttttagttcaagtgtcaatataaatttatgctcaagaaggtttncactcattggcctttgttgtctaacatt

SEQ ID NO: 174835 - DNA, 435 bp, Glycine max
  unsure (1)..(435): unsure at all n locations
agctntcatatgatggtggtttagaggctttcataatcatggcaacatcttcatcctccatcttaacatctatatctcttaatccatcaaaatagaatttaattcatcaagatgatccttaagagatgtaccttctttcatgtgtataccaaacagacgcctcttcaagaagagcttgttgcatattgacttagtcatatataacttttccaacttgagccagaagccacttgcagtttcttcatttgcaacttcatataaaacttcatcagacaaggaaattaagattagtgagtgagccttttcttcttgttctacaaggtctttagtctttgaaacagaggccttttcttttgattcagaagtcacttctttcttcatagatgcagaagcaacatgagcccagacacgttgttcctttaacaaagcacacat

SEQ ID NO: 174836 - DNA, 389 bp, Glycine max
tggataagctcaatagcgtttctcttttttttttcttatctcaccatggttcaattgatatgacttatcaaatgatttcaggcttgtgtcttgttgccttttccaattatattggggtcaagacagcccacggtttaggaggcttctcaccaagattaatacaagagcatgaagtgaaagcctttggaatatggacagatgtagcttgcgcttggcaattatggttgtgctcttgctgctgttaagcttattatgggaattcagtgcaactttggtaacagctaagttcaagcatggtggtggtgatgctcacttatggtttgcttgcatggtgtcaatgatgctcaattatggttttcttgcatgggaagacctctagaggtgtggat

SEQ ID NO: 174837 - DNA, 420 bp, Glycine max
cacctgcggcatgcaagctcaccattttccatgaatatctgatttgtccatcaaagtaagaaattgttaatgttcttatgttcaccagttcatgaaagctagcaccagaatctggaatccatgtggagttagcatttccatgaggtggaattggtgagcataacacttggttgtgttgaggctggagcattaattccagatttggaattgggattaatccaagtattgcaggttctgacaaaaccacagtagtagggaataggttgaagtgctgctggatcaaagaaagtgagtgattcatgaggttgaaaactcatgtcatacctaaagtgacaaacatttgcagtatggccatacttaaggcaacattgacattgaaaattggccaatttgccatcactgtgatctctgctggaacca

SEQ ID NO: 174838 - DNA, 433 bp, Glycine max
  unsure (1)..(433): unsure at all n locations
acacttnaaactcagctgagcttctagcgaagcaccatttgcttcactagtttatgngancnnnactngttggtgatcaaatctactcgggtcttaagagggtcagatttcaatgccaaaaaagttctatgcacgtatgcattaccagtggtgggaagatcctgttcaccaaaaacaccttaacaattacatggggttcatccacaattctcaaatcaccatgtggcaagggtttaaaaaacactccgcaaccgcgatntcagcctcaacatcaaagtttttggactcatgtatgcaaatttcccgcaatgtcaaggatcacgaaaaaaccgcaatttaaaatcttgccatgtgggttatgctttaaactaaatcttcaaaaatgggtcatctcatattngccaaattgaaaatggtgttcaattcaaataaa

SEQ ID NO: 174839 - DNA, 412 bp, Glycine max
agctggcctaattaacttgaaattgagagtaaatgtctattaaacacacaaaatggaagtactaagtatttatacctatacttaatagaaaatacttatcacacattggaagagtgtgatacaatttacacaagttctatacacaaaagttagtcgtattcaccgactaacaatgttctcattgctctcatagtccttggatagaagggtgatctacttctccgaatcattggatgagtcattgtcatcccatgcaatatacgccttcttggatcttctctcttcatgacttttattctcattcttctcgggccatgactcatttgtggggtagtgtgcatttatgtgaccgggttgattacacttataagcattaagtgttggggaaccttcttgagatctcttcccattg

SEQ ID NO: 174840 - DNA, 403 bp, Glycine max
  unsure (1)..(403): unsure at all n locations
tgtacttggtataaacatgattgatacatgatttgggacttgtangattcaatatgggtaaaactggatgaaagtaagagtggttttcnaaatatgcactttatgcagaattttgctgttgaaatgtgcagcagaattctgtatatgtgcagaaaaaaacgcttatgtatggctgtgtgtggaaagggtagtacatatggggttctggacattttctagcagatcccaacggtcaaaatgtagacttatgtactatagacgtccagtaaaattttcgagtcgatccaacggttaacgaactggaacgaatagaatgttactggggtatttgaatgtgaaaaaagctgtgatattggtttgtgtattgggcagagatttctgcctttgccctgatttcttggct

SEQ ID NO: 174841 - DNA, 361 bp, Glycine max
aaaatgcttattaaaatcatgactttcgaaagaatgagttttttagatgaataaataagacgaagtagttgtatttattaaaataatgattttaaggtaaataaaataaatatatgttcttaagaaatatatctatatagatatgtttggaatagattttattttaattggtttgttttttttggaatgctcagacatttttttcaatatcaaataatgagtgtatctgggaaaaaaattactaaaatggatgccctacaatatattaaggaagtacaatgtgcatttcacgacagcagagaaaagtttgacaagtctatggatgccatgaaagattacatatttcataggtatgaataag

SEQ ID NO: 174842 - DNA, 356 bp, Glycine max
aactccaatctgagatgctggttaatggatctaaactcccgttcacttgaaccaacataacgcgtgggtgagatttatgggctaaatttactcctcaaatgaacaatttatacagaattattaatatcaccttttaacatctattcactaagatattataatttattgaaaaaaatttacacgtttaggtatacatgaataatatctagaatattaataattgtttctattattgcacctttataataaatagcccaagacatgtccaacaaacgtgtttgatgaaaaacaatactactcattaaattccatactaaaatattaattacctcttacaataattcttgataactatc

SEQ ID NO: 174843 - DNA, 467 bp, Glycine max
  unsure (1)..(467): unsure at all n locations
gatcctcaagacacctgcggcatgcaagcttgcgtcagaagaaatagtaagaaactaactctctttgtgccaaagcagatttgtgcaacaaagctctttctttgattgtgattaaggattttagagtctgacttcatttattcttcataggattcggtatatcctaatagaaagtatcaaataaagtcttaaatatcactttaatgccgcatcaaataatgattcaatcctactactgtctgaaacatcaaacacaaacttggcaaaacatgttttgataacgcataagaggaagttttttttttcctttgtattcatttacatctaatcaaaataattaagggtcctaattcatcttaagacataaatgtcttttgacctaacatgttgtaaacacccttatgtttnctttaacatagattatggtttaaaaacaatatcaagcacatatcaaaatccaagtgtta

SEQ ID NO: 174844 - DNA, 386 bp, Glycine max
ttcggattcctaagactcaaatcataacaaaacattattgaaaccacaatcactaaagttattatatttttaagaattcgtgaacttcagaatgcaattcatatcccgactagagttattagaagaaaaaaaaagaaaagcacataaaactgtcctttaccggatttaatgcaaggcagtcatcaagccatcgcacagttctgtctactgaggttttgttccttttatcagtcacccaagcaggtacttcatcagccaaagtggcccatatattaggcctcatgcatgaaatcatttcaacataatctttgggtttaatctggtcatgtaatggtaaaatagaattataattatttgcttaaaatgtaaagggtaagcagagaata

SEQ ID NO: 174845 - DNA, 437 bp, Glycine max
  unsure (1)..(437): unsure at all n locations
agcttcagcactagtcacgccatcccgtatttaatgctacggcccttataaattatcgntggctaaagatatgtttctaatcctttgaactgcccaatgtttctgtgggacatgaccgcttaacatgttgttatccaatctaagagaattcatgtaactgctgttatccaaacttggtggaatttccccattaaacttgttatctgagaggtctattggaatagcactagggagtaatgtggatatatcataagggatgggtcctgtgagctcgttgtgtgaaatgtctaatcctatccacgaaaagcaaccccttaggccttgtggaaactcacccttcagacccatgtgtgtgaggttgatattaatcacttttatttccccatgttgtcatctttcacaccaacaaatacacttatgtttacgctcgtgaactt

SEQ ID NO: 174846 - DNA, 341 bp, Glycine max
aagctccacagcagccgagctaacagaaaccgatccagaagaaaagtgagactcgggactaaccacacttccaaccgatatcgcccgatggaacaaaccactgatattcttatcaaaaccaggcactccctgtccagcttgcacaacctgcttcacctgagcaagaacaagaccttccccaagaacaagtgagtcaagccctgacgccactacaaatagatgctgcgcggcggacgcgtaatacagcaaaactcggcgctcccgaagctcaggcactgaaaacccacccacctaaacaaaagacacaaccaggaggtttccttgccaaacacaaacaagaa

SEQ ID NO: 174847 - DNA, 419 bp, Glycine max
  unsure (1)..(419): unsure at all n locations
tctttcatctactggacttagagtccaagaaagaagttaactttcccatcatagacatctcaaattctatctaatacaatggaaaattccttacacaaagtttcattagtagaactaaatataatattatcaacatatattggaacaattaacaactcattgtttactttcttaataaacaatgtttaatcaacttggtctctagtgaaagattgctcaagtagaaaactgctcaatctatcaaaccatgaccttggttcttctttcaaaccatactttttcagtctatagacatggttaggatgttagtagtccacaaaacctgggggatgatctacataaacttcttcttcaatgagaccattaaagaagaaacacttcacatccacctgaaaaagtctaanatccatgatacatgc

SEQ ID NO: 174848 - DNA, 439 bp, Glycine max
  unsure (1)..(439): unsure at all n locations
gggtagtggttaattcatctcccctcttatgttattgagtgtacttgttctacagncatatgaaagatagatatatttagacatttattgaattggtctttgctacaagggagattgatgaaatgggcaacaaaattaagtgccttttaaagaatttatgttcctttgcatgcggntaaaagtaaggtatgagctgattttttggctgaacattgatgtgtagaaattgaggatgtttgttttgaaatgaataactatattggtttacaaccttgtgttttaatgtttaatggatctaatacaagggatgacactagagtaggaattaacgttacagatccctaacgaaaggtgtatcgattggttaactggattgcagcanattcaaccaataatcaagtcgaatatgaagcattaattaccatgggagctcaatatg

SEQ ID NO: 174849 - DNA, 410 bp, Glycine max
  unsure (1)..(410): unsure at all n locations
acctgaggcatcaagctttttgcaagcttatggtaaaatctgtgacctatttcttattgaagnctctacagaggccattgcctccctcgcccagtattatgaccacgcactgacgtgcactcaccttcggggacttccagctatcacccatggtggaagaatttgaagagatcctatgatgccctctaggggggaggaaaccatacctcttcacagggttctatccctgattagctagaatttccaagatagtccaaatctcggcgtaggaattagaccacaggaagcaagtcgaaaatggggtagtcagaataccgagaaaatatttggaggtaaaagcaagaatcttagcagataaaggcgagtggatcccgttcatagatattctcacactgttgatattttggggg

SEQ ID NO: 174850 - DNA, 425 bp, Glycine max
  unsure (1)..(425): unsure at all n locations
aactaagctttaactcttacaaaatgaagctcggaaccacgtgttatacaagtggcctcanatatcttaagaggcggggggggggttgcaacttaatcactctcccgccctcacgttatatagagggaccccttgcatttgtgactagagggtggtcccgcattactaactgagcaatggcttggaatcatcggtggtcgaagccctttctttgtgtcaacatcctaactcaaaagcgctacatgtgcgagatgaaataaaccgttaccgcacaggatatccgcatgcatctcgcgatcgcagtgtcgcaaatctaggaatataaacatctgcggctcgtcgtcagtgtgggcgaacatttccacaaataacctgtttcgggaatattagtccctccacgggggaaccggcgcggtctgaaggac

SEQ ID NO: 174851 - DNA, 423 bp, Glycine max
  unsure (1)..(423): unsure at all n locations
gcctgaggctacttacttcctacattggctngaacaccatgaggagattcacaccaaaaactgaattaaagacatggattacaagatttgcttccacttttttaactttgcaaagaatgcataagcaaaaggccaatcttagaaagatgtttaattcaaatgaatggttgaagtctaaggcagctaaagagcccaaggggaagcaagcaacagatgtngctcttatgccatcattttggaatgatgttgtttatgctttaaaggctatggggcctcttgtaagtgtgttgaggttggtggataatgaaaaaaaacctacatatgggttcatttatgatacaatggatagggccaaagaagcaattccaagagctctcaataacaatgaagggaagtataaggatatccttgcaatcattgata

SEQ ID NO: 174852 - DNA, 368 bp, Glycine max
attacagccgcagaggatgtgctattaaaaatctataatttgacctaagtgtgccagtcttataagtatttattgtcggcatcatttaatttattgtctctaccaccttgctaattcaagattttggctaatttatactctaaaactgtctgtatctggaactaccaatctcaggtgtgacattctttgtagttgagatgctatatatcgttataaataagggtgtgcgtattttgcattagaaacaaaatcatcttttttcttttcttcctatcctatctagtgaaaatgaagtgaacggctattggatgaaaggcttgatattgatggtctagctctaatagtgatatccgagaattgaaagttta

SEQ ID NO: 174853 - DNA, 434 bp, Glycine max
  unsure (1)..(434): unsure at all n locations
agcttggaaggatgcttcaatggaggaaaatatagatggagagaaagagagaggggggagcacgatattgaaggaagataaaggagagaagttgaactttgagttgtgtctcacaagactctcattcatcaaagttacaacaagtgttacacatgcttctatttatagactaggtagcttccttgagaagatttcttgagaaaacttccttgagaagcttctttgagaaaacttccttgaaaagctagagcttagctacacacacccctctcataactaagctcacctccttgagaagcttccttaagaagattcctaaagaagctagagcttagctacacatacctttctaatagctaagctcacctccttgagatgagaagctagaacttagctacacaccccctataatagctaagctcacccncatgaca

SEQ ID NO: 174854 - DNA, 363 bp, Glycine max
gcaaacaccggaatatcactggtagaagcatgcttcacacactgcacaaattaggcatgacaaaaactaatcaaaaaacaaaaaccaataaagtttaaacaatggtactcctggtttataaaaatgtccaccatcataaaattttccatcagtcatgttaattatcgcaacttcagagtctcaattattaccttcacaacttgtagcacataatatttaccaagaatctgatatatttttatacaaaatgtcaaggttttttcttatcacttttaagatttttttaaacaaaaaagctcaatgggctagccaacctcaacccatttatcaactcattttggaacagctatgtgggctgggatg

SEQ ID NO: 174855 - DNA, 431 bp, Glycine max
  unsure (1)..(431): unsure at all n locations
atccttatagtcacctgcggcatgcaagctttaacataagccaggataatgaatggttngccaaacccttagctggaaatcaagtttatgattgggtgaaagacatctaactatctttgggaggacccaatagaaagatgcatttgagaagaacatatggaaaaaaatgtcattattctttgatcttctatactggtttgatctaaatgttagacattgtatagacgttatgcatgtgaagaaaaatgtatgtgatagtttaatgggcacacttctaaacattaaagggaagacaaatgatggcttgagtgtcatcaagatttggttgagatgggtatacctgagcaggtacatccgatatcacaaggtcgacaaacgtattttcccccaacatgtcacacaatgtcaacaaaataaaaaaaagttttttc

SEQ ID NO: 174856 - DNA, 380 bp, Glycine max
  unsure (1)..(380): unsure at all n locations
taaacaagcggaaatggtcataattgattctcatgtatgggtttctctgnttctcatgtatgggtttctttgtcctttcgtttggttcattattaaccattcaaccagttacttatatactttgtctattacagggagatgcaatctatgttgtctgcaaacaaaatcaactaaagtcttggaatgctgatttgatggaaaattgtacttatgtaatgcataattttaaagttgtgaagaataatggtcaatttataaattgtgatcacccatatacattagttctcactggagttactattgtgaggcaatccgattagtaagatcttccctttaagaaatataaatttgctgatttcaccaaatgtattgttgggctc

SEQ ID NO: 174857 - DNA, 430 bp, Glycine max
  unsure (1)..(430): unsure at all n locations
ctgcaagctggctaacctatcgacatcctgcttttcacttgtggagggcncgccaatttgcatacgtatctggcttagatactatgaaagtcctccagttcaaaagaaaatataacaataaaatacttatttcgtttgataaccaagttgtataaatagaacatatatatcgacaacttacatatgtcctttgagagtgaatatcaaccccattgccagacattttctcgtgggtggccaagaaatcagggtccataaatcacccaacacatcaaaccttatcaatgtccttctggatgtgcctctgatccaaatgagcagagtcacggtccttctgcttcttctactgcctctcttactcgtgtagaatattngtttccaattgcctatatgatatctgtagaagattaaacatcgaatattccttaat

SEQ ID NO: 174858 - DNA, 369 bp, Glycine max
gcataagaaaaagagaatattaacacttggtttatattggttcactccagtcttgaactacgtctagttcacctttaataatttaaagggttccaacactcaaagatgattataaagacagtattctaccatattcattattggcttacataagtattctataggccacttctaacacaccctcaatctacccttagattgataaataactaagtattcttttatcacatgccactctttacttttcaaaccaaagtttgaatgattacaaatctaaatcaactctcacatagaggatattcaatgagaaatatatcacaaagtaaacttcttaagcaaaggatgacacactatgcatttgtgtatgat

SEQ ID NO: 174859 - DNA, 401 bp, Glycine max
gaccgcggcatgcaaccaaacaatttgaatttttttattcatacacgaagcgcacaagcgctcctcattttaacaaaaaccttctgactcaatgtccattaatgggcgataggaatgtccactagtatatagacactgcctgatcgcaatgttactctaccggaagtacatcattatgcccataagtcaggctaactggggtagtaatagatgataacttaagagatattctcatgcccatataactgatctaacgtttattccaattcttggtttcgagcaagtgattttaatcaagtaatactatgttatggctgttcgacctaccattgattcacgtaatatgtgtgaggtaataacgaaatcagtttatgggcaaattttctttatcgccacgaaac

SEQ ID NO: 174860 - DNA, 431 bp, Glycine max
  unsure (1)..(431): unsure at all n locations
agctntctagtgtgccccagggtngaaaaatgccccanaagtgaccatnttacccccattttgagtattttgcacattccttccaaaatgtcaaaaaaccttatggaatgcacgacaatttgtgttaagcaactcaattcggctggcaagaatccaaatgtttgcaaatgatcatccccggacgaaattagggtatgaaagaagtgtatgttcgagggaacaaattgtttttaggtggatccttctcttggagacttcatggaaagaactaaaataacaaatatcacactagaaaggagggttgaataatgtgttagataaaacttanagctttnttgaaagatagagtttcacaaaacaagtttatcacatatataaaatgctcttaacatgagcttccaaatgttaacaatagattntcataaagacaa

SEQ ID NO: 174861 - DNA, 426 bp, Glycine max
  unsure (1)..(426): unsure at all n locations
tatctggttgggctgatgaggtaggctatactgcangattactcaagtatggttgagggtgatcctcagtagcatcaaatgtttgtgagtctaacaaattggtggaaaatggtgcagaaagaagttgagtaaaagaagatgtgtttggttcatataaattttgttgtgcatgggttaaagaaaaagtgttttggattgcattaaatgtatgtgaataatgggataaggataatattgaagttcatgagatacttgttgagggtttgtggtgggaagtgtatgtatctggatgtttgcatacaattcaatgcatgaaagaatcttatgttggaaaacaaaaaaaaaaaatcatacctctgacatctttgtcgttaacaagttgtactattgtaaacttaagcatttcgcaccccactacttgtaagt

SEQ ID NO: 174862 - DNA, 410 bp, Glycine max
agcttctaggagtcttctatccaatgcccttgtgggggaggattgcatcactatccaccaaaccatttgctccccaaacacaaagtttgagatcatcacggtatccaaacacaaatagcacataaggagtgagttatcacattcctaactaatagagagaaacaaaacaacattgatatacatatcatataaatgaaatacaacatacttaaacacaactcacgtcattccaccacttatcacctgacatcacatctcaacgctacacgtctgacacatttttacatcagtcacatactcaagaatcaaaacacgatatcactcaaccaatcaatatcgatcaatacacaagcatgatgcagaatatatactaagactcaatcctatatgcaatgtggtaccatgtcagt

SEQ ID NO: 174863 - DNA, 374 bp, Glycine max
gaattgtgttagaccaatataatcaatgcatcaacgtatgaatgctttcataaaacatgaaaatggttttatgcatgaaaagctggaaacatcattctcagtattagctttctaagcacaacattatgaacaacaacatactgagtattgtatctgcataacataaattgagtttttcataataatagtattttgaaaaattcttttatttaagaaatcaacttttgaacataagcaaatgttcattgacattaagttctcataatcctatcaaacatttaataatgagtgttatgaataaccacctatagagattagctatctaagtgcttgaacctctatgtcaattctttcttaatatcaaggtaatcttg

SEQ ID NO: 174864 - DNA, 438 bp, Glycine max
  unsure (1)..(438): unsure at all n locations
agcttaatagtcagcaagacccgccatgcgtgcccatgtccgngaacaaaatgcaccttgattatataaaatcagacaaggattcgattcatggtcaaagttacaatcatggttaccttgcataaacaaacatttttgtctccaatcttttcttctcttgatgcctaattcaagtcaacaaaaggctaagcaccttgatctaaaaaacggggtgtgaatatgaaacacatcatcatggagaagaattaatggactggagcagcaacggggattttgtctaagatttgtagagcctcttttatggacggtctcttttgtgggacatgggaaacacagctaatccccaacttgaaccacgccaataccacattctctctcccttctatntcagacttcattgccacgtcagctatcctcaagacccggttgttctcatct

SEQ ID NO: 174865 - DNA, 436 bp, Glycine max
  unsure (1)..(436): unsure at all n locations
gatctcaagtcacctgcggcatgcagcttacaatcgtgtatactattgatctttcaattttgntaaatatgcaatactagactcaaaatatgcaacatacactagacctaatcatggtcacagaaattggaagaaaatattttatccaagcacaaacttgaagccttattccatgtattgtggggaagatatggctggccatatgggtagaggtgtcatacaggagcaggtttggaggaagggaccttggactgctgaaggggacaaattgcttgttgagtatgtcaggttgcatggtgaaagcagatggaactctgttgctaggcttgcaagtaaaaaacaccaaactctttcactggtttgtttcttaaatatatattggatgttacatttatggtgacatatagcaaaaaacaactgaaatgttacaactcta

SEQ ID NO: 174866 - DNA, 431 bp, Glycine max
  unsure (1)..(431): unsure at all n locations
aaactaancttgggatttaagctcaaaaaagcttagactgcgggattgttgattttatatttcatcctccacaaaatccccatcatcacactttaatttgtgacaatttcttgtcaccaatgcttattgatttgcagttgattgttgtctcattctattggaacacaaccatgttttgagagttaatatataacatttaacatgccattgagttccaacacaagttggtataaggggatattaatttggaacaaatgcctaccttttcatgggtgtaagttcctaattggtctattgtcaataccttactttctatgcttggtgaacaactttctcattctttaggagatctcttaatgcataggaactatttatttagtcgcaacttatttacaagcaatatgtttaatttacgggatggcacattcttg

SEQ ID NO: 174867 - DNA, 412 bp, Glycine max
  unsure (1)..(412): unsure at all n locations
agcttgtagccatgtagatcttttaacttctgagaaacttctgcttgggtatatgatctttgtttagagacaactgacaacaagcggaacaataacaaatgataaagaaacaggcaactgttagaaaatttcataataatatgaaaaatatgaagaaaaaaaactcattgtttatagaataggttatttcctatgccaccatggatcaaaaagaaaaggaagataactaagcaacgggtaaaatcttgcagaatgacaggaaaaatacggggaagataaaacaaaaccaaaatcaccgggaatgttattaggtgggtcacacctacctttagcagaatttatcccactatggtgaggtgaactgtnttcctgctgagataattccatgggatcattcaccctcttttcattt

SEQ ID NO: 174868 - DNA, 425 bp, Glycine max
  unsure (1)..(425): unsure at all n locations
tcacaaactcataactaataattgtgctttatggtgaaaaatcacaatacatggcgtggatggtggattgccttaacttctgccatctggaagcataagaatttactcatttttcagggcattccttttattaattccaaagttatggatgatgccttatttttggcttggtcctggtctaaagctagagttaaaggttttaatatcccttttaatcactggtcatcctatctaatggaggccttggaataatcgggtgtcataccttgtagttgggctntgtgaagggttattgttctctttttgggaggctggcagcacagctgcctttgtatgtttatcatcagtacccctggtactgtaagttttttcttattaataaatatatatatattctgccttccaaacaaaaanaaaaaatgtgc

SEQ ID NO: 174869 - DNA, 344 bp, Glycine max
ggggtaaatttggtacttactcttcccataaacaagtctatattatccaactagacttgctcaaactgggtatacgcctaatataccaccaaatcaaaattggacttctcaacacccaatttttaccctagaaatggttctggccttcactatggacatttgatttcctctcttgcacagcccaagctttatcataagttctaaatgacatttccaactaggaataaccctcaatacatcactactttctcactcatatgactacattctcactatctatccctaggttaactctacccttcatccctagcattttccattagcaatttagcacattaactcac

SEQ ID NO: 174870 - DNA, 361 bp, Glycine max
aattgccaaccacttgtaggacttgacaacatctttttcaccacatcaccacacctagttcttggcttggagataacccctcctaaccaccactccttgggatagacaattccagcattcttcacctcttcaagagggcttaacccacataatgatttttctcactcttgggaagcaaatatttctttcaccttcttatgctactcaagtattaattcaactctacctctttaggttgccatcttatagacattctctaagctacccaccttccatggggtcttcctaatcactttctccatctaaactaacctacacggtaatctaggatcatacatatattaactatgaaatggcctga

SEQ ID NO: 174871 - DNA, 398 bp, Glycine max
  unsure (1)..(398): unsure at all n locations
tgcaagctngatgatacgtgaatataacgcagattgatattttcagaaagctattagtttagtgaggaggcccttgacctcgaatcaggatttcacagcctaagtgctctacgttccctccctttccacccttccccacaaccagagcatatcaactggtccgacctaccaaattcgtttttagaaagataaaattttggtgaaaaataattattgaaaaatgcaagaatgataagagactgtatatttatacaaaagttatattataactatagacataaatatattatgggcatatcatatgaccaattttctcttgaaaaattccatttcagcagtttagttttgatgatagtaaagaagaaagtcctttaccattataaaatattttcattttg

SEQ ID NO: 174872 - DNA, 416 bp, Glycine max
  unsure (1)..(416): unsure at all n locations
acatgtgctctcaatacataacattgttatgaangaattnacaatcaatcaaggccatcaacctcattggagtcacttgcacttaatacgcttagaattggcttctctcaaccattcaatgcattcctcttgagtccagatggatgggcaagttgccaagccattgctttatccagctgcaagtgaaaatgaaaacctcaaatttcaatgcagtgtgtacatctgtgtgagtgaaaatgcagtacgccaaatgacttaccgactccttaacaagaggtcctcctttaagttgtagggcattcataaccatcttgccattgatcaattgttttatgtcccatactntctcaaggcctgctttccatgagaatgtgttaattaataaagaaatttgatgcgtagcaaactacagaggt

SEQ ID NO: 174873 - DNA, 414 bp, Glycine max
  unsure (1)..(414): unsure at all n locations
ggagtacaagtagaggtgatattccatacatcgngtatggaatngaatgacgaatattcgagacatctatatagagtagaaggtaaagaatcccacacaacctacagtctataagggttttcgagattaaagtattggtgtcaagatttatttattgtgattgttcggggatcattggtataaatctttccagtatttaccctcctcgatttcccaacaatgggtatcaaagcatgtgagctctaataaccaccatgaaaatactccgggatgaaaatggcttccgttcaagggggagactaccatgtggatgagattgacacttgagggaaagattgttatagtacaagtgtgaggtgaagtcccatatcgtgtaagaatgaaaatgttgaacaccatataagtgaaggcaag

SEQ ID NO: 174874 - DNA, 308 bp, Glycine max
gccccaactccatggatcccattcccttcctaataagcaggggtaaaaaatagccccggacctgcatcaccagcgaatagaagtggtcggaactatacatgcctacagcaaccaactacttgaatggcgcccaaagaatagccagtcttaccctcataattcgaaagcacaatgctgtgggcagatagatcagtgtcatgtctcccgatcctgcagagcatagatcgaggcattaagttgacagccgctcctccatcaatgagcactttgttgactccaacattctcaactcttgccctgatgaaaag

SEQ ID NO: 174875 - DNA, 434 bp, Glycine max
  unsure (1)..(434): unsure at all n locations
tcttcgaccctacacccaccttaaagtatatttccatttatgttgtataaactttagcagtgggctgcaatccattctccttcatctcagcaaacaatctaatagcagagtcatcacggtttagttntgcaaatgctgatgtaagtgcactatatgtaacagtgtctgggaaacaatgcccttcactacacatttcattgtacagctcatggaccttttcatgatgcccctcttgcatcacagagttgtaagtgctcaccgtaggtctgcccttgcgacccttaacctggtaaaagacagataatgccctgttgaccatgtcttgtattgtcttccacacttcaccaaacatcctatgttcatccaagcagcgaatcagggccatataagtggtcgagtcatgttcaaaattcctcctcttcccgcccacttaa

SEQ ID NO: 174876 - DNA, 333 bp, Glycine max
aaacaaacaaactgtatatatatcttataatcagagtaaagaaatctaagaattgagctggcttggtcccaaattgaccatcctttgcactaaaaaggacaaattctgctaacttgaagcaacagatgaaagagaaataataacgcattacttacttttgtctgacttgatcccggatgagggcgaagcaatgtcagtgccggtgcctgtgccagggcctgaataagggatgttgctgccacttaaacgctcgtattgcagagtagataaagaacctctaaagccaaactcataaataaataagacatttctatcgatgggctatatatgtga

SEQ ID NO: 174877 - DNA, 339 bp, Glycine max
cagcatggaatacttcctatttttagtgacaaactgatatcacgaaacccgaaaaaaaaccttgagcttgttgcttagcagtgccacttccaaaattaacctataaagagaggatatatatatatatatatatacctatttatatgtatactcacttttttttctcactttcaaactttattttgtgtctcttaattaatacatcacattatgttgttttggggcactacaatatttttgtttcttttggagtatccaacagctgtatcaatgattaatttttggtaaaaaatataattaattatcataaatctctctttaagaatacaattttttcat

SEQ ID NO: 174878 - DNA, 425 bp, Glycine max
  unsure (1)..(425): unsure at all n locations
agcttccaaattagtgtaccacactaccgtctctccggccaagctatcctgaaagaagtgtatcaacagcttttctctttagaatgggcgcccatcttacggcagtacattttgaggtggtttttgggacaagtcgtccctttatacttgtcgaagtccggcactttgaacttcgggggaataacaacatcgggtactaagcaaagatccgtcatgtctgcaaacggatagtccccaaatccttccacagcccttaatctttcctcgaggagatcgagcttcctcctttcttcagttgccgggggcggcctttccataaacaaaactattggcgatgctgcgaggttgggttgaggcaacgtgcctggtgccggcccttcanggatcggnggataaaactcgacatcccttcgagcataatcttg

SEQ ID NO: 174879 - DNA, 362 bp, Glycine max
ctgccaatgtaatgtgtgttttaagttttgacccgtgatgaggatcacattgcagcaggaggagtttcaaagaaaatcaagatttttgacctccatgctatttcaagcgattctgttgacatccagtacccattagttgagatgccaaataaatcaaagcttagttgtgtcaaataaatcacagcttaatcatgaataaaatggatgaattggtttagcctttgtaattgcatattttctgtgaattcagccatgtgattttaaaatgaaagtgacttgagttgtgtttatgaggtgttttaagtggtgtaaggtgaggtaaatcgcagtccatttgaactatcatgtaaatgagtgagttg

SEQ ID NO: 174880 - DNA, 429 bp, Glycine max
  unsure (1)..(429): unsure at all n locations
agcttagactaagttcagcctgccatccttatactgatggtcaaactgaacggaccattcagtcattggaggacctttaagggtgtgtgtcttanagcaaaaaggaagttgggagagtttcctgccattgatagagttcacttacaacaacagttttcactctaccattggcatggctccctatgaaaatttgtatggtaaaaggtgtaggacacctctatgttggctagagcccagagaagacctcaccttaggacctgaagtggtacaacaaaccactaagaaggtgaagttgatccaagaaaggatgaggacagctcatagtagacagaaaagttattagaataagaggaggaaagatttggaactcgaggttggtgatcatgtattcttgagagtcactctgtggactgnggttggtcgagcatt

SEQ ID NO: 174881 - DNA, 419 bp, Glycine max
ttaaacacatactgttatcgaataccatatgagattctcagaaaatattctcaattgtcacatcttttcatttgggtcttgaatggctatcaaaggcctatatatatatgacttgagacacgacattgctaagagtttttcaaaacaaaaaggtcttatcctcttaaaaagaaaaatcattttatcctcttacaaattccttggccaaaacacttgtgattcaataaggaattatttgagtactcaaattgttcaatctatctctctcaagagagattacttcttcttttcttctttattctgaaaagggattaagagactgagggtctcttgttgtgaaagaattctaaacacaaaggaaggattgtccttgtgtgtttagaacttgtaaaaagaaattacaagatagtggaactctc

SEQ ID NO: 174882 - DNA, 448 bp, Glycine max
gcttgtcattgagcaggttaacgaggtcttcctatctagaaagacacaaatgtataagtactaccactaggtcaaactcttggagcatttcaaaaagaaagaactggtccatgttgataaggaataaaacgaccaagctgatgctttagcccacctagtgtgctttaaaagaccaagttagcaccagacatttatccaagatgccctaacctcccctaccaccgatgttattgaggtttgctcaagtcggattgctcccagcagatggatgtctcccatatggaccttcttggtcacctacgccttactccatgaagtggtaggagccgaaaaggtaagacaccaagcttcacactatgttatcattaacaatgaaatggttagaagagccatctcaaggccattgttgaagttcgttgacaaagatcacatagagtgcgtcttggat

SEQ ID NO: 174883 - DNA, 485 bp, Glycine max
  unsure (1)..(485): unsure at all n locations
tattacggacacttaaaactaagcttccacacatattnttctggaattgcttctgaatagccatttagcacctactgctttctttccttgaggttctagagttgtaaactctataggccttagatattttaaagtatccaagtattattccattatcacacttagagtcaaactttcccaagttgtctttaatatttagaatgaaacattgacatctgaaaggatggaaatatgaaatgttgggctttcatcctttccacagttcatgtggagtccttttcaaaataggccttatatanaattatgtttgtaaataacatggagtattcacggctttagcttgtaagtgtaaggtcattaagcatggttctggccatttcttgcaatgatatattctttctctcaatcacaccattttgttgacgtgttctatgattagagaaattatgaagaattccattttctttacagaatagatgacagta

SEQ ID NO: 174884 - DNA, 427 bp, Glycine max
  unsure (1)..(427): unsure at all n locations
agctagaatggtgttcgcgttctactgaactatttattttggttgggtntgcaatgtcgctatcctaaatttgttattctctctctcgtatattttagtgtcgacatactgtagtatacaggtatgagcttatcaagatgaatcattttaggggattatcacttggtattgctcaactattctctaagcaggtatgccaattctttgtatgaccttgtgctggttttgctctcttatcataatctatcttcttaaatttgttacaagattttatacggactggctctactaaaagaggctggcatcattcattgagatctgaagccagaaaacattcttttatgtacgacgttggtttcttacatgaacgtgctcataaagaactgtatgcagcagctatttcttaaagatttaatacctcttaact

SEQ ID NO: 174885 - DNA, 442 bp, Glycine max
  unsure (1)..(442): unsure at all n locations
attcccctctacttctgttgtatttgacaactattatntactcgaaattatcagagaactggtttttaataatgcctgaattttcttcagcttaaggaaatcagaacttcactattcagatttctcaataagtgatgcaaatgctttggacattttttaaaccaaatttaagtattgcctaacacattatgaagcaaaaaaaaaattctgctaaaaatatctgaggcagaatcctgttatttccataaaatgatttgaaattgtcaatattcatcttaaataatacagaatgtctttaaccatgtataaactacaaatacaaattcataatatatataagaataaaacacctgttgggcaaatgtcgcagcctcaatagcagcagctgcaagactgcttgattgggaagttcctgatgttcctgatccagggcctangatac

SEQ ID NO: 174886 - DNA, 438 bp, Glycine max
  unsure (1)..(438): unsure at all n locations
agcttctaaattattagcgaattgttgagtatgttcttatatctttgtaccaaaagaanaatatgtttttacactttgaaaatttataattgagtctctaaaacttaaaagtgttttttttaattaggtctctgaattcattttcattaggaatccattaaagtaattaattttttaaataatttaaaaatcaagttgtttatttaatttttctataattctctaagttttttaatatatataaataggtgcttagcaaaatctcataaaaaatgtgacaaagaagtcaattaaaaattataaatttaaagatctatttacaaattctaaaatatagggatgtacttatgttttttaagtntggaattatgttatcaaattgtgctctgtctgaaaatgaggctnttttattacatatcatcctccacaagaattatt

SEQ ID NO: 174887 - DNA, 471 bp, Glycine max
cacggaccttgaaactaagcttgattgttttgcaaggatagattccaagctctggggatctctatctgatataaccaacagtgcaaagggtatcaatttatcatattgtttttctcattagccatgactggtcttattatatatttgattggatgcccttcttttctttatttgtagatcatttttaatccagctttttggagtgtatgttactctgtttgccataacataagctctgtttagaatcctagtcattttatttgaaatgattcttaattaattaatatttttttgaacaaaattaaatttatacatcgtgtgtatgtatgcgcgcacctattatggtacacattttttcctgatgcatttcaatattaaatatgaacggatagtgtggaacagtatgttcattgtacagctggggtaggttggctgaatctgactcttaacaaatatatattaaaaataaaa

SEQ ID NO: 174888 - DNA, 445 bp, Glycine max
agcttgagccaaaatcctgactcaccatataccttgacccagggtgagaatgtcaatccttaccctcggaagcaaaaaaaaaaagaaagaaggaaaatttccaatcaaagagaaagcaaaaagaaaagaaagaaaattcccaatcaaagaatgggagaaagaaagaaaaaaaagaaaaggaagaagaagaaggaaagaaagctcctgatcaaggatcgaaagaaaacagaagaaatgtgcagaaaggtctttggaccagacaatatctgaacaatacagaattgtcaccgaatgaacaaaaagaaggaaaggagaccacgacctaaaatggtcttctccctttaattgccaaccaaaatcttgtgcgctagcgactttttcgccccgcactatacaaaaacagaaaagaaaaaagccaacaaaaaatcaaaagccaaaaacacac

SEQ ID NO: 174889 - DNA, 456 bp, Glycine max
  unsure (1)..(456): unsure at all n locations
taagagtgaaacacttattgtgaggacaagttgctatgccatttaatttgattgccattcttgttgcatatttctaaccttgcatttgactaaaaagttgaatgtgggcattatgcttagttgattgaagcacatgaacaaaaattagttgaataaaggggaatgcaagaagagtgtgtttgtaacttgtcattgtttatccttagtttttcatttgtcttttgtttttcagtcttagtttaattttgtttttgagtccttacttttttaagtagtttttattgtttagtagttttagttagtcttgctagaggacaagcaaggttctaagtttggagtgttgataaacgtcaaatttatcgaatnttaatatgcattttgtgacatttatttgacattttagttaactctagacttggttttgaatcaaattagctttaaattcaattttttact

SEQ ID NO: 174890 - DNA, 443 bp, Glycine max
  unsure (1)..(443): unsure at all n locations
agcttattgtctgcccaaggaattcacttctacttcttattatttcaagggataagttttctggttgttggccttgatttgattggagagcaggttagttaaggttcagattttgaattttaagtgcatacaaatcctctcagatcctcattcataaaggtcagaatggccaaatcttaaacccatccccgaacacattgatttgagcctcattgttgttgccaagtcatatgccttaagttacataaagttgtttcagttcctaatggcaaaacgtatcaacaccttggaaaaaagaaaaaaggggtttaacattcctgacctataatacaatgccattatacaattccttgcctgcctgaattgaaaaggtggagattgttagattataacatttgttattctttntnttttttcactattggcatactgtacagtcacat

SEQ ID NO: 174891 - DNA, 456 bp, Glycine max
  unsure (1)..(456): unsure at all n locations
tatntagtaataggtgaaatgttgtgtcttatgttatgcattttaaaggttttagttttaacatttactgataatcttatattagttttgtaataactgctaaatattacttgttttttataataaaaatatattggaaatatctttaaaaatatttatttgccagttatttttggcttaaatgttacgaattgatatttttcttatttatgacttgaagatatgaaaaggaggaattaaaagcaaaaaagatccagaaaacatcaaaaatatgaataagagagatcttttgcatcaggctcaagtccactccagcaactataaaaatggaatcaagcacaagtccactccaacaactataaaaaggagtcaagtcaaggagaaaagacacactgagtctcagagcactctaatacacaccccaagcctgtgaactctcccttanggaattctttt

SEQ ID NO: 174892 - DNA, 451 bp, Glycine max
  unsure (1)..(451): unsure at all n locations
agcttcctcggggccattntctgcgaatgcttacatttggaaagttagttntaccaagaaatgctactcttaaaacaaaaatggcatacaacctcctccaataaacacaaagatcaatgtaaatttagagcaaactcatgctcatacttccttacgaacattcactcgcacaagatattcttctaactaagaaaaatgcacccatgcacaatcaaggcaccttcgttacctagattatttatatgtacttccaaggtgtatttgctacctacatcacatgcatttccttggctaaatttacatacgtgcatactcaaagcatcttggctaccaaaaattgcacacgtgcacattctggtatttctaatacctatgcatatacaaactttgtgatgaatcttggctatctacacaataaggtgctacatttcatgctttattcaaagtgttt

SEQ ID NO: 174893 - DNA, 452 bp, Glycine max
  unsure (1)..(452): unsure at all n locations
ntctgcagtgaagctaagtgtgaagtatgcaattctgcatatgattggcgctgcaaactgggtacccaccaatcatacttccactgttgccacaggtttgggtaaatttctgtatgctgttggaaccaagtccaaatttaattttggaaactatatttttgatcaaactgttaagcattcagaatcatttgctgtcaaattacccattgccttcccaactgtattgtgtggcattatgttgagtcaacatccaaacattttaaactacactgactctgtaatgaagagagaatctcctctatccctgcattacaaattgtttgaggggacacatgtcccagacattgtctcgacatcanggaaagatgcttcaggtgctgtgtccaaggatgccttgattgctgaactcaaggacacatgcaaggtgctggaacaaccatcatagcaccaca

SEQ ID NO: 174894 - DNA, 447 bp, Glycine max
  unsure (1)..(447): unsure at all n locations
agctntgacaagacagtacacactgctgttttctacaacaagataaaatagggaaatctactctaaagatacatctaataatacccataattataacatgtcccttattaaccgccaagcgaataccgttatcttgctaggaattctaatcttccataattccttacaccattcctcttgccgacctcctgtaatagtttccaaaatcagattatatgcgctgcttgtcgaataatttcctgattgatcacctaaccactcccattgatctgatccttgctgctgaatgttcatgccttcgatctcccttaggaaattgatggctgactcgatttcattatcaaacagcgatcttctccacataaaatgccactcccaccctgaatgtagatgatgtcccatctgtctaatgggttggttctgctgtgatgatattagatacagtct

SEQ ID NO: 174895 - DNA, 456 bp, Glycine max
  unsure (1)..(456): unsure at all n locations
ntgcttccacagcacgtataggtagtgtgattgcatgcagtgacgtggaagccacattgctgtaaatgcctgttccagaaagactgaaaatgcttggtgtcaaaatgccttcataattggcttgtgaagctgaagttcggcttattgtataagagactgaaaatgcttagtgttaaaattcctttataattggcctatgaatgaagttgaagtttgggcttattgtataagaataatcattcttttgtcagcttttaaaaaagatagaaaacgattattttctcataattaatcttttccaagcatgcatggaagagaaagttgagtgatactagaatgaatagcctaaagtacgtacatagaaagttagtaagggagggaaatttactggctagcttgaagtgcttcattttcactgcctactattaaggatataatgtgacttgtaaccgtctg

SEQ ID NO: 174896 - DNA, 434 bp, Glycine max
  unsure (1)..(434): unsure at all n locations
agctngctctaaatatacattgaagtntgtatttatgggaggaggttgtatgccatctttgttttaagagtagtgtcccactggttaaactaactttccaaatgtttgccttcgcaggaaatggccccgaggaagcttgcctcaaagaggtccaggaaggacaaggcagccgaaggaactatttctgctccggagtatgacagacaccgctttatgagcgctgtacaccagcagcgcttcgaggccatcaagggatggtcttttctccgggagcgacgcgtccagctcagggacgactagtatactgatttccaggaggaaatagggcgcccgcggtgggcatcactggttactcccatggtcaagtttgatccagacatagtccttgagtattatgccaatgcttggccaacagaggagggcgtgcgtgacat

SEQ ID NO: 174897 - DNA, 470 bp, Glycine max
  unsure (1)..(470): unsure at all n locations
cgtgacactatgaaactcaacttatagaggcctttggatctcatgcctcacacaattntataggcatgttcatgaanacctgtaaatacagttccactatcaaatatcatataaactaactaatacaaatgataagaaatgcctaatggtgccttgcctcaataaaatttgcatcaagtaacatggcacggcaagtgtctcggtctcttctgtaaggagatatcatactagcaacacatattaagccagcatcagcaaacagttttgccacttctcctagattaaataatttttttatcagtaaaaccaagttgatatgcatcagattttttaatacactacagctatatacaataactttgaaggattaatagattatttttcatcatggaactaatccaaatacactaatatngattagaagctttttcatgtaataagttggccaagagtagatagcaatattgtgt

SEQ ID NO: 174898 - DNA, 439 bp, Glycine max
  unsure (1)..(439): unsure at all n locations
agctntgcaacgttaagttccctagccggtgtcaaaaccatgcagtgttagatattgcgcagggcaataaactaggttggggtagtttgatgacgagcaaaagtagaaatctaaacaattgtatgtaaacattcttaaatattgataattatacttttactgtttacacaaattggcaaggagccaaggagctcaatgctacctactcgatctatggactatggccaacctttttttggttccccacatcatattttgttcactactgttatggacggcacacaagttacattttgcacaccattttgtctctaatggggtaatacttacagttacagcttactagcaagatgttacttggttgattcattggcgcaaaataatatcacanaaaatcaccttttgcctattaaaacttttatacttctgcattgcatga

SEQ ID NO: 174899 - DNA, 451 bp, Glycine max
tctgaacaaattcttggatacagctgacctcattaaaccttctatcccttccgctacaatatcgaaaagaaaaggtgcaaggggatcaccttgccttaggcccctcttacggataaattccttagatggactcccattgattaaaatggatatggttgcaatgtttagacaaccatttatctatttcctccacctttcacaaaatcccatcctcataagcatgtagtcaagaaatccccaagaaaccgagtcgtatgccttttcaaaatccgctttgaagaccatgcaaggcttacttctacatttggcctcagctaaggcctcattggcaattaaaacaccatgaaggatgtgtctccccttcataaaagccgtctgcctttcgtctataatgtgaggtaaaacaacagccaacctcttggccaaaacttttgccacaattttatagaca

SEQ ID NO: 174900 - DNA, 416 bp, Glycine max
agcttattataatagaaagaaacattcttatttgcttgcaaggacatcaaagaaggtggaacctcctcggttaaataattgttctaaagctgtagatcaaacatagtggtacaacttaagaaatcaggaatgagacatgtaaaatggttattattaagccacaccttaaacaagtgggtcatggaagacctcaacgatgctcgaaaacccaaacccatccttcatgggctggtcttgtgcctaggccagaagggcaacgtcctatggtccaaaactagatggtgacaaaagataaaaataaaaatatatatagctatgtgattaaaaaaattatattatcatgtgattatgaaatacattttcttggggcattatttctctgtgcttaaactgtattcattaatttgtggtaaaaa

SEQ ID NO: 174901 - DNA, 447 bp, Glycine max
  unsure (1)..(447): unsure at all n locations
ggtgtgaagagatagacatgaaaagactcagatanttttttgcaattgtctatccgctaagcgcagaccttgcgctaagcgctcagtcttcacgcactaagccgagcttgctcgtgctaagcacagagacccctgattggttggctaaattgttcagctaagcgcacatcactatgctaagcccaacatcttcactgtaattgaacctcaatcagtgggcttagcgttgatgatgttctaagcgccacttcttctctggaaatttttattgtagcagcgctaagcacactatcatgagctaagccttagatccattctgtaatttgagctnttaagctgggcttagcgaggcaggatgcgctaagcaccaatctcttactggttntgaattcttggaagtgcgcttagcatgcctgtngtgctaagcctgaactactctctgtaagt

SEQ ID NO: 174902 - DNA, 432 bp, Glycine max
  unsure (1)..(432): unsure at all n locations
tctccgnctttcccttaaatatgggatcgagggatgatcttaaatgttcaatcctcctggtatctgagaatcacttaatattagtgagaaaaattgtctctgtgaagaaaatccaatccaagacgcttccgtaacgctttcgagacgtttacgtaggtgatttcgtgaagattttccaccgttcttcatcgttcttcgtatcatttttcgtcgctcttctgtcttcaactggtaagttcccgaaatcgaacttttcaattcattctatgtaccctcagtggtcctcatttgtttcgcgtgcttctatttttatttcatttgctttccgtacccccttttgacgtgctttagtcatttatttaggtcattttcccgcctaataacaaaaatatatttccaccgatcattcgtatagtgacatctagtaatttc

SEQ ID NO: 174903 - DNA, 433 bp, Glycine max
ctcgacccggatccttaagcacctgggctgcagcttagcaacagtgtcaattttttttgaaaaggaataaaaagggctacaacatcaatgcacatccaagcatcagaagaacttcaaaagcatatgtcctgaagacagagaacagtcacacagataaaagattctggaaacaaaatctccatttgaacacctggtgtgctgaattcaacttgtcatccaagtcccaagctaagaaacagaataaacaatttactttgtgggaggtggccaagataggttcaaattttacttgttaatacaaaagcaaacacacatttcctagtctttagattatacacatcagaaataaaattcacaatagagggaatttgcctttcaaccataagggttcatgatgtagtaccaataaacacggtcatcatcatcaattagt

SEQ ID NO: 174904 - DNA, 446 bp, Glycine max
ctaagcttaatccaggccagattcttgtgcatgcagaggcttcttcaagaaaaactccaaactccctttgcaaatctgatttcaggcttaaataggtggtcttgttcgtgctcgtgcgctatgcgcttagcgcacgtatggaccgcttagctcacgttagtaatttttggcttagttcgcttctctcgcttagaggatgagctgaagcggtgtgcttgatgacctggagcggtgcgcttagcgagcttgacagctcatcttcttctagattcttcctcgtgcttagccactgaatgtcacgcttatggaatgctcgttaagccaacatattggcttaacgagaaggtgaaaacaacacttttaccaatttgcctaattaacctgaaattgagagaaattgattattaaacacacaaaacacgagtataaattatctattacctata

SEQ ID NO: 174905 - DNA, 415 bp, Glycine max
  unsure (1)..(415): unsure at all n locations
agcttgnagttggcatattgcttcattctatttctatctaagaaccaaattaagaactccattcaaaatgggctttgttactgtcaactatttgagggccagatgaatcaggttccacaaatcttatgtcactgttatagtagttcatttcagttgtatataatttccctgtgatttgctcatgatgtgatatgtgtatttgaataaattcttatgagcttgctcaactcatttgcaattctttttgtttgaagtccgtgaatcataaaattaatgtttgtaatatttttgtctggctaaatgcagtgcatacagagcactatacattctcaactggatctaccgctactttaccgagcctcactttgtccattggataagtatgaatttctcttatttctgttaaatggtacta

SEQ ID NO: 174906 - DNA, 463 bp, Glycine max
  unsure (1)..(463): unsure at all n locations
gacctatgaaactcagctatgctgcnacatttatatagacccccttagcagcaaaaccaacaacagcagaataattatgatctttcaagcaacaaatacaatctaggttggagaaatcatccaaatctgagatgggcaagtcctccacaaaaacaacagcctgtccctcctttccagaatgctgctagtccaagcaagccatatgttcctcctccaatacagcagcagtcacaacaaagacaacaagtaaatgaggcttctcctcaaccttccttagaagagttagtgaggcaaatgaccatccaaaatatgcaatttcagcaagagacaagagcctccatgcagagtctgacaaatcagatgggacagatggctactcagttgaaccaagctcagtcccaaaattctgacaaatttccttcacaaactgtgcaaaatctgaaaaatgtgaatgtcgtcacct

SEQ ID NO: 174907 - DNA, 447 bp, Glycine max
  unsure (1)..(447): unsure at all n locations
ttaagtcaccgcagctgcagctgaatcggcgtgaattatactgtattttcaggngaagatcgattggaggctctcctatactctgctatctatctcaaggtctggttctctctctctctcttcattttcaatcatcatatctatggtcttcttatcgaatatcatcatctgagcccttcttagatcatctcgtgcagtggatgaacacagggcaaatgtcttgctatgaagatggaggtcaccaccggcccaataggcatgctgagatctcaaggcttatatttcgtgaactagagcgacacactaatcgcaaggatatatctccacaggtgatctatatgagggtagatctttctgtcataggttcaatattgcaataaccttatttcacgccggatgaagatagtatacttcaaatgcagtcaattcgtttcatatcttcttaat

SEQ ID NO: 174908 - DNA, 454 bp, Glycine max
  unsure (1)..(454): unsure at all n locations
tattgaataaatattggcggaagcacacagcacacaggttattctttatatttgaagcgaaagaaacgtctaacccgaatggtgttataatatggagagggggtaatttcacccaacagaagctgcgacactgacacaccaaactacaaatctgaaatccccctttgactcctctcactttgagacgcctcattcccaactttcctcccaaacacccttttatttttttttgtgagtgatttcaaagcaaacaaataaaaaaccatgtaacgctctctcttattattccaatttccaaatcacaaaacaaaaattctctctctctctctctctctctctctctctgaatntatactccaatatccatctccatcgataggaagaaggaacatagctgactgaattccgaatctgaatcgtactctgcttgtatatgttattcacactcctcgca

SEQ ID NO: 174909 - DNA, 441 bp, Glycine max
  unsure (1)..(441): unsure at all n locations
agctntgtcatcaaaaaccacctaaaaactattttaaggtccaacgccttgaatggtcctcttcacttttatttggttaaaaatggacttttgaaagcctaaagccaacgcataactttgtcactactttcaagaaaccaagagatcattaatggtccaatgccttaatgttttctcccttttcaaaaagaatcaaaagatcgtttaaatggtctaaacgccttaaaacgaccttttgtttggtcaaaatatatcttgaaaaaaagaggataaaaacaacttaaccaacgttcagttctcaaagaactacgtaggtctaatttccttatcacaattgaggaatacgtaggagcaagggaaacacccttgtcgaccacaaaaggataaaaaatacttaaggcacaaaaagacatatagatgtaaaagggaacaaaaacaatt

SEQ ID NO: 174910 - DNA, 459 bp, Glycine max
taggttctaggagagcaatcatccatagataaaccttcactttttcattcattcacaccccatacttgccttttatttaggcactcagcttcatttcattattttgcaacatacatacttattaatttcatggttttcttttttttttttgaacacaatatacatagagacattatgtgtatatacagaaataatgtgtgtatgctatttactttgaccatttcaattcttacccagtgcctcccccaaatttaggacaaatttaccttgataattactcccccaaatttgggacaaattttctttgaaccacgcttcctatggatgatgctctcttacaacctaagtcaaggtagtaggagataacactgtataggctcagggttcaatcaatcaataattcattcagcttaaactgggtgcaagggataaatcattcaagcacatggtcagcttttt

SEQ ID NO: 174911 - DNA, 406 bp, Glycine max
agcttataatatattgatacgcgtcgaaattaacttctttaactctcgagaaattcaaatggtcataacttttcacacggatgtccgattcgatcgcataggatgtcgagaggctctaatttgaacaacggaaggtcttgagaaattcatatggtcataacatttcacacggatgtccgattcaggcttataatctatcgatacgctcgaaattaaacgtcggaaactctcgggtaattcaaatggtcataacttttcacacgaatgtcctattcgggcgcataatatatcgagaggctcgaaattgaacatcggatgctcttgagaaattcagatggtcttaacttttcacaccgatgaccgatacaggctcataatatgtcgagacgctcgaaatagaacatcg

SEQ ID NO: 174912 - DNA, 395 bp, Glycine max
  unsure (1)..(395): unsure at all n locations
ggaatcggatatccgngtgacaagttatgaccatatgaatatctcattagcttccgctgntcaatttcgagcttgtcgtcatattatgcgcccgaatcggacatccgtgtgagaagctatgaccatatgaatctgtacagagttatcgatgttgaatttcgagtgtatagatatattataaacctgaatcggacctcagtggtaaatgatatgaccattagtatttctcaagaccgttcgctgttcaattctgagcgtctcaatatgtgatttgctcgaatcggacatccgngtgagaagctatgaccatttgaatgtctcaagagcattcgctggtcaatttctaccgtctagaatagggtgctccaaagcagacgtccgggtgagagttttgg

SEQ ID NO: 174913 - DNA, 449 bp, Glycine max
  unsure (1)..(449): unsure at all n locations
agcttaaagcctntntagtataacaaggaaatatatttatgtttttatttaacattcaattaattgtcaagctttaatgtaaggcttgaagtggtatccaagattaactaaacatacacttgagtatatttcacatctataatagcgttttcttatataatttcctgacagacctttagacaacaattatttccacccctagaaatcctaaaccacacataactattaacacttatttcctcaccagaggacattttcattatactaagtatttgttcgtgggctagactcatttacaagccaattacacaccaattctaaatataggcaaatcccttatgaacatagtcttcaaccgatttatgagctgttttcctcatgattgagaattaactcaagttgtactaattattaatacaagcgaatacgtcaagttcaatctcccatgt

SEQ ID NO: 174914 - DNA, 467 bp, Glycine max
  unsure (1)..(467): unsure at all n locations
gacctataaaactaagcttctatggcctgcttgcatggtgggatcaacttgttgatgctgtcataatcagcctttttaattagtcccctgtctaatgcgtaatctgtatatgcctggtactgaatttcatgattggntaacccattgccaatagcaaaaccctgtttatatatgggatcaacggaatcaatacaatgaagaaaaaaaacaattaacctttcatagttatactaaaagttatgagatagtaaagacctttagatttatatgaattccttcttttgctttgtttccttggtgaaccctggatgcaagagctggaatgtagtgtccagcatatgactctccagtaatataaaagtcattcttagtgagctgagggtgctccttgaaaaatgcctgtcattattgtaaaattaaatggatcctatgatgcacaacggcagagtctaacatataacttgaaa

SEQ ID NO: 174915 - DNA, 406 bp, Glycine max
acttgaagcaaatcagatctttatttgaaaaatcccacttcatttcaacattcccccatattttctctctcttcaccccaaacacttaaccatcatcatcataaatcacctcgacctatcactatcaaccttctgcaaactctctctctcataaagttttgcacccaaaaccctctccttctcttagaatcttccagaaaccctaacaatggccaacaaatagaaccaaaaacaaaccacccatgctgaaccagactttaggaataacccaccttctacttcatccaaagaaggaaaagttctacaaatcgctaaacttgcactagtgtccatcattgctgcaaaagtttcactaaaagacaaggagcccaaggttcacattgaacacttcttcaacatcgagtca

SEQ ID NO: 174916 - DNA, 440 bp, Glycine max
taggttaaattagtctaaacttatgaggggttgtggtttattactttgggctacaacatagaacacaagaacatgattaattagagaaatatcctcatatgcatcaacttttttgttagaaagacccaacgctttttacctattgctatcaaattttacttgcatttactttttttaccatagaaatagtttatttctgttataatcatcggttattaatgttgttccaacaatgccttacttctgaataaaaatttgtctaataagcaagttcctaagttcgatactcagatcactccgttttaatttttaatacttgacgacccggtgcactttccgttgtttcatttcccttgaatatattagttgaaaattggagaaaaaggaaccatatgggaaaatgaacagtaatgtttgttttaagataagttgtagaaata

SEQ ID NO: 174917 - DNA, 435 bp, Glycine max
  unsure (1)..(435): unsure at all n locations
agcttcctcggggccattggctgctattgttttcatttggaaagttagntttaccaagaaatactactcttaaaacaaaaacggcatacaaccttctccaataaacacaaacatcaatgtaaatttagagcaaactcatgcacatacttcctcacgaacattcactcgcacaagatattcttctaactaaaaaaaatgcacccatgcacaatcaaggcaccttcgttacctagattatttatatgcatttccaaggcgtatttgctacctacatcacatgcacttncttggctaaatttacatacatgcatactcaaagcatcttggctaccaaaaattgcacacgtgcacattctggtatttctaatacctatgcatatacaaactttgtgatgaatcttggctatctacacaataaggtgctacatttcatgc

SEQ ID NO: 174918 - DNA, 451 bp, Glycine max
  unsure (1)..(451): unsure at all n locations
tgaatatcttganttgagtaatgcaaacctattctaagcttttcattggctacacactctccaatctcttccttctttgacccacctatctttgtcaggatgcaaactccctcactataatgaaccatccttgctcaacttctcatctctgcaaactctccatctttccttcactagttattcccctgccatttcttttgtccccaagtggatattcaaattgaagaatcttgtttctcttcaattatcagataattatgaaatccaaggtccgattccttgtggtattcgaaacctcacacatcttcaaaatcttgacttgtctttcaattcattttcatcttctataactaattgcttatacggtcttcatcgtctcaagttcctcaatctaggggacaacaacttgcatgggactatttctgatgccctgngaaatntgacttctctt

SEQ ID NO: 174919 - DNA, 456 bp, Glycine max
ggatcttaagcaccgcggctgcagctataaaactaacaatgttttttttcttgaaagggagcatgaagattgtaagataactcatcaagctcatttagttgattttgtccaggaaactacttcacctggtggtgtacaagacacctttgtttgtgaggaggtcaaggcattgctgaatgaaaagggtgaaatccttaaccatagttcttgaagattcataagaagagcgaaaggaaacgcgtaaacaaaatcttttaatgcaaatagaatgcacccttgttaataatgagtttgataagttgaaaaagaacaactcaaatctttggacagaatgtcaacattataaagagatctcttctgatttaaactataagcttagaggacataaggccttgaaggaactatttcctgagattgtaaaactctatgaagagataaaaaccttgagtgatacct

SEQ ID NO: 174920 - DNA, 451 bp, Glycine max
tatcatggttaaaatgatttacttttattatattgcatttttatgaatactaaatatataaaaaaggaatactaaataaagtaaagttgttaagaatgggtcattgaggtgataagcgaatatgcctgtattttcttatttaaatattcacagagaaaatcaaaaacccttctcgtcttcccaccattgcatattgttatttattgggtatagaataaatttgttttttttttatttctacaaatatgattgtttcattttacgagaaaatttaatgaaaggctagagtctataatataattttttcaagtgcaataaagttacataatgtctattttttttgttgatagaaggggtattttcatgggtattgcacaggtcacgttagttctcatccatattataaaatgacatgtgaataaattgataagtttctataactaaattcttt

SEQ ID NO: 174921 - DNA, 431 bp, Glycine max
agcttaacggaactaaaaagtaaatttttttgtttggaataatattgaacaaacatgaactaaggactaaattgatatctaagacttaactatatgtaacaaaatctatcttttttcatgcttaaatgttcatttggtcctgtaagtattacaattatgtgattttaatcctcttaattacaatggagtcaattggatctattaggtatcataaatatactattttagtccctcatcttctaatttcatcaattaagatcccaagtattacaatttttccattttagaccttaggtatatatattactttatattgatatatataattaagtactattttagtctattaaacacagggaataaaatcgcataatgttatacctaagagattcaacgggaacttaagagactaaattgcataattgtgatac

SEQ ID NO: 174922 - DNA, 449 bp, Glycine max
  unsure (1)..(449): unsure at all n locations
tggcgactgcagntatactatctcacattgtttgattaatgttatccctagntacaatgacgttccacagaatttcggtttcctgatgattgttcagaattattaatttgatatggttgctaactgacactgacaaagtagctctattgataaaattaaccttatggattattctttttcatgagcatatcttatagttcttcgacgattgtgttttgttttatccaaggacaggaaatacatagaattagtattttaatttgatttggaaatgtttcgactaggcgaataatgcatgtattataaagaaaattgaaaagtattttgtcgctcaacaagcctgcatatagtcttacacatagttgggaaattgatgactattaatattattccatcatcttaagcataaatcaacatggagtgaaggatactgtctctgtatttatctt

SEQ ID NO: 174923 - DNA, 447 bp, Glycine max
agcttgagacattgttgacattaaccaattatgttgggtgcacctaacaacaccctttctagtcctatacagcagctctttgcaagccactagcccaatggattgacgtattgcctacccactttttttaaaatataaaaaattatcaaaataaattcacctttatataacaagttaacaaaatatttttaacccctgtaaaataaaatataaatatatgttgccatttgtactataaaataacaaaatataatgtaataataaaaataaaataaggtgcatcaattgtaacaataaacaagtgttagaaattaaaaacaaaacgcaatgtacgtaaaatattaacttcaaaatggacaatggcaacatatgtagtattaaataaaatacattgtaattttaccaattataaaatgtaggccaacatataagtaaataaaaaaaatc

SEQ ID NO: 174924 - DNA, 449 bp, Glycine max
  unsure (1)..(449): unsure at all n locations
gtaggattatggggtacccatcacatgtggttctatgtggcggtcgggcgatggtgcacaacaagttttccacatccacaatgcgcgcataaacccaccatcccctgttgcccacctccaactgagctcacgtactcccacgtagcccatatcctcgtttctctcaacaccgggtccccatcaatcctctcaagcttccacaacatccaagtaaaacaacattcaaacagcacaagctatcacagccaagcaaaagcagagcaaaggcagaaaactctgctcaaacaccaatcaaaatcacaacttttctcacttgaagaccacagtaacaattccttcgatccaattcgttaaccgttggatcgactccaaaattntactggaagtctatagtgcataagcctacantttgaccgttgggatctactagaaaacatcaagaactcatt

SEQ ID NO: 174925 - DNA, 421 bp, Glycine max
agcttccttaagaagattgctattgaagcttgagcttagctacacatacctctctaatagctaagctcacctccttgagatgagaagctagagcttagctacacaccccctataatagctaagctcaccccatgacaaaaaaacatgaaaatacaaaaaaaagtccttactacaaagactactcaaaatgccccgaaatacaaggctaaaaccctatactactagaatggccaaaatacaaggcccagatgaaggaaatacctattctaatatttacaaagataaccgggctcatacttagcccatgggctcgaaatctaccctaaggctcatgagaaccctagggccttcccttggatctctagcccaatctacttggagtcttctacccaatgcccttgcggggtaggattgcatcaat

SEQ ID NO: 174926 - DNA, 439 bp, Glycine max
tgtgtgaagagatagacataaaaagtcttagaaattttttggaaattgtctatccgctaagcgcagaccttgtgctaagcatccagtcttcacgcgctaagccaagcttgctcgtgctaagcgcatagacccctgattggttggctgaatagttcagctaagagcacatcactgcactaagccccacatcttcacggtaattgcactttaaccagtgggcttagagtggatgatgcgctaagcgccacttcttctctggaaaaattttattgtagcagcgctaagggcgctatctagtgctaagccccagatccattctataacttcagtttttaagctaggcttagcgggctaggaagcgctaagcgccaatctcttacgggtttggaattcttggaagtccgcttagcgcacctattgcgctaagcctgaaccactc

SEQ ID NO: 174927 - DNA, 409 bp, Glycine max
agctttcaacaggttgcttcacttatattctttacacagcagaaaactaacaaaaccacccatcatatctgccaaaaccccttacccacgaaatttaagagagaaagagaaagaagtccacccaaacctggattttcgaagtcccactcgtagccacgcacttcacgactccgaaaatgctctcctttcgcgatttggagcagaaatgagcaccaaaggttgaagctttgttgggcaacaatggtggatgggagaaaagaagaagaaggctgcgtgagagagagggagctgtctgaaattttgtggggctgagtgaagagagagagaaaagctttttggtcttaaaagaaaggggtttcccgttttccattatattattcaagctctggcacatgtccctatttgattg

SEQ ID NO: 174928 - DNA, 455 bp, Glycine max
  unsure (1)..(455): unsure at all n locations
cggacacatgaatactaagctnaggtagactctttntctccttttgcacagagtntcctatgtctctgatgttctaatccatcttcacggcagagaagtacctccttaaaaaggcatttgtgcactgattccatgtagtcatgccattctcaagtagtgaacacaaccagttttatgccttctcattgagagaaaagggaaaagcataaagtctaacgtagtctgcgggtacatggttttgtctcactgtattggtcaacttgatgaacttcctcaggtgtggcatatgatcttcataggcaacaccacttaacaagttgttctcctgcatctgtaggaacccatgcttgaagtcaaatgtgactccctcaagtagatcgggaaagtggatggtattggtttccccaaagtgggagtgaggtagttcataaagggttgagttggatcaactacca

SEQ ID NO: 174929 - DNA, 374 bp, Glycine max
aacgaaattgtctttttaggaacatacttaaagaagaatttgcttaagtcggaattttttgacttaagagaaaatggtcgttgatatgtttagcttcaaaatttgttggcttaagccatatctcactaaagagttgtactttttggatggtatttaaaggacttatagctctgttatttgaattctcattttatcctagcctgctcttattttagaaatccaaaaatatttgcaaaatttatagttttgatttttctgttgtattgacgcacaatgtcatgcttattaacctattgcgctattcattaagcttagtttgcagacaattatgaaaactcacaacttttgtgcaagccgcttttgacaacaatact

SEQ ID NO: 174930 - DNA, 389 bp, Glycine max
aattaatatagaataatcttcttttgcgcgcgattgattcaacaacactatcattacaattgttttttaactcaacaaattgactcaccataaatcatgccgttaataaagctggcgaaatggatcgatctaaccgtggactaaactagactaagaaaatgttggtccatataagaaacaacctatttgggttggctgaatgagcctgttggactatgatgaactccagaaatataggtccaaatcttatcaagtctatattacctgatagtgttattactctttaattattttcttttgaacttgtatatacttatgtaaaaataataaaacaaactaatgtgattgggttatcgatcggcctaatgagccattatgcctaataggac

SEQ ID NO: 174931 - DNA, 457 bp, Glycine max
  unsure (1)..(457): unsure at all n locations
tccttatagtcacctgcggcatgcaagcttatgcgcctatttacttacaaacgttctcttgtacaagacatttaaccgaaaaacatgcgcccatttacaatcaaggcagcttcgttacctaaattatttacacgtacctccaaggtgtatttgttacttacatcacacacatctccttggctaaactcacatacatgcatactcaagcattttggggcaccaaaaattgcacatgtgcacatcttggcatttctaatacctacatacgcaaacttcatgatgaatcttgactatctacacaataaggtgctacatttcatgctcttttttcaagtttttgctacctaaagccgcatgcaaattcaagcatatttttctttgctgacttaaaattgcattcaaatttaaaaggtatatntttttgcaatatgttttcttcatgcaacatatntatata

SEQ ID NO: 174932 - DNA, 463 bp, Glycine max
  unsure (1)..(463): unsure at all n locations
ngttcttganttttcctcagttctttaacaagctttgaacaatatacttggccttcatttaactgtctttgcgcttggcggccacgctcaacaaagtactttcgacacctactgtacgttgatttgaccaatgctgttatgggaatgttgcgacaatccttcaaaaccttattgatacattctgaaaggctggttgtcatgtggtcatatcgacgtccttctctatcataagccatcgtccatttttcctttgaaattcgatcaatccatgtggctatggctggactcagttcacgaaatttttctaaattttgatcaaaaatgtgcttgcaaggagtgtaggctgcataaaaacagttgatgaataacaattttaagtataaatganagtaaaataaatgtgaccaacatatatgaaatcttacccaatttcttcaacatttctttntgtttggcattattg

SEQ ID NO: 174933 - DNA, 437 bp, Glycine max
  unsure (1)..(437): unsure at all n locations
agcttgcttgtggggcttctatggaggctgtatctttgagcttcaatgaggtccttcaatggtgattttccaccatggaggtgcagtggaagacaaaggagaagaagtgagaggaggccccaaccactagggaataagccttggaagaatgagcttcatcaccaagaatgtgccttggataagaagcttagaaaggatgatcaatggaggaaaaaagagacaaaaagagagaggggggagcacgaaattgaaggagtaaaagagggagagaagttgaactttgagttgtgtctcacaagactntcattcatcaaagttaccacaagtgttacacatacttctatttatagcctaggtagattccttgagaaacttccttgagaagcttccttgagaagctttcttgagaaacttccttgagaaacttctttgagaag

SEQ ID NO: 174934 - DNA, 457 bp, Glycine max
  unsure (1)..(457): unsure at all n locations
cttctccccaattntctataaatcgcgggagaagtgaagtgtataatgtttcatccccttaggcacttctctctctttcgaatttgcttggaaaaattgtttccgtgaagaaaatctaagccgaggcgcttccgaaacgtttctgtaacgtttccgtgaggaatttcgcaaaggtttcgaccgttcttcgacgttcttcattcgttcttcatcgttcttcaatcttcaacgggtaagtacctcgaaccaagcttttcgattcattctatgtacccgtggtggtccacattgtgtttcgtgtatttttattctcgtttcatttactttgtatacccccttttgacgtgcttaagccattttatttaagtcatttctcgcttaacctaaaaataaaataaatntccaccgatcgtttgaattgtattatccgttaacttcggttaanatgaattccgac

SEQ ID NO: 174935 - DNA, 444 bp, Glycine max
  unsure (1)..(444): unsure at all n locations
agctgcctgtccgatgtagcagtaatgattgttctatttatgttggggaacggttacgaacccggaatgggtttaggcaaagacaacgacggcatgactaacctgataaatgccaaaggaaatcgtgggaagtatgggttaggctataagcccactcaggcagatataaagagaagcatcgcgggaaggaagagcggtagtcaaagctcgtggtcgagacaagaaggtgaaggaagcccgccctgccacataagtagaagctttataagcgcgggtctgggggacgaaggtcaagtggtcgcgatatacgaagatgatgttccgagtacattggatttggtacgaccatgccctcctgatttctagctgggaaattggcgagtggagtgtcataccctaatttcgtccggggacctttgcttgatgacatgcgacctntctttg

SEQ ID NO: 174936 - DNA, 456 bp, Glycine max
tagccctagaggggatggaccttttcaggttgtggagaggagcctatatgttggacctcccggaagagtatggagtcagcaccacttttaacatttctgatttaattccttttgcaggtggagttaatattgaggaggaggaactaacagatttgaggtcaaatcctcttcaaggggaaggggatgatgcaatcctccctaggaagggaccagtcactagaaccatgagcaagaggctccaagaagattgggctagagctgttgaaggaggccctagggttttcatgaacctcagggtagatttctgagcccatgggccaaggttgggttttccttgccttcagaggaatgcatgtcctcgccttcagaggactacacgtcctcgacatttgagggctgcacgtcctcgccttcatagggctgtacctcctcgccatcagagggctacacgttttc

SEQ ID NO: 174937 - DNA, 295 bp, Glycine max
agggcatcacattgacaattacagttcttcagaatgtgcggataccaaatctcaaggtgattattcattactttaacctgacttttgcacaaactcctatatagggttgatatctgtatccatgacgaactacactcgagattcataaagggggcctccatgtgaggctgagaactaatcttgacttttgcacaatctcctatagaggctcgtttttatattgcagtgaaacgacagaatatggatctacagcgtattactgaccattgttatgtacaaagaagactaatttatt

SEQ ID NO: 174938 - DNA, 438 bp, Glycine max
  unsure (1)..(438): unsure at all n locations
agcttggtgcatacaacttatatgctctatctttgatggggagtgtaaaattagttgtatagctttataaaagctggtttttgtatgtatttttcataggttgcaacctagtttctcaatgcctcttattgtactttgttcagaacactaattcatatgtaatatacatcagttgggagaagacttaatgatattgttctaatattaatcacatttcaagtctcttaagtaaacctctagttaccttaccaagatactcttaatcacatttaatagttaaattcatcaaaaaggttatttatttctcaagaaataccattttaaaaggaggaaaatattatataaactttggaaaacattntgattttaagtacgacattgagccctgaagaccttttgctaagcaaaacatgtttcacttagtgaatcaactcactc

SEQ ID NO: 174939 - DNA, 437 bp, Glycine max
  unsure (1)..(437): unsure at all n locations
ntcttgctctctntgttctccatctaccttgaagttgtatgttctccatctaaccatcattttgtctaaggtcgagcatcgtgttcgtcgcactcgagcatcgtcagaagtctgtgcttcttctccttcgccacctcacgtaggtatgtttggtctaatcctgtatgaatatttgattgcattcatgtatcgcacacttagtgaactaaacatggctagggtatctcatatttaactcgagcatcgtgacaactttgtgcttcttctccttagtgaagtttcccttacccttattgtgctcttgtaacagtttaagagttaacgcctattattggagtttaacagtttcccttacccttattgtgttcttgtaacaatttaagagtttaagagttaacgcctattattggagtttaacaagttcccttacccttatt

SEQ ID NO: 174940 - DNA, 430 bp, Glycine max
  unsure (1)..(430): unsure at all n locations
agcttgnaatagttggaggctaaaagtctttttgattaacgctatgggatgcctcttctaagataacatgacacccatggcaatgttggaagcatccatttcaaggacaaacagaattaagaagtcaagtcgtattaacacaggggtagacaaaattggcatcatcaattggttgaaggcaagtagggccgatgaaggccattcaaaattgtcgcggattaacaaggtagttaaaagtggtgctagatgaagcgccgataaaaccctgtgagacccaaaaacctatgcagggccttgaaggatttaggaaatggccattgtcgtgtagcttgtatttttgaaaagaccaattctactccttgtgatgagaccatatgacccaagttttcactttgcgttgaccgaacgaacacttggataactttaagaa

SEQ ID NO: 174941 - DNA, 453 bp, Glycine max
  unsure (1)..(453): unsure at all n locations
ntagcagtgacagagaatattcacctcgtcttgcttcttgttgttacacttatcaacgcaagttaatatattaattgtattaaacttcacagtttcatttcatgtatataaataaactcgtgagagtgactttccagagagttctgagttgtcaaaccagatatggtcctgcttattatatgttacggagggatataataatattggctgtcatgcatacatgctcagggattatcaatattgaaacttgaagccaatcttaataatttgttattccccccttggttcaaacatcaaatngcatgtgtatataggtaagagaaaccaaactatgttgaaatgcatacaaacaaaatttaattaacaatattcactctactatcaaaataatttcagaatctaaggtacagttctacgacaagatataacttataaatacacatgactcgctag

SEQ ID NO: 174942 - DNA, 431 bp, Glycine max
agcctttggcaaaaggagagaagaagttcttttatactcacaaaacaatgtggaaaaattgcttgtgtaaagaatgaattggaaaagatagattgcaaagattgattgaataaataaaatgcaaaacaaagccttgcttttatagacttttcatgtctggtcaagaggagcatttagaagagttataacttttagaaaaatttaaaaccaatttgaaaaattcaaaaacaatttgaagagttacatattttgatttattcagaaacaatcactgataatcgattaccaaatcagtgtaatcgattacacaaagcttttatgtgaaaggatgtgacttttcacatttgaatttgaatttcaacgttcaaaggcattggtaatcgattaccaaaacattgtaatcgattacagcttctttttttaaaatcaat

SEQ ID NO: 174943 - DNA, 451 bp, Glycine max
ttaggtgagattccattatagcattatgaatgtatgattctttgaaatgaaatgactcttttgagatttgatttcactaacaagcctaaatttttaaaatcttttatgaggttgaaatacaagagattgaacaaagttaagaagataactaagtaattataggataacttggcagttaagaagccaccactgattacttcgagtttttgtctgttaagttggtaataactcaggttagaagttttgtggataaattatatgtgcttgtttactttcaaagatgcattttgattgtattttattttcttaatttttctaatgttgcttttaaactttaactgtctttttagaattgatttcattttacaaatttgatgtcaaagttagtttattagtgttgtgtttgaaagtgaataatttcacttgacaatggtagtgttgataacaatta

SEQ ID NO: 174944 - DNA, 434 bp, Glycine max
  unsure (1)..(434): unsure at all n locations
agcttagattatttaatgagataagcaatttctttttcatgcttagattccatttagttnttcaccaaaaaaaatccatttaatttcataggtgaaaaagatttactacttgttaatactcccttcgagtgcgtaagaaaagaaaattatttcaaaataattattattttaattttttaatatatcattaattatttttttcacttgtatttcttataatattagtaacaaattataaaatctataagtgaattaatgataatataagaataattctataaaataataattattttttatcagttttttatgatttctagatatgtgtaaaacaatctagaataataactattttgggacaaaatggaataattttttgttattgcatatactttnttcatccctaaatacaagactntnttaattaattcata

SEQ ID NO: 174945 - DNA, 447 bp, Glycine max
gggtcttaattataaaaagagagatgctggtccaaaactctgtttgttgtatttgggagatgatgaaaaaagtttggatgcttgtaagcattgtggtacatctagatggaaacccaacaagaagaagaaaatagctgcacaggttttacgttacttttcattgaaaccaagattgcaaagattgttcacatgtcgtaagactgcaaaagatataagatggcatgttttggaagacaataaagatgggttgttaaggcatccaagagatggagaggcatggaagacatttgatttaatccatcctgagttttcttcagatcctcgaaatgttcgcttagtctgagctctgggagagtgcgatgcatgggattcgcttgtttgcacgaacaaactgtagtacgattgactcacagaatagttgatgaatctgaagcctctcctcttgat

SEQ ID NO: 174946 - DNA, 446 bp, Glycine max
  unsure (1)..(446): unsure at all n locations
tggatganatatcaaatgagatggaccaatgtctnttttttatggaatatctgcaacatcaatttttttcgggataaaattatgttaaaacttattgtagtctttattttaaacaaatattttagtctactacttatatatttatatttacatttatataaaaaaatatgcaaataatgaatgatatacatttaacaacaaactaacatattgtacttgtgctttgtatgatcaacgtacaatatttatattccagtaacatttgtcttaacggacatgaatcctctctcgtcatcttttcagtgaagacaattntatgtttatctctttcctcaaagaggaggaggtgaatgaagtaattaatgattgtggtagttaacagagtcgacccagatgggtacactcttctattcatcaaagagttgtgggaattgtaaaggtgatat

SEQ ID NO: 174947 - DNA, 407 bp, Glycine max
ggacactatgaatctaagctgaagtgaagatctgcaacttagtattaaactctatcatggccaacccacggaatgatatgctgggcaagatcttgtgatcaattcttgttttgttcgacttatgagtcaaattggatactgtaactaaacattttgcagcttaatgtacaagacatatgtacttaaacacatatgaaaatagattttcgtaagcgctgaatctacagctctggaaacttaggtgctacaagtacaagcattgttcaaatacacaattagagtaccttactgaatctccatgctccattatgtatgtattcccctcgtcactaaacctctatggacccattgctctcacatcaagacaccatggcattgaagactcatggaccacccacatgcttgcc

SEQ ID NO: 174948 - DNA, 433 bp, Glycine max
  unsure (1)..(433): unsure at all n locations
agctntcttattgaactttcttntttgttttaactntttgaagattagaggagaatttgatatttaacttgcctgtaaacctcactatattccttttttttttaaaaaaaaaaattctatactggggcttttatgtcttgtctactgcaggaaatatattggttgggttgtcagagtatggtttatcactttatctaagtcccttgagtgactttccatttgcaattgcatactggccatacttatattgatgaaaatttgaatttgcagtggtgaaagtgcaagtgacggaactagtgaaggaagtgatgagaactcccagaatgtaagttctctgccacttgtcaatatttatctaaccaagaagtgacaaaatccttatatccatgtttgttcttgcttgcttatgtagcaaaatgatgtctgaatgagt

SEQ ID NO: 174949 - DNA, 450 bp, Glycine max
tcatcctcaaatccctcttgttggaatagacttagcttatatagcttatgaaagtttagactaatttagcccaacctttgtcctcagatccctcttgttggactagacttagaccaaactaaattattgtaacaacatatttaaaaccaaaacttaatccgcagattcctcttgtaagactaagtttcaattctgctgcactcaagttctaaggtaacaatacatttcccaatgctaaagtcacctaactatgcacacaaatgggtgatcagaccaagagcatacaaaatttaagcactgaaagaagcattgaacataagaacacaatcaattagataataaacctaggtatctctgcaaaagctgctcctcttgctgcctccagagctcttttcccgaaataggcactgtagtgtgctctggaatctgtgcaaatcatctacctaaaaa

SEQ ID NO: 174950 - DNA, 444 bp, Glycine max
  unsure (1)..(444): unsure at all n locations
gcttgcttctacaatctccccctgtgtgatgatgactagtcctgaaatcaagatagtatatacaaatactccccctttcttttagagattatactccccctttctttaagctctcttgatttctaagttcttgaatttttctccccctttggcaatatcaagaagccaaagtgtagggcaacatcaaactcaagcaatcagtaaacacgaatgtttcaatcaaccaatcaatccttatttatccaaatcactaacatctaagaggcctaattctctcctaatggcaaagaatgtttccttagggagaggtttggtaaagatatcaacaagctgattctttgtatncaacaaatttagaacacaatctcccttcagaacatgatctcttaagaaatggtgtctaatttctatatgcttggntctagagtggtgaattggattttg

SEQ ID NO: 174951 - DNA, 460 bp, Glycine max
  unsure (1)..(460): unsure at all n locations
tgttcatcttgagataatagggggtcatcctcatttgaagttgatggtgcaacatatttctttggcctaacaggaactccaatatntttacagcttctaatgttatgattggtttggccacaccttccacatgtaaactcagccaatttcctctttagcttatgtcctgtgacattgtcctcatctacagatctccttctatttttctttggccttcctctttggacctttttatgtggtggaacagggtgtgtatactgtgtctgggcccaatattgtggtccttggactggttcaataaaatgcttgtatgtcttattataagcttctattgacagccactcatgacacatgtcctcaggcttccctcctttgtgagttattgttgcaatggcatgtcggcatggcatccctacatcaaagttgtaaaatcagcacacatgtatgttatgaatgaaaa

SEQ ID NO: 174952 - DNA, 394 bp, Glycine max
tgcaagcttcacattctagacaaggtgagggcgattgtttctgttacaaaggctacaaccgacggaatagatgaacaagttctaagtaacgaaaacgagtgcatgatgtatagggttaaacaaatagagacattgacaccgagtctaacctgcatcttatttggtgaaacacaggggaggtgtaattctgaagacatttacatagtaaccacccttaccgataagtactcctagttctgtaggaatttagaatgaccggttagtaataatatagaagagaactatggctaggatcaagatatgtgtctagactagagggatatggatcttacctttcatttggtccattacatgcgatgattcattctttgctggagttttaagttgacgatca

SEQ ID NO: 174953 - DNA, 456 bp, Glycine max
  unsure (1)..(456): unsure at all n locations
tgctctatttgctgcgcnttacgactgccattgaggattgctattttctctatatatgaggntctcgcgcggcattgactcgagttcgttggttcgttgtgaactgctagttgcggcgaatgtgcgactgcaagtgtgacgaccactaacgatgtatgcagaatgtggatgctgtgacactgacgtatggatctctcatggatcaagctgatccgtgagaggcttacagatcaagttgatccgtaagtgcgcctctcgtttgcgcgactgctttcacctctcacatcattgttcttgccctcagtgcctttctttttagcaactttcttcttatgcacaacactctcctcatcctcgggcttcacaaatcttttactccttgtcatcacagctttgcattcctccttgggaatctcttctgcatttgccacacaattgttggatgacttgtcagct

SEQ ID NO: 174954 - DNA, 411 bp, Glycine max
  unsure (1)..(411): unsure at all n locations
tcaagcttaactcggatgtacgagtcaggcgcatattatatcgagacactngatattgaagaacagaagctctcgagatagtctgaaggcataacttttacacggatgtccgattcgggcgcataatatgtcgagacgcttgaaattgaacaacggaagctctcgagaaatgctaatggtcataactgttcactcggaggaccgattcaggcgcataatatatcgagacgctcgaaattgaacaacggaagctcccgagaaattcaaatggtcataactgttaactcagaggtccgattcatgcgcataatatatcgagacgctcgaaattgaacatcgaaagctctctagaaattcaaatggtcataacttttcactcggaggtccaattcaggcgcattatatatcgag

SEQ ID NO: 174955 - DNA, 387 bp, Glycine max
  unsure (1)..(387): unsure at all n locations
actcagctagatgcaatgccaacggccataacgtcttactcggatgttcgattgtgtcacgtaatacatcgaaacgctcgaaattgaaaacagaagctctgtgctaattcacacgacaatacattttaactcggatgttcgaatgagtcccgtaatatataaagacactctgaattgagaataaacgctctgaacaaattcgaacgacaataactctttactcggatgtgcgatggagttcagtaatatatctagacactcgaaatngagaatagaacagctgagcatattcaaacgacaataactgcttactcggatgtacgatggagacccgagcgtctcgatatattatgcgcctaaattggacatccgagttaaatagtatga

SEQ ID NO: 174956 - DNA, 446 bp, Glycine max
agcttataagaacaaaattgccttaatcatttcctaatatgcatgtgaattaggacgcatcaacaagaatcaagccaaggctattgtgcaagcaatcaatggggcaaaacacaccaaatgattataatgatggatggctcaaattctcacaaaggtaaaatcatcactttcaaattgagctttcaaaactatcatgacatgtagagaagaatcaaggatttcaagtcacaaaatgtcaagaacttttattttcaaaacaattacccatttcttgaacatatcctataattcaaagaaaaacatgcaaagtcgtacgtgcacacaaaattgacccaaaatattaaactgaaaatccgacgaaactaacaacattaacaaattaacacaactaacaaattaacaaaaccaacaaaactagcaaaaccaaagaacactccccccccccc

SEQ ID NO: 174957 - DNA, 457 bp, Glycine max
tgttaaagaactgagggaaaatcaagaacaagcttgtacgcacatcgttcacgtgtatgatatccactccacaaggtttgaagtagaggagaacttcaaccttataacgcaacgtggcggacaaaagtgggcagttaacttgaatggtcatcattgtcaatgcggaaggtattctacgcttcactgtccatgttcacacattattgcagcttgtggttacgtgagcatgaactactaccaatatatagatgttgtttatacaaacaagcacatcttaaaagcttactccgcacaatggtggcctcttgggaatgaagcggctattcctccttctgatgacgcatggacacttatccctgacccaactacaattcgtgcgaaaggtcggccaaaatcaacaaggataagaaattatatggattgtgtcgaaccatctgagcaccgacaaaaatgtagt

SEQ ID NO: 174958 - DNA, 456 bp, Glycine max
agcttatacagcttaacaagtaatctcacattcgaattctaatattcatagttacattaaatatttaaaaagatattattgtttataatgatcgatcatatatgttgctcgagcaagattaactttgatgaagaatatatatagtaaaaaaagtattttcaccttactgaaattttctaaaggtaaatgattaatttataatcaattttcacgtcagtaccatattgtttccgttttactaatattaacaatatcttgaatatgaaaggcagtgacacgaatctttttgaaaagggtcattttcatttacagatatgctgtgaccttgataccaatacagacaaataaaaatttaatacttgagccttaggcttaagacaggctttataaatgatgtcccaactcgcgacctggtaagggttcatctgaatacagtacaggagctagctacagata

SEQ ID NO: 174959 - DNA, 461 bp, Glycine max
  unsure (1)..(461): unsure at all n locations
actcagcttgctcatgttgattgttngggttaagttcatgtgtgtttggagggtgcaatttgtgttttatatggatgttagttcaaggtggtgtattgttggactgtgacctaaatccatatgacagttaattctattattgctttttctgttctgatttatatgtgtgtatataggacaacttgttttgtatttttacacacagagagaacaacttccacttgtattttgcatcagtaataaaaagctttctgccacctcctgtggatgtagccttgttgaaaggtgaaccacgtaaatctgtgtgttctttctcatctctctccctttcaatntgctgcaacatctgtgagtatgacatttntgttctgctgcatctcttgctgctgctcttacttgttcttcatcacttccataacatgatatatattcatgcacggatgatgtcaacttggagagaa

SEQ ID NO: 174960 - DNA, 441 bp, Glycine max
  unsure (1)..(441): unsure at all n locations
caagcttnattggtcatagtggggcatgatatctcgctgcctatgctcttgtattcactgtcatcatacgtttcgccaatggtattctggtatgttatgttatgttatcttcttactctcaaattttaataattttcctatgccagattttcagagtgctttaagtatttactattttttatacgaagctgtcttcaactcttcatatcatcatatatatattaaactcaggcaatgataaatcattttttcaccaattaccaattcttaaacatacctatatatacaccttgattatcaacttttatagacatataactgaaaggaaaaggaaagatataagattgatntgaagattaaaaaaataagatcaataaaaagtcatgaagttgatttctcttattaataaaaattaataattaacctttacggctaaaaaag

SEQ ID NO: 174961 - DNA, 443 bp, Glycine max
gtttatggctgggagaaatatgagatagtttgctggatttcaaaaataccaaaataaaataatgatactaattcattattaattcttctaccaaacattattgttttaagcagcctaaaaatatatatatttacgagagaaaaaaaatcaaataaagaaagcataccttgatacttagacatgccacactcttcatttccaatggcaacaattctcaagtcaaatggctcaggatgtcccatggaagccctaagagatccccattgtgatttgggagaacctctagcaaactcgattccatctagagcttcctattaattaacgaaaagatatagattttttaataactattaaaattcagaaatacgaattaaaaaaatgaaaacaagatggaagaaattatacttggataaaaggtgctatggcagatgtattaacttcgt

SEQ ID NO: 174962 - DNA, 369 bp, Glycine max
agcttatcttctcattctcgtccaacactatctattctcaatacaatcaattgtgtgaatcaaaagtcacaggaggttgttctgggtttcttagatatctctattgctttcatcaccattgtaaggagctctgctctatttcatcactgtttccagtctttgattatctctgctgtttatactaaaagaggaaatatgctgttattactgtttcatcaaggtatttgacacttcctatcctatcctattgtttgttcctatctttttaatatatttatgtaaaaagtaataatttttatcctacctattgctataaagtgcttcaccaaacatagtagtatcttgtacaatattgaatattatacttat

SEQ ID NO: 174963 - DNA, 454 bp, Glycine max
  unsure (1)..(454): unsure at all n locations
tcattcnttggctcttcctcttcttggtactctttcaatatgtctggtttggntccaaatccaacaatgataacaacgccgtcttcaccaacaaccaacttcagttctctctgtctagaaatagaagaatcttaacaactggccgaggatttgacttcaccccgtttctccaccaccaccatcgtggtcatcatcggcgccaccaccaccggagtcgcgtgccggagtcaaaggaaaccgagattgatccacgttatggtgttgagaaacgccttgttccaacgggtccaaacccattgcaccattaatgaggttcacatactttgttttttcaatttttcaccgtgacataatgtaattttgtgtattcataanaggagaatttgtctagctctagttaaaaaaaaaattgttatatatacatataattcctctctttantaaactaataagt

SEQ ID NO: 174964 - DNA, 426 bp, Glycine max
  unsure (1)..(426): unsure at all n locations
agctngatcttgagtgtgggtcagntctttatcatgctntgaacaatatacttggccttcatttaactgtctttgggcttggcggccacgctcaacaaagtactttcgacacctactgtacgttgatttcaccaatgctgttatgggaatgttgcgacaatcctttaaaaccttattgatacattctgagaggttcgttgtcatgtggccatatcgacgtccttctctatcgtaagccatcgtccatttttcctttgagatgcgatcaatccatgttgctatggctggactcagttcacgaaatttttcttaattttgatcaaaaatgtgcttgcatggagtgtaggctgcataaaattagttatgaataacaattctaagtataaatgaaagtaaaataaacgtgaccagcaaatatgaaatctt

SEQ ID NO: 174965 - DNA, 451 bp, Glycine max
  unsure (1)..(451): unsure at all n locations
tagcctatttggtcaagcttgaaaaatgattgttgattgttttctcccttggttnggattattgtaaggattaatcttagttgggttacattttgatggcaattatggttaacagccttgtaatgaagtctaagtcatttaagcaatttctggatctatgtggtgacagctaaactttcaatggaagaggcaagggaaagactagacatgctgggatttaaattttttcaagaatcttaaatggatatggtgattattttactttaaaacatccaagttttgtatttgttaacagtttgcgggaaaacaagataccaattggtaaatgatatatttagtcattggtcctgattagtttaaatattgtctcttcgaccctaatcagtcagcacttgctntaatatagttgtagtgctatacatcggtgcataaatatcaagattcatctggg

SEQ ID NO: 174966 - DNA, 402 bp, Glycine max
  unsure (1)..(402): unsure at all n locations
atagtcnaagcttgagaaggganngaaacacagacgcagagatcaaacttttttctccnagaacacgcaataccccaagaaccaaatgcaacatacactcgctccaatggactgcagagatgtgctaaactctatgcactcacaagaatgaaattcactcatttacagatacaacactcccgcgaattttatcccaaactcaaaggagaatcttgtaaagaggcatgcaaatcgagcggtacacactgtataaaagacttcaagccggatgctaaaatccatgaatctgagccaattcctaagtgtatcgtgcaaccacttatgaatgaaatgaaacaaatacgctctgacaaaaaaacaaaaaagatcataacattcgaaagaaacgacaaactgatactt

SEQ ID NO: 174967 - DNA, 442 bp, Glycine max
agcttagaaagattatggagaagacctatattttattgtattcgatgagaattttcgtgtcatatttatgcattatgagatattttatttggaaaaactcattgtttggtataagtttgtaaaagacatgtgcttaagagattttatgtgaaaaagagctaacaatattggattattcgagccaattagttagtttaccacagttatggtaattttttacaaccacgataattttatacgcatacggtaattttgtacacctgtggtctgcttgcatcacttgtcacttgaagattgcaaggatcacatgtcaaatttaaatcctaattaattgataatattaagggataattgattctttaattaacgaaagatggatgacctttgtataatattataaataaggaataaaggcctctctttttggagtctttaatctatt

SEQ ID NO: 174968 - DNA, 444 bp, Glycine max
  unsure (1)..(444): unsure at all n locations
ctattacggacctatgaatctcagcttgtacatggtcgggttagcaaagaattcatgaattntcttggatgcaaagcttaggttttaggagagcattcacatattcctttatttcttaacccatcatgacttccttgctacaatccctcctttatttaattacccctttaacatcacacaatattcttttaggataaaattgcttctagttcctatttttcattcaatagttttttttttactatggcaatgtaccacattatgcagttcgtgttgactgtgtgatgttgttacaatccctgtacatagacaatttcatacactcccccaaatgtgggacaaaacatctttttctaggataatgctctcctacaacctaagataaggtgtgcatgagagtaatttcattcagctcatggttcaataacaacattcattcatgtt

SEQ ID NO: 174969 - DNA, 413 bp, Glycine max
agcttcttatccaaggctcatcttggtggtgtaactacttcttccatggcttattccctagtggatggcgcctcctctcacctcttctcctttgtcttccgctgcatctccatggtggaaaatcaccattaaaggacctcattgaagctcaaagatccagcctccatagaagccccccaagcaagcttccatcaatgatagacttaatggcccatataattagaaaccgctcggaagtttgtattatcactcacatcttgactagttaaactttcctaataaaatgagtttatcccatgtctttactccaaagatcagtgcgaatcaaatcactcccgcattttatctctagcatgcattcatatcatgcatcgcatacgcatctcttcatggcatcataatgaacatattgt

SEQ ID NO: 174970 - DNA, 450 bp, Glycine max
cttgatgatatggtcttcaccgatgaaaggatcaaagttgttcttaaaagaggcaaatctgatcatcatgctttgataaatgccaaaaaaaaaaaactggggcaaatgaagagggtgagaatgagggagaagcccatgctgtgactgccattcctatacagccaagtttcccaccccaaaatgtcattactcagcaaataacaagccttctccttacccaccgcccagttatccataaaggccatccctaaatcaaccacaaagcctgtctaccacacaaccaatgctaaacacctcctttagcacgaaccaaaacactaaccaaaaaggaattttgcagcaaaaagcctgtaggattcaccccaaattccggtgtcgtatgctaaacttgctctcatatctactcgataattcaatggtagccataacccctgctaggtttcctcaacc

SEQ ID NO: 174971 - DNA, 414 bp, Glycine max
gcttaaagaaaaaaacagttgcaaattgtgtgcttttttgaaagaatcctacaagtctttaacatgcaaaatacaacataattattctctaatgagactatagacattactattaatcacgattggattttgacaaatagtagttaagttctatcaaattttcgtaatttagcattactcttttaacaacttaggccatttttgtttcaactttcaagtataaaattgtatcttaaatagtaatactctccagaataatatggctaagaatatcattcttaatatgtttgattgatatttagtaaaatataattttttaattaaaatctaaaggtgaaaaaatgtagagatacataattattgtagaaaataatcttccttctcataaaaattcacctttcaggctgtcactat

SEQ ID NO: 174972 - DNA, 424 bp, Glycine max
  unsure (1)..(424): unsure at all n locations
gaacgtngaacttagctcanatgatgcaatgagtgtacttgactttattatcacatgagcggcgggctgtatgaacttgattgaaatatatgtatatatatataaggatgttttctcagtccaagtagatatatgtccgagtagatataggtatgttttccaaggggtctaagttaattctttatttgtttttactagctaaaaaagttgttggattattcaataaacaagatttttaatgaacgtttagtattctttgacacattgaaatagtatttttaaaacattatttttaaatttgttatattctcatctatatttattcgcaatatatttatttaactcctttattatctgttttaaacaacatattattgtattatttttatctcatactacactcttgtaagttattcaataatta

SEQ ID NO: 174973 - DNA, 435 bp, Glycine max
  unsure (1)..(435): unsure at all n locations
agcttngaagaccacagtaagagtagtgttgtattattggagaacatccaaccccttattgtagccccactgtatgaattattgcatgaataagaacgaaacttatagtgagatttaaggctttcaaaatatgaattactatatatgaaaagaagttaaaatatctttgtattcaataacaatttgattgtttgaaaattgatgactgcaataccatgcatgactacggaataatttctccaaaataagaaataaaataactaaaaaaaaggctgaaaaggtcttcattaaaggctttgcacaatgcacattaattaatgaaataataatagaatacggtaagagtgaggactctacctggaggattgttaaggtatttagagtaccacttgatacaggacttctactttggcacaaatactttatcccgctcaa

SEQ ID NO: 174974 - DNA, 445 bp, Glycine max
  unsure (1)..(445): unsure at all n locations
ggcgctacgctaagagatgcanaggcgcgattgtgagtgtggccggagtcaattgcgagacggcggcgccgtcgcgttgtcgcgccggttcgccgaaccttcgccggcgcggcgaagccatactgaagctgctctcttgttgcggtggctcctctgaagtgaagatccgtcaaatgctcggtgacagccctgacactagcaaagctctacgaatgtatagtctctctctctcactctgtcacacacggtcacacacacatgcaaattgtggcatgcatgatgcaccctaaacatttacgtgatttaaatcctataggtttagtttgtttaatttcagcggaatagagggagattttttatatgatatatgtactatctgaattcaaaatttcaatcgatcgatcacatcacgtttgattntgtgatatactctctgtgatcactc

SEQ ID NO: 174975 - DNA, 421 bp, Glycine max
  unsure (1)..(421): unsure at all n locations
catcgcgacctaagcaccgcggctgcagcttaagtaaacaacctttgccatttttcttttataagctagagncatgtncgaaaaatttataaaatagttattttacatttttacttagctaatttaataacatttaaatatttgttgaattttagagaatgacaaagttgttactatcatttttctttcccaatttttagatatatctctgattgttgtggtatgtgcatgggaacattacaatatttttcacaactaattgttttactcgataaatacaaaaaatcatatatttaaaatacattaaatatacttcatgtttttatttaataataggtcaccactaaacgtgtgaattaattggttagaagttattttaatataattaatgatctcacattaaatcatgaatatgcgcctc

SEQ ID NO: 174976 - DNA, 455 bp, Glycine max
  unsure (1)..(455): unsure at all n locations
tgagtagctnggtgagctttaagtgaactaagacaataggttcaatttgctattgagaaatgcttgagctgggactaattcagttcaattcatttccactcctactcggtaatataacttgaaagttgcagcttaaatttgtgctggctattatggattctaatatttgattaatttcagggtaaattatatctgctgcttcttgggaccacagctcttagtctggtatgaaattgtttttatttgtttgaattaacagttactagatttcatagctagctttattgtctctgatccatgcttgattttcaagaaccaaatctatgcaaactttattctgaatggaagttctgaattacctaaacacattgtggacacgacaagcagccttataatagctattgtaattattatcttatgtcccgtacttctatatgatagtgcatgtagaggat

SEQ ID NO: 174977 - DNA, 444 bp, Glycine max
  unsure (1)..(444): unsure at all n locations
agcttgagggtgcgtagcccaccatctnttcatagtatagtatcgataatgtgtctaccatcacgattatcgtctccctttccatcattgggggtaccacgtgggccgccagatccctccaccttttgggcgtgttctttgaaagattcgtccccctttttgcaaatgttctgtagttgcatcctatccagaaccatatcaaaattgtactaatactgcctaacaaaggcaaccattatgtccttccaagaatggactcgggaaggttccaagttagtgtaccaagtaacagctaccccagtaagactttcatggaaggaatgtatcaacaattcctcatcttttgcgtattcccccatcttctgacaatacatctttagatggttcttgggacaagtagtccccttgtacttgttaaggtccagcaccttgaacttgggaggg

SEQ ID NO: 174978 - DNA, 453 bp, Glycine max
tcacgctgctcaattgctccaggttgctgcatggaagggcaaaggtctgtatggcggtcagcataggagcacaaaccacaaaccctttcgacaggtacaaatttctgattcaaggccagctgggttactaagttgaccaacgcatccagtttgccttcaagcttcttagtttcagatgatgcagatgggtttgtagctacctcatgcactcctctaatgactatggcatcatttcttgtgctaaactgctaggagttggaggccatcttctcaattaaatttctggcttcagcaagagtcatgtctccaagggctccaccactggcagcatctatcatacttctctccatattactgagtccttcataaaaatattggagaagaagctgttctgaaatctgatggtgggggcaactggcacatagtttcttaaatctctcccagtactcatac

SEQ ID NO: 174979 - DNA, 476 bp, Glycine max
gacgcgaccttaagtcacctgcggcatgcaagcttgtctcagcgtttatgcgagacggatttttcttgctagctatcatcgctaagtaccaagaagagttgggtctatccacggcccacgagcatagaatcgcggacgagtatgctcaagtgtacgcggaaaaagaggctagaggaagggtgatcgactctctacaccaagaggcaaccatgttgatggaccggtttgctcttaccttgaacgggagtcaagaacttccccgcttgttagccaaggccaaggcgatggcagacacctactccacccccgaagagattcatgggcttctcggctattgtcagcatatgatagacttaatggcccacataattagaaatcgttaggaaacttgtatggtctctcagaccttgactagatacgacttcctttttgaaataaaatgagatggtcccatgtttctactcacaaaagcttgt

SEQ ID NO: 174980 - DNA, 456 bp, Glycine max
  unsure (1)..(456): unsure at all n locations
cttgcttgtgggcttctatggaggctggatctttgagcttcaatggggtcctttaatggtgatnttccaccatggagatgcagcggaagacaaaggagaagaggtgagaggaggcgccatccattaaggaataagccatggaaaaaggagcttcaccaccaagatgaaccttggataagaagcttggaaggatgcttcaatggaggaaaagaaagagggagagaaagagagaggggggagcacgaaattgaaggaataaaagagggagagaagtggaactttgaagtgtgtctcataagactttcattcatcaaagttacaacaagtgttacatatgtttctatttatagactacgtagcttcctggagaagctttcttgagaaaacttccttgagaggcttctntgagaaaacttccttgaggagctagagcttagcaacacacacccctctcat

SEQ ID NO: 174981 - DNA, 428 bp, Glycine max
  unsure (1)..(428): unsure at all n locations
agctncaatggagcttgcatcatgtgttatccatagcatcttcatctaggggatgttcttttgcttcctctatctttttgttcggagaattctctttaattccttgttcttcatcttattctccatgtatatcctccattgtcttgtggtttggtgctgtttagagtacattcaaaaaaaaataaaccgattaaatcttagatctacacttgttcttgcatttctatggttcaaattttgtagatctacccttgaatcttgtttttgtgttgattttagggtctatcaattttcattcataatattcttgttctgaacctttangtctaaattttgttccaaaatattgattagaaaaaaaaacacaaaaatcttagtgttaatcacttaatccatgttggcttaaaccatgtttagacatagtaatt

SEQ ID NO: 174982 - DNA, 450 bp, Glycine max
  unsure (1)..(450): unsure at all n locations
ntgtccgcanaaatcacttaaaaccgttttaaatgtccatctccttanacggtcctctttgcttttatcggttaacatggaccattcaaaagcataaaatcaacatgtaactttaccacttttgttgttggacaagtggcctcagatatcttaagaagggggggttgaattaagatatcacaaactattccctaattaaaaattctacttttaacttaacccaacaacccaagattccttttaaacatgaactcctagataataatgcaaattaatcttactaaataaaaataataagcaataaacagtaaaggagtttaaggaaagagaaaatgcaaactcagatttatactagttcggccacacccttgtgcctacgtccagtccctaagcaacccgcttgagagttccactatctttgcaaatccctttacaagttctgaaccacac

SEQ ID NO: 174983 - DNA, 401 bp, Glycine max
cctatgatctcaactctatggagactgaataagaagaatgctacgtgagagatgctgatacaaggcatctgcatgtatgctatgactgactgcggagagagaaaatctattcggttttagaataagaaaggatctccctttattccataattttattcaagctctgccacatgtccctattctagtgtagctcatgggcccactctctctatgagacgtgtacccatactcactcacagaagtgggaaaaacctgacctttgaaacgctaaaatcctgcctcggtttgcgtgtcaggtctctgaatccaaactctctcgtttctgtgggttcgtcatggccagggatctatagcctgcaatatatatatcatagcgctcagaatgaaacccctgatgtggc

SEQ ID NO: 174984 - DNA, 434 bp, Glycine max
  unsure (1)..(434): unsure at all n locations
agcttagacatcttgcgtcttcctattgtattgtctcctgtattntgtcaagcaggaactctacatgcttaatctcttcttcctttgtcagagtcccaaaatattaacatttgattgaactttgaacaaattataaggacaaaattagagtttttataggtattgtttgtgttattcatcaattagaattggggttttgtttgtgttatttttcaattaaaaattagttttatttcaataattcattaaggcgggccactaattttttttataaagatgtggaacactaattntgattagaaaattgtactaacagcaatttagaaagatgtatatatatcttgtccaaataataaatataccagatagagttaccaagtcttctatgtcgaggccttgttgcttaaaattatctatgagaacctccaaagatg

SEQ ID NO: 174985 - DNA, 453 bp, Glycine max
cgcttgggtgtattcaatagagagctccgagtcttgatgcctttctcatttgcttcctactccttttataggcctaaggtagcttaaaattcatgcgacctcacactaagcatgaccttttgggcttagcgaggtgagcatgcactgagcgcggtagtgcctgtgcttggcgaggtgattacgcgcttagcgcaggatttcatgctaagtgcacctttaggcttcctcgccggccttcgtcgcgttaagcttgagcttgaccgctaagcggggaggtgcgcttagcctagcttgtgtgctaagcaagcagtccccatcttcaactttttcttcaaggttttttcttcaagtttttgcatcaatttttctccaaagcacttgtaattttcttcttttgaatcatgttggtaaaaagttaacatgatattaaattcctcattatttcattaaaaa

SEQ ID NO: 174986 - DNA, 439 bp, Glycine max
  unsure (1)..(439): unsure at all n locations
agcntttaacaatttatgtatatnagatcattatactacgtcatcaataaaatatttaaacaatgacatttgtctaaggaaaaacttaagataaggatacattaggacaattatttctgctatgaccatgttgccggcaaagtccttatttttttctacttgctcgttcattttcgtcttcgtccatctcaataggaatgcgagttgaaacgggacgaccctttgcagacctctttctccttggatcaggaccccattgatctccttcatattcttgccacattgattcgtgtggcaataaaccaaaggagttgtcgtagatgtgcaaaatatgttgtaaagtgaatatcatcggcacataggtcataggatcaacattgacagatttacaggcagccatgacgtgagaacacggtaaatcgttatcctgatattacca

SEQ ID NO: 174987 - DNA, 455 bp, Glycine max
gtgttattaattaaccatatatgttatacccaatgtggtattgaaaatgtagaaactcaacccctccaaaaaacagggatcttaagtcaaaatatcaataaaactaaaaaatcatccgaagaaaaagggaaatactaaaaaatatacaagaagaaagagcatgacgctacctgctttaaacaattcaaaacatctgcacaaatagatttatgcatacactgaatctgcaataaagttccacactgtggggcaatcaaaggtgatctgtgaaaatttaaaaatagagaacaaattgtagacttacaggaaacacattaacattctgattattcaaacttgaaaggatacatgaacatatcatatggcaacaatttaaaacaaaaatcaattaccataataacatgttccaaactgctcaatgtaaaatttaaaccatctaacctataaaatcctta

SEQ ID NO: 174988 - DNA, 438 bp, Glycine max
  unsure (1)..(438): unsure at all n locations
agcttgtngaatggctagacatgatacatgtcatggtttggtttggttcaaggataaaagggatgccccacattatttccatgacacaaatgcaaaaatgatgatttggaaattttatgcaaaactggtcatgcatgcacctatgcggacactcaagtgtcaaatttttatggtcatgtgatgctagggctcaggattcatttcctctattttagatcaacccaatgtttccaaaatatgttcttttatcaatttgtgcattcatccgagtccattttgggtactcgggaaaattttcacagcattcacccttcaggtgtgcacacatttttttttcaacaactagctatgatcagccaattttttcaaagaaaagttggaagtcatctcttttcgaaagcatgttggtttttcagctagacaacttatttttctttt

SEQ ID NO: 174989 - DNA, 451 bp, Glycine max
tagacattgaagaatgtgacactcatgagagcccaagcttttatgcccatcaatacacctcatttcccaacctgtgagaaatgtgggattgtatataggttgggagaatgcattatgggtaatgaattagttgcaaccatggatgagatcaactttgttggagaaagcaataattcatataatcgataccctaaaaattacaatcaaggacaaggctttaggcataatcaaaatcaagggatgtataggcctccacccatgcataataagaggcatagacaagaagagagacattccaccttacaagaaatcgtgcttcagtatgtggctcacaatgataagagaatgaagtagatgatgtcctaaatgaccattattcattcttttatttcacaaagacaatcgagcacccttccttcacaccctgagccaaatcctataaaggaagaag

SEQ ID NO: 174990 - DNA, 437 bp, Glycine max
agcttataacaatagtgactgatgttttgttcttcaaccaagctataaagaatggaatatgccgaatgtattaacctccagccaaaagaaacaccaacatagtcactgaagctaaggttgtggcctgtttcacatccattagaatggcaccaagtgcaaggcctattccttgagagaccagcacattgaaaagcatgatcaagagggttaacacaaatgtaaccaacgatggcttgagtccacccatccaataagagatggctacaaagatggtgggaagcacaaattccattggtaagtcccctaccatcctggctacatagtaggaggagagatggtacatgcctgatgatctttctttcatcagcattggtcgttccaatggacaagcgaagacggcattgaagagagggtagaactcccagaagatggagaag

SEQ ID NO: 174991 - DNA, 468 bp, Glycine max
  unsure (1)..(468): unsure at all n locations
cactatanaataactaagcttcgataaagaaaaggaaccgagagaaggaacttatggcttttccaatgctctcaatctaagatacccactttggatatcttatatgctatattaaatcaattttagtggtctctacaattgtagacaagtcacacttataagcaatccatacataaattaataataagaaagctaaggaactcattttatatttttttcctgattttcctcaccacccgtgttttttcttcttctacagcacttttgatacgattaaatacttttttaagagtatttataatgcacagctgttgttcattttagttgtttattataattttatgagttttataatttcaagtattttaaacaaaaaattactctaatgataagattattaaaataaatacttagattaactttgtgacgtttatgatatttgaaaatatattatctatagtataataa

SEQ ID NO: 174992 - DNA, 439 bp, Glycine max
  unsure (1)..(439): unsure at all n locations
agctaggcttactcgggttgctgtcaccctactgcattcatacctccccttcctttntctttgagctacgaatttcaatttgccctctgtttatcattccctgcagtagctcctcagttaccgggcatgtttccacatcgtgtgacgcccctggatgcattaagtacggatctcctttgtcactgtcaaggtcaattacatcggcctcgcgcaatgcttccaatatgaaccacctggaagtcgacacatcccttatatgcttcagccctcgagactcccattcttccactgcattcatcgtcgagcctccatgaatggcaagcaaattagtcctcatattcggactatcctcttgaaatgtcagccatccaacatcaatcaagctctgtaccttgtacttgagggctacacactgcttgatagagtgcccctggacacc

SEQ ID NO: 174993 - DNA, 449 bp, Glycine max
tataagagtgcttctcccacaaatgccacaaccatatcttttactacttggattcaatgagagcccacatctaacaatagtataattaactttaatcacaaaagcaatgtgcaagtgaagactaatatactatgggctttgttcacaacacccagatgaatggatgtatcatggtaatatgcgccatactctaatactgcaaaattttgaagacacaaatatgactatctgtttttttcaaaatttgtttttgcttatttatgaataaaataattttatagagaaattaattaaatgaactgggactattgcatttgactttgttattcacattttaaaaaaattgtaatgttttaaattgtctttctttaaaattctcaattatttttatttttatttcttttgtcatctgtttaaaatttaaaaatgacttcctttttaaaactctt

SEQ ID NO: 174994 - DNA, 444 bp, Glycine max
  unsure (1)..(444): unsure at all n locations
agcttgactaggcgagttgattgtagccttattttcactntagttattagtcaattcgattaagaatgagaaatcccaaagagaaaacgtccgattgattttccgctttattttactaaaaaaagatgttttttgattattatattattttttatctctttttgttttccaacgtggttacggcacgactgaacggtcggaattcattttaaccgaagttaacggataatacaattcaaacgatcggtggaaatttattttatttttaagttaagcgagaaatgacttaagtaaaatggcttaagcacgtcaaaagggggtataaaaagtaaatggaatgagaataaaaatacacaaaacacattgtggaccaccatgggtacatagaatgaatcgaaaaggttggttcgaggtacatacccgttgaagaatgaagaacgatga

SEQ ID NO: 174995 - DNA, 466 bp, Glycine max
ctaagctttaccgagagtcttactctctggtgatcgagtaccagtttactattatcgactaccagcggcaaggtttgttttcaaaaagctttcaactgaatttacaacgttacaatcaatttcaaaatggtgtaatcgattataatatattggtaatcgattaccactatgtttgaacgttgaaattagaattcaaatgtgaagagtcacatcctttcacaaaaatgctttgtgtaatcgattacaataattcgggaattgattaccagtgataagttttgaacaaaaatctaaagatgtaactcttgcaatggttttcaagtttttctaaaggttataactcttctaatggttctgttgaccagacatgaagagtctataaaagcaagtcctgtactagcattttcaataacaattattacaatctttaaatctctatgaacatcttcttcttcttcatcctttg

SEQ ID NO: 174996 - DNA, 447 bp, Glycine max
  unsure (1)..(447): unsure at all n locations
agcttcttatctaagacactctcttggtgttgattcttctccttccaagccttattctctagtggatgacacctcctctcacctcttctcctttatcttccgctgcaactccatgggtgaaaatcaccattgaaggaccttattgaagctcaaagatctagagttcatagaagcttctcaagcaagcttccattaagtggtaatcagatcacaagagcttcaagtaggtgctacttaaaccttcattaattttcagctttaccttctcctccattggtgtttcttcattnttctctatgtatctcctcacatgtcttgtgctgaatgttgttaacatgattttttagaatttccaccaattaaacttgctatagaagctagatttgattttcaatggttcaaatttcttgttcttgttcttgaaccatgaattgtgttgagtttacg

SEQ ID NO: 174997 - DNA, 453 bp, Glycine max
  unsure (1)..(453): unsure at all n locations
ctaagctgcatagtctaattatggtattctgaatgagtttttgtaataaatcttattntatgggtaatgtcgtctctagaacatttccattggatntagtgatgaaatatgtgcatcttcaggtgaaaaagacgctaagttttgaattgcaaaatgtagcagttgggctaagcgcatatcgcgcacttagcgcanaagagaatttggcagagcatcagcatcaaagccgtgcgctaagcttgagattagtgcgctaagtgcaattggtgccttcagtcaggctaagctcgagactggcactaagcccaatttcacttactcgcgctaagcgcgagggtggcgctaagcgcagcgccgcgattttagagcctatttaaagccttgcttggtgcagaatagggtacaactttctacatcttttacaacaccttttatgacagcttctacagaatg

SEQ ID NO: 174998 - DNA, 433 bp, Glycine max
  unsure (1)..(433): unsure at all n locations
tggaccatgaacagaatatgaanaatccggaacacgcatttattattattctcaaaagctggtagctagagggggccaataatacagataccaaaacaagataacgtcctttttctttttctcttattcttgtttgtgaccaaatctgcaattgctttgctttgtcattttcataaaaatgaatggctgtcatccatttggtacatgcctagatggcaaagtttgcgccttagcctgccaaatgtgaggcaaggataaccaccacataaaaagggaaaaagaaaaattcctaaggtggtgtaattccacggcatctttgtcatcaaaattcacataatgtctaatatgagaattgccatgttcttaacttttctatttaggatctgttggaagcccacttaacaaatcacgttgcatgtcctttatatatttt

SEQ ID NO: 174999 - DNA, 446 bp, Glycine max
  unsure (1)..(446): unsure at all n locations
agcttgataatagcaagaagactagtatcttttcttgctgacaatagaaagcttgcagctgaaggaattggaaatattgtcatcacagggaatgatgggaagagggtgataattgaaaaagtcttgtatgttccagaaatgaattgcaacttgatgagcataggtcagctggtggagaagggtttttcagtaaccatggatggtgattcactgaaactgtttgatgcanagaagaatctggtgctgaagtctaatctgtcaaaaaacaggacctacaagtgcagcatctccagtgataagatgatgtgcatgtctggagttacaagtgaagaaactgaggctttgtggcatatgaggtatggtcatctaaactttagaagtctgagtgaattgtattctaaagatttattttatggcctgcctaagttgaacgctggaagggaaat

SEQ ID NO: 175000 - DNA, 452 bp, Glycine max
  unsure (1)..(452): unsure at all n locations
ntgtgataggcattcatagatacaccttcttctaaaatttactctttataggttccacatcaagcaagggatcccttatgtgattttcaaataaatccttaggatagtattttgtgttctttacatgttttttcacttctaaaggttacatcgagcatcttctagagagacatatgttgagggaggaactcgctgttgagtgttaggggcaagctaatgttgaggcatcatgacaatatttggttgcactatcggattttcatatgtattttgtgatatttatttggcattttagttatctttaggccttgtttaaatccaattagttttaaattcaatttttaatttgtcttagatataattcttgatatatctgtttagcacaaataagtcattcttgccagagctctataggcccaatattaatagaaagttacagaaagagaaattgc

SEQ ID NO: 175001 - DNA, 400 bp, Glycine max
ccacacaacacacgagaacgcacactactaatgctggcaaggactctttcaccatacactatcaggaccacttatgtcactactcttcagacgaccactactaccataagaaattttctataacgccaccttctgagtgcatattggcaccgctctaatatcgtcaaacagaaaaagaaaatggaaggggagtagggtacttataaatgtaacctccaaatgcctcctataacgttgttttatgaagcagaaaaacggaatatataattacattacatactgaatacgtgcgtcagccaaatgtcaaaaataacctctttctaatacagaagattgataatatggaacctataattctatagaataaatccatctctacacttagaatcctacatctgtg

SEQ ID NO: 175002 - DNA, 449 bp, Glycine max
  unsure (1)..(449): unsure at all n locations
taccaaatctaaatagnnactctttagttaaggatagacttaagtgtttatttgaaaaancaacttctgaaaaataaacaatttaaatctaatcattgaattcataaataatatgaaaaattaattgttaaaatttataatctaatataaattaatcttaaaaaatataatatatattattaaattaattattgaatattataacttaattaattataaaatgttgtaaaaaatttaagtaagaagaatgttactattttattttcaatgaaaataattcaaacatcaaaatcggaggaggagcgcctagctatgtacgaaaacacaaaacccttcgcttttacttactccgcacgctctctcgtcatcattatttatgccatctccaaaccctaacaacttctaatccaatcgaagcaaaaacaacgcctcccgacagacgttgttca

SEQ ID NO: 175003 - DNA, 439 bp, Glycine max
  unsure (1)..(439): unsure at all n locations
agcttcanataagggtacgaaagtgccttatcctatggtaccttccaagaaaaataaggaccaccatctggcgagattcctagacattttcaggaaattggaaataactatgccctttggagaagctttgcagtagatgccactctactcaaagtttttgaaagatatgttgacaaggaagcacaaatacattcaccaagagaatatcgttgtggaaggcaactgcagtgctatgatacagaagatccttccaccataacacaaggactctggaagtgtgactattccttgttcaataggtgaagtcatagtgggaaaggctctcattgacttgggagccagtatcaacttaatgccactctccatgcgtagaaggttgagagagttggaaatcatgcccaccanaatgactttacatcttgctcatcgatccatcaca

SEQ ID NO: 175004 - DNA, 418 bp, Glycine max
  unsure (1)..(418): unsure at all n locations
agccaatgtgagagcttgagatgtttttgttagtgattgngagatcctaaaggtgaatgagacatcctcaccacttgtatttttgcaatctttcatcttgttcttctctttgttgtaaaggaggcttcctggttatggaaagctaaatcctctgttggatcttccctgtacgtacctgatgtaaatacatttctatctatttaatgatgttttgcgtgtcctctgtgctatctgcttttcactccagtatgcctttaccttgatcacatagatgcatgcttcgttagggtcattcaatagtggaaactggtttgagtctaaagtccttgatagtacacggcttacttgtcgtactatcatgaggaatcggggtgcgataatttagttgtgtatgtgtgtcttaatgcggccctggttg

SEQ ID NO: 175005 - DNA, 432 bp, Glycine max
  unsure (1)..(432): unsure at all n locations
agcttatctaaatccactctgtggtgatatgattggaaacaatnntctcatagtttccctctatgttaatgatcttttagtgaccggagataatataaggctggttgaggaattcaaacaagaaatgatgcacgcttttgaaatgacagatcttggtcttatgacatactttcttggaattgagattaaacaaagtgagaatgatgtgttcatttgccaaaaaaatatgcaaaggaaatattgaagaaatttcagatggaggagtgtaaaatagttagcacaccaatgaatcgaaaagagaagttgaacaagcaagatggtgctgataaagttgatgaatgatattataggagcttgattagatgtctaatgtatttcactacaacaaggccagacattctattcgttgtaagtcttctctctcgaattatg

SEQ ID NO: 175006 - DNA, 364 bp, Glycine max
  unsure (1)..(364): unsure at all n locations
tctctaaacccagctggttcattgaccataagaatgtgaatgggaatgaacctgtatattacacacagaaagaagtctggcctttctaattgatttgaaactgaacattgatgaggcaattcagatgatacagaaggaaggtttacatctatgaagcattgacaaggacaatgtctataagcccctatataacacaaagtgactactgaccacagatttcagaatatatggacacaatgtataaacatatatattaaataaataataataatacttattacttatagaatgtgtatgttttatgtcaaaagcatcactcgcacaaaaatattnagacatattcgcagcattaaacatttaaaat

SEQ ID NO: 175007 - DNA, 441 bp, Glycine max
agctttagcttattattcattacactttgtatgaattctatcgaggactataatcaagttatgagcagctaatcttctcatctgttggggttagaagaattgacctaatttcatgtaattctcccttttaaatacaattgtttatgtgtttattcttcttcttcaattcttaatgcatgttctagattgatcacctattgtttgaccataggaatcttagtttagttgaaaaacactcttttgatttctgaattgagaagagtacctaatcgagattgtcgctacacataggtcaataccaattaggctccgttaattcttaatcgctaatgttgattatttagataaaattttcaaaacattgggaattaatttaaataatttaggttctttcacctaagacattagggttagaatataggataaatagtcattctcatt

SEQ ID NO: 175008 - DNA, 455 bp, Glycine max
tcaccctcttcaagcatttagctgtcaaggaaacattatatattaatagacatgtatttaaactaatggaacaagaattgaaatacaaagtagaaaccatatacaagtaaaataaaaaataaaaacaatagggagaagtacagagtaatttcaaagaggaacactaaaaattttcttattcttttcacagtcaaatcaaactcaacaagactacaaaagaaagtttaagaagacaaaatgttaaaatgttaagatcttctaaatttcaaccttatgtccattattaagaatgcatcctttccagaacaactttccagtttccacatcaccttatctcatattctcatcctcccttgaacttatattattatcaagcacaccagtttctgtataatacaggatgccagaaatatctccaggtgataagataattaaaaataagaattaggtatggg

SEQ ID NO: 175009 - DNA, 430 bp, Glycine max
  unsure (1)..(430): unsure at all n locations
anngctgaataaaactcataataatgatctattttcatgcaaatcaagcatacacattttttttattctattgttgttctagacgtgtattttgacgttcatctttatcaccttttcttgctcatttatttttcgtttttgttcattatttttccattgttttcatttagatgtctattttacccagttaaaatttcagctcaaaacttgaagtattcaagccatagcagagttaagaagacaatgtgcctgaactgacaacaaccaaaatttcaacctagaaatcaagagtagtgtttatgttgcttaaggcttggatagttacaatttgtatttgcttatgctcaattgtctcggataacacaattcagaagagcttaagacttantttgattcacaaatccatccataactcagcaccctaactcaa

SEQ ID NO: 175010 - DNA, 451 bp, Glycine max
cgcatgtacgtagactcatttagttgtggcttttctaatttctcactaactcattgggatgttgttttgtttttaaaggagcaacatgcttagttacccaaaacagtgagcaatacgtcttatatagaactctacccatcatggagttcaaaacatggagatatatgtgagaaccataaaatcctcacatgatctcattctgaatgttaacattgatatgggtttgaatataggttgaaaaatggaccacatacgatataacaaacttcaaaaaaccatttccactcacttgaatgaaaaacataaatattggttcctaaaatgttagaaactgccaacattttcccacttggtccatttatctcattatcaattataacaagaaatcaaatatatgaatcatggtgataggtcctctaatggtaagtattatctcccatgggccataata

SEQ ID NO: 175011 - DNA, 451 bp, Glycine max
agctttaatggatgaagtggaggatgatgctatttttgtaatattttaagatgcaatcttcgcatcaagaagaagacacataacaagtgtttgtaagacttgaagaacaaagccatgaacatgtaaaccacattaaaggctagaaaataaagtagattaacaaaggaaacaaaaatccaacgaatattgctgatggtttacaaaagttccatattaaatgtaatcattaatgaactatttatatactttatacacgatgcaaagctaaactgacccggcactttcaattaagtgtaattaagaaggtgataaatgtcatgtgtatattatcattgagtgatccatataacattcctaaattatcgttcacctttgctcacaatcattgtatgtgacccaacactttctacagtattgacatttcattaataaattcaaacaaaattatact

SEQ ID NO: 175012 - DNA, 433 bp, Glycine max
  unsure (1)..(433): unsure at all n locations
tcatgtttataggataaattattgtcttttgttattcactgacctaaagccataatttaaaaatgaatattcaccaaactgttaacaagcattgctcaaacttaatgttatatttctgattctgatttctcactagtgaatntgaggatcagcagtagtgatgaattccacagaagaagagtgtcgtggctgcgagattatggagaaagatgctcatgtcaggtttctcgagttaatgtactatatgctcccatctccgtacgagtcccaagagatcaaccatctcaccctcgcttactttgtcatctctggacttgacattctcaactcactccacaaagtacacacgatcatcctattcctagttnttgctttacctatngccattactattgtaccatgttccttattcatctgtaatctcatgnttttc

SEQ ID NO: 175013 - DNA, 426 bp, Glycine max
  unsure (1)..(426): unsure at all n locations
agcttgcttctacacttaggaaacgtatcttcttacaggnatgaaaatggtcaattatttctattaacgatgatggattgatggaattttattgttgtatgtgtttattgttatttgcgtatgtgaaatgtaaggttgaatatgctcactgggctttaaaaagagtgttacagaatagccttggagacttatgtagtgtctaggatgccatgaacaacatgatgacgctacagcacacggaagttaaagcatcctttgaaacaagtacacatgtggttggacatgtctttaaaaaaaccttatacaagaggcttcttggaatggtttcaaggtatgctttaaattagattgctgctgaatatgagcgtgtacattatgcaggccagaatccttccacttgtgattatgtcatgagaaccacacatg

SEQ ID NO: 175014 - DNA, 446 bp, Glycine max
  unsure (1)..(446): unsure at all n locations
tccanaaatcaaatntacatatgggacaccttcaatgtttatgaaagaatntaacactntcactgctaataaaagaatgaatcataacagtaataaggcaaagatcaaaggtacaattattgttatatgaaggctatcacccattttttatgttttttaattagaatgatatgaagtggtgatgtttggtatgactctgtgaagatggtcttcaacttgatattcttgcttatctttaatttcaagaaagaaaggttcttgctcaaataagctgggttgaaaagcttgaaagcatggttgcaaatcttaaagcaaacttatgtcctgtacatgaaacttgggaaatgaagattgctgatggtgaacatcagattggtatatcaattaatactattaaattagctgctaaagatgaagacctactgtctcaagatgatgagattgat

SEQ ID NO: 175015 - DNA, 437 bp, Glycine max
agcttgttcgcacatcgttcgcttgtatgacatccactccacaaggtttgaagtagaggagaccttcaatcctattacgcaacgtggcggacaaaagtgggcagttaacttgaacggtcattattgtcaatgcggaaggtattctgtgcttcactatccatgttcacatattattgcagcttgtggttatgtgagcctgaactactaccaatatatagatgttgtttatacaaatgagcacatcttaaaagcttactccgcacaatggtggcctcttggaaatgaagcggctattcctccttctaatgatgcatggacacttatccctgacccaaccacaattcgtgcgaaaggtcagccaaaatcaacaaggataaagaatgatatggattgggtcgaaccgtctgagcaccgaataatatgcagaatatgtggag

SEQ ID NO: 175016 - DNA, 431 bp, Glycine max
  unsure (1)..(431): unsure at all n locations
taaaaaacaagaaatgaattgaaagtctcggattctaatacttacccgttgaagaacgaagaacagatgaagaacgatgaagaacggacgaaaaccttcacggatttgcttacggaaacatctcggaagcgttacggaagcacctcggcttggattttcttcacggaaacaatttttttcacccaaaacagctgaaatacatagccagggggctgagggatccttagaacagcccccttcagcctttttataggaaaaagggggaggaggttgctgccatcaacccagcttcaaaaaacgttctggaaggcccaattcaaaatttcgaaattgctatttgcacccccccaattntgataagtncaccctcctcttatcagtaattacgacaaagatacggaagccttacggacgcatttggacttgatttt

SEQ ID NO: 175017 - DNA, 419 bp, Glycine max
  unsure (1)..(419): unsure at all n locations
agctntngcaactcacaaactctagattttgtttcttaaagctttcaaaggttagagtgagttgttaacatctnttggatcaagagagatccattcaatcaagctttcattcttggatttggatgtaaaggttgtatctctccttgattttgttttcatatgttttaatatattgttgcagcatatgcatgagtctttacaacatgcaataataagggtttctcttaggcttatatttgcaaaggagcctaagagaataaaggtcattcctgagtggctcactccaccaagtataagggtataagggaaatttatagtttccatgatttaacaaacttttacaaaaggtttgtcccatatttttctatacttgtagcaccactcattgagttggtgagcaaccatgttccctcatggga

SEQ ID NO: 175018 - DNA, 443 bp, Glycine max
tagctacacacacctctctaatagctaagttcacctccttgagatgagaagctagagcttagctacacacccccttataatagctaagctcacccccatgacaaaatacatgaaaatacaaaaaaagtccctactacaaagactactcaaaatgcctcgaaatacaaggctaaaaccctatactactagaatggccaaaatacaaggcctaaacgaaggaaaaaaaatctattctaatatttacaaagataagcgggctcatacttagcccatgggctcaaaatctatcctaaggctcatgagaaccctagggccttcccttggatctctagcccaatctacttggagtcttctatccaatgcccttgcggggtaggattgcatcaggatcgacccaagcgcaagagtattcctccagcatacttgaaggattacacacacta

SEQ ID NO: 175019 - DNA, 440 bp, Glycine max
  unsure (1)..(440): unsure at all n locations
agctngagatgaggaagtgttgaagggtgaaacttcctgcttttattgttgaccacagagtggtacctggagatatgtcgcgggggtcaggagaccttggggacgtcaggtggggtgctattgcccaaaaccaagcttgaccaatcccgacccaacccgggcatagtcggtcagtgagaacctgtgatgtacctaagcaggcgagctcctggcagtcaacagataaaaggaacaaagaccacaaagcaaggaggcttgtggtggctggccagctctgaattttgtgtgatatgtggattatggcctctggtaatcgattaccaagggtgggtaatcaattacaaggcttaaaaatgaagacaggagactaagatggtctctggtaatcgattaccaaggggtgtaatcgattaccaggctttgaaacgaagtcatgaaac

SEQ ID NO: 175020 - DNA, 459 bp, Glycine max
taagctccttcaactgcacaaggctcttaatattagaagagtattcttgtggaaccttcacccgacgaagacactggcaaaaacttatcttctccttcttggacaaagtgtggcaggctgggggcaagtaaattttcttcccatcagaccttggatgcaactgtgctcttatacccatatcagctagatcttgacgggtattcaagccatcattcgtcttgccttgaatgttaaggagcgtcccaatcacactgtcacaaacatttttctccacatgcataacatcaatacaatgtctaacgtcaagatcacaccagtacggaagatcaaagaaaatggacctcttcttccatatgcaactctgacttttatccttcttttgggtcttcccaaatacagtgttcaggtgttgaacccgctgatatacctgctcaccagtgaacattatcggcgcaatat

SEQ ID NO: 175021 - DNA, 436 bp, Glycine max
  unsure (1)..(436): unsure at all n locations
agctntaaacaataacgtgcagttttatagtctttcaatcttaagctctntaaacgtaccataccatgtatatcctgtatgatgtaactcggttgctagactctttcagtttgtacagtacttccatgatcagaaaagagggaaaaagaaaagctactatatagccgtattctcattattggtctataaaaaaaaggtgaaagcttgattcaatgaaattaaatctatcatgagcccaactttcgagtggcatcatgatttcataccaagatgacgtcgtgcaattgaggagcatgcatagagcttaagatgatgtcttatcacaaatcacaactttcgagttgcatttatgatagcagcgaacaacaagtgggagtgaaagtggtggaatatgaaaacatcttactagtatttaattaggatacaaagacaaaat

SEQ ID NO: 175022 - DNA, 455 bp, Glycine max
tctcactttgtttttgattgcccaaaaacacaacccttatggtgggaatccctatcctggactaaaaccatgggagctttttctgcaaacccaaggcaacacttcatgcagcaactaattggcataaatggagggaagcagtactctagatggaagtgctggtgggtggcccttacctggtctatttggcagcacagaaatcggactgttttcctaaatgagccattcaatggaagcaagctgttggaggatgcagtgttcttagtatggccatggcttatagagttggagaaagattttgtagagccctataattactggtctagtaatctaccagtagccttttgtatctaggacaacaacgaaggattttacactaataataaattaagtctgcaacttggatcctaacacaattggatccagtagcctaccaagaattaacactgtatctt

SEQ ID NO: 175023 - DNA, 447 bp, Glycine max
acactcaaactagtagtccatcccgtcacagcactggaggtgaggtcatgtcacggtgtgtttccaatgcccctttcactcacaaaaacaacattctacgcatcagcaatggtgttcgccaacccgaataacgaacttaagcggatcatgaaacaaaaactgctgctcctaaaatcaccaaccactcaaatgcagacatttcagttcaatcatgaacgaaatagcctccacatcacttgattttcatggggactgacttttgtgacttgcggcgcatatgttttgtcacttataatattgctacacggtatctcttactgctatataatgaaaggcattgatgtaatttgtgaggatgattcctcagactatgtcctgtatctaaatttaaactaaatgctttcaccacgactaatagcatttggggtcttatcataccgttttatc

SEQ ID NO: 175024 - DNA, 438 bp, Glycine max
  unsure (1)..(438): unsure at all n locations
agcttatggatcaacaaatctaagagcttctactagagcacactttanagcacgtattgatggttttacttcagcccttgagtggaaaacttcctcatttcttcttgtccccaccatcatgttgagtcattcaacaacattcacctatgatgaggataatcaaaatctcacccctatagaaaaagctgcgatcaattgtaatcaacatctcacctgtcattaggataatcaatcaatatgttggttgactttatttgacactgtcaaccaattaaaagtcaccctaaataatacttgttttataattattatagaagtcaacaatttccatttaaactgaaaagctattcataaaagatgttatgttctctaaatagcactcttccattagaaggacacttccatntaagtatccctttcttggcttatagctccatg

SEQ ID NO: 175025 - DNA, 448 bp, Glycine max
  unsure (1)..(448): unsure at all n locations
ctttatactttntctatgattganaagagagaaagagaatctcaattgttcatttactcaaacgatttttccattaatgattctcctgtataggaaaagtgacaccctaataagagttcaggctgattgtggtgatactctatcattacaaatttgacaatttaaagtagctacaagcctacaactgtttcaatggcttctgctctattaagctgctgtcaaaaggatcttcctgcaacaaaactgctataaattgcatttgcaaacaattcgagatattaaaagtactgagtcacagaactttgataggtgtgcataaccaataattccatataagctctactattgaatgagttagaggagctataagactaatttgatgacggaaaagggagagggagacatgtgagtntgaatcttnttcattaaanaaaattaataaattaac

SEQ ID NO: 175026 - DNA, 413 bp, Glycine max
  unsure (1)..(413): unsure at all n locations
agctnttcaggaactgtgaccggactataatcccttggtaagtgcttgccgntaggtgccatagttatcttgacgatcgagtatctcaggtgtctggtggatgattgaagatgacacaaagttacttttcttgacggaacgtggttgagcctcaatcttgtgttatatttcatttaaaaaataaaataaaactaatttttaaaattatgttttttattaaaaaacataaaaatcaacattttattttagatacattattataattacataaaaaagatacatcattataataagttgcagacatcacaattttaatattttttgcttttcagaaaacggagtaaagcacctagtggcagtgtgtgctgtgttctgggagtggcttttgagagaaaaaaaaaaaaatagcccta

SEQ ID NO: 175027 - DNA, 435 bp, Glycine max
tatcattgggaacctgctccccttcatcaatgtccatcttcagcgtcccgttatgtccaagaggaaggaactcaaagtaacccatgttatgcaagagcgtaaaagcaacatcaccaggatcacaaagaggcttcagattaaccccaaagtagcactcagaagaagcatacatggtacaaaccaaaggcaatttcccatcactgtagtgcttaagagcaggaacatactgagccatggagccagtaaccacagcctcaatgaactttgccttaggccaaagctggcacagaattcccttccaagacttctggctacagattctcgtgatttcatcagcgagacgagggtcaggggatgaaagcaatgtggacatgcatgaacggcatgaagggtctgttatgaaagaactgagttggccagttcgaatgtcctcac

SEQ ID NO: 175028 - DNA, 448 bp, Glycine max
gatcttaagcacctgcggctgcagctaaatacctggccatgccatctattttcagatgaaccatctccctgtgacagaggtttgtagtcagcttttgttgtacaaattttgagaacacaagtagaagcataagtacatacagggtagaaggagcaaattttaaaacaaattctttttactcatatcaaaaggaaccacaatacacagtattagaattcattccaggcctcactcacttccaaataactcaagggcagagggttctgtgtcatataagaagtattatggccatattcctagcgaatgtggggcatcttaaccgtaaggaatccatcatagagatgcaaatattatttaaaagatctatgaaaaacccaagacatcaaatcagaatctgcagcttagtgaattaaaagaaagaaccagatgaacccaaaaggcttatgct

SEQ ID NO: 175029 - DNA, 413 bp, Glycine max
  unsure (1)..(413): unsure at all n locations
ntnanaggcatngatgtcctttaatgcttgcagatgtctcatgcagaaaggattctttacattggtattccaaatactccactgaatgaacattagcctgctgacactgcttaccagtgttattaatggtggatggcggaacatggaagaaggccaaaattctgccatgcctggccccccttcacaaattgcctatggcggtaggcaaaaaatctgccatgccattcctccatggctgttatttaacaacattgttgcttactggatttcatttttggtattttgaactgcatgtgatcagttggacttatccatttctagaattcaaattcaagttgaaaaataactttttgcccaattcaagccccaccaattctttaataagtttttatttttttttggggggggggggg

SEQ ID NO: 175030 - DNA, 430 bp, Glycine max
agcttatgctgcaaatatatacaatatacctcctcaacctcagcagcaaaatcaaccacagcagaacaattatgacctttccagcaacagatacaaccctggatggaggaatcaccctaacctcagatggtccagccctcagcaacaacaacagcagcctgctccttccttccaaaatgctgctggcccaagcagaccatacattcctccaccaatccaacaacagcaacaaccccagaaacagccaacagttgaggcccctccacaaccttccctcgaagaacttgtgaggcaaatgactatgcagaacatgcaatttcagcaagagaccagagcctccatttagagcttaaccaatcagatgggacaattggctacccaattgaatcaacaacagtcccagaattctgacaagctgccttctcaagct

SEQ ID NO: 175031 - DNA, 442 bp, Glycine max
tatccaaagtggcattcgttgtaccaccaaattcctaattcatccacctttaaagtcctactgaattagtacaaagtaacttctagcaatttggtgagtaattcaacactgtatataataagtacctttgtctgtaaaaattttaaaaacatatacatatctaacatgaacttaatcttaatttcaggatgcactgagttctatgtactcatttatgaaagatgcaaaattcaccaatgttaatttggaagggactacaaaggcaacattgttgacaataattggaggaagtatgcaaattcacaaaatttggaagttggccaggaaattatatttgagttcccagatccaaaatttaactttgttctattctaaatttgtttggaatttaactacattatactctacccatctctatacactatggttataactctttctg

SEQ ID NO: 175032 - DNA, 445 bp, Glycine max
ctgcagcttaattaagattgagtgtattgagttatagcttgcttctaaccaataaccacttttggtcctaaaattctaacgtttacgtagagtgcaggttgttgcaattctgcgtaatcaagttatcttcatcaaccattaatcggagcacctcatcttccccttttccttttattcttatcctagctaggaatgggattagaatttcggacttctctggttttacaatgtccttttgctactcggatttgaaatgcaaaatccttgatcattcctttgctactcagtaggtcacaaattaagttgattacaactcatacaaaccttgttgactctcaaacatttgtttcagccttcatatctccccctattgtgtattgggaacataaaagcacgtggaacaacaacttatgtttgattagtgattaattacatgaaatttact

SEQ ID NO: 175033 - DNA, 465 bp, Glycine max
tacggacctatgaaactcagcttaattggagtcttgtcttttacagacttagttggacatctgttgagtatgtaaacagcagtgtagactgcttcagcccagaatgtgttacgtaatcccttctccttgagcattgatctagccatttccataactgtgcgattctttctctcgaacactccattttgttgaggagaatatgcgactgtaagttgtcgctcaatgccttcatcctcacaaaatctttcaaactcgcgagaggtgtactctttgccgtgatcacttcttagtacttttatccattttccactttgattttcagcaagggccttgaactttttgaatactccaaagacttctaatttttcttttagaaaatatatccatgtcattctagagaagtcatcaatgaagagtatgaagtacttgttgttctcatgtgatggcgttctcattggtccacag

SEQ ID NO: 175034 - DNA, 438 bp, Glycine max
agcttaagctccttcaactgcacaaggctcttaatatttgaaaagtatccttgtggaaccttcacccaacgaagacactaacaaaaacttatcttctccttcttggacaaagtatggcaggctgggggcaagaatattttcttcccatcagaccttggatgcaactgtgatcgtatacccatatcagctagatcttggcgggtattcaagccatcattcgtcatgacttgaatgttaagaagcgtcccaatcacactgtcacaaacatttttctccacatgcataacatcaatacaatgtctaacgtcaagatcacaccagtacgaaagatcaaagaaaatggacctcttctaccatatgcaactctgacttttatccttcttttgggtcttctcaaatacagtattcaggtgttcaacccactgatatacctgctca

SEQ ID NO: 175035 - DNA, 423 bp, Glycine max
tcaggctgttcaattgcttcagattggtgcacagaatggctaagggttgtgtggtggttggcagaagagcataaaccacagagtctggcgacaggtgcagattttttattcatggccagttgggtcaccaggttaaccaaggcatctagtttaccttcaagcttcttagtctcagctgatgaagatgaattcgtggctacttcatgcactcctttaatgacaatagcatcatttctggcactaaattgttgggagtttgaagccatcttctgaattaaatttttggcttcagcaggagtcatgtctgcaagggcttcgccactggcagcatctatcatacttctctccatgttaccgagtccttcataaaaatattggagaagaagctactcacaaatctggtggtcaagacaactggcacat

SEQ ID NO: 175036 - DNA, 438 bp, Glycine max
  unsure (1)..(438): unsure at all n locations
agctggtagatctcttgtggctttattaacacaagagntgggcttagatccaatgtttctaggttgtgcagctcaccaattaattttggaagatagaatatgcgtgaccttctgaagcttaagtacctcaaaaatgataagtcccccaaactttcaatgcgcggaacataataatacattggagcacattcaaattgaagtacccttaataacctgtactttgtaggcatactcttcaccaaggattctgacaattcttcatcactgaaaacatgaagtgatcgaatgttcgagctttcaacacctcccgtcaaattgttggaaccagatgctattgttaggtgacgaatcatcccactttnggccaagttcccacgctcactagcagaatgacaaaagcttanatctggattcttcttacggatcatttcacgtact

SEQ ID NO: 175037 - DNA, 443 bp, Glycine max
  unsure (1)..(443): unsure at all n locations
tgtggcaccttcatctntggttgcacttgctgctttgacttctgcaaactcgtttcacctcctgccatagcctttacattgctgcagaaagttctattccttttgcttgtcaatggtagcaatttgacattggaaaatttgttcattctactagatgaagtgcgggcatggaaacctacatttggtagagctgatgccattttttttgttagacaaagatgttggaaggatgtcaatgctatgataaggcaaaggacattgagaagctgatgtttgcattaaaatttataggaggcattggacatttctggacccaggtaagcattaaaaaaatcttatcttttatgattgtgacttgggttcttggtgagatctagagttttccatataattctttagtggcctatcctatntccatatntgcatggngatctggaaacata

SEQ ID NO: 175038 - DNA, 428 bp, Glycine max
agcttgaaggcaaactggatgcattggttatctttgtaacccagctggccttgaatcagaaatctgtacctgtcgcaagggtttgtggtttgtgctcctctgctgaccaccatacagacctttgcccttccatgcagcaacctggagcaattgagcagcctgaagcttatgctgcaaatatttacaatagacctcctcaacctcagcagcaaaatcaaccacagcagaacaattatgacctttccagcaacagatacaaccctggatggaggaatcaccctaacctcagatggtccagccctcagcaacaacagcagcctgctcctttcttacaaaatgctgctggcccaagcagaccatacattcctccaccaatccaacaacagcaacaaccccagaaacaaccaacagttgaggcccctccacaa

SEQ ID NO: 175039 - DNA, 456 bp, Glycine max
  unsure (1)..(456): unsure at all n locations
tgtgcattcaatatcctgatgagggtattccatatgttctcaagactggactaatacatttgctgcctaagtttcatggtattgcaggtgaagatcctcttaagcatcttaaggagttccatattgtttgttccaccatgaatccccttgatgtccaagaagatcatatctttctaaaggcttttactcattctctggagggagtggcaaaagattggctacactaccttgctctcaggtctattttcagctgggatgaccttaagagggtgttcttggagaaattcttctctgcatctaggaccactgccatcagaaaagacatttcaggcatcangcaacttagtggagaaagcctgtatgagtattgggaaatattcaagagattatgtgcaagctgtcctcaccaccagatntctaagcaactccttcttcaatatttctgtgagggactta

SEQ ID NO: 175040 - DNA, 423 bp, Glycine max
  unsure (1)..(423): unsure at all n locations
agcttgcctcanagagatccaagagagacttggctgngttggaaccagttccgctcccgaatatgacagccatcgttttaggagcgctgagcaccagcagcgcttcgaggccatcaaaggatggtcattccttcgggagagacgtgtccaactcagggacgatgagtatactgacttccaggaagagatagttcgccggtggtgggcatcgctggttacccccatggccaaattcgacccagacgtagtcctcgagttttatgccaatgcttggcctacagaggagggtgtgcgagatattcgttcttgggtgaggggtcagtggatccctttcgatgcggacgccctcagccagttcttgggataccctttaatgctggaggagggccatgagtgctagtattgccaaagaatgaaccagga

SEQ ID NO: 175041 - DNA, 457 bp, Glycine max
cttgagccaattcaaacgacaataacgttttacgcggatgtttgattattttccgtaatatatcgagaccctcgaaattgaatgttgaatctctgagccaattcaaacgacaataactttttactcagatgtctgattgagtcccgtaatatatcgagacactctaaattgaatgttgaatctctgaccaaattcaaacgacaataactttttactcggatgtctgattgagtctcgtaatatatcgagacgctcgaaattgaatgttgaacctctgagccaattcaaacgacaataacgttttactcggatgtctgattgagtcccgtaatatatcgagaccctctaaattgaatgttgaatccctgagccaattcaaacgacaataactttctactcggatgtctgattgagttcctgtatatattgagacgctcgaaattaatgttgacctttg

SEQ ID NO: 175042 - DNA, 451 bp, Glycine max
agcttaacttaaagacctcaactcaattcctattacctaacttgtaaagagagaattgtctaaactttgtaaagaatacatcaattatttctctagttgaagagggactaaacagtaaacacttctctacctagtacattgaaaatgctggaggctacaataagaaaaatgttacatgagcatccaatatgttatttgacaccagagacacggagaaaaaagagacaaaaataagaggtgttgaaggggtgttaaaataagagatatgataggatttttgatgtgatagaaagagagataaacaaaaataagaagtgttgaaggggtgtttaaaataaggaggtgtttgtgtatgatcactccacaatgaaggtagcccaaagacacaacaatcatttaggcgacttttccaacatacttttcatttgatgtgtgtgcttacatttcaatt

SEQ ID NO: 175043 - DNA, 449 bp, Glycine max
  unsure (1)..(449): unsure at all n locations
tttctnttcttcgccccccnctntgaactgggtgccacaactcctctggctttgtttgaagnnggacgcgaaaatcaaacaaaatctacatggtttctcgattctccactttgatatatactatattcttttctttctttctttctttcttttcttttggtaagatttgtttgctttcgccttgttctttttctctcggactgtaatgtttctccttttactcttattaaaagtagagaaaattaaagtagaaaaatactcggggtcccctacgtagctctagaaggcaataataagatcatgatttcttgtaagaagcaccacccaatcacataacgttacgcgattagactcatgcaaaagtagcatctacgttctatggtaaacgtgtcatgcacggacgttgttatttttctttgtgataacacagcacggacgcgtaagtcatg

SEQ ID NO: 175044 - DNA, 453 bp, Glycine max
  unsure (1)..(453): unsure at all n locations
agctngagatgagaaagtgttgaagggtgttactttctgcttttattgttgaccacagagtggtacctggagatatgtcgcgggggtcaggagaccttggggacgtcaggtggggtgctattgcccaaaaccaagcttgaccaatcccgacccaacccgggcatagtcggtcagtgagaacctgtgatgtacctaaacaggcgagctcctggcagtcaacagataaaaggaacaaagaccacaaagcaaaggcttgtggtggctggccagctgtgaaacttgattgatatgtgagatatagtctctggtaatcgattaccaagggtgggtaatcgattacaaggcttaaaaatgaagacaggaagctaagatggtctctggtaatcgattaccacggngtgtaatcgattactaggcttgaaaaacgaagtcaggaaactaagggagcctttt

SEQ ID NO: 175045 - DNA, 443 bp, Glycine max
taatgtcatagctctcatggaggtcaaggtcgaccctgtgcatagcttaacgtcgcaactaaatcttatttatagttgtgtagtattgttttatattattttattatttttataaatgagttgaaattattttctcattttatgtctatttattcaaattaaaatttgaactgcaagaagaaagtataaaagatttagttttttttcctaatatgttataagtataaattcatgttaaatgaatttttaagtgtaaaatattaacatagtaaatttaacttttagatactcacatatcttctatgaaagcaacaattgtgctggtaaaattgtctcttttgttctttctctatagggttttcactggtggagtgtcctcccttctttcattagataggacctctttcgtaatagatgcggtttgcctgtctacagttttagat

SEQ ID NO: 175046 - DNA, 451 bp, Glycine max
  unsure (1)..(451): unsure at all n locations
agctngcttgtggagcttctatggaggctggatctttgagcttcaatgaggtcctttaatggtgattttccaccatggagatgcagcggaagacaatggagaagaggtgagaggaggcgccatccactagggaataagccatggaagaaggagcttcaccaccaagatgagccttggataagaagcttggaaggaggcttcaatggaggaaaagaaagagggggagaaagagagaggggggagcacgaaattgaaggaataaaagagggagagaagtggaactttgaagtatgtctcacaagactctcattcatcaaagttacaacaagtgttacacatgcttctatttatagactaggtagcttcattgagaagctttcttgagaaaacttccttgagaagctactttgagaaaacttccttgagaagctagagcttatctacacacacc

SEQ ID NO: 175047 - DNA, 447 bp, Glycine max
  unsure (1)..(447): unsure at all n locations
ngatgatgatgaatcaagttgattcaagtaattntgatgatgacaaaaaccgaagagtgatttcaagattcagtcaacaagttcaagatcaagataaatttcaagtttcatgagaagaaatcaaaaagattaaagaatcaagagaagtttgatttcaagattcaagagaagaaatcaataagacttcacaagggaagtattgaaaagatttttcaaaaaacaaacatagcacatttttgtttttcaaaagagtttttctcaaaattttctaagtgaccaaagtttttactctctggtaattgattaccagtttcctataatcgattaccagtggcaaagtttgatttcaaaagcttttaattggaattgcaatgttccaattgatttcaaaatggtgtaatcgattacaagatattggtaatcgattactagtgtatctgaacgttg

SEQ ID NO: 175048 - DNA, 435 bp, Glycine max
  unsure (1)..(435): unsure at all n locations
agcttgctgcaaccagatgtactactattatanttgtgcaaccggatttacttaaacaaataaataaattatgattcattaatattataaacatgatagaaaaaataaatatgaaaatggtaaaacaaataataatgtaactgaaagtaataccttaagaagttccaacactaataatctcaacacttgtcattccaacactttgagtccctgtatttaaaatcaaaccaaataactctaaatttttttgttgattttgattaattcggttcagtttgattttaatcggatctataaatttaaacccgtgacccgatccgtgcatgaacgattttgatcgattcgattttgacccagatacataaatgaattaacccaaactgtttagatgatttgggtcaatttgagtttgcgggtgacccgtaccgtaaacac

SEQ ID NO: 175049 - DNA, 451 bp, Glycine max
  unsure (1)..(451): unsure at all n locations
tgaggganaactngatgccttggtcaacctatttatttttctcgccatgaatcagaaatctacacctgttgcaagagtctgtggtctatgttcttctgcagatcaccatacaaatctgtccttctttgcaaaaatctagagttaatgagcaaccagaagcttatgctgcaaacttttataatagaccccctcagcaacaaaaccaacaacaacagaataattatgacctttcaagcaacagatacaatccaggttggaggaataatccaaatctgagatgggcaagtcctctacaacaacaatagcatgtccctcttttccagaatgattctggtccaagcaagccatatgttcctcgtccaatgcagcaacaacaaagacaactagcagctgaggccccttctcaacctttcttagaagagttagtaaggcaaatgaccatccagatggg

SEQ ID NO: 175050 - DNA, 436 bp, Glycine max
  unsure (1)..(436): unsure at all n locations
agcttggttcgaggtacttacccgttgtttatcttagaacgatgaagaacgaatgaagaacgtcgaagaacggttgaaatctttgcgagattcctcacggaaaacgttacggaaacgtttcggaagcgcctcggcttagattttcttcacggaaacaatttttccaagcaaattcgaaagagagagaagtgcctaaggggctggaccccttccttcttcatttcctcccctatttatagcaaaataggggaggtggttgccgcccagctcgcccaggcgagctcagctcgcccaggcgagcagggttgcttcctccagaagcaaccgccttctggaggaatcttctggagggcccaaatgggcctgggtgctatntgcacccacatttttactaagtacacccccctctgctgttcttggtgattctttttcgtaa

SEQ ID NO: 175051 - DNA, 450 bp, Glycine max
tgcttcaccctcttaatcttggaccttgtcatatgacctcttatcccatgtaaaggatcattagacagattggttgcacctctatcaaactaactccctaactaactaatttccactaatacatacagttactacttagaaggaagtgatgagccttgattaggcccatctaatctacctaattaaactaattacacaaagcaaagttcaaatttgcagcccaattattcaagtgcagaggttttgactttcaagtccaatttgactcttgaaatagtagaattggcctaagcttatttgtgacaaaattgaatttctttttcttatctttgtagggactactcacaaaatccatttagatttctttagtgtcctataggccatgcacaaggtagataagtcaaggaaacacaaaaatccaaaaataagccacaattgtcaattaagctc

SEQ ID NO: 175052 - DNA, 433 bp, Glycine max
  unsure (1)..(433): unsure at all n locations
agcttatgttcatgttaaacctatgcatgngttactttcactgacattgnaatgtggattttctacccatttaatgggggtgcaagggcaaaagtggcatgcaccaacattccactaaggaccaaaggggaacatgtgggggattgggagcatttgacattaagggtaagcaactctaatggagaattatggagggtttatttctcacaacacagtgagggtaaatgggtggatgcatctgagcttgagttccaaaatggtaatagacccgcggcttattcttccttgcatggccatgccttgttcccaaaacctggccttgttatgcaagggatgagagggttaggtgtaaagaatgatgcanctagaagtgatgcagtcatggatatggcaacttggtttgaaatactcgctgctgaatatttggggtcac

SEQ ID NO: 175053 - DNA, 446 bp, Glycine max
  unsure (1)..(446): unsure at all n locations
tatattatctgagaagtaggcagtgatattctctctacatcanttggtgaacagatatgcatattaatacattgaaaaacccatagtaaaacataatatattcatattaatacgcatgtaatgttctctagttacatataacacacctttattttgaaaatctacaaaaacctatgttaagttttctagtagaaacttcctgtcagggaaggcttgtattgcaaagaaaatatttgtgggtagggaattgaagaaccataattccctccagacaaccattttcctcataaagaaaaagatttgaacataacacattggacacggtgtcatggtttgctcaatggattttnttccctataagtgtaattttcatccacatctcttccattacaaatgtcattactaaaaaaaaagttaagacaaacaaattagctaaagtaaaaaat

SEQ ID NO: 175054 - DNA, 450 bp, Glycine max
  unsure (1)..(450): unsure at all n locations
agcttcagcatattgaagatagatggatctttctatcagatttcagaaatgtagttactgaatgaagaatatatggccaacaacttcacagagacacttctgcattctgctgttattattattcagaaattgctttccaggtttttttgaaggactttgatgatatttttaaattgataaaaacaatctcaaacaagtaagaacaaagaaaaacaaaaaaaagtcttgattggtttagagagcataattccatgccatgaagaacagcacaagcaaagggattaattgcaaatgtgagctgacaacagtttattcatatgatattttgagccctaaatggcacgtatatagattgctcccattcttctcactatcatatcagtaacttccttttaaattagtatctcactcnctctccatcctgcactctcccactggatatttctcatc

SEQ ID NO: 175055 - DNA, 442 bp, Glycine max
  unsure (1)..(442): unsure at all n locations
tggctttntgtcttctcttgttagtcaaacttagtcttctttntaatnttgtgttttctgaattgttgttgggttgtttctgaatctgatctcgagattagtgtggggcaaaagtttttctgatatttcccagcatcttcttttttgtattgcaaattaataacttgttctacaaagattgagattttagggggtgaaattagatgctaggtgcatacagttctttaggtacttgtgtggttgttcgccaattagaattgaagttttacctcactaatttgtattgatctataatgcaaacttttactgtatgaaattctaatctgactgaaaaacaggactaaaaacacttgagaaattgtatctttgttttgtctgagaatttattgtctttgtattttacccaatcaaattacgaanagggaacttttgaaagatctca

SEQ ID NO: 175056 - DNA, 353 bp, Glycine max
caccgcagcagcagcaggacgaagaaggggagcactatacccaaacaacaaacccgccggcaacaacgcccaaacacgccacacccccaacaaaagccccacaaatccccaaccacaacgcaacagaagacccaaaaccaccaacacagcccaggaaacacgagaccccacaaaaacaggacaccacacacgggggaacaaccagacaaacacaaacgggacacagcaccacaccaaccccacccaaaaacaccacaagacaacaccgaccaccacacaaccaccccctagggaaaccaccagcgcaacaaagccaaagcgaaccacaacccccgggaacaaccaccccacac

SEQ ID NO: 175057 - DNA, 368 bp, Glycine max
aactctgcttaggactataggcgggagagggttgcctttttttttgtgcccgaacctcctagaacggcagttatctcagacatatactacttaaacacaactgttattattcaacgaatccgctcatacgagctaatggtctttgactaccagggaactcttcttatttaccctccttacatattaattataactgtaatggaaatgaccattgttgggcataatgttctaattgtttgttcaagccatgtcatttaactctctattttttccaactcagtaagatacatagtctcttagaaagctactcctttaatctcaccaacagaatatcaagctgtcaagttcaggattcgttctcctcccct

SEQ ID NO: 175058 - DNA, 436 bp, Glycine max
  unsure (1)..(436): unsure at all n locations
agctntngataagatggaggaaatcggtttattatagatccaaggtgattaataactaaacatatatatggtaatatggtgagcaatattactattggcaatctcgaaggaaaggtagttttgactattatattacaagttttctgtgaatttgttcagtatgtaaaagaaactatcttcgtcaatagtactagcaaatgtgtcatgtatttgtatatttttatttttagtattttcttaaaccctaaacattgaaattgtatgctaatatattctttcctatttgatttgattcttagttgcattttcttttttttcataatcattttgataaaataaaaaaaattatttgattaattgtgactgtttcaaaaccgccagaaaacacaaattcaatagagtatatacattttgtggcgtcttggaaacggcaaca

SEQ ID NO: 175059 - DNA, 377 bp, Glycine max
  unsure (1)..(377): unsure at all n locations
nttgcagaggtcatgatgggatggggtcatgangttttgttcactatgattgtagaggagatgtggatatccgtgtaatgtgttggtgaacttgtgatgttttgaccatgtgatgtgtttgtgagctcgtgatgtttggtagaccattatctgatacctttgacaaaagagaccacacaaacatgtaaagaacaaattccaaaaaggggatagttgttaaggagtcagtcctcaaagtttggatgaccacacaaagtggtacctgatggatcattgatctttcgcttcttatgggtgtgatgctgatttgcggttgcactttcacaatgccaacttggaaaccttgacaaatgtgagacgtaaccagttggtgagag

SEQ ID NO: 175060 - DNA, 452 bp, Glycine max
  unsure (1)..(452): unsure at all n locations
cccgggagcctaacagacgcatgcaagcttgcagaggatgccncagtggagggaatttatagagtgatataaccacagaggggggagcacgaaattgaaggaagataaagggacaactttaactttgagttgtgtctcacaagactctcattcatcaaagtcgccacaagtgttacacatgtttctatttataaactaggtagcttccttgaaaagctttcttgagaaaacttccttgagaagctagagcttatctacacacacccttctcataactaagctcacttccttgagaagcttccttatgaagattcctaaagaagctagagcttagctacacatacctctctaatagctaagctcaccttcataagataagaagctagagcttagctacacaccccctataataactaagctcacctccatggcaaaatacatgagaatacaaa

SEQ ID NO: 175061 - DNA, 323 bp, Glycine max
cacttatcattgcttgtgacactccgaaatgaatatatacctatcctctggtctcttaccggaaacacactgaagagaaagtgatacttttgtcctactaacagagctttgccgggattcgtaaacccccggagaccaacttttttcactatgtgatagcccagtaataggtacttcttattcttttttgggggtggggagtggacgtgttcacttgttagaatgtgcggaacgttataattcaatttcttacagattttcaaaccggttgataatgccctttatgatggtgacgtggttggggacatattctctttctcttt

SEQ ID NO: 175062 - DNA, 434 bp, Glycine max
  unsure (1)..(434): unsure at all n locations
agctntgagccaaaancctgactcaccatagtctcttgatttatggtgagaatgtcaatccttaccctcggaagcggaaagaatagaagggaaatttccaatcaaagaaaaggaaagaaggaagatttccaatcaaagagaacgctaaaaaagaaaagatggaaaattccccaatcaaagagtgggagaaagcataatgaaaagaaagaaaattcccaatcaaagaatgggagaaagtaaaaaaggaagaagaagaaggaaagaaagctcctgatcacggatcgaaggaaaacagaagaaatgtgcagaaaggtctttggaccggacaatatctgaacaatacagaattgtcaccaaatgaacaaaaagaaggaaaggaaaccacgacctataatggtcttctccctttgattaccaaccaaaaacccgtgcgc

SEQ ID NO: 175063 - DNA, 422 bp, Glycine max
  unsure (1)..(422): unsure at all n locations
agcttattgtctgcccaaggaattcacttctacttcttattatttcaagggataagttttctggttgttggccttgatttgattggagagcaggttagttaaggttcagattttgaattttaagtgcatacaaatcctctcagatcctcattcataaaggtcagaatggccaaatcttaaacccatccccgaacacattgatttgagcctcattgttgttgccaagtcatatgccttaagttacataaagttgtttcagttcctaatggcaaaacgtatcaacaccttggaaaaaagaaaaaaggggtttaacattcctgacctataatacaatgccattatacaattccttgcctgcctgaattgaaaaggtggagattgttagattatacacattgttattctttnttttttttcactat

SEQ ID NO: 175064 - DNA, 412 bp, Glycine max
  unsure (1)..(412): unsure at all n locations
agcttggccaatgactagcggattttacctttagttgactnccgnaccaccggctcactctccttagatattggccccccgggcatcttcttcgcttgatctctttgatatcgaggaagatttgcaaaaagcttatcccttccaatgaaaatattgtctagcttcatggcgaatcgttccggctcttgaatccggcaaaaacgagcaaaaccgaatcttttacccatcctatttctccttgtcggaatcaccacctcttgcaagtcaccatagctcctgagactgttgaacaagtgcttcgcattcatctcctccgcaaaattggtaatgtaaatcgctgctgatagtagttgctccttactcctttggtccctgaattgataaatatctggtttggtataccagagcctct

SEQ ID NO: 175065 - DNA, 424 bp, Glycine max
  unsure (1)..(424): unsure at all n locations
agctntgtgtaattgattacactgatttggttatcgattaccagngatagtttctgaacaaatcaaaagatgtaactcttcaaatagtttttgactttttcaaattggttttaagtttttctaaaggtcataactcttctaatggttctcttgactagacatgaagagtctataaaagcaaggctttgatttgcatttcaacaatctttccaattcattctttagacaacaaacttttgccaattgatttctgagtctctttgaacttcttcttcttccttttgccaaaagctttccaaagttttctggttttccaaaccttgaaaacttgngctattcattcttttcattctcttctccctttgcaaaaaagaattcgccaacgactaaccgcctgaattcttttcgtgtctctcttatccct

SEQ ID NO: 175066 - DNA, 422 bp, Glycine max
  unsure (1)..(422): unsure at all n locations
agcttgaatatctgtatgtgagtattgcanatctatccaaagcatttcattggctacacactctccaatctcttccttctttgacccacctatatttgtcagaatgcacactccctcactataatgaaccatccttgctcaacttctcatctctgcaaactctcgatctttccggtactagttattcccctgccatttcttttttccctaagtggatattcaaattgaagaaacttgtttctcttcaattagggggtaatgacatccaaggttcgattcctggtggtattcgaaacctcacacttcttcaaaaccttgacttgtctgtaaattcaattgcatcttctataactgattgcttatacggncttcatcgtctcaagttcctggacctagagggcaacaacttgcatgggactatt

SEQ ID NO: 175067 - DNA, 421 bp, Glycine max
  unsure (1)..(421): unsure at all n locations
agctttgtgggtatttctttaagccttgaattttatcttttattgctccatactttggttatgattgtcttggatgtttaccattttgttttgctgtgtgtttggttattttagcctttgtttggctcttgacttaatttgaatagacttgcttgaaattatgttatggattatattgtggtttgtcattttctggatatgtttaagttcttgacttagttcttttctccaaacatttttgacttnttgatgttgccaaagggggagagaacttaagggtagaatttatcatgaacttaggcataaattccaatcttaagggggagtaagggttgtgagcacgcattatcaattgtatatcgattatcttgatttcatattattgtcatcattaaaaaggggagattgtagaagcatatat

SEQ ID NO: 175068 - DNA, 407 bp, Glycine max
  unsure (1)..(407): unsure at all n locations
agctntatatggacgaaagcgcaattttccnatttgttggtatgaaganggagaagcggcacttcttggacctgaaatgctacaacagattaacgaacaagtgaagttgattcgagagaagataaaagcatctcaggataggcagaagagctactatgatagaaggaggaagccactataatttcaggaaggagaacatgtgtttttgaaggtttctcccgtaaccggagtcggaagagctcttaaagctaggaagttgacacccaagtatctaggtccatatcagattttgaagaagattgggcctgtagcttatcatatcgccttacctccgagtttatcgaatttgcatcctgtgttccatgtctctcaactgagacggaacaacccagatccatcacatatac

SEQ ID NO: 175069 - DNA, 404 bp, Glycine max
  unsure (1)..(404): unsure at all n locations
agccttgatgatgccgataagagatcacatttttgtcatcatcaaaaagggggagaatgttaaggtatgtatacatgatnttgatgatgtcaaaagaagaatcaaacaaggctcatttgcttcaagattaatacaagattttttcaacaagcaaagccttgattcaagatttcttcaagatcaagccttgcctcaaaacgaaagctttcaagtcatccaaggcacatgtaatcgattaccaatacatgtaatcgattaccaatggttggaaagcgtgtaatcgattacacatcatatgtaatcgattaccagagactctgaacgttgggaattcaaattttaaatgaagagcacaattattcaaaaaaataattgtgtatcaattcactaatgctgaatcgata

SEQ ID NO: 175070 - DNA, 418 bp, Glycine max
  unsure (1)..(418): unsure at all n locations
ttaatcaccgcagctgcagctttccccagagacttccatttgtccttttttcccggggccctttggncatcttaaacaagacaacatacttcaccaacttgttggctgtggcattatctttaacggttgagttatccgggatggaggtgttttcaacattcactgattttggcggcttgtttgggacgtgatcccacactgatcttaggatcgtgcagccaggtaaccttgaatacaagagcttcatgtacaatacattccttgaaccaaaatcccacactccaagtggtgctccagtaactatgtagacaccagagaagtctcctatgaaggtttcagggttttcaattggtgctgtgctcacgtgagaaaagttctttcacttaacaggctcataccaccggctgtcttgctcctc

SEQ ID NO: 175071 - DNA, 429 bp, Glycine max
  unsure (1)..(429): unsure at all n locations
agcttgacccttacnagncagattagtcaatgttagagctttctcgtataaaccttctatgaatctccgggaatatcctgctaaacctagaaaactgttaatcttaaaaacagacttaggactctcccacttaagaacaacttctatcttagagggatccacaactatccccgcttgagatatcacatgccctaggaaactaactttctctaaccagaactcacactcggacaacttagcatagagttggcagtccttaagggtatgcaacacaatcctcaaatgttcttcatgttcctctctagtctgggagcataccacaatatcatctataaatactaccacagaattgtcaagataacggtgaaaaactctattcacggagtccataaacactcctggagcattaggcacaccaaagggcatgac

SEQ ID NO: 175072 - DNA, 436 bp, Glycine max
  unsure (1)..(436): unsure at all n locations
agcttagagaggaagcttcaatggaggaagatattgagtatatggagataaaaaanaatggcatgggaatgaaggaaagagagggagagaagttgaactttgtgtctcacaagactcttattcatccaagttaccacaagtgttacacatgcttttatttatagcctaggtggcttccttgagaagcttacttaagaaacttccttgagaagattcctttagaagctagtgttacacccctccaatagcaaagctcacccccatgccaaaatacatgaaggaagaaagcttccttgagaagcttccttggggagcaagtattacaaccctccaatagctaagctcacccccacgggaacacacacccctccccaaaatacatgaaaatacaacaaaagttcctactacaaggactactcaaaatgccctgaaatac

SEQ ID NO: 175073 - DNA, 431 bp, Glycine max
  unsure (1)..(431): unsure at all n locations
agctttgaaaagtgtngnttttcaccttctcttttttctttatccgctggcttagggagcgtccgctaagtgcaacactcattggctaagcgcaaggaagaatctggaagaagatgagctatacaggttcgctaagcgcaccatttcatctcactaagtgcaccacttcagtccatccgttaagcgagaaaggcacgcgctaagccgaaattcactaatgtgcactaagcggtccagaattgtgctaagcacacgagcacgaacaaggccacttatttaagcctgaaatcacattttaaagggggagtttgaactgggattcagagattttcatgtcttgagattctagagagagaaaggtccaagttccagagagttttgagagattttgttgtgtgaagattggcagaaaccatagcttgaagcaggag

SEQ ID NO: 175074 - DNA, 343 bp, Glycine max
aagaatattctacactctctaacagaagcgacttactgcctcccactacatgcggagctgtatccgagacagaacatcattactaccctgtcaccttggacatagaagttttcctcatctgggcacaaatatttacgctgattggccattatacatccctgccaccctttaccattactcgaaacactcccctggcctttaaataacccttgtcctcaaggtggtgaagcattttgaagatggaccattcttcccacgaagcttcctcgatagccaggtctttcattgaactaacaccatgcgctgacgtcccatccctagaagaatcagctaggacgccatg

SEQ ID NO: 175075 - DNA, 118 bp, Glycine max
acatcggatctccatcccacgtgttatgtacatccataacgtatcacttcaataatgcctttgtctattctgtgaaaacaatgacgacgacttcatctcaagacttgggacactttaa

SEQ ID NO: 175076 - DNA, 427 bp, Glycine max
  unsure (1)..(427): unsure at all n locations
agctntgaatggcagggatcttatatctaatatttacaactccatgngctntttgacctttgtgaaagtgaccttccaggggatattccacggaggccttctagtctcttctatattgtacttttcttgaattcaaatgttagttattcaaacgtaatagagacaaatggaatttgaataaaacagtacatgtgcactttccttttctgtgatacccagtccttgagagactagacacatgaatttatcgtatgacagtgtgttatattgttatgaacaagactagatgcttactaaataaagagagctgaacactagattaaaatagagcatactctatctagttgtgggcgatattcctttaacataataatcttgtccacttgtcaaaaacacaatagaatatcaataatttatacttatgtta

SEQ ID NO: 175077 - DNA, 423 bp, Glycine max
  unsure (1)..(423): unsure at all n locations
agctntgctgtcttttaaacgctcttcatagtttctcgggttngncntgggctaattctgttggtcattatttgtttaatcaagatggtgaccacggtattagtgtggttgtgggaaaaaaaatgtacttggtgattaaaaaacatatgcagaaggaagtgctaattagatttaggggtgagtcttttgcttataaagaacgttcctaatgttgacaatctggaagcaatgcaaaatagctaattatggagtgggtgtgatgtgacagtgagtcaacccagcccaagtccagttggtcccacaggttaaatgaattggataaaaaaagtttgagtctattcaattcatgatgtttaaccatccaacctaactaaatttacaggttaatcgagtcagtctatcggattaaacctattttgacag

SEQ ID NO: 175078 - DNA, 422 bp, Glycine max
  unsure (1)..(422): unsure at all n locations
agcttccaagagggccgcagccttattaantttatgtntgcacgngnnggatactctgtctacttagaacacaaagattcttcagctgactcgcaggataaaacagcaaaattgccctattgcgatggtcttgaggttttatatctagacctccttttccttggagttgatgtatttttttatttaactaggtttatcttgttccatgggtttcttcaaagttagtgcttattttgtgtaatctagagtgtcatatatcatgcggtgagcaaaatctattacgggggtcaaataataaacttgcgaagtcatgaaagataaaagagaactgctagactctagcacactctttgatgcttggtaaaatttatgtggagctcacttgttgaatgggtctcatttattggttaggggctctcaca

SEQ ID NO: 175079 - DNA, 421 bp, Glycine max
  unsure (1)..(421): unsure at all n locations
agcttcctcggggccattcctgcgattgcaattatttggaaagntagttttaccagggggacattactcttaaagcaaaaatggcatataacctcctcccatcaatgtaaatttagggcaagcttatgcgcatatttccttacaaacgttctcttgcacaagacattctattaaccgaaaaaaaatgcacccatatacaatcaaggcagcttcgttacctagattatntacacgtacttccaaggtgtatttgttacttacatcacacacatctccttggctaaattcacatacatgcatactcaaagcattttggggtaccaaaaattgcacatgtgcacatcttggtatttttaatacctatacatacacaaacttcatgatgaatcttgactatctacacaataaggggctacatttc

SEQ ID NO: 175080 - DNA, 416 bp, Glycine max
  unsure (1)..(416): unsure at all n locations
agcttgcacacactggacatgttgtatcgtgtattncnncaaagggagttctttgctctaaacaatttgcatgataaacatggccacacactaaaactgccacagctgaaagttcacaagacattgaactccccaaaaaattatttttttgacttagtagtttttcacaaatcccacaaaccatctttgctatatttggtgatattgcatccatccctaaggaatttgactgaattctctctggcctgagaaacactttctctctatactctggggaaaaaaaattaaaagctcataagaaaagcatgaataatcaactatccaaggtgaaaaaaatagtgacaaaataggttctaaaaatataatataaagtatacctttaaattaaatgctacaaaaatacacaaaaagcatta

SEQ ID NO: 175081 - DNA, 421 bp, Glycine max
agcttcagcctctaatggaagaatatttccatctataacaaaacatttggccctgaaaaacacacctctattgcatgcgggtgtgtaaaaattcctattctcattataacccaacataaattgaatagattttttttttgaaataattcaagaaaaaagaaatgctttgatttataaaacaaattcaattaacaaaattatttgtacaaaaccaaattggttaactaaactagttttcatttgaatattttatttgaaaaaagaaaatttgaaaatcagtttaaaattaatctgatccttataattagtttaaaattaattaaaaatcagtttagaatcaattttttagaactaattcgatactgaactaatttttaaattaatttaatcatttaaatataaaattaaactaaaataattt

SEQ ID NO: 175082 - DNA, 433 bp, Glycine max
  unsure (1)..(433): unsure at all n locations
agcttcttgaacggaatcagtatattcatttgtatagattaaaggatgaaaacgnggntcgtgatatcttttggtgtcaccatgatgcagtgaagttagtcaacacatgtaatttgatgtttttgatagacagtacctacaaaacaaacaggtacaggcttccactgcttgattttgttggggtgacaccaactgggatgacattctctgccgattttgcatatctggagggtgaacgtcttaataatgtggtttgagctttagaacgcttccgaggtatatttttaagacgtgatgtcctccctagagttattgtgattgatagagacctagcattgatgaatgcagtgaaaactgtatttcctgagtgtacaaattatttgtgtagctttcacataaacaagaatgtgaaggccaaatgtaaatcattaat

SEQ ID NO: 175083 - DNA, 433 bp, Glycine max
agcttgtaatgtctcgaatgtagttatcaatatctgcatttattgttactatcatgatgtggttgggttgagtggtcagtgatgtgtggctgctgaccactataggaaacacattgcaccacgtttctttgttgtgggaatggctatttcctgttagcactttgacccctcccttatctggccaggctctgataggctacaagctcgccctaatttggcctgaacaatccctttagctggcctagcccattcattttcttccaaacctcaataattcacagattttttcccgacctgagggcaagtgcaccccgagcttatactttggatttctatctttttccccccaatctaaaacacttggacaacttattataagacattctgtcccaagtcaacttctcataagacattgctatcctcgttttttggg

SEQ ID NO: 175084 - DNA, 433 bp, Glycine max
  unsure (1)..(433): unsure at all n locations
agcttatgacaacttgtgtaatcgattatgataatgttgttatcaattaaaacaaagagttttttcttctgaagaaattttctaactttagaaaatttcttctcactcactcatgatgatgcatgatgcacaaaagatatgatatggactaagatgcaacattcaatataacaaccaatacaaatgtcattcaaaggagttggatatgtaaaagataaaacatctccaagcttcaagatttagtcttcatgtttctcatgttgctccccttatctctaaaaaaaccttcttgctcaattaaattaataatatgtgtgttaactcattggcaagtgcaccaaattatcacaagtagtaaagtaaaatgaaagtctgagtgtcgagtccacggngactntgtttgtacttagattggtgtatttctaattttcaa

SEQ ID NO: 175085 - DNA, 339 bp, Glycine max
  unsure (1)..(339): unsure at all n locations
tacaaaatctcccatcacttgaaagttgaggtcaatgataatttgtaaacatcctcctctctcaatcggtcgaaatgtatattaacaaaaaccttgctgtgacagactaatggacaccaacacagataatatttcgattgaaatgacctctaaagatgtcctggaaatttgaaagtctcacatcgcttaagagtctaaattaaggataatttggtaacattttcttctctaaacccattgaagtgcattttaatggggataattaaaagcgtgacgggctactgaacctcagagatgttaacctgtgacagcaatgctcgaatgctaaattnggattta

SEQ ID NO: 175086 - DNA, 407 bp, Glycine max
  unsure (1)..(407): unsure at all n locations
acctgcggcantgcaagctgcagggtggaagaatatgtttgattttttatatgcgcctgacattgatcaaaatctacttagtgtcgctcagcttgtagagaaaggcttcaaagttatatttgaagaaaatcggtgcttgatcaaagatgcaaaaggaaaagacgtattcagggcgaaaatgagggctaaaagctatgctttaaatctaatggaggagaagcaaatagctttttcaagcatgaccaccaatgttgaactatggcacaaaaggctcagacacttccatcttgctggacttttatacatgcaaaaacatgccttggtgaaaggtgtgtcaatgcttgcagacaatgtagccgattgcgtggctcgccaatatggtaagctattcagaataccatctcctc

SEQ ID NO: 175087 - DNA, 409 bp, Glycine max
  unsure (1)..(409): unsure at all n locations
gcttgacatttgggagaaaatttagattgtattgatagagaanagngngttcggggagggggctgaactggatctacataacaggaaagaacattttttcaaatgataatctggtgtaggcaatcttatgatagttccatagatcctacgaccaagatgactatcccattgtgggagacttaattggctctctcgaatagcctacttcctaagagattagtttagagaaattaaggagtattaagtgtaataagcctaaacttcaagggacgttagtgtaatttactttaaaaaagatatgcgacttccttccaacttgtttttttttataatgttgctatctttttttaatttctatataaatagtgtctgattaattctcaatttcttctatagatgcttattctaa

SEQ ID NO: 175088 - DNA, 422 bp, Glycine max
  unsure (1)..(422): unsure at all n locations
ggctgcaacttctgcttttattggggattttgtttccttttggngctctaaattgtgggaatgtgctcaaatatgtggggcaatattggtttgttttcttgcttgattaggttgaattgggggtttgtatgggatggccctacgcctataatgcattttgaagcaatggggcatgccacattgtccccgttctcttgctattgatgcctaaatgcgcgcccaccaagtgttcggtgaaatgcctcaatggcattagcgcgtgacttttgtaaggaaacaacccatggggcatattggtttgtacatattntctattttttgggacatgcattcattcccgaaaaaggctagaataattgcctcacatatatcctaggcctaggaaccaaagtttttatgcaaaagaacacaagaggaggtgc

SEQ ID NO: 175089 - DNA, 381 bp, Glycine max
  unsure (1)..(381): unsure at all n locations
gacaacattaatnttgaagctacatactttgtctcacaaggcacacaccctaactatttatcggtagatgcatgtggcactaaatgtttgacttacactcgggatacacatcgtaagaaatacgaccctaaaacccttccttgtgtggtttggtggatatagagatatacataaaggatatcaacgcattcatctttctagtaagacatgttgttatctcatgacatgatgtatcctgacgagttattctttccatataagactagtcgaactcatacgaattcctctcttacatagcatgttagtagcatatatgatgattggtacctcatactaactgcaattcttgtgcacacctaacagcaggaacaacagtttatc

SEQ ID NO: 175090 - DNA, 422 bp, Glycine max
  unsure (1)..(422): unsure at all n locations
agctntaatgttaatgtcacatcattttatgtttttaacagtatcaaattatggagattgtgatatggtattgtaagtgagatccttggccagattgagtttgattgggatgacactaagcacatgatcacaattgagaatgaaaatgcttggaatgaatattgcattgtaagtattctttaatatattgctatttgttattcaaagcagattgaatttgactttttttattctagtcgcataaatcagctaaaccgttttgattcaaggtgcttcaaaactggggtgatatagtggatttgtgtgctaaagatagagccattggtcatggagctgaaactactatggatgttgatgaagcgatgagtagagaaacaaatgaagtggaattcatgggtttaggtgctactgctactatatac

SEQ ID NO: 175091 - DNA, 416 bp, Glycine max
agcttcagcctgatcgctaagcgacaccttattcttggctaagcgttactcagtgtcgccaagcgcaattccttacggccataactgaggtccatgaagctaagtgccagtcatggcagctaagcgagattcattgcgacagtgtgagtgctaagagagtccttatcagctaagcacatgctcctctgtacttaagatgcatcattttagctaaaccagccagagtctggcttagcgagagttgcagcttttcagatctgcaaacctcgctaagtggtctgatcctcgcgctaagccaaacttgtgtgttcaaaaaaaaaattgattttgaatttgaaacgtcagctaagcgcgtggatccactaagcgagcctcgatgagaaaccaagcgtctctctggcccgcttagcgtagcg

SEQ ID NO: 175092 - DNA, 416 bp, Glycine max
agctggcttctacaaataacacaagttaaattacttgaacaccgactatttttccctacccctcatgtcgtaagaatttgaccaaaaatagaaattaaatcaatttgagtattgaaagattaataatattatttcatttgtttatattgtttgcaggatatgaaaagagtttaatttccatataaggataatataaaaaaattgttaaccaatcaagattcatctcaatataattttaagataattattataaaaaataataaatttatcatgcttaataacatgttattagataatacaattaaaaatctgttcatagtgtattctaataaaatttataaagatagagtaaaaagaaaaaagatttattctcagtaaacgtagacaccaaagaacaatagataaaagaggggaga

SEQ ID NO: 175093 - DNA, 434 bp, Glycine max
agcttatgcacggaaaatgtaattatgaaattgttatgcttgtaaaaacaccatttcctagttaaccatgcattaggtaccatgttcaattattttgtttttaagtgaaacgggtttatgatcccaacatggttggctcgtggtgcctaacacatgaaactaagaatgtagtgtgaagtttcacgcttcccccttttttgtttttgttttgtagaggaaaacgcaaggatgagcaaacatgaaaacaaatggtatgcaattttgcagatcaaaaagtttgttgaacgcatatgcatgatgatgccatgactcatgcaaaatgtgaggctggaatatgataacggacaaatgcaggatatgtccattatgatgttatgaagagatgcttatgcgatgcatgatatgaatgcattttacggacacgagagcccgga

SEQ ID NO: 175094 - DNA, 386 bp, Glycine max
attttcacaaatccaaaatggtgtgcgtgccacgacatgcaaccacatgtctcctaatatgatgctaacaaactttgctgtgaaaaacatttatatatattgcgactcccctcaaaacattttctgattctaacatcatagtctctctagatatggtaacgaaaatagcttcgagaaccatggtgatccaccatgttcgaactctattgcggtgatgaccttgactaggatcctgtcccttggactcacttcacaacaagatgcacacacaaaagcatatcctatgatagtgatgtaaataaaaaaatcaaaatatcttaaattcacattagagtcttatttaattatcaaatctcctaaatatttactagataaagaaggaagat

SEQ ID NO: 175095 - DNA, 430 bp, Glycine max
  unsure (1)..(430): unsure at all n locations
agcttaacaaannnttttgtatagtgtgcgctatctatttatactttttcaaaaggtnggttntggcttttataataaacaagccgagccgagctgagtcttacatagaccgagtaaaaggctcttgacaagctgttcggctcattatcatccctatntctaatgataataatgctcataaaaaattatattattaaataatatcaaaatattcaaataaaaaatttagaataaaaaatgataaagggagaaacataaaacctacccgcaatcacgactgtctcaactctccgacacctacttttattttctaatttgctatttctagattaatcacaatgattaaatattatttatntattttatttgtaagtgcttatccactgttgtacatttatagttgatgtgacatattatcctcagaaacaac

SEQ ID NO: 175096 - DNA, 434 bp, Glycine max
tgcatgctctgagcttgtcagcggcgcgggcacctgatgatgtcgcagcatttctggcacaccggctctcccttttggccgtcgagcataaatcttctttctgctgcgcactctcttgagaaagcttcatctgaatcaaatccaccagagaagggctcttcctgaggcgcaaacccaatgggctgggcttatcaagtattttcagatgggaaggagaactgacagaaccatcatccggagcattccattgctaatatgatggcaagcgcgcacgcaagctcaggaaggagaagaattacatgttaaaaaaaacaaacaagccacaaaatttcaacattctttgcgaacagacaaagcgcttctttcatgatttcgagaagtaagatctacgcaatgatgcagatgacatgttattgaatgccagataacaacat

SEQ ID NO: 175097 - DNA, 425 bp, Glycine max
  unsure (1)..(425): unsure at all n locations
agcttgaagctcaaggagaagtntttatnaattttggcttttacatgcccaactcctttgagtggcatttgtattgtttgtgaacttgattgttgcatcttagtgcatttgatatttgttttgcattgtgcatcatcatagtgtgagtaaagaaaattttctaagttaaaaaaatttcttcagaggcaaaaactctctagtttaatcgattatagagttgtcgtaatcgattataacaagttgtctgaagcttaaagagttaagtcttgtatcaatttaatcgattacagtagtattttcatcaattacattgttgtttgagacaacgactgatttttcaggagtctctattntaattgattaccaagtggattaatcgattacgtatgtcatttaatcaattatatagttcttgagttgttttc

SEQ ID NO: 175098 - DNA, 421 bp, Glycine max
  unsure (1)..(421): unsure at all n locations
agcttgcttctacaaattacaggtttatctatttagttatcaaattatttcggctttattatattaaccgctatctttgttgtacgggcaaagaatcaacattatgaaccacgaaatatcactttagtcctaaccatgcaatataacactgatattatgaaccaacaacacctaataaaatgttaacagaataaccttataaaatgctaaaaaaacaccaaatatagcaattttgagcaaaataacagtataaaaataacaggcaatggatatcacagtaaatatatacgagtataaagacaacaaaataataagcacaacataaaataggtggtggaaataaacacacacgcatgcattaacttgatggacaatgganaaatccaacattgaaatatgataattgattctcccatgatgc

SEQ ID NO: 175099 - DNA, 342 bp, Glycine max
ctgcaagtgcaacgcggatattttgctacttccatacgcaccacataccaacgagcatcgatagtctatgtcatattgactaattgactttctcgatacacccaagaactcgctcacagttatcttagagatgctcgtgcaaactatttaaattgctaaatcaattaaacagattaacaactcattaaatcttaaattgaataatatgtaaatcgaaaagattgcacttttctctgaaaaaataggattgaactctaattagatttttggtccaatgttaaaacagattcaaaccagacatataaattaattaatatataggtaatatttacaccataaact

SEQ ID NO: 175100 - DNA, 423 bp, Glycine max
  unsure (1)..(423): unsure at all n locations
agcttgaatccaagggtgggagaaaaaagatatantttcaatcnancaaaaaagataaaaatgatatgaagatttttagtgtcattcttcaattaggattaaagtttcacataggtaatgcatataagttctctaataatacctttaagaacatattatatgggcgttttgttctataaactagtgttgtcagtccacaacaaatttacctatactagttagtatataccccatccatatgtgttgttatatcaataacttgatgacgagccgattaattaaggagaaaactaaataaataaataaaaacaaattattagtggcatagtgaaagaatttcataccaacatactaaaccaattagatgggtaattttcattgataaagaagagaacaaattaggtagagaatgatactttcatt

SEQ ID NO: 175101 - DNA, 416 bp, Glycine max
agcttgccacattgatgtatcctgtctatggtttctttgatacgggtacttaaattttggaggcttaagtttattattaaagggggagatggggagaggactaccctttattaaccaccctgatcaactttgtgaaagatgtttacttggaaagcaattcagaatgagtttttcgaaggagtaaaactcaatagctaaaacgccactcgaggtaatacatgctgacgttgtgggccaatcaagccaagctcactaggtaaaaataactatttcctccttttcgaagatcatttttcaagaaaaacatgggtctatttcttaaagaaaaaatcagaagtcttttttgccttcacgaagttcaaagctgtcacaaagaaagatagtggtcgagagataaaagtagcgaggactgactg

SEQ ID NO: 175102 - DNA, 409 bp, Glycine max
  unsure (1)..(409): unsure at all n locations
agctngnaagaatatattgtgataatttgccttanttattagngcccaaacgactttagaggttacttcctcgttgacatcttttgttttgaatggaattgccatgacaggtttattattactgtctttgatatttggtagttgatattgcgttgtgggagataattccgattggattaactcaccatctttcacttgccagtttgttatgacatttgtttttggatcacctatgatttcttgtttccaagggtaatctatatcctttctgatggcataagcatgaaaccaatcaaagaaaaggacattaattgtgactctttcgacaaattcgtagaacttgtcttgaatctgttntctgtttgttcccttgtaatgttggaaaaaccatcttctttgaggttcattc

SEQ ID NO: 175103 - DNA, 428 bp, Glycine max
  unsure (1)..(428): unsure at all n locations
agctnttagnattntatactcacctacaacctgtcttatttaacagtgtacgagagtcccatctgtgttagtaaaacttgtatttgtcagtggaagataaattcaaaaccttacatcttacgaaaaagtttatattctatttaacacactgtttaaccctccagtgtgatttctgtaatttcaaaatttgattatttatccttcttgtttttctttttctttttctccctatctttcctactttccccctgctcacccttctccctcaccagtaatcacccttattcgttcttcgggtctccactcaaccaccggccaccattgcgaacacctccctccgtcatcgaacaccttctgtcgtgctcctcttctcgttgacaccttcatcaccatgtgcaatggttccaccacgaaacttgtcacttctg

SEQ ID NO: 175104 - DNA, 427 bp, Glycine max
  unsure (1)..(427): unsure at all n locations
agcttctggggggacatcttgacttgctttttttctgttattcaccacagantctgccttcttctattttcagattgggaatgcctctaacagcaccttggtcaatgattttcttcatgcctcttaagtgcagatgtccaaatctttgatgccatattttgacttcatcttctttggaggatagacatgtggaggagtaactggtttcttgaggtgtccataggtaacagatgtcctttgatctgctgcccttcattagaacttcactcttctcatttgtcaccaagcattctgactttgtgaagtgtacattgaatccttcatcacacaactgactgatgctgatcaggtttgcagtcagtcccttcactagcagtactctgttcagactaggaagtccatcatggactagctttcccattccaat

SEQ ID NO: 175105 - DNA, 378 bp, Glycine max
  unsure (1)..(378): unsure at all n locations
agcttgtgaacngnngggcgggcggggaggtattatcttttattacncctnaacgagcccggaataccttttgcatagtttgaagacacactaccacaccataaagtgatatgatcgaagatatcaccctcactcctctctggtactaacgcgagcttcgggcaatagattacgagaataactcgatgggggggaccttattttgacacatgatgtctaaacaattctaaaataggtgagattctttatacaaaggaatgaccattatgggctaattaatcttatggggaaggacactattcttggctgagacggaaacaagaaaaccatcgtttctactgatgaatggtgggaagctcaaattcaagtgtgtactat

SEQ ID NO: 175106 - DNA, 430 bp, Glycine max
  unsure (1)..(430): unsure at all n locations
agctnttaaacaaaaagaaagggacgaaccctatgatctatttttcagccgacagaaaaaaggaaaaatggcttcattgtcgtcatccaaaattgtcaagtgattaagttaaacaaaatatacactttgagggagccttcgaagggatatgcaaaagataggatgaggttgcatgaactatcacatctttcaaaaaaaggcagtcaatctgtgttttcacaaaacaaaaacaaacaaaaaaaatttcaaaagagggaaagaatgtcatgagcattgcacagttttcatgattcaaaaccttttgcattgcattgctagatacaaagcctacatttactgcatttcaagacaaaatttgcacacctttgcattccaaaactcattctctatatcacgctataagtgcatagatttctctatatatgtcagt

SEQ ID NO: 175107 - DNA, 419 bp, Glycine max
  unsure (1)..(419): unsure at all n locations
gaccttaagcgccgcggctgcagctgccaggagagggcagttttattttttttncacacaaccgataacgaactagataattttattctatataccactctcaatatttcaatttgtttcgagatattggtcatacaaacaataagaatgttattcttattatttggatttcaaattcaaagaatttaaattactttatccaaataatatattttaataactctaaaaaatttatattgatacatttgaatttcgaaattttttaaatttcttatacgtttaaccaccacattgacttctctttttttgcagcagaccagagtcctttgactcccaaaatccatcatacaattgcctgggcagtcccaaattacttaatgcttgtttggcccgaagacgaccaaaaggggctttctctc

SEQ ID NO: 175108 - DNA, 425 bp, Glycine max
  unsure (1)..(425): unsure at all n locations
agctnanngagggctctgcgatcataggtttttatataataacnctcagaccataataggggtgatagaaatagatataaatcaaacagtctgtctgatgtatattgcccctaattatacaatgaatcttggtgatttcgtacaaaacataaacttagaagtccagacaataggctttggaaaaatacttgtaggacataacttacacttaggcatcaccttcataggcagaataagtgatcaaatatcccctagatacatgataaatactaatccattagtgacaactttatcatctgatggaattcaatttttgccacccaaaatctttgattcctctagaaatcaaaataataaatggcaaacacatatcgatgttggatcctctaggagtgctataagcacccttagatcagctataataa

SEQ ID NO: 175109 - DNA, 402 bp, Glycine max
  unsure (1)..(402): unsure at all n locations
agacccgcaggcatgcaagcnnaanggggagggagaagagagtttgaagttctctttcaccacccngcaccgagccggcgacaggtctctttatacccttcgcacactagagtatactattgctaccatcacacatctacttgatatttgattcaacctaactccttcagaggagcgttattggcacttagatcaacggctattgcagtaatatgatctacctcccgtaacctggacactccttacaaatgtgagttgcggccaacttgaacatctccttggcaaagttcgcctttcctaactcgctattgagagctaggacttcttcgtactcttccggagcttcaaagacattttcactgacgacatttaacttggcgagcacctctaacttcgtatatg

SEQ ID NO: 175110 - DNA, 418 bp, Glycine max
  unsure (1)..(418): unsure at all n locations
agctttcaagtaactaataagttatttttattatacataaacataatcttagtaatcattataacacacacacacaatatattattatttattacataaattcatgataaaaaagtattaataggatgaatgatatcctaagaaattattgtattatacctcttttagcttataaaagatataaatttataacatcatattttacttcccattagatttattttatttagacatgctatcccttcattttataaaaaaaattcatacctcgcttatttatgattgtgataagaccccaattaatgtaaattacaaaagaccagtaaatctaattcatattcactttttttttatttcattcattctcgttnttaaagattgaaataaaatagaaatagaatagaatggagagagatgg

SEQ ID NO: 175111 - DNA, 416 bp, Glycine max
  unsure (1)..(416): unsure at all n locations
agctgggtctcaacttgtttgatttcacctcatgntacaagaacgnggcttttgttagcagaaacttataaacagcgtttaggcctatgggttacctcaaatcagaaggaatttacttagttgaccctcttgctgacaaaacaaacttgaagaagtctcagcctgtgaaattattgtccgtggatggtatcagaaaggcattgaggtttgtcattattaacatgggcacagtacccgctgggctatattgcaaggacattctactttttttttactccacttgaattcttttgcagtctagtattaataataatttctataccagcaatgcaggaaaagtaacaacagcttctcattcgcaagggattaggtttctttctgaggttgcaggtaattggactatcttgtaactacaa

SEQ ID NO: 175112 - DNA, 289 bp, Glycine max
atgacatcaagatgcattctctatggacagcgagcagccacggatagatcactcatttccttatcttgcacacatttggcgagggcggtgccccatttatgcatttaagaaggtcatactaaccttctgacttcccgcgatgagaccaaatgcaacacatgcatgacgatgcaatacaaaaataaatgcataaaagcacatggttgatagcaccacgaggaatgtttaaccgcggctgtatcatcaaacaaacatacagcaaagacgcacaagagcatgacattaaaag

SEQ ID NO: 175113 - DNA, 433 bp, Glycine max
agcttaagacaacttgtgtaataaattacaatattgctgttttcaattaaaatagagagtttttccttctgaagaattcttccaactttagaaattttcttaattcttaataattttactaatgctaatgcaagcaataaagcaataaactagttctttccaaatgcttatgcaatgcaagcaaatatgcaattcatacgcagttcatctccccctttgggcattaacaaggccaaagagtttaaacttatgcacaaaaaagaacacacaaattgaaggaaataaaccatagcatttcattaatcatgaaacattgcaaacaattaatcattaatcattgacctttctaatcaaacacttaattgtcttcaaacaaacacaaacatggaaaaacatatcagaacagactaactaatagtagaaccaagcactg

SEQ ID NO: 175114 - DNA, 360 bp, Glycine max
acaaccatcacgattatcgcctacctttacatcattgggggtaccacctgggccgccagatccctccaccttttgggcgtgtactctgaaagatccgacccccttttggcacatgttctgtagttgcatcctatccggaaccatatcaaaatgtgctgatactgcctaacaaaggcaaccattacgtccttccaagaggggactcgggaaggtcccaagttagtgtaccaggtaacagctacctcagttagactttcttggaaggaatgtatcagcaatccctcatctttggcgtatccaccatcttctgacaatacatgcttagatggttcttgggacagagactcctcttgtactgtc

SEQ ID NO: 175115 - DNA, 423 bp, Glycine max
ctagcttgataatagcaagaaaactagaatcattcttgctgtctttagaaagcttgcagctgaaggaattggaaatattgtcatcatagggaatgatgggaagagggtgataattgaaaaagtcttgtatgttccacaaatgaattgcaacttgatgagcataggtcagctggtggagaaaggcttttcactaaccatggatggtgattcactgaaactgtttgatgcagagaagaatctggtgctgaagtctaatctgtcaaaaaacaggacctacaagtgcagcatctccagtgataagatgatgtgcatgtctggagttacaagtgaagaaactgaggctctgtggcatatgaggtatggtcatcttaactctataagtctgagtgaattgaattctaaagattattttatggcctgcct

SEQ ID NO: 175116 - DNA, 442 bp, Glycine max
  unsure (1)..(442): unsure at all n locations
acctgaggcatgcaagctttgntccttnttataaagcgagaagatcttaaanctttttcatnanctaaaaaccttgaggtggatccaagtgctccgatcattcattancatattcatgttttggtggcatactcaccattgttggtttctttagggaactcacaataactaagagagcgcagaggcacccctataacactcgatccataaaaatggataatgaagagggagtgcaagaatagatgaaggccgacctatcggccttaaaagatcaaatggcttctatcacggaggccatgctaaagcttcataaaactatagaggataatgccacggcgaccgcctccaatacagttagggaagcagaaccggtgctacagcccgcaatacacttgngttgagatataaacacgacgatgttcggtcggaggtatagtcctca

SEQ ID NO: 175117 - DNA, 425 bp, Glycine max
agcttctatggaagcggactttgactttttgaggtccttcaatggggatttttcactatggagatgcagcggaagataaaggagaagaggtgagaggagacgccatccactagggaataagccatggaagaaggagtttcgccaccaagaatgtgtcttggataagaagcttggagagaatgcttcaatggaggaaaagaaagaaagagagaaagagagaggggcgagcacgaaattgaaggaggaaaagggggagagaagttgaactttgagtagtgtttcacaagactctcattcatcaaagttaccacaagtgttacacatgcttctatttatagccaaggtagcttccttgagaaacttccttgagaagcttccttgaaaaacttccttgataaacttccttgagaaactttcttgagaag

SEQ ID NO: 175118 - DNA, 419 bp, Glycine max
  unsure (1)..(419): unsure at all n locations
agcttcctctaccgtaaagaaacattttcggtttttcgcttgtaaaaaaancgcgcaatgtcggctgaaaattttcagttggggctatttaactaccgatgctggctactgttttttctattccacccctgaataatacttggacgatgtcgatttggaaatgttcgatcggagtcatccggtcatgcttctttttaagacctcgatctgtcatcttttcctggccgacgtcggctagcatttttttcgatcaatatcggtgaatcatgctttttgccaaggtgggctaacgtcttcgtggctgatgaaatgagagcatgccagtgtcggccgaaacacaatctcgcacgaaaaaccctagccgacctacattgcatattttgtaagcaataccgaacagcanaacttcgtctaccata

SEQ ID NO: 175119 - DNA, 435 bp, Glycine max
  unsure (1)..(435): unsure at all n locations
accctaagcacctgagctgcagctcntatccaagctcagcgtggtggngattctccttttttcatggcttattccctagtggatggcgccgcctcttacctcttctcctttgtcttccgctgcatctccatggtggaaaatcaccattaaaggacctcattgaagctcaaagatccaccctccatagaagctccacaagcaagtttccatcattagagatatctaattgttcatgtgatcagttttccataatgaacttatgagttatgctttacccagctcatggcaattggttttttcactccctgttttctcattttatccctaactttgccaacatcttttcgcctgccagccaaagcataaatgttagaaagcaacatgtaattgccgaaattatgtggttcaaccttgaacagtttagctgcagcaagt

SEQ ID NO: 175120 - DNA, 385 bp, Glycine max
  unsure (1)..(385): unsure at all n locations
gaccttaagcaccgcggctgcagctgggaacatcttgactgtttttgtttttatttaaagaacaggaccattggcaggaaaaatataatgatatagaaggaccatgcttttttagaattcacttaattttaattgnccctgagccccttcccatatttgctaaaaaaaataaatcgttgattgattttattaacgtttaacttttacactctatcaaaattcaattttcatattacttttttttctctatcaaaatttcaattttcataatttacaacacaataattttcaaaatattgagattgaaagctggattgaattcttttgattaatttctcatttcaatatttgtggataaacaatcaattctaaatttaaattcttg

SEQ ID NO: 175121 - DNA, 420 bp, Glycine max
  unsure (1)..(420): unsure at all n locations
agctgggatgtcctttgctccggattcctcttctttctcatgngaacccaaaaccaatctttgggttggaaaacaacctttttgcgccccttgtttgcatgtttagcatagctctcattcctcttttcaatgtgggccttgactctttcatggagctttttcacatagtccactttggcttgtccttccttatgctttaaaactgaaatattaggctttggcaacaaatcaagaggagttagtggattgaaaccataaacaacctcaaaaggagaacaagtagtggtgctatgcacagtcctattataagcaaattcaatgtgaggtaagcaaacttcccaatttttaagattctntttcaaaacggtccttagcaaggtacccacagtcctattcacgacctccatttgtccatccatt

SEQ ID NO: 175122 - DNA, 417 bp, Glycine max
  unsure (1)..(417): unsure at all n locations
agcttagcgacgtgggtttcttccataattatttatgantagnggaacagagaatgttattttggcggtaatagattagaggctgaatgatgatggatgaatgagtgttagtttcagcaatttgactatcttccgtaagcaaagagcagtagctgaaacaaacaacgaacgaacactgtaagcatgaacaagcgccaagaagatgtgcgcaacatagctactaccctcgactccagattcaatcagaccctcagaaatgttcaagggtaacccccaattcttctcttttttctcttttcagatcgagggttattattgcttcgtcgaggtcaattttttccattntctattttctaactgatttaataactacggtaattagtttcggactgtttttgactttcttcttctttagta

SEQ ID NO: 175123 - DNA, 433 bp, Glycine max
agcttccttgagaagctagagctgagctacatttctccctttatattttaagctcacctccttgagaagctctcttgagaagctaaagcttatctacacacccctataatagctaagctcacccccatgacaaaaaaacatgaaaatacaaaaaaaatcctactacaaagactactcataatgccctgaaatacaaggctaaaaccctatactactagaatggccaaagtacaaggcccaaaataagaaaacaacctattttactatttacaaagaagagtggacccaaccttggcccatgggctcaaaaatctaccctaaggttcatgagaaccctaaggccttctttatcaactctagcccaatcctcttggagcctctggctcatggctttggtaactggtcacttcctagggaggatatgatcacacat

SEQ ID NO: 175124 - DNA, 428 bp, Glycine max
agcttctcatctctagaatggtactaaacaatttgggcttcttattggggagcttcatatcagcaatcatattaaatatatctgcaaattccaccttagtgggtggctctaagcccctgtttctaaatattgcaagagcaattgcaagtttctctgtttcaatttaacattggtcttgtgagaattagtcttcgcttatagaaattactaaaaccttgcaattgcataaaaaaagacaaagggctcttggacagtgtccttaaagtatgaaactcttttcatattttagaagtgtttgatttgatatagaatttaaaaatacatgtaatgttttttttctaacaagatataagaaatgagtttaattaacatatgttttgaaaaggaaaacatatttattcatcacaagtttctgcagtcacaagtga

SEQ ID NO: 175125 - DNA, 421 bp, Glycine max
  unsure (1)..(421): unsure at all n locations
agctnttctatctcaatcaactggtctattgactaacaattctaatngcaagctcacattcttgttccttctttgtctaacatacatacttgctcaatcttatgaaaagaaacacaaactccatcataatcatgcattcaaaccaaaatcaattcatacaccaattttcacaaaaagataaaagtgtttcactaccttatcatcaaaatcaagtcaaactgttccatatgcttcaggataagcataccaactaaccataaataaaaacatcagtgtatataaacattaaccaaaatcactaaaaactaatgtacttaaactataatcataataataacaatccaaaaagcataatcagaaatttagaattcttgtgactggtcctatgtgtcttgtgtctgaacatcctcctcatctgtca

SEQ ID NO: 175126 - DNA, 334 bp, Glycine max
ggagatctggaagctgtaacattgccgaatcccgcccgcaatcgattattacatcattcgccggttgttcttcatacctccttcattcattctccgccctacatctggttagcgcttgctgttaagcatttgagtttgaattatggaccctcagggggcccttattatagttgatgcatcatcatctccttcttcgaaaaaccgggatcttttcctgtgctctaaaccacgggcgactggtcgtcatatctgcatcatgattaagcatccgtcaaagaaatctatactgattggttatgttcgaatatcactcaatcactgcttacatgaattt

SEQ ID NO: 175127 - DNA, 415 bp, Glycine max
  unsure (1)..(415): unsure at all n locations
agcttgggaataatgttgtttgcctcataaattttaatgaggaaactctgctttttcaaatgcgtcatttaacaaatccaatatcatagtcattgccttgtcgcttaatccacacaaaatttttatatgatataatttgattataaattatagttttgtgtatttgcttccttcatacaatgttgggctcccatcatatagaagctcataaaagccattatgatcttctcttggttcatcatttactatttcatcttcatttaatggttgtgatgcacctacattagggtcatgttgcctatattgttcaaatgcgtcattgatcatcatttccattgggttntgaggttgaacaccactatcttggaaaacatcttccacttgagaagaatctaatgcttgctttccaccatga

SEQ ID NO: 175128 - DNA, 424 bp, Glycine max
  unsure (1)..(424): unsure at all n locations
agcttgctagatcatcaatattcctanaatatatttctgatatccttaatgaaatgccataaatttatttgccaaaaaaaatattatctcatgtcacgccacgccattttgttttggtaaagtggcattttacatattggaatttgaatttaattaaaagaattcaaataaaaaatatatcaattcataattcaatgataaaaattttacaattacgttgtagtaaattaaattttactaatataaaataatatctataccaaaatgcatgcatggtcatgtaccttgatccatcgttccatgactaacaaagactggcttcttgtaacaaactggctcgtgatgggcaattactctcgtccacaaatataaagatcaaaatattcacttggaataaaaagtctacatcactcaagtccacaca

SEQ ID NO: 175129 - DNA, 424 bp, Glycine max
agcttaaccctagaggagatagtatttttttatgttttggagaggatcaacaacaatgcctataggttggacctcccacaagagtatggagtcaacaccccttttaacattactgatttaattccttttgcaggtggaactgatattgaggaggaggaactaacagatttgaggtcaaatccttttcacggggaaggggatgatgcaatcctccctaggaagggaccagtcactatagccatgagcaagaggctccaagaggattgggctagagctgctaaagaaggccctatggttctcatgaacctcagggtagatttctgagcccatgggccaaggttgggtccaattaatcttgtacatattagactaggatgtcattatatgtgatccttgtatttacggctccataatgtaggtaggg

SEQ ID NO: 175130 - DNA, 390 bp, Glycine max
  unsure (1)..(390): unsure at all n locations
agccctggacttctactgaagctgtatttcttttcttcttctgacccgacatagaatctctagtgcagctgaaggatgctatacggttcttgatccttcagattcagacttttgttcttgatggatctttttctcggatatatctctcattaaaaaaatatcaatgacaaaaatgatggattaactgcgtatcctttttctggtatcggagaaaagattatgattttcattggtctcattattcagtatttggattcgacattcttattggcattatctattctccataatattctaaattttactttnttaaataacatctttatgcaaaattaataaatgatacactaacgtttattaaaatatattcatttatcactatattattga

SEQ ID NO: 175131 - DNA, 421 bp, Glycine max
  unsure (1)..(421): unsure at all n locations
agctatgcggattaggtcttcgccttttaaatgatcgangngggnccgaaaagaggcaaatttgatcatcctactaggacgactgagaaaactggggcaaatgaagagggtgagaaagagggagaaacccatgctgtgactgccattcctatacggccaagtttcccaccaaacccaacaatgtcattactcagtcaataacaaacctcctccttacccaccacccagttatccacaaaggccatccctaaatcaaccacaaagcctgtctaccgcacttccaatgacgaagatcacctttagcacaaaccaaaaaaacaccaacaaaaagaaattttgcagcaaaaagcctgtggggttcaccccaaattccgttgtcatatgctaaactngatcccatatccactcaataattcaatgg

SEQ ID NO: 175132 - DNA, 417 bp, Glycine max
  unsure (1)..(417): unsure at all n locations
agcttgtacaaatttgttcaatactttttttgtgtgcttnctggnttaatatacatattctgaaatatgttttagatttgacaagaccaatgattgaataaaaattgaaagaacgtgtctatattctataaaaggggagctttatctactcgactcttttctctgtttgaacaattatacacaggtggtgcttgtgctttcatgccagaacgatttaaaaataaaataactaaaatttaaattttaggccgattaacaaaaaatattcgcctttaattattataaaacaaaaaagtcctatttattaaaaaaaaaggtcgataaaaatgtctaatatatagttccatcaaaatctattttaagtttcactgttgagtcgatcctactgtcatgatctcattgttataaacttgtatg

SEQ ID NO: 175133 - DNA, 417 bp, Glycine max
  unsure (1)..(417): unsure at all n locations
agcttatagntatgggagggagaataaaacattccaaaatcaattgtacctttcaagtaacgaagaattctttttgcggcttttagatgaggagaggtaggagcctccataaagcgacacacaactcccaccgcatatagaatatcgggccttgtattggttagataccttaaactccccacaagactcttgaagatcgngaagtctaccttctctccttcatcaaactttgataacttcaagccaccttccataggtgtgttcacgggattgcaatcaagcatattaaattacttcaacacttcttttgtgtacctttcttgtgagacaaagataccattctccgttttcttcacttccattcccaagtaatatgacatgagtcccatatctgtcatatcaaattcacgagacatg

SEQ ID NO: 175134 - DNA, 430 bp, Glycine max
  unsure (1)..(430): unsure at all n locations
agcttctcaacgaggtgagcttagatatgagatggatattattagctaagctctagctcctcaaggaagttttctcaaagaagcttctcaaggaatctacctagtctataaatagaagcatgtgtaacacttgttgtaactttgatgaataaaagtcttatgagacacacttcaaaggtccacttctctccctcttttattccttcaattccgtgctccccccttctctctttcttttcctccattaaagcatcctcttcaagctttttatctaaggcacattcttggtggtgaagctccttcttccatggtttattcccttgaggatggtgcctcccctcttctcttctcctttgccttccgctgcatctccatggtggaaaatcaccattgaagctcanagatccagcctccatagatgcttcacaag

SEQ ID NO: 175135 - DNA, 434 bp, Glycine max
agctttgagccaaaatcctgactcaccataatctttgaccttggtgagaatgtcaatccttaccctcggaagcaaaaaaagaatataggggaaatttccaatcaaagaaaaagagaaggaaaatttccaatgaaagcaaaaaaagaaaagaaggaaaattccccaatcaaagagtgggagaaagcaaaaaaagaaaagaaggaaaattccccaatcaaagagtgggagaaagcaaaaagaaaagaaaggaaaattcccaatcaaagaatgagagaaagtaaaaaaggaagaagaagaaggaaagaaagctcctgatcagggatcgaaggaaaaacagaagaaatgtgcagagaggtctttggaccggacaatatatgaacaatacagaattgtcaccaaatgaacaaaaaagaaggaaaggaaaccacgaccta

SEQ ID NO: 175136 - DNA, 310 bp, Glycine max
gcctgtgtgtaatggaaaaacaactaacccttcagatcccgaataggatccggagaccaaagatgtgaaacttatggttaggcagggaaagatacaaggaatgcgaggacctggagtcattatcggacaaatgcttcttggagcacttgaatactagcccgacattgatgctaaatacgggacaacggttccctttatgttaagaaaagtttctctagaaccgattattgtacttaaagtagacgctttgaattatcttttgataaaaaggaatgctcaagagggggagacgaatctataaagacatcat

SEQ ID NO: 175137 - DNA, 406 bp, Glycine max
  unsure (1)..(406): unsure at all n locations
agcttgctctaaantcttattgatgtttgtatttatgggaggaggttatatgccatttttgctttaagagtaatgtcccactggtaaaactaactttccaaatgtttgccttcgcaggaatggccccgaggaagcttgcctcaaagaggtccaagatggacaaggcggccgaaggaactacttccgccccggagtatgacagtcaccgctttaggagcgttgtacaccagcagcgctttgaagccatcaagggatggtcgtttctccgggagcgacgcgtccagctcagggacgacgagtatactgattttcaggaggaaatagggcgccggcggtgggcaccactgattactcccatggccaagtttgatccagaaatagtccttgagttttatgccaatgcttg

SEQ ID NO: 175138 - DNA, 425 bp, Glycine max
agctttatttgcaagagagtttaccgaccgtattttattttattattttacacgtgacgacctaaaatgatggctggtacacttttatttttgaaagagcaaaatattttagaggttatgcgtgatcagaaagaaatgactccaaatagagttgtgaactggccatttaggactttatagtgaggattttccttctgaacttaattactgtgaaaaagagaaagaaacgaaaaagaaaaagaaaaagaaatttcccatggtttttgttatttaaatcattactattaaaccagtcatcatttagggacgccacacagattctcttccatattcttcccactcgctaagcgagctgagtgtcttgcttagctgatgttactcactaagcgcatctgcctcgcttagcgagacaccagctacttcaa

SEQ ID NO: 175139 - DNA, 418 bp, Glycine max
  unsure (1)..(418): unsure at all n locations
agcttataagaacaaaattgccttaatcattttttaatatgcatgngaatnaggaagcatcaacaagaatcaagccaaggctatggggcaaaacacaccaaatgattatgatgatgaatggctcaaattctcacaaaggtaaactcatcactttcaaattgagcttccaaaactatcatgacatgtagaggagaatcaaagatttcaagtcacaaaatgtcaaaaacttttattttcaaaacaattacccatttcttgaacatatcctataattcaaagaaaaacatgcaaagtcgtacatgcacacagaattgacccaaaatattaaactagaaatccgatgaaactaacaacattaacaaattaacacaactaacaaattaacaaaaccaacaaaactagcaaaaccaaagaacac

SEQ ID NO: 175140 - DNA, 418 bp, Glycine max
  unsure (1)..(418): unsure at all n locations
cgcaagctgnggctaaataagcactgtatattttttggtaagaacacgtaatatcgaaacaaaagaatacattaaagacatatatacctaatagttgttcaaaattgattcatgacacaaataaatttcttttaaatattatatataaattgtctcctttctgaattcaggctaaattatatataaattatctgatctacaagtcaaatataagcacatctaagaaaaaatacataatagcaaattagctggattaaactcattaggatgttctacatcagctaggaatatagccaaaatactctctataagacttgggcaatcctcctgtgagctatgctttgggttgagttaggcttaactcatttctaatatggtactaatctatccaatttttatgttgggccacatgcagatt

SEQ ID NO: 175141 - DNA, 415 bp, Glycine max
agcttagagaagacttcctttcccttggaatattataggccaaagcaaacccttgaaataacatcagctgagaagcccctcaaatttacatcaactttaacttcagcagtggcacttccttggctctcgataagttgctcccattttagtagtaatggctgcgctgactctatcattagccccaccataccctgccatagtgatgaatttcacttcagattcactgtactagcacgtgttctttctgctcaaccaggatcatttatttaattttttcttttatacaagaaccacaatgaagatcaagcttaaactttcatagatactatctaaacttcttcattattaggccgaccctactgaaatggattatttatttaattatacacatatattgaaacagaggacgagcctt

SEQ ID NO: 175142 - DNA, 412 bp, Glycine max
  unsure (1)..(412): unsure at all n locations
agcttcttgacttcaagtttcatagattngcttttaactttntggggntattccatctaacgacactcaccaatattctagagtagatcaatatatacacacacatacataactactgatatttagtttcttctttgacacaatcttaacgtgaataaaactgcaggaggtacaatgctagagatagtcaaaagttgcataggtaccaaattcactagtcaatttggggatttagttgctataagtaccctctactccatgggcaagatttttaaatttcaaatttgtctttgttcttttatctttattctaagttgtgaaaattcattgcatgaggctcccacctacttggggttggggaagatggatgtacacaaccttaccctaaataaataggcccaattcttttagt

SEQ ID NO: 175143 - DNA, 175 bp, Glycine max
taatcacgcccaccccccccaaacacaagggatgggcctaggcgtatggcgagtcgactaccgagaactgggccagcttgctaaaaggccagtccacctgaaatcgacatccccacacaaaacactgagctggccatgtagaagaaactccattaccccagaacattagccaccc

SEQ ID NO: 175144 - DNA, 344 bp, Glycine max
  unsure (1)..(344): unsure at all n locations
agctntaacctcatcgtctctcacagtctttatattttgtagccaatccagnccttgggttcggactctcagccacttatgatagccgccgatgatcccattactgcttcccctaagctctctgtcctttcttcacgccgcatcccatgccttgcgaactccttggagtaccctagcgttgtggtcactgaaacctcgtgcgatgaaaggcgtgatgctttcgtctgatggcactcctctcatgggacatccttcgcatcctgattcttccttccttctagcgagggaaccatttaacaaacgcccctccatgctagccaagagttggtcccaattcgtctttc

SEQ ID NO: 175145 - DNA, 421 bp, Glycine max
  unsure (1)..(421): unsure at all n locations
atcaatagacctccaatctttaatggagagggttaccactactggaaaacccgaatgcaaatttttatcgaggcaatagatctaaatatctgggaagccatagaaatagggccttatatacccaccacagtagaaagagtttcaatagatggtagttcatcaagtgaaagcataaccatagaanaacctagagatagatggtctgaagaggatagaaaacgagtacaatacaacctaaaagccaaaaacataataacatctgccctaggaatggatgaatatttcagagtttcaaattgcaagagtgctaaggaaatgtgggacactcttcgattaacacatgaaggaactacagatgttanaagatctacgatanatgcactaactcatgagtatgaatcatntagaatgaatacaaatg

SEQ ID NO: 175146 - DNA, 303 bp, Glycine max
atattcttcttaacttgtatgctgattttatatacactattttctttgcctgcacagcacaaacatggggaacaactgtaacctttatgattacagaacgatgggttgtaacagttgcatcagttggtgattcccgttgcatactggagccttctgaaggtggaacttattacttgtcagcagaccatctactagagagcaatgaagaggagtaagtagctactggaatctttcgtttgaacaaaactggatggaattgctcctttcctttgcagccagactctccctttatatttctgatct

SEQ ID NO: 175147 - DNA, 287 bp, Glycine max
tcgtggtgagcctaccgtaatgctgaggctttaaatttgtaagtctagctatgatctctccatgttcacggttatcctttatcttttggattaggtactcgcattctgcaagcacatgtcactcatggcttatacatgtgatattctcttttctttaaaatttaacatgaattactaattctattgtgattaatttgatagcttacatgatcgacatctcgggtacagaagaattcgggttatttcacactttgggctcttttaccatattaataaacaaagagaga

SEQ ID NO: 175148 - DNA, 413 bp, Glycine max
  unsure (1)..(413): unsure at all n locations
agctntatgggaaagagaagatgaaaggttattattatttttttatgaagaaagcttctcgcgtgctatgctgctttgcagctccgttgaggttcccatggcgctgcaatcggcaacggagctgggcgtatttgacgtgttgcaagaagcgggggctaagctctctgcgaaagagataacatccaagctttcctgcgacaacaaccctgaagcagactcaatgctggatcgccttctagcccttatagcctctcactccattcttaactgtgctctcattctcgaccaccaaaacctgnggacctttcagaggctctacaccatcactcccgtcgccagattctttgctcgacattctgatggcgtttccttgggacccttgatggccttgctataagacacgatcttcctac

SEQ ID NO: 175149 - DNA, 465 bp, Glycine max
  unsure (1)..(465): unsure at all n locations
atctatcgagacaccatcttgaatgtttcatgagtttttacttttctgtgtttgaactatgctacttctttctctctttttttcctgttatgaatcgtattgaggggaacaataattgccattttatcccaaccatccaatcgtcatcgttgtcggcaactttggcccttcaccaaaactatatataacggacaataatataaataagaaattactttaatttcggccctgatcgatccacaatcgcgaaaacaaacccaccacctagtacttgagtaatctatgtttcttgcagatgtattttctttggattagatgtgttgctacaccaatttatttattcattcatctttattattgtaattaattagaccgaatgcattntatgtatggcaacgacttgtgtttctgacagcagtaaagtagcattacttatcactgctaactngctactctatagctaac

SEQ ID NO: 175150 - DNA, 433 bp, Glycine max
  unsure (1)..(433): unsure at all n locations
tgcaagctntgactngagtcataagtgtatatattatgtgaccatggcctgagtttcaactaacaatcaatcatcaatcatctttgaatcatctatctttcagtctttacaacatcatctgtcaacatctttcaatcaatctttcaatatcttttctatagaatgttctaattcatttctcttcatctttctaaaagctttttatcagcactttctcttccaagaaaagttctttgttcaaaaacttgcgctattcatctttttcattctcttctccctttgccaaaagaacgaaagactaactgcttgaattcttttgagtttctcttctcccttacaaaagattcaaaggactaaccgcctgagaattctttgattcttccttcccttaagcaaagattcaaggactacctctgagaatctttgttccctt

SEQ ID NO: 175151 - DNA, 355 bp, Glycine max
  unsure (1)..(355): unsure at all n locations
gttgtactatcacgaggaatcggggtacaagaacttaagtgtgtatgtgtgtcttaatgcggntctggttgagtttagtcttacaagaggaatctgcggatgaggcttgattagaattangcaaggttatcatgaggaatcagggtctagcagtccaggagacaacataggaatacatgagcattgttagatagagaacatccattttagcatcatgaacctattaggaagaccaacgcgttctctactttgttttacancaacattctcttgcatgattntctntcttttttgcatagatagttacatacctattcacaaccacaatgatcttttcatactagacacctattta

SEQ ID NO: 175152 - DNA, 206 bp, Glycine max
cgacgccacgatggaaatcacaacatatatagggattttgctgcggattgttaggagaaactcgctgttgcgttcgatgttccaaactcaaccggcggcggacggaaatcaaaagagaaagtgatggttctggttcaaaataaatgatggatctgacaaaggaagaagcagatcaccacgatctgttgtagacctaagatgcatac

SEQ ID NO: 175153 - DNA, 435 bp, Glycine max
agcttctctagtagagcttctattagaatttcttatccagaagctctattatgaaaagctcttgttagactagttaattaggtgtttggatgatacttatttaagtgcttcccttgaagagcttataaaagtagtgcttggataatttacaaaagtgcttttatattcttaaaattaataaaaaggtcataaaaattaaatgaaatatttaaattaaatacaattaaatgtaataattttttcccttttattaatgaaaatatttctattctaactatttatttatttccttatatattttctttaattattttggaaaagtattataattaaaaaaggttcaattagattccataatttctaaaaaagggtcaattaggtcttaaaaggttcaattacaaaagtgcctgttactattaaaaggttcaactatac

SEQ ID NO: 175154 - DNA, 358 bp, Glycine max
  unsure (1)..(358): unsure at all n locations
actaagcttacaagcaagcttccatacanaatacctgcttctcttgctagcctggttctgggccagcttagcttaaataatgcatcttgattacagaggggtaggcacttagcagttgatggatcgcttaacgctactntggccgcaagganatgggcttagctggcatgagtagcacttagctcaatgaaccctaatttaggccgcatcaaaatgggcttagcggcgacgtctcgcgcttagccagagaatacaatgcactaagcgagcaggccatcgcttagcccaattcaaatcgaattgaaatgggcttagctcagccttggtcagcttagcagaccaaatcagcctgagatgc

SEQ ID NO: 175155 - DNA, 393 bp, Glycine max
  unsure (1)..(393): unsure at all n locations
accgagctgcagctgaattacggccggtatacttgttacaagacganaacaaaaaaatattacattactagggtatatattataatttttatactgcatgaatttacattttttttagggaattgactaacaaattaaaagtgttttttaatgcatccctaagataatttctagtaaaaaaaatctattatcgatgccttaattaaagtatgcaaggctcaaaacaaaataactttaatggtcataattttgcgtggttctatatgaactaaacagatataaaataatttaccatataaataaatataaagctacacttaactaaacagtgcttttattattcgtatgtaaagtgatcgaataatataaatagttgtaaaattatgataaaac

SEQ ID NO: 175156 - DNA, 445 bp, Glycine max
  unsure (1)..(445): unsure at all n locations
actaagcttagccagttatataagctttggatggttagcatatatgcctttgttattaaaaaggatcccacagttatattatatgaagagtctgattagctgttttataattacaagtagcaagcatgagttatgtgaaaaacgtatggttgccatttgatttctaaggttgttgtcggtgaatatttatttaatacaaaatttaaatgtaaaattaatttaatatatattgtacggaacatttccgagaatctcccaggcaggatgacacgccgatgaaggggacgtgccaccactgaaactctcaccgcctgctattattgtattcacactattatactatgtcactgcctcacaaccaacaanaaataatgacaagttaacgttagttcataaatataatgagaaatatatttatacggtgttgataaaaatacaaaaatgt

SEQ ID NO: 175157 - DNA, 443 bp, Glycine max
  unsure (1)..(443): unsure at all n locations
agctttatcttgtaaaactaaatgttgttttctctngaaatggccccgaggaagcttgtctcaaagagatccaggaaggataaagtggctaaaggaaccagttccgcccccgaatatgacagccaccgttttaggagcgctgagcaccagcagtgcttcgaggccatcaaagaatggtcatttctccgggagcgacgcgtccagctcagagacgacgagtatatcgacttccaggaggagatagttcgccggcagtgggcatcactggttacccccatggccaagttcgacccagacatagtcctcgaattttatgccaatgcttggcctacagaggagggcgtgcgagatatgcgatcctgggtgaggggtaagtggatcccgttcgatgcggatgctctcagccagttcctgcgataccctttagtgctggaggagggccc

SEQ ID NO: 175158 - DNA, 470 bp, Glycine max
  unsure (1)..(470): unsure at all n locations
actaagctataaaattgagaaggacttaaaagtcttttnatttatacaaacaacttcaaggaaaacatgaagaaaagatagataattcttcagaaatttccactcaatcatgtgatgactntgaaagtctaaagttaaagacaataaagcttcactttaaaaatgaggaaatttgtaaagaaagatctattctattggaagaccttcaaaagttgaaaaaatcaataggaaggtttaaaaaatgagtatatcacactcaattaacttcatgtttgcttaaatgaggaaaggtgtaatctattgaaagaatgtttacgagtccataagaattatgaaaacttggaggcaagtaaacataacttatatgttgaatgtgaaggatgtanganaagcctggaattctgaaatgataaactnggatagtatgagcctctccaaaactacctcaagatgtngtatacttcatcaag

SEQ ID NO: 175159 - DNA, 405 bp, Glycine max
  unsure (1)..(405): unsure at all n locations
agcttatgcacggattatgtatttatgattttgagatgcccgaagaaacaccattttctagttaaccatgcattaggtaccatgttcaattatttttttaagtgaaacgggtttatgatcccaacatggatggctcgtggtgcctaacacatgaaactaagaatgtagtgtgaagtttcacgctttccccttttttgtttttgttttgtagaggaaaacgcaaggatgaacaaacatgaaaacaaatggtatgctaatttgcagatcaaatagtttgttgaacgcatatgcttgatgatgccatgactcatgcgaaacgtgacgctggaatatgataacngacaaatgcangatatgtccattatgatgtatgaagagaatgttatgcgatgcatgatattaatg

SEQ ID NO: 175160 - DNA, 440 bp, Glycine max
atcctgactcaccataaaccttgacccatggttataatgtcaatccttaccctcggaagcaaaaaagaatagaatggaaatttccaatcaaaaaagaatagaaggaaaatttccaatgaaagcaaaaaaagaaaagaaggaaaattccccaatcaaagagtgggagaaagcaaaaagaaaagaaaggaaattcccaatcaaagaatgggagaaagtaaaaaaggaagaagaagaaggagagaaagctcctgatcagggatcgaaggaaaaacagaagaaatgtgcagagaggtctttagactggacaatatctgaacaatacagaattgtcaccaaatgaacaaaatgaaggaaaggaaaccacgacctaaaatggtcttctccctttgattaccaaccaaaatcccgtgcgctagcgactttttctccccgcactaaac

SEQ ID NO: 175161 - DNA, 323 bp, Glycine max
atggcccacaccaacatacgactgaggattgacaagattccatttaattatcttttttttcagacaactttctttatttacttaattattttactgttttttttttggatttgaacagtggtttaatctagcattttcatgatattttttttcagtaaatggtgtttgtcttgatatcttgttttgaactgaattgattgcatgacatgagtgacttgcgctgtgaaatcataaaccttgaacaagcttgctttatgtagaagagatagagtgtggaaattaggggcgtgggtgaaaatgtattttgcatgacagggaaatag

SEQ ID NO: 175162 - DNA, 347 bp, Glycine max
agcttgcttgtgggggcttctatggaggctggatctttgagcttcaatgaggtcctttaatgctgattttccaccatggagatgcagcggaagacaaaggagaagaggtgagaggaggctccatccactagggaataagccatggaagaaggagcttcaccaccaagatgagccttggataagaagcttggaaggatgcttcaatggaggaaaagatagagggagagaaagagagaggggggagcacgaaattgaaggaataaaagagggagagaagtggaactctgaagtatgtctcacaagactctcatttatcaaagttgcaacaagtgttacacatgcttcta

SEQ ID NO: 175163 - DNA, 363 bp, Glycine max
  unsure (1)..(363): unsure at all n locations
cttcgctatggtagggtatttcatgattactctggtgctttcttaagaggatatgttttatatgtgggtatctttctttcttttcagctgaactggagggagttgttttggctatttctatagctcattccaaaggttggggcaagctttggctagaggtggattctcttttagtcctcaaggctttcaatgttatcagtgtggctccttaggatttaagaaatgtttggatgaatactntattctattgtggcccaaatggagtttcgtgtctcccatattttccgagatagtaatgtatgcgctgatcattnggctaactatggtgtagaattactctattatgttggaagaataaacttt

SEQ ID NO: 175164 - DNA, 362 bp, Glycine max
  unsure (1)..(362): unsure at all n locations
agcttggctttggtttagacatgtntgatacatgatttgggacttgtaggatctgatttgagcaagattggatgaggggaagtgtgattttcgaaatctgcacttatgcagatttttgctgtcaaaataggtgcagcaagattttagcttggtgcataaaatgcttgtgtgtggttggctgtggaaagtctagtgcagaacgagttctggatgtttgctaatatatcccaacggtcaaaatgcaggcttatacactatagacttccagtaaaattttggagtcgatccaacggttaacgaattggatcgaaggaattgttactggggtctttaagtgagaaaagctgtgattttggttggag

SEQ ID NO: 175165 - DNA, 433 bp, Glycine max
ctatcttttcattggtggtatttgatctccttttggttctctaaatagtgttgatgtgctcaaatatgtggggcaattttgatttgatttcttgcttggttggcttgaattgcgggtgtgtatgagatggccctaggcctataatgtattttgaagtaatggggcatgccacattgtccccgttctcttgctattgatgcctaaacgcgcgcccaccaagtgttcggtgaaatgcctcaatggcattagcgcgtgatttttgtatggaaacaacctatggggcaatttggtttgcacatattttctattttttggacatgcattcagtttcggaagggctagagtaattgccccacatatatcctaagcctatgaaccaaagtatttatgcaagagaatacaagaatgggtgcatatcgggtgaagctaccct

SEQ ID NO: 175166 - DNA, 443 bp, Glycine max
  unsure (1)..(443): unsure at all n locations
agcttcaanggaggctagattattagctttttttttttctttattggcgacttacaaccatggagatgtaacagaagataaaagacaagacgtgacacgaggagccatccattagggaatatgccatggaaggaggagcttcaccaccaaaagagtgccatggataagaagcttataaaggaagcttcaatggaggaagagaatgatctatagagagagagagaggaatggcacgaaattgaacgagaaaaagagggagagaaattgaactttgaagagtgtctcacaagatttacattcatcaaagttatgacgagtgttacacgagtttctatttatagcctaggtcattaactaaatgaatagctccttgagaagctcccttgtgaaactttctttagaaaattccttgagaagctagagcttaactacacacacgcctc

SEQ ID NO: 175167 - DNA, 314 bp, Glycine max
  unsure (1)..(314): unsure at all n locations
tcttcttccgcgctnntgaaattggttcccttctcctcttcgtgtattggcatcctccattgactagctntgttcgtttcttctgccatctaggttagtgttctaacctcgtgtcttcatttggaagtgttaatggccgtaggatagacgacatgagtgatgtgtggtggctgaggttgaagacgaaggttcttccgcgagaagaaccttcttccgcgcatgtgggaggggcagttggatattgaagcggaagaaggagttcttctgcgggaatctgcggaagaaaggggagaaggttcttccgcgcgttctgg

SEQ ID NO: 175168 - DNA, 444 bp, Glycine max
  unsure (1)..(444): unsure at all n locations
agctcgcaattggcttggatcaacaatatttatatttttgtttttataaacaaancggccatttaattaaagatagtagttcatacgttgatggttgtcggataagtaatagttacattatattatttcaattctaaatataatatatgaaacagcgctgaataaaaaacataatatctataattttgccatatcaaaaattaaatctcacttataatcataactcacaatatgaaagtaaatcaaatgccatattattacagtttaacatcactaacattctgctgtaaaaaaaatcactaacatttatcaccgactgcaattaaaaattacataaatatattaagtcaaaattatagtctccgccatcataatattgactccntttataactaatttattttctcactaaccgattcaatcattttgccagctatataaaca

SEQ ID NO: 175169 - DNA, 457 bp, Glycine max
  unsure (1)..(457): unsure at all n locations
aaccacgctggtgatgagagtaccactgggttttattatattcctttgttactgangangctgatgaaccagaggaggcatctcccacgtcaactgacccgagaaagataactcagcaacatgttgcaactgcagaatccatctcggggtcgaaagaccttctagtgagcagaaggggctgctacacctcaaaggtttcctctaattgcgccacgtggtcttatgttcttgcagtttctgcaactgtattggactcagcaatactccttgttaatatatgggcatatgtcagatcttaaactgcttacatgcagtataagatcattgacttgttaaggatgcgtgtaggattgactcgttagagacttgttgattacaactgtcgcgtataatatatatgtgcatatgtatgtagcagtcattgcagaatatggtagcatagctgtctagtctgata

SEQ ID NO: 175170 - DNA, 378 bp, Glycine max
  unsure (1)..(378): unsure at all n locations
ggaacttaagcacctgagctgcagcttggagaagattgganattggatcttatcctggcctttatgncttagatcttaaggacattcttgattgcaaatttaatttttttggtatcaattcacataccaatttcattctttgtaaaaatcctcatatttggcattctagatttggtcatatctcagacaaagttttcaaacatttgaataataaaattggtctacacctttctctaaatttctcttcttctaattgttctgtttgtcctcttgctaaatttagaagattatattttcctaactctaaccatctatctgaattaccatttaacttaattcactgtgatatatggggtccgtatgctcactctacatatg

SEQ ID NO: 175171 - DNA, 387 bp, Glycine max
  unsure (1)..(387): unsure at all n locations
catattntattttctgttatttatgaaattctacatcttgtatcagtgattgttaatgtgatgggggtaaatttgagctttgggaattttcaagaatttaacaaaatttgcagtatagcagatttttctactgtattagcagttcagtttcctgtaattttcaacagtgtttctagtgcaaaaaaacacactntgcttatgttgtcaagtggtgttaagagacaattgaatcaaatcaacaaatgatgttcaagcctattgaaacagcaaaggtctatggaaaaacttgccatgacttatctttnttgtgatcaggtggcctatgtgtttcactacatagtatgaataggatctttaggtccaatcgaccttttcttcngaatcaaa

SEQ ID NO: 175172 - DNA, 425 bp, Glycine max
  unsure (1)..(425): unsure at all n locations
agctnttgcatatttaggaagttctagagttagaaatgtccaagntccagagagttcaaagagattttgctgtgtgaagacctgcagagacgcgagttcgaagcgaaagctattctgagagcttgagatgattttgtgagtgattgtgagattctagaggtgaaggagacatcctcaccacttgtgtttttgcagtctttcatcttgttcttacctttgttgaaaagaaggtttccggactatggaaagctaaatcctctgttggatcttccttggacgtacttgatgtaaatatatttctatctatgtaatgatgtnttgtgtgttctcagtgctatctgctattcattccagtgtgcttttaccttgatcacgtagatgcatgctttgttagggtcatttaacagtgggaactggtctgattc

SEQ ID NO: 175173 - DNA, 446 bp, Glycine max
  unsure (1)..(446): unsure at all n locations
actactaaaaattcattggtttttctatgatttttaagtttagattctaagagagcacaagtcctagactaatcccaatgatcttttcttgttttgtacaaatagccttcccactattcccttttcttaagttgttttcgacctttttgtaacagcacaacttattttctttntcttttttttaaacatacaacttatttgttgtttgtgctgatgcttaacctttttgttttcattctaattgacttttcacccccaaatttagagtaaatttgccttgaaccatatgctctcctagaatctaaacaaggtattaggagataatcatntaaagttcagggttcaattcatgacaaatcaataagctntatacaagggagcaacagatacaaatatcattcaggtaagctatttggtcaaagagcttgtgctatacaatcatggct

SEQ ID NO: 175174 - DNA, 419 bp, Glycine max
  unsure (1)..(419): unsure at all n locations
agcttacccattctgtnttaggttttttattatgatgcttgngngctgaaatggctgatggagaactgatagagatgaagggtagagttaacctagggttaaaaagtgagaatgtagtgatatgagtggaaaagtgtgatgctttgaggatttgaaaagccaaatctggatttagtggtaattggaggttagagtgaggtaatcctagtttgaaatgtcatttacgactgtgagaaagcttgggttgtgcaaaggaggaaaatgagtgaccaaagtgaagacaagagccatttctagggtaaattgggtgttgaggagtcaaattttgattcggtggcagtttgagcaagtttagattaaggttatagacttgtgtgaggtgagagttcgcttcaaatttaccccattcttattttcac

SEQ ID NO: 175175 - DNA, 373 bp, Glycine max
agtgtcaagggaaatcgtcttgtttcaatggtatattgtcagcgccgacggtggtaacctcgactagtgataagagttgtacgtttgtgaggcatgtcaagctcccctagcttggacaactgctggttaagcttcttctggcaagttgtctggcgtggaaatgcttttgatcttgctagctatattagacgtgtcacgcggatgatgtccttatatatgacgattcaacccttttctgatcattggaggatgcattgaacacaaatgtttccatttgtcttttgctacacgcgagagcaacacacacgtattactcttgcatatgtatcactcatggagggggtgtgtactgaagatgcaatacacgggtgag

SEQ ID NO: 175176 - DNA, 339 bp, Glycine max
ttggaagtgacatccttggccacagtgggtttgactgggatggcactaaacacatgatcacagttgaaaatgaaaatgcttggaatgaatacttgattgccagtattctttaatatattgttatttgctattcaaaggagattggatttgactttttctttttttttccagtcgtacaaataggcttaaccgtttcaattcatggcgcttcagaactgggatgacatagtgtggattggaaaaaaacaaagaataccagcttctgtgataaaatgggcaactctcttgacagattgctataacaaatagatgggaaagtcgatgatgaagatattccag

SEQ ID NO: 175177 - DNA, 409 bp, Glycine max
gccttcctcgattgtcagattgggaatgcctctaacagcacctttgtcaccgattgtcttcatgcctattaagtgcagatgtccaaatctgtgatgccatattctgacttcatcttctttggagaatagacatgtggatgagtaactggtttcttgaggtgtccataggtaacagctgtcctttgatctgctgccctacattagaacttcactcttctcatttgtcaccaagcattctgactttgtgaagcttacattgaatacttcatcacacagctgactgatgctgatcaagtttgcagtcagtcccttcaccagcagtactgtgtccagactatgaagtccatcatggactagctttcccattccagtgatcttttctttagaaccatctccacatgtcacatac

SEQ ID NO: 175178 - DNA, 210 bp, Glycine max
gagagcacgaacacaaagttatttctgcaaaaacacgaccgcgaacaaaccacccgccagagcacagcataaacaaagacgaaaagaacagaagaagaccccaaacaacaaccaacagccccggggaccgggaaagaaagccgacccccaaaaagcacgaaagcaaaaggagcaacaaaaagaaaacgcgaggcaaaccaaacggccaca

SEQ ID NO: 175179 - DNA, 263 bp, Glycine max
aatttaaatacatattgagaggcctggaggggagcctaatgatttaggcggcgaaactcacacacagacccggatgggatacacattgcggcaaaaaagtctaatgatactgcggaaagagatgataaaaggcagacccacatggtcatttgaacgagagatctatagaatgaagttgtgatctctacgctgcgtagaagcaatgcgtgtaatagaaagagttcaacggtattctgagattcaggggcattatctcaacaaac

SEQ ID NO: 175180 - DNA, 297 bp, Glycine max
catctctctcacaaaaaactttttctttctttattgctgttaaagtacacggatcatattcatggacatatacattcttttgttcttcacttttgtgagcttagaataggaaagattattatcttagctagggtcatacttgcactcactcttacccttctttcttttgaccatcaaacatgtgtcgtgcataagctcattcacaccaaactgattcagaaacaatacccatcggttattatgaaacaatgagcatatttcttttacagacatgacccttttagtgactataaaatt

SEQ ID NO: 175181 - DNA, 429 bp, Glycine max
  unsure (1)..(429): unsure at all n locations
agcttgacgtcggacttgatccatccgtttttctaactctcgcaagctggctacttctaggctcttgattttgacattatagaaccttttcttaaaaaagggcgcttggttcgaccccttgtttactagaatgaaaaaactctgctgattaatacctcgacaccctatcatagagtaaatatgatgaatgcatgagggaatgtttatgctatgcatgacaaaatgcgtctaccgtcggacacaagagtccaaaagaccaccccttcttacccataatgcattgngtatcgtggttcatttgcaaacattaccatgatgcccaatgcaaggcaattaaaaaggtgacgcggacctttcgacttcatgtgacaaagatgaagagatannatgtatgcataagcgatgacatggcatgagcatgcatgcgtg

SEQ ID NO: 175182 - DNA, 354 bp, Glycine max
  unsure (1)..(354): unsure at all n locations
ctctcaatgagctggngaagaagaatatggcatttatctgggttgaaaaacaagagcaagcctttgcttttctcaaagaaaagcttactaaggcacttgttctagctcttcttgatttttctaaaacttttgagctagaatgtgatgcctctagagtgagagttggagctgtattgttacaaggtggacaccctattgcttattttagtgaaaaactntatagtgccacccccaactaccccacctatgataaagagctttatgccttaataagagccctccaaacttgggaacattaccttgtttccaaagaaattgtcattcatagtgatcatcaatcacttaagtacatta

SEQ ID NO: 175183 - DNA, 415 bp, Glycine max
ctgcagcttgaggcaaactggatgcattggtttacttgttaaccctgctggccttgaatcagaaatctgtacctgttgcaagggtttgtgggttgtgctcctctgctgaccaccatacaggcctttgcccttccatgcaacaacctggagcaatcgagtagcctgaagcttatgctgcaaatatttacaatagacctccccaacctcagcagcaaaatcaaccacagcagaacaattatgacctctcgagcaacagatacaaccctggacggaggaatcaccctaacctcagatggtccagccctcagcaacaatagcaacctgctccttccttacaaaatgctgctggcccaagcagaccatacattcctccaccaatccaacaacagcaacaaccccagaaacagccaacagt

SEQ ID NO: 175184 - DNA, 407 bp, Glycine max
  unsure (1)..(407): unsure at all n locations
aaagaagtcattntgcggccttgagatgagtaatggttggagtctccatgtatcaattgataagtttaatagcatatagaatgtctagtcttgtgcacgtcaaatatcacaaactacacaccaaactcttgaaatttgtagcatccaccttttttgcttcattaaactttgataactgcattttgcactccactgatgttccaattggcttccagctatccatcttgaatttctcgagcatctcctttgcatagttntgttgcgaaatgaagattccatcttccttttactttaccttaatgccaagatagtgtggcgtccctaaattaatgactgggttaatagtaataatttaaataacanaaaccatggtaaatnnttttttcttcttttcttttcatttcttc

SEQ ID NO: 175185 - DNA, 429 bp, Glycine max
agtcacctgcggcatcaagctaaatgtatatatcctaaaggataaattattctattccctcatttcgcccaaaataattatctcatttgacaaaaaaaaatcttaaaataaatgtttcatttaactttttaatataatattaattatttttttctaaaatacttacaagaactagggatttattatgaacatatggaggtgatgaagagcttgttgtaaagagttgtactgacgctaccatccaaaacaatagggatgatacccaactacagtcaagatttgtgttttgccttcgagaatgttgttgacccaattatggagcaccttggtagaagcataatgctcacactagggttatgttaaaacaaaattaattgaaaaattaatttattgaatgataagtattttgtaaaattaattgtaaagtag

SEQ ID NO: 175186 - DNA, 367 bp, Glycine max
  unsure (1)..(367): unsure at all n locations
taatggtggacctaaagttaaatatctttatctgattgcttctcgataggtttgggcctgcatgcgcttaacaacatgagaagagtttgtgacttgaacaaacttgagtgcaacgtatgctattattatagagattgtttcgatgtattccagataacaaagcctgagtgtgcatgggtcaataatgagctaatattttactagaatatgacagtactatgtctgcggcatggacattgttgttaaatggtggcaccttggccaccatgaccaaatggtgtcgcggatcttatgacaaatgccatgggcaatttgtgaagggaggcctgctatggcggcaccatangccacaatggcgtgtctatat

SEQ ID NO: 175187 - DNA, 239 bp, Glycine max
ggcaattatagatgaacattttacacaactctactattgctacaaacagtcaatggcataagacccttttttatatcaaacaattaagaccgctgttaatatcttacacgctcaactatagaaatatactatcattgctacgtgtgttgagttgtgaatgcattatacataagcgcgcccctatgagatgcaagaactaactcacgctccatggttcaactagtctgaccacatccgcg

SEQ ID NO: 175188 - DNA, 420 bp, Glycine max
  unsure (1)..(420): unsure at all n locations
tttttaatatcttgtttatgtaaaaatcgggtcttaccattaaaaatcatgtcagtcatttctgatggtaaaaatgaataaaaacgagtttttaaccagaacttcctctagacacaagttaaagaatcaattatagaaattcttattagaaaccatattgcgtacatcttggaagatatagggaaatacattctttaatagttcattttaatttcttaactaatttcctcatgacattagcgtatcattttgtcattgttttaaagggcattaactctagaatgctattggtgaaaatgacatatggattgaaaattacagtgaaagtgtattaatgataanttttaatccagtaaaagacgatcaaatcaatgaaagctcttctctgtaatgtacatattacatatgtaactaataaca

SEQ ID NO: 175189 - DNA, 434 bp, Glycine max
  unsure (1)..(434): unsure at all n locations
aagcttatgaacactaatgtaaaaatagttttcttttttgaaacacgtaaataatatattgtttgtattacaattttatgtatattcgatctctttgttattttctgttgattttatcttcctttgggtattgtttgtaagtctctaacgtgctgtttaacttgaatgcatagatctaaacatgctgacgtaactttgagaaaacaaatagaatttagttaaaaaattacatattcgtttttagttaaaattattttttatgtatgcgttgaaatgacttgntatactcatttttgttttaaaaaaatatttattttgaacaaaataactaaaaatatttaatataaattaaatcttaaataatctttgtcacatgaaaagagatgttttgataaattatttatcccattatattntagaatatataaatatta

SEQ ID NO: 175190 - DNA, 404 bp, Glycine max
  unsure (1)..(404): unsure at all n locations
ctgtgtggtggtcggcagaggagcataaaccatagagtctggcgacaggtgcagattttttattcatggccagttgggttaccaggttaaccaaggcatctagtttaccttcaagcttcttattcttgactgatgaagatgaattcgtggttacttcatgcactcttctaatgaaaatagcatcatttctggcactaaattgttgggagttggaagccatcttctcaattaaatttttggcttcagcaggggtcatgtctctaagggctccaccactggcagcatctatcatacttctctccatgttactgagtccttcataaaaatattggagaagaagctgctcanatatcttgtggtganggccactgggcacagtttttaaatctcttccagtatcatat

SEQ ID NO: 175191 - DNA, 387 bp, Glycine max
  unsure (1)..(387): unsure at all n locations
agcttaacaagttntttttatagtttggctttggttttatctaaaaaaagctttttaaaaagtttgagcttgacctttatagtaaataagccaagccttaaatagactaagccataagctcttgacaaacggctcgactcattttcatctctaatgataataaatgcattatggctgtctatttgtcttttatatttctagtaataattattatttgatggataagtcaatagttagcaatatcatatgggatgatgaagtcgtttaaagtgtttacaacagaacaacattatctgtaaatttgataacacaaaattattaggattaataaaaaatattatctgtgcaagtatatagagtattgtatttatgaattatttgttccat

SEQ ID NO: 175192 - DNA, 468 bp, Glycine max
acaatatcctcggccttcgattaattgtctttgagtttgttggccatgatcaacaaagtactttcgacacctactatatgttgacttaaccaacgctgttattggtatgctgcgacaatctttcaacaccttattcacacattctgagaggttggttgtcatgtgaccatatcttcatccaaatgtatcgtaagccatgctccatttttcctttgaaatgctatcaatccatgttactatggctggactcaattgacgaaatttttctaagttttgatcaaacacatgcttgcaaggagtgtacgctgcgacaatctttcaacaccttattcacacattctgagaggttggttgtcatgtgaccatatcttcatccaaatgtatcgtaagccatgcctccattttcctttgaaatgctatcaatccatgttactatggctggactcaatttgacgaaattttctaagg

SEQ ID NO: 175193 - DNA, 382 bp, Glycine max
  unsure (1)..(382): unsure at all n locations
agcttgcctcaaagaggtccattaaggatttagcggccgaaggaactagttccgctcccgagtatgacagtcaccgctttaggagcgcggtacaccagcagcgcttcgaggccatcaagggatggtcatttctccaggagcgacgcgtccagctcagggatgacgagtatactgatttccaggaggagataggtcgccggcggtgggcatcactagttacccccatggccaagtttgatccagacatagtcctcgaattttatgctaatgcttggccaacagaggagggcatgcgtgatataaagtcctgngtgaggggtcagtggatcccgtttgatgcagatgctattggccaactcctangatatccgttagtgctgga

SEQ ID NO: 175194 - DNA, 421 bp, Glycine max
  unsure (1)..(421): unsure at all n locations
cctttcaccaacaatagtggcattactttcgaatagggcagtgagtttcttttccttttgccactctaactacattgatcaatgtctattgcaactaaagatgcaaggctctgtgaagcanggtttggatttacttttgttntgccttggttcagcattcatttcccttccatcttctcatgtcatatgcacaaactatacataaacatagacgaaacataattgataagcccaaaatttggagttacacgggtctcatgaatagctgatgattatcttcaaactcaattttatttgtcttataatcctctctaagatacagtctntacaagctacctnngatgtcattaccactagttnggaaaattcttggtctccttagtccttatttctttacangtgctatcactttctttgtttg

SEQ ID NO: 175195 - DNA, 446 bp, Glycine max
  unsure (1)..(446): unsure at all n locations
tgcaagcttgatgaaaaattntttaatcctttttttctctcttctcaaacttaaaacattacttaaaggatttgattttaatttttcttgaactaacatgttcttaataatggtcactttacatgagtgtaaagaaaatgaggtaggagagaaaattaattcaaaaatttgaatagaaaaaaaaaactaaaacatcaaaattgtagtcttttatttgatcaaacaaaaaataattgaatacatcattgctcatgtttctttttctttctatcttctttcctttgcattcgacttattacccatttcaaagatcaaagtgaagaataaaagacagtcgcttgtgactattctagttttaaagtcattctaccaacataggaacttaggaagatgtacctatcctaataatgatgcatgtttgttggtatcttccctggagtatactt

SEQ ID NO: 175196 - DNA, 375 bp, Glycine max
  unsure (1)..(375): unsure at all n locations
atcctatatagntcttcgactcttggttgacttagactntgtataaataccataatgatataccgaaatgattcacagaaatcaaaaccatactattccaacgagttctcattgcatttctttccccaaaaatcatggctgagtcacttcttttcagctntgcagaatcatattaatagggaagctcgcttctcctgctggtgaagaagcttctctagcgtggggtgtgtatgatgatctacaacagatgaaagatactatggcactgatcgaagctgtgctattagatgctgagcanaanagatcgcagaacaatgcgttgaaggaatggctgagatatacaaagcatgtgttcagcgatgccgaagacatagt

SEQ ID NO: 175197 - DNA, 406 bp, Glycine max
ctagctatgactttgggctcagtgtacattttcgctcagagttttttttctttttttcttttttgccccaagaaattaaagtaatgaaatcacttttttttatgaataagtaatgaaatcacttaattatatacattcggacaaatagcaatattcaatttgttcgtactgtgttaatatagtaatgatattaaccgaaaaggagcgtgatcatattcgaacgtatacaatttcttaaatatctctatacctagctataacccaagtttatattctatcatgttcattcatgtataagtttaaaatatcaaatatgttatgtaataaacaacaaaataaaacacatggtattaacaaatatagaaaataaaatcaaaatatatcttcagtcattgtcatgaaaggg

SEQ ID NO: 175198 - DNA, 191 bp, Glycine max
  unsure (1)..(191): unsure at all n locations
aattgagtctaacacatttctntaaaagctcttaaaatgatcagcttattgtttataacaaaaggaaaacaagttgcttaacagaaacactaagtgaaagagctttagaaaaaccttgattcttttctctttcttcctctgctccccctgactctctctttgctctctctctttccccactctattcctct

SEQ ID NO: 175199 - DNA, 166 bp, Glycine max
gaacaatccaaccagcggattcttcaacaatgaaagttgctgggtcagaagatggaccaaaagcacgtgctggtgcagaccttggtggaggagtggggctactggcttgcggtgcttgtgtggggacagggctatcccttggtggagaaccacttcctcttggttg

SEQ ID NO: 175200 - DNA, 447 bp, Glycine max
  unsure (1)..(447): unsure at all n locations
tctgatcatcatactttcttcgctgatggtgttaatttncagtttcgcatcataaaactcatcctgcatttcatcctcatattcagcactagaaatagaagcatcagacaatttggaatgaacaattgtggtgccattttcatggtggagtgcaggattggctgcaatgtattccttcagacctgaaacattatttagcaaaatatattaaatgcctctggaatggtattcactccaaataagaacttaatttgatcaagacttgagaatttcaacaaaagaggccaatttaaactacctagatgtagtacaatactaaaaatacttaacctgacacttggcacaatagtgcatatggaatgctcctctcannatttgagctcttggtgttcttccattgacaccaggatgaagagtgtatctctaaagtgtgggtcactaaacatc

SEQ ID NO: 175201 - DNA, 406 bp, Glycine max
agcttaaacattcaactgtgagtttctcgttatatttcgggactcaatcagacatccgagaaataagttattgccgtttgaattggctcacaggttcaaaattcaatttcgagcgtctcgctattttacgggactcaatcagacattcgagtaaaaagttattgtcgtttgaattggctcacaggttcaacatttaattttgagcgcctcgatatattaggggactaaatcagacatccgagtaaaaaggtattgtcatttgaattggctcacaggttaaacattcaatttcgagcgtgccgatatattacgtcactgaatcggacatccgagtaatacgttattgtcgtttgaataggcttagagcttcaacattaatttctagcgtgccgattattagagactc

SEQ ID NO: 175202 - DNA, 432 bp, Glycine max
acgacaataaccttttactttgatttctgattgagccccagaatatatcgagacgctcataattgattgctgaacctccgatccaattcggaggacaataactttctactcggatgtctgattgagtctccgaatgtatcgagacgctcgacattgaatgttcaacctatgagccaattcaaacgacaataactttttactcggatgtctgattgagtcccataatatatcgagacgctcgaaattgaatgttcaacctctgagccaaatcaaactgacaataactttttactcggatgactgattgaacaccgtaacatatcgagacgcttgagagtgagatgtgaacctatgagcctattcaaacgacaataactctttctcggatgtccgattgagtgccgtaatatatcgagacgctcgaaatcgatg

SEQ ID NO: 175203 - DNA, 347 bp, Glycine max
atgattgcgcgaatttgactgataattatgagtccttctatatttgtatctacgatattcctttgccaaaaagaaacgggaatcatcataacttacaaatctataataagttaacattgaaaaggaaagtgctgacacctttctttaaaaatatccttattatttttctctgattcttatctttatgaacatttaaacataaccattattaccttttagtttgcaatagatatttttcattaatgtcatgtgtgtgagagattacatataaatatgttaactagcgaattggtgaaaaataatcttgactctaaaatttatcggttgacacaagtgagtattaaatc

SEQ ID NO: 175204 - DNA, 424 bp, Glycine max
  unsure (1)..(424): unsure at all n locations
agctttagaagaatgtcatnttttgatgtttcttccgcaatgcgggttcagttctcattgtcatccatgcacctcaagagcatgctttaaattctgtccaagaaatatgggatctcgccactcaaccgtggttgttattcttatttttcactcttataataagatcatttccggtccataaagaggtgtttctcataatctctctttttttcttcagtatttctagtttatggggcggcggcagcctcggtagatatagccttgattntgcattatgaacctcgctacggacagaacaatatgctggtttacttgggaatttgcttcgtaattgcctacttttgtaccttttgttccgccatcactttggatggaagctcatattgggattgggattcacaactaactaactattcaggtttga

SEQ ID NO: 175205 - DNA, 372 bp, Glycine max
  unsure (1)..(372): unsure at all n locations
acaacaccactaccgataaattcaaaagtagatacactatctcctttgccaagttcctttagcatgtcagatatcaccccaatcaaatactcttctgtgttactagaattatcatccagaccaaatccagaagctntaactnttccctttgccttgcttctttggtcatcaacaccagtgatcaacttcgtgcatagatttttcagatgcaaaagatcatcactaacacccacttcaacagacccaggatcagaaggaaagtacttgtctntaanagctctagcaactgagctaacagaatgcacggatactagaatagttgtnggagtttctacagaacttggtggcanaccaacatttactggactggac

SEQ ID NO: 175206 - DNA, 392 bp, Glycine max
  unsure (1)..(392): unsure at all n locations
agctntgaaacacaaggaatcagaaggattcttgtttatctcttatgatgangaatcggaaacaataggaaagggggaatataagaatatatcaagaaaatccactagaatttcattgacttgtcgattggtaccgaaagttcacaaaaatttgcttaggttttgaaattatatattttgttccatccccatcccatctaaagttcaactgtaacctcttctgtgtttttttctctccttgggggctttcttacattatcatctttaggctatgtttagatatctaatgctgagtggaatgaaatgaattgagatggaatggaataaagttattattttattggttggagatttttgtttgatgtaattaaaaaaaatagaactagttcacc

SEQ ID NO: 175207 - DNA, 433 bp, Glycine max
  unsure (1)..(433): unsure at all n locations
actaagctaatgggttggcctaactcacatgatctatgggcttttttgtgtgggtcgtttggccctacaggntntttggtcctgggcagcgtgggtcatgattgtgaggtatgctaatcaatttttacagctctagtgggagactaaattaaaacatatataagtccttttattattataataaatagtaattaaataaaagttatagttgtactgaattaatttttttattgtatacctaaaaattatctttttctattcttgaacaattgttgttttatccatttcggtcataccacaaaattaacgtcattaacatgataacgacatgtgttgtatttactaataagatataacanaattaataaataatntttttgcttcaatatagattatgaagttgatcctcgagtcttttaatgaatttaatatc

SEQ ID NO: 175208 - DNA, 418 bp, Glycine max
  unsure (1)..(418): unsure at all n locations
agcgactgagctgcagcttgattttattatggcgacttattgttttataattcaccccaaagaatnggagctgcaacatcacttgaactcagagcaagtggaattcactatacttttgctccttgtgtggcagtaaggcatcataaccaacttctgaactagttatgctgataaattaacattaactacagctgtgtctgtgtattgctatgtggcatttcccttacaattaacacttatttgcatctaagttgtgcataattgatcaatctcacttgaaaggaaacaacacaatttaatttgctaaagaaataaagaaactcagaacatcaaatttctgtggtagatntctcatttgattgctactgtagaaagtgcggaggcgtcattttgtatactggaatactaataccttctt

SEQ ID NO: 175209 - DNA, 477 bp, Glycine max
  unsure (1)..(477): unsure at all n locations
ctaagcttatagcccgtaagaagaaggaaaacatacatcatatattatattttattcaaaagtcaattctaatattgtattggcgaactaaaaacattttacaatgatactgaaaattgattttttataataaaaaaaagcaaaattaagcaaatgattattgaaaaattatattttccatataaatcctaattttcaactctgcttttaagagattaacttttaaggaatggaaagatacttaatagcccgaaaaaagaaaaaagaaaaaggtgctctatacgaatatgaaataaaagcacaaactaatcttttaattatttttcttgctgtactaagaacactttctagtgccgctgacagagtaatctataccanaatgtaaaactaaaacaatgtgattattttaaaggatgaatagacgtggcttctatacacgtctaagatataattctcatactatacatacagtcaaca

SEQ ID NO: 175210 - DNA, 407 bp, Glycine max
  unsure (1)..(407): unsure at all n locations
agcacctgagctgcagcttatcaaggccctatagngaagatttatctctttcacttactncanaggacaagaacccagttgtggaacctttgaccatattggaccataagtgggacaaccacacaccacctcggttatcaggcctagttcaatggtctggattgccacccgaggactcaacttgggagaattgttctgaactccaagatatctatcaccttgatgatgtatggaatgatagcaattcaaggccgagaagaatcatgaataggccctcaggatgggaggagtctattcactaagcacttttcagcagaagagtagtatacgaatttaccgcgtaggctggccctcctctaatattgtagtgctctcccgtagtgcttgtccccacttacattcggtat

SEQ ID NO: 175211 - DNA, 187 bp, Glycine max
ttataaactggttgacagagcatgaagtatgggagttactgccatggaacatatctatacagctctgtactcaacccgccatgaagttatatatgagtactacggacggtgactttacaaccacgtgcagcatcatagattccagttgtccaaaactgtctacacaggggtgctacgcccatggatg

SEQ ID NO: 175212 - DNA, 447 bp, Glycine max
  unsure (1)..(447): unsure at all n locations
agcttgtaactcatcattnttagttgaaattgtcatttntacacatgcaatcttaattctcaacacactttttggatgagtcttccaaggattgtgttgccttctctaacttttcttccttttccagcgataaggtaaagctacaaaattgagtctcccaatgtttgatataagttttgtaagaccatctttaatttgaacaagtggcttaaaggtgtaaatgcacagtccttccaagcgagcaactcaaaggtgtaacaccatcttagaatttcgtatgagcatcttcattgaaaatggaagacttgaacgaaaatggttggcttgctcctcattgttttgggaatagataaggatctatataatgagcacaatgtatgaaggatggaaaaactccaatttatgtaatcccaggttaagacttgtagttcacactaatcaatgact

SEQ ID NO: 175213 - DNA, 421 bp, Glycine max
  unsure (1)..(421): unsure at all n locations
ggagatgaggaagtgtagaagggtgaaacttcctgcttttattctttgaccacagagtggtacctggagatatgtcgcggnggtcaggagaccttgtggacgtcaggtggggtgctattgcccaaaaccaagcttgaccaatcctgacccaacccgggcatagtcagtcagtgagaacctgtgatgtacctaagcaggcgagctcctggcaatcaacagataaaaggaacaaagaccacaaagcaaggaggcttgtgtggtggttggccagctgtgaatcttgtgtgatatatgggttatggcctctggtaatcgattactaagggtgggtaatcgattacaaggcttaaaaatgaagacaagaggctaagatggtctttggtaatcgattaccaaggggtgtaatcgaataccatgcttg

SEQ ID NO: 175214 - DNA, 423 bp, Glycine max
  unsure (1)..(423): unsure at all n locations
agcttatgcataattggagagttataaagttaaaaaggtccaagttccaaagagtttgagagaatttgttgtgtgaagatctgcaaagaccagagctggaagaggaagtcgtcctaagagcttgagatgagtttgtgagcgattgtgaggtcctagaggtggaggagatatccacactacttgtatttctacaatctttcattctcttctctttgttgtaaaggaagcttcccagttatggaaacctaaatcctctgttagatcttccttgtaggtacttgatgtaaatatctttttatctatttaatgatgttttgtgtgttcactgtgctatcagaacttcattctaccatgcctttgccttgatcacgtagatgcatgtngttttaggatcattcaacagtggaaactgatctgattctt

SEQ ID NO: 175215 - DNA, 461 bp, Glycine max
  unsure (1)..(461): unsure at all n locations
tgataatgacactacctgngagaacaacananattattctcaagaaacaatctatcgacaaatgtaagacagaattcattgatactacaatatatcattgacaatttgaattaaactaacatcacccagtttcaactacatgttgatgacacagtcacaaacactaaacactcaaaggagaagcacttctcttaaaaaattaaagcaaattcttctcaaagaaacatcaacctaaaaaacttcagtcaattaattatcaatgatcgaaaacttgtcaatcttaacacaaattcaaaatcaaccacaacattgtcaaagacctgttaactgtgtttggaattgcctcatatatcgacattntcaaatgaaattgcataaactgtgagatgtaatgcanaagctacanattgtagcttctgactggcgcacatctgatggcatataaagtgaaaccacacatg

SEQ ID NO: 175216 - DNA, 422 bp, Glycine max
  unsure (1)..(422): unsure at all n locations
agcttatgtgtgtattaaatattcattatattatttgttgntatatataaagacgttatttgttttttaacataattggtctattaacttaattggttagagtgtcctactaataatgcaaaagttacagttgcaagacctgcatgaaccattaattttaaattattttaattttaaattatttcataaaacatatttttaacaatccgtatggaccaccacagatccgtatgggctatatataaagacaattttggaattataaaaaatatgctaggtgtagaagaaaaattattagtacaagaagaaaatcccttgaatgtttttaactaatgattaaagtagattaggtaaaaataaaaaaagaaaacattgatttactaaaanaaagggtaatcacaaattatattatctcacgacac

SEQ ID NO: 175217 - DNA, 439 bp, Glycine max
  unsure (1)..(439): unsure at all n locations
atctcatgttactttaaacttggaaatgaacataaaatgtataaattgaaaaaggcactctatggactaaaacaatctccaagagcttggtatagtcgcatacagacatattttttgaaagaaggatttaagaaatgcccatatgagcatacactnttttattaaaattggagctataggggaaattcttattgtttgtttatatgtagatgatctcatattttttggaaatgatttgggcatgtttgatgagtttaagaaatctatgcagattgagtttgaaatgtctgatcttggtttgatgcattattttcttggcattgaagtagtgcagtcagctaatggatactntatctctcagaaanagtatgtgcgggagatcttaaacagatttcagatgcaggatngcaatcctataagtagtccaatatagtacggg

SEQ ID NO: 175218 - DNA, 443 bp, Glycine max
agcttctcaaagaagccacggtgaagcttcttgaggaagcctcttaatgaagctttttgaggaagcctcttaatgaagcttcttgaggaagctacatgaagcttcctcggtaaaaacgctgcccagcttttgttaaccgttggatcttctctaaatttggtctgaagcttcacaggaaacttttccatgatctgaccgttgggatctttaataagatatctggagtgtgcttgaagcttccgttcccgagagcatttcttatttaagcattttagccgttgctttcgtgtagcttaggaaaaacgccatttgttctcctttctttcttccaaagccatttctaacatcccaagaactttctacatcacccacagccactattagccaccacaaaccatctttgttctccattgaaatcccacaccgagaggaacccttcaatc

SEQ ID NO: 175219 - DNA, 312 bp, Glycine max
  unsure (1)..(312): unsure at all n locations
gctcacctccttgagaagcttccttgaaaagattcccaaagaagctagagcttagctacacacacctccctaatagctaagctcacctccttgagatgagaagctagaacttagctacacaccccttataatagctaagctcacccccatgacaaaatacatganaatacaaaaaanatccctactacaaatactagtcaaaatgcctganaatacaaggttaaaaccctatactactagaatggccaaaatacaaggcctaaatgaagganaaaacctattctaatattacaaagataagcggctcatact

SEQ ID NO: 175220 - DNA, 461 bp, Glycine max
ggatccttaatcacctgggctgcaacttgcactttcatccctttacattttgtaggattcaaactattcctgcactaaacgagtccaaccaatcccaaacaaggtcatattccatcgaattatttggtcatttaaggcatgtattgatgcgttttcattttataaacccattgtgcaaatcgatggaacatggctatatggaagatacaaagggatgttgttaattgcaattgcacaagatggtgctaacaacatatttccattgtcatttgtcattgtcgagggtgagacaacagatgggtggcacatttttttgaaaaacttgagaacacatgtgacaccacaacatggtatatgcttaatctctgacagacatgagtcaatcaaaagtgcatacaaatgacctgacagtgggtggacagcagacaactcgtcacatgtgttctgtattcggcacatat

SEQ ID NO: 175221 - DNA, 455 bp, Glycine max
  unsure (1)..(455): unsure at all n locations
tcttgaacgtgatcagtatattcattggcacattatttttgatgaaatgtggntcatgatatcttttggtgtcaccctgattcagtgaagttagtcaacgcatgtaatttggtgtttttgatagacaacacctacaaaacaaaccggtacagactctcactgctcgattttgttggggtgacaccgactgggatgacattctctgtcggttttgcatatgtggagggtgaacgcattaataatttggtatgggctttacaacgcttccgagacctttttttaaagcgtgatgccttccctggagttattgtcactgacagagaccaaacattgatgaatgcagtgaaggatgtattcccttgatacacanantttgtgtgagctttcacataaacaagaatgtgaggccatatgtaaatcactaattgcgcaaataatgcttgggatatgtcatg

SEQ ID NO: 175222 - DNA, 434 bp, Glycine max
  unsure (1)..(434): unsure at all n locations
agctntccctctttgaacaaataccccgttccaaatataatccatcttgggcctttctcccataactctcgtaaatgggagagaaatgttcatctaaagcatacaagtccctaatattatcaaatcctaaaatttgagctcctagggagaaaaataatgtgtcttctagagagggaatcaactaccatatttgtttttccctttttgtatttgataacatatggaaattgctttaggtactctacccattttgcatgccttttgtttaacttgctttgccctctaatgtacttaagtgattgatgatcactatgaatgacaaattccttggaaacaaggtaatgttcctaagtttggaggggtcttattaatgcatgaagctctttatcataggtggggtagctgagggtggaactatgaagtttattactaaa

SEQ ID NO: 175223 - DNA, 262 bp, Glycine max
ctctacgttggttttgggaaaccctactaacccccaaggatcctatgaccaatcaatctaaacatggggatcaaggaacactgaccgagaagccactgcactctgaaacaatggctcatatggggcatgtatataacactataaaaaaccggcccgtgcgtgcattctgtgcgaacaaccacttctggactgcacctctcttaacttagagggatgccctggccaggagctactggtcaccacggtcctatgtacgcactct

SEQ ID NO: 175224 - DNA, 440 bp, Glycine max
agcttgaaccaaaaatcggggagagtgttttcttattctgtgagtgaacgactagctgtgagtaataatctttgcatgaatctctaaattttagaatgaaatgtataatgaggacatgatgaaggccatgattgtacatacacaagctcttttgaccaaatagcttaccttcaataatacttgcatcttttgctcccttacatcagcacacacaacaaataagttgtatgttaaaataaaataaaaagaaagaaaagaataagtgtgttgtttcaataaggtcaaaagcaacttgagaaaaaaaatagtgagaaggctacgtgtataatacaagaaaagaccattcggataagtcaaggatttgtgctctcttagaatttaaacctttgaatcctagaaaaaccaaggagattttgtagccaagcctcactacaagcctg

SEQ ID NO: 175225 - DNA, 436 bp, Glycine max
  unsure (1)..(436): unsure at all n locations
gaagtattagagcacaagagcttcaagtatgtctccttatacctccattaattntcagctttaccttctccttcattgttgattcttcatttttcttcatgcatctcctcacatgtcttgtgttgaatgttgttaacatgatgttttagaatttctaccgattaaacttgctataaatgctagatttgattttctatggttcaaatttcttattcttgttcttgaaccatgaattgtgttgagtttaggttcttttgagttttggtatagggtgagcttagctattgtgaagaacttagtgactattatggaggaaggcataggtcacaccctanacctcactcccataggagagaaaaggaaagaaagtctcaagaggttaacactaacctnccatacttccatgagaaggacaatgtagaggcttatttatatt

SEQ ID NO: 175226 - DNA, 313 bp, Glycine max
acccaagcgccgcgctcaactcctaaacccgtttagttgtattttcccccagagccctgagaactttaggaacttctgggaagtccagacctctctgtaaacgctgccgtttgtcacctggtccttcgaaatgtctggcgtcgagatcttcgatgacaacgggtaattaaaaattctgaaggctgaactccacccgggcttttcataactgtgcctgatcgtgactagaaacccgggctccttttctacaggcttttagagcagaatttagaaccacgctatatccacaccattatttctttatcccccggga

SEQ ID NO: 175227 - DNA, 229 bp, Glycine max
cttctgaagatccaaaaactaactactaccccctcctatactagctactcttaatagagctgactactcacccctttatagctactacccatgcaatcatgtatcaaaagcctgtcaatcttctaagccgaatacagtaaccttcacaatggcaacatgctataagaaactattattacagatacgctaactacctgctaactactagtagaaccagcctctgatctgc

SEQ ID NO: 175228 - DNA, 430 bp, Glycine max
agcttcatcccaagaattgatgcagactttgtgggactttctaacaagttttccttgtgtaagtctctctaatcgggggtctaacaggttgcttgtcacttcaaacttcagcagaaaatgacagacaggcataatgataatttagttaggttcttgactgcactactgcagtagaggaaaattttctttatatacaactgtgatgttgtttggaactgaatgttggacagttaaaagccaacaagataataaacttaatgtagcagacataataatgttgcattggatgagtagacatactagacaaagtagaataaataatgaaagccttagagaaaaaaagtggggtagcacttattggagaataatggcagaaactcgccttttgttgtttgggcatgtgtggagaaaacttgctgaagtttagtct

SEQ ID NO: 175229 - DNA, 334 bp, Glycine max
ctgtaagttaaggaggttggagtataactcctcaatggttcttttgaaaaattgcatttgcaggtgcaagaaagaaaagaactacctatataagcatgaagtttagccgcttcaagaagctgggacttggctttgatatgcttatgaaggatagggacacaggctagtaaactagtgtcgagcaagagtaatgttataaactattgtgtagattatcttcatgtattcattatgaatagaaagggttcaatccttagtgacaccctgatattcgaatatttgaaacgtgtaatttgctaagatgaaattcaatcgtcatgatatttcatctatg

SEQ ID NO: 175230 - DNA, 346 bp, Glycine max
cacctgaggctgcagcttaaactgctagcactattttttgttattagtttttaactgccgctatggacctgtatcatacttgctgcaattcaattagctcataggtcaaggatgtgcacatttctttagttgtacacatcatttagattatttggtataataggaaccaagctaggtttgaaagtggcccttttcagtatgagcacattgtccataaagttatgtctactggcttaatctcacgcaactactcaaatgggatggattaagtgcaacattgatggagcaacaaatagttgtctagggccttcatctagcggggcgaattatctgaattctacgggtg

SEQ ID NO: 175231 - DNA, 360 bp, Glycine max
ttggttcgaggtacttacccgttgaagatcgaagaacgtttaatttctgatgataaacgacgaagaacgggtgaaactttcgcgaaattcctcacggaacacgttacggaaacgtatctgaagcgcctctgcttagattttcttcacggagataattgttccaagcaaattctacagagagagaggtgcctaaggggctgaaccccttccttcttcacttactcccctatttatagcaaaacacgggaggtggttgccgcccagctcgcccaggcgagccaagttgcttcctcgagacgcaacatgccttgtggaggaatattctggagggcccaggagggcctgggtgctatatgcacc

SEQ ID NO: 175232 - DNA, 434 bp, Glycine max
  unsure (1)..(434): unsure at all n locations
agcttaccgcctatcagctagctcttatttgttcttatttaaagatttccaccaagcttgacgagcttttgtagaagatggcccttcttgaatccaacccctactgctcatcttcttcttctgtgcatccacaccctgcgtctacatctctgactccgcaccatatgaagctagaggtgctgcacttcaatgggtcagactccttgggttgaatctttaagatcacccaattcttcgaatatcacttcactcaggaccatgaacgcctcaccatcgcctccttctaatggaggcacctgtgttggcttggctctcgtggatggccgcaatggccaacttacctgatggtgtggtctgcttcaagcactcgagactcgttntgccacatcaacgtttgaggatcccaccataactctgtgctactgatgcaacat

SEQ ID NO: 175233 - DNA, 465 bp, Glycine max
  unsure (1)..(465): unsure at all n locations
tatcttcttcttcactacatcaagaatcatcgtgttgtgtcttctctgtggctggcttactggtttagctccatcctctaaatttattcgatgcatgcatgtggatgggctaataccaggaatgtctgccagggtccagcctatagccttcttatgcttcttgagaacagacaacaacttctcctcttgctcatcagcaagggaggcagatataatcacttgaaaacttttgctatcatccaagtaagcgtattttaaatttgatggcagaggcttcaattctggtgtggtcggctggatagtggtagaagaagatggtttctcagcctgtacctcataaagaaagtcagaggtatgtgtacttcctgaaacatggttagtcctatctgactctatanaatcaatctcaagaggtaanacaccaccaccagacatgcaatcaatatcaaantcagaatcactctc

SEQ ID NO: 175234 - DNA, 296 bp, Glycine max
gagcaaggacagattattttagacaaggcatgaaccaaaaccacacgtgttgatcacttaacgaccacattggcatttcgctcaagccaatgcatgccccgagggatcgacttctaaatgttactgggagacaatactgcggtttcctatcgtttggaccgttgagaactactggcatacggacgaaactcattctgtagtaaacctttcacatcctaccgcactcgatcatcgggtacatactcgagcaataaactggagcacaatcattcgactcatattctgcatgctcgcag

SEQ ID NO: 175235 - DNA, 445 bp, Glycine max
  unsure (1)..(445): unsure at all n locations
agcttcaagcctgcatgagtggacatcttttatcttttttatttcgnattcaacgtggatggttgtgattgaacccaacgagagtggtacagaatgtcttgttgaatccaatttgttttgatttgttttgtttgaagcaccaaaacggtattgaagctcgccgtttcacgcatattgcttttgaagaacaagagagaagcccatataaagctactcatgagagagttggcacaattgcttgagtctggtcaggaccgaactgctacaatccgggtaacgcttaacatcaataacaccttttgttttttcatcaattttacgtctgtttatgttcgatgtatcaattgagattttcatttttgattctttttatttttggagattctgcttgtgttgtttatgaacaaatatcgaatgatagatctttttttcttcttttgacttt

SEQ ID NO: 175236 - DNA, 452 bp, Glycine max
  unsure (1)..(452): unsure at all n locations
cttcagtcacctaatgatactaaatctaaggtcctattttattgtctttaatttgttnntatagaatattcggtaaaatagtaacgaagacttgttaatttataattaaatataaaattgtttgataaatatcaatttggaaaacaaattgaaattaaaaaatatttttcaaaagaaaccactaaaacaaaacaaaaaattcaattgattttttttttttaaaaaattatgaataaagatcaaagagtttgtttgattttgaaaatagtaacgtagagtttgttagactaaaactcacctagtgactctaataaaaattccaaggctttccctttgtcccatttaatagtgggacgaatctctagcacctgtgcaaaacaaatggcaatgaaagtgagacacctctcacttcttttcttacttctttcanactaaatcaaacgcccacttaa

SEQ ID NO: 175237 - DNA, 447 bp, Glycine max
  unsure (1)..(447): unsure at all n locations
agcttgcatgaattacattctccccctatctaatttatttttaattcttcttgacatcatcaaaatcttcatgatttacattctcccccctttttgatgatgacaaccacctgtgggttaggagcaacaacaaataaaaaatatctatttgcatataggttactcccccttggttttgcaatgattgcttatatgagacagttgaagatttcatatttttcatatgtaaacaaattgtctcataaacaatagataatttttcttactattgtatcctttatctttctctcccctttgtcaacatcaaaaacaaatcatgaaaagagaggagatagatgttaccacttgttgcaatgtatgagaatcaagtgataccaanaggcattaaaacaatcattcaatattaatcaagcanaaacaagttcaataacacatcaatcaaacaca

SEQ ID NO: 175238 - DNA, 462 bp, Glycine max
tcattaggctatctatggcctcaaacaagctccaagggcttgttttgatagactcaaagagactcctactgaagtttgagttcatatccagcaagtgtgatcccactttgtgtactccaagggatcatctactatctacatgctagtatatattgggaaacatccaagtcccaaatcgactagagataaggccaatatagaatatataagtggggggcaaccctcatcctttaagctaacttttagggttgagttagacttgaacccacattctaagatgatattagaacttatcttagatctattaaaagggagtcacccaccatattatccatgctcgaagcacaaacgtgttgtgcgtgaggggatgtattggggaaaacccaagtcccacattggttagagataacgccaagatagaatgtatgagtgagggataaccctcacccaatgagctagctt

SEQ ID NO: 175239 - DNA, 439 bp, Glycine max
  unsure (1)..(439): unsure at all n locations
agctgggagaggatgcttcaatgtatgttattaaagggagaaggggggagcacgaaattgaaggaataaaagagggagagaagtggaactttgaagtgtgtctcataagactttcattcatcaaagttacaacaagtgttacacgtgcttctatttatagactaggtagcttccttgagaagcttccttgagaaaacttccttgagaagctagagcttaggtacacacacccctctaataactaagctcacctccttgagaagcttccttgagaagattcctaaagaagctagagcttagctacacacaccccctataataggtaagctcacccccatgccaaaatacatgaaaatataaaaaagtccctactacaaagactactcanaatgccctgaaatacaaggctaanaccctatgctacaagaatgaccaaaat

SEQ ID NO: 175240 - DNA, 425 bp, Glycine max
  unsure (1)..(425): unsure at all n locations
ctcttacacaggcctagtatgctatcattgttagtggaataccagctaggtttaagtttgaggccttttagtgtaaagagaaacaaactagtagtgcttatgttaataaagactactatttcaattatcattgtgtttttatgaatttatttatttatacttttcaatgtagaattgccaaatgaatcatccgagaagactaagatattttttgttgaatgtagaccccattccctatcaattcatacacacggaaataaatattacccggtataaggagcctaagatgctttgtccaagaattagtgtgttgggctgttatttcgtctatatttaacagagtctattgtcgtgtctctccataagcttatatgataagagatgccttgtccncttaaatggtcctctcacattagtactttatg

SEQ ID NO: 175241 - DNA, 407 bp, Glycine max
  unsure (1)..(407): unsure at all n locations
agcttggttcgagggacttacctgttgtttatcgaataacgangaagaacgaatgaagaacgtcgaagaacggttgaaacctttgcgagattcctcacggaaaacgttacggaaacgtttcggaagcgcctcggcttatattttcttcacggaaacaatttttccaagcaaattccaaagagagagaagtgcctaaggggctggaccccttccttcttcatttcctcccctatttatagcaaaataggggaggtggttgccgcccagctcgcccaggcgagcacagctcgcccaggcgaggagggttgcttcctccagaagcaaccgccttctggaggaatcttctggagggcccaaatgggcctgggtgctatntgcacccccatttttactaagtacacccccct

SEQ ID NO: 175242 - DNA, 433 bp, Glycine max
actagcaccatctttctaggattgctttctgtggtacaaattggagagaagagggtaggtatggcatcacaggtatcttgggtagaagtctcttaactcagttggcaagggatgaatctttatgttcggatgtcaatcctgtgattgctcatgttaatttaatctcgaattggaacttaataagaaaggaaacgagtgggagaatttgtcagctccagcatttttagaccttttacttttttttttttttttatctagctaagtggaaaaacttatcaatccttattatgtttaaaggttacaaattcagcgataatattggtaaaaacccaacgtctgtacttaacagattcatttaacctttgtgcctcattaatatccacttgttgaaacattcttctatatagagctgtgagaatcaaggtttcttaat

SEQ ID NO: 175243 - DNA, 412 bp, Glycine max
  unsure (1)..(412): unsure at all n locations
tcatgcttaagtatgtatggcaaaacttcattattgttgttcaagacatacaagngagcttgtaacaaatcttttagacttggagtgatcacaagcagtcctcttgaacccttaccacccactctgtcattatgccgaggcacaggaaggccaataggtttagccttctcaatgtattctgaaaaaaattcaatggcttcttctgtaatgtacctctcaacaatatatgcttctggatgatatagattctttgtataccctttaaaatcttcatgtattgctcaaccgggtacatccaccacaaataaacaggaccacaacatttgatttctcttactagatgcacaataaagtgaatcatgatgtcaaagaaagcagggggaaaatacatctccaacttgcacaatataat

SEQ ID NO: 175244 - DNA, 391 bp, Glycine max
agcttagagaataaaagaatttggcttttcactgtatgaacaccacaaggaattgaattctaatgaatactagattcaacaatgtgtaagtgaacatacaatatttaattgttaaacttgggaaagggagaatataagtgatgaggacaaaagaaagttaatgtaaaatattaagaaaattaaagttctttattgaatcgcaaatatttgtcaatattgatagatctttaatgattgcaactatggaaatatcatactactctaatctctaagtggttgaatgaacattatatcctttagttattggcaggatgtatttccctctcaatttctattttttaggccttcttaaccaacttattgttctacaactttaagaataacacgtttt

SEQ ID NO: 175245 - DNA, 447 bp, Glycine max
  unsure (1)..(447): unsure at all n locations
actcagaaactacgcttatgatgtgatgatcaagaatgattcaagttgtttgtatgattcttagatgangacaaaaagcccaagtgaatgatttcaaggttgagtcaagaacaattcccaagagaatgatttttcaagagtgagtcaagaacaattcaagaatcaagagaaatgtgacttcaagattcaagaatcaagtttcaagattcaagactcaaaactcaataatcaataaaagactcaatcaagataagtactaaaaagtttttcaaaacattgagtagcatatgaagttttcacaaaagctcttaccaaagagtttttactctctggtaatcgattaccagtttactgtaatcgattaccagtagcanacgtggtgttcanaatctttcatactgaatttacagtgttccaattaatttcaaaatggtgttatcgattaca

SEQ ID NO: 175246 - DNA, 432 bp, Glycine max
  unsure (1)..(432): unsure at all n locations
agcttgtagtgaaatattgaatttatgtttatatatttttaatccagcattttggacaatcttgttcatggattggtgaaatagtaggggcgtccccttgatcactatttaaaaaattgatgaaagtaatgaaataaaatatacttttttctgtattttcatgttgattattcctaccaaaaagtacaacaaacctaaggtgtcccatataagtacctaagtttgtattgaaactaaaaataagaacaaacctacctaatgagtccctatgtacataaatcttgaagatgttgggtgcatgagtgattntataaaagaggatngcaccactcaaaacattcatcataccacctatnttagggatttggtgcctaataatacctatnttgggcaccaacaaagtacaaggatntaaactcttgcgaactaaac

SEQ ID NO: 175247 - DNA, 445 bp, Glycine max
  unsure (1)..(445): unsure at all n locations
gccagtgtatgaatcagaatttgtctgtttaaagcctgtgcattatggtttagcaagtctgtttcaggtaaatagggcaggaattcttccaagcccagatggagatggtgttattgttaacatatttttccaggaagcacttatgcagcttttcaaaaagttgttctacgaggatttgtatgtatcctcattatagcacatatggagctatgaaatattctgttagctactatcatggttttaaactgtggttgcaatcaggatcgtgatgagtcaaaatctttacattatggataattacggaaaaatatgactgatgccatatcaattccggtcataatatgactgtgaagtgtcaaaataccttggcgttacgatcacaatttcagtcgtggatcagaaattanaaccatgactactgtgtaattganggacttctactatg

SEQ ID NO: 175248 - DNA, 364 bp, Glycine max
  unsure (1)..(364): unsure at all n locations
agctggctnctacaatcattgttcctgattacgcaaaagattcacttcatcaaacacatgaaggttgtccaaatgaaagtattgaaaatgaaagtagcactaatacttggattatataaaatgaattacacatcaagtaataaaatttagtattattattattagtttttatgcagaaacaagtcataatttactagatgatgaggatgaactattagatggcattggtgattctgttcaccgcattagcacatgcattagtgtctattaacgaacgtttagtttaagcataattttaccaatgtgaaactaataaactcttatttggtaggatatgttgatctaggagaccctactataacat

SEQ ID NO: 175249 - DNA, 178 bp, Glycine max
  unsure (1)..(178): unsure at all n locations
aagtgggcaattaacttgaatggtcattattgtcaatgcggaacgtattatgcgcttcactatccatgttcacatattattgcagcttgtggtacgtgagcctgaactctaccaatatatggatgttgtttacacanatgagcacatcttagaagcttatccctgacccaactacaat

SEQ ID NO: 175250 - DNA, 241 bp, Glycine max
aacacaaaaaaatctataagtctacaaccgcaccgttaaaaatctatttcatataaacatattatcattaatatgacatataatgcataattatctcttaatcataaaatcattcagtagcgtgaccattgaatcacttaactatgtctgaataactaatgcatttaccatagatgggtgtagaaaatgaacttctttatttcgggagactcaaagactctggagctaccactataatgtc

SEQ ID NO: 175251 - DNA, 337 bp, Glycine max
aggcgaaaaccactctgtaaggggaatcattcattccctgacaccacctaacccatgccacgctttactgcttcttacttatcattattataatctggttgcacatcaacatcgagcaaagggtgatctctgagtaccgtcatcttgcttacattttttattggctatagtacaatagacccagcactccaacgctattcgtattctaccatgctccctaacctcacatcttggtagatagctgagctgatgacctttcgaaaggctatctaccctagacagacagtgtgtacggcatagactgctgatgtaaaaacatgtgacatacctaggctaa

SEQ ID NO: 175252 - DNA, 431 bp, Glycine max
  unsure (1)..(431): unsure at all n locations
agcttcaccttccaggttgtgacctcattttattatcttcaatatgaggnncngngagacttttctggtagtcagaagaagctcttcatggttaacagtgataaccaacgattcataagtttgccgttttgtaactttgctactaattgactcaattctctttattttttaaaaactatttcctctgcgtcctttccactgaagttgaaatcctgcatttaatgtgctgcgactgtttaggaattagaatctctctagtctctatcgccttcttttgttagagattttctctaagtctgcgttatggatttgcaacaactatcatggactgaatatagagacactattgtgagtgtctctgcctctgtngcagaatgcatnggaagataactcttactttaagatataattcggcgatatattaactttct

SEQ ID NO: 175253 - DNA, 390 bp, Glycine max
aatttgagtaaacgacgcatacgtgacattgattgacataatacatattttaagaggatctaaagaaattgactaaagtggtgtaacgcagttgcagtcacaagttgttgaatttcttttatattcgtatcgtccctgaccctgacatgcacgccacatgcagcattagcttattacatttctttggcaactattagtcacaagattgtggccaggaccagccatagtcacacattagcatatatctcatctccgccaacccagaactggatactcgactacctttaaatatacctgatctcatttatatttaggataagtaaggtctcttaatcttcgagttgtcagttacgagctttatctttattttttgtataaagtaattcttat

SEQ ID NO: 175254 - DNA, 426 bp, Glycine max
  unsure (1)..(426): unsure at all n locations
ttaagtcacctgcggcatgcaagcttggaattcctgatcctcagataacatatgtgtttaaggntgggactaanacaagtcaccaatggctctcttgaggagagagacatgaaagaccggatgaattttactgtgagatgaaagatccaacttgtaaacaatagcacccaccttgtttaacacctggaaaggaccataaaaccgaggggagagtttttcattaattcttttagccaaggatcttcttctgtaaggttgcatcttcaagaacacctaatcactgactgcatattctatgtcccgacagcgtatgttggcatttgctcgcatgatatcttgagacttcaacaaattttctcttagagtagccaataattcattccgagcaatagttagtttattgacttcttcaaggcgggaaggaat

SEQ ID NO: 175255 - DNA, 440 bp, Glycine max
tgtgctcactcttatacaagttggactagttcatctaggtccctatatggaaggagttcaaccttgtccctcacttccatattaagctcactaaggaaactagctatgcttgttctttcctcctccctaagtccaactcttaaaaggagtagtttcatttgttaactatattcttcaacactcatactcccttgtctaagcctttggatcttgaccataagctctctttcatagtaggagggaatgtacctcttcctaagggcactcttaagatcatttcaatactctactggatgatccccatgaatacttctttccctaacaagagaagtccatgaatccttctttcctaacaagggaagccaccaatgagggcatactcttggagctagagtaaccatgaactttttctcttactatatgatggcagcgaggagtgt

SEQ ID NO: 175256 - DNA, 386 bp, Glycine max
caagggtcttgtctttataaataccaaacatacaaatcaataggtattaaatagaacttgttgccttctagccgatagctgatagccgatttgagcgtaattacttccaataaaaaatatttgtgatctataaaaagagaaataattcttgtcattattgcatacccttctttctcatttagccgtgtatgtgaggtacagattgaaatttgaataataataatggttgtatccgtaagaattgaatccaataccaaatgagtctaactcaattggttgaacaatatgcgaacgtgttataaactttctgataccatattcaatacatttaaaatccacaattttgggtcttgcattctaaaataaagacatttaatcatcatatt

SEQ ID NO: 175257 - DNA, 457 bp, Glycine max
  unsure (1)..(457): unsure at all n locations
acctatatatatgtatatatacttatattattntttgggtaccaatatatacttatattattctttaggtacaattaattatttttttgaaacaagtagactttgattacacattactgttccataacttccattcctataatcaagtaagactttaattacaatttaggtatgagtcatgtgtccctttatattcctcattatttttattggctttcctattcctgttaatgtttccttttcctttaactttcctattaagttcctactactccatagcaaaggaatattaatgtgaagaagacttttaaaaaggctatcaggccaagccagacttttaaaaaggtcaggtcgagccaaaataaaagccattgatagactataggctaggctcacgcctcananattattatangctangctcangccttttanagtctggtctgacctagtctat

SEQ ID NO: 175258 - DNA, 396 bp, Glycine max
  unsure (1)..(396): unsure at all n locations
agcttctcgaacgtgatcaatacattcattgtcattgatngaaggatgaagntgcggtgcgtgatctgttttggtgtcacccagatgcagtaaagttatgcaatgcatgtcatctagtgttttttatagacagtacctacaaaacaaacaggtacagactcccactacttgactttgttggagtgacaccaacggcgatgacattctctgctgggtttgcatatctggaggctgagcgtgttaataatattgtatgggctttggaacgatttcgaggcctatttttaagacacgatcgcctccctcttttattgtcactgacagagacctagcactgatgaatgcagagaaaactgtgtttcccgagtctactaattcgttgtgcagggttcatat

SEQ ID NO: 175259 - DNA, 432 bp, Glycine max
  unsure (1)..(432): unsure at all n locations
gagagagcttcaactctttcactatcaaccaaaatggttgagtcaatgaagtatcttccttaccaggtaatttttcttttaatgtgttaactagaaatatttatctgatctccatccccagccccttctcttcttaaaggcaaatggctgacttgtttgtcatggcttctttccctgcctgattgaccaatgtgcaggaaatttaaaggtgtgtacacccactgatctgttgatatgtatgattatggaatactctcatcaagatggcaatattgaacttgaaaataaggtatgtgtgtaattccatctctgctcaaattaattttacaccttaaggactcttataataacatgccaaattagtggctgcaaatctagccgttaattacaatntagcttaacatagaatatatttttggtttttataataac

SEQ ID NO: 175260 - DNA, 424 bp, Glycine max
  unsure (1)..(424): unsure at all n locations
agcttctaggaagttttttaaaagtctttattattgttttttaagaaagcttctcaaggaagctacctagtctataaatagaagcatgtgtaacacttgttgtaactttgatgaatgaaagtcttatgagatacacttcaaagttccacttctttccctcttttattccttcaatttcgcgctccccccttctctctttcttttcctccattaaagcatcctcttcaagcttcttatccaaggcaattcttggtggtgaagctccttcttccttggcttattccctagaggatggtgcctcccctctcctcttctcctttgccttccgctgcatctccatggtgaaaaatcaccattgaaggacctcattgaagctcaaagatccagcctccatagaagctccacangcaagctntcatcacga

SEQ ID NO: 175261 - DNA, 464 bp, Glycine max
  unsure (1)..(464): unsure at all n locations
gctaaggaaaagcttgaagaagttnntggctttatatgtccaactccattgagtggcatttgtattggttgttgcatcttagtacatttgatatttgttttgcattgtgcatcatcatagtgtgtgtgaagaaaggtttctaagttagaaaattttcttcagaggcaaaaactccctattttaatcaattacaacctcgtaatcgattaaaacaagttgtttgaagcctgtagagttaagtctcgtatctgtttgagacaatgactaatttattcaggagtctctgacttaatcgattaccaagtggattaatcgattacttctctctcattcagttgttcaaaagtgaacaagaacactntaatcgattacttaggtcatctaatcgattacattggttcttgagtggtttctagatgctggatgaacactnntaatcgatacnnttgataaactaatcaata

SEQ ID NO: 175262 - DNA, 245 bp, Glycine max
aataccagcaccaaacatcgcaacaaactatattttgagtattgtattctgaaacgcagcaacagcttaaaatactaaaaaaaaaaaaaaaatctgctacatcattaaccagattcatcttaaaacaaccaaaaggaacaccatcgtaaagacgaaagagtgaatcaaatttcgcgaattattacacatcacgagtaaaaataatataataataataacgagaggggggatttgacctgagttag

SEQ ID NO: 175263 - DNA, 308 bp, Glycine max
  unsure (1)..(308): unsure at all n locations
tcttacanaatccatcatgattctatttattacaaaactacccatcatatctcccaaaaccccatacccacganaatcaaaggagaaagaagtccacccaaacctgaattgtcgaagtcccactcgtagccacgcacttcacgactccaaaaacgccctcctttcacgatttggagcataaatgggcaccaaaggttgaagctttgtttggagcttcaatggagaatgagggagaaagaaaggcaacgtgagggagagggagagagaaggcttctgcaattcttctgctgagtgaagtgagagagagt

SEQ ID NO: 175264 - DNA, 318 bp, Glycine max
aaaccctgtggaatcactaaccatcgcattcctacacaaatattaattgtgtaaaacgcaattaacaaatgatcacgatccaggactcatcgatcaaatcttagatagctacgcaacatatataaaagggcaccttctcgcaatatatagaggtgctctctttcccttcagaaatggattccactttattgcgaaagagaatacaacctgttccctcatttcactaacaacattaaaacttgttcccacaactcctgcacagaggagagccaatcaattatgaccaattaaccccgccataacagacctaagacatca

SEQ ID NO: 175265 - DNA, 361 bp, Glycine max
  unsure (1)..(361): unsure at all n locations
agtggtgctgcaagagttgagtacccctttatcaatcgactatagaatccggcgagacccaagaaccctcgtagagctcttggtgatcgcggggttggccatacatgaatggtatggatcttctccggcactggtcgaactccatcaccagctaccacatgacccagatactctaattttccctgaggaaacatgcatttggagaggcttactgaaaactgacctgtcactataatctgataagcgttctctaagtgaaagagatgatttgtgatagttctgctatagatcaatatatcattgaagaagaacgacgatatactttctcagacatggacggaanagttgattcattgtggat

SEQ ID NO: 175266 - DNA, 201 bp, Glycine max
cacacaaggaaaaaaacccctcgggacatgaaaatacaaaacaaacaaagaaaatgaaatgagatctccgaaaccctcacccataaagacaggatcctataatcaactaagcgctaggctattaaacaaagagagcagccctgggaataaacataaccgacatttcagtagactgcgattctctatgagcatgaagacaaa

SEQ ID NO: 175267 - DNA, 359 bp, Glycine max
attcacacggcatgccaacttgaagggaaattttcaacgtaacttcactgcttaattagaagacatgactatgttttagcataagccctcaaagatggttacaggttacaatttaagtctcaacataacgggagcaaagagctgaattcgataacttaaccgtgccatggttactacaggatgggggcataaaagttgagttcaaccactaatcttattagctcaaacagaatgttttatgggtgtagtagaactaacaataaataggagagaattttggaagacattactaacacatgctttgtataacagtggtgtgggtgtttattgtagtggaactcattcttactctactctct

SEQ ID NO: 175268 - DNA, 404 bp, Glycine max
  unsure (1)..(404): unsure at all n locations
agcttaagggcactctgtaatatacattttgttctgagncatagaagcctgccttatctgcagacatggcataaaagccaggtcaagaaaggaataatttattcatttgaatatgccacgggggaaattaagaaccagaacagctgtcttaacattagttaaatgaagaagacaaataacaaatgcattgtaagggattaactaaaaaatgcagatacacaacactnttcttgttttatagacttcacctaatactttcaactgataatcccagttgagggtgttagatattaattagaaaaataatattaacaaactttatgaggctcaaattgtggaagatgaaagtngtaaggttgtgagttacaaagtcttgaataagcaatatgtgagtatttagtatt

SEQ ID NO: 175269 - DNA, 272 bp, Glycine max
gacactcaagtatacaagttatgaggataagagagagaatatgaatacactcgtatgcaagcatgtgtacatgtgtgttcaagatgtgttgatggttcgatgaaactcgatatttataggagatgagtggagttgctcgtccttgtctgtagggattgttataacctttgcagataatttccggcttatacataaaagctggcagcttatagataacgttagagataatacgttgcttacagactaaagctagtagataattgtaccttata

SEQ ID NO: 175270 - DNA, 441 bp, Glycine max
atcttaagtcacctgcggcatgaagctttaaaaaggctacgtgtttaaggttcttgttccaccactaaggatggcgacatgcatgtgcatgtgtttccctaatggtgatggcgaaacccatggtggactcgctggcaggaatggcgacatgcatgggcatgtgtttcgccaatggtgatggcgaaacccatggtgtttcaccaatgtggatggcgacacacatggcactcacgtgaacctactaccctgacatggatgcatgcactgttactgcgtgttacgctggaaggaatggagaaataaatgtttcgccaataggaatggagaaacccttaccaaacccttacaaaatgaccccccaaggaaatgttagaaatacactcctcttggaataagttctaaaaaaacccctggggcttttgccgtaacaccacaccacac

SEQ ID NO: 175271 - DNA, 358 bp, Glycine max
  unsure (1)..(358): unsure at all n locations
aaatattaattaataagcataatctgtctatttctctgaaatttttaatatgacaatactttacctaaaatatgagactccaacaaaaatgcacaactattaaattaatctttacaaaaaaatgaaatccaacttgattttgttactacctaatgttgtcacaatagaaatttcagagcaacagacaacttatgctttattaatcaatattatgtttattatgtttggttttttattttttaagtgtttattgtaatgcaatgtttgcaacgattaanaaagagagaaatatgaagaattaaattatatttggataaataaccattntcgtctctggatgtgtagagtgatgacaaat

SEQ ID NO: 175272 - DNA, 427 bp, Glycine max
  unsure (1)..(427): unsure at all n locations
agcttggagaggatttcttaatggaggatattaaagagggagagaaagagagagggggggagcacgaaattgaaggaagaaaaagggagagaagttgaactttgagttgtgtctcacaagactctcattcatcaaagttacaacaagtgttacacatgcttctatttatagactaggtagcttcctagagaagatttcttgagaaaatttccttgagaagcttctttgagaaaacttccttgagaagctagagcttaactacacacacccntctcataactaagctcacctccttgagaagcttcctaaagaagctagagcttagctacacatacctttctaatagctaagctcaccttcctgagatgagaagctagaacttagctacacaacccctataatagcttagctcaccccaatgacaaaa

SEQ ID NO: 175273 - DNA, 425 bp, Glycine max
  unsure (1)..(425): unsure at all n locations
catcctcagatccctcttggtggactaggcccaatttatacgaccctcttaggtttagactaacttaaactgagtttcgtccgtagatccctcttgtaagactagactcagctcaagcagcttacgaaagtttagcctaatttagcctaagcttcatccacaggtccctcttgtaagactagacctagactaaatagcattattgtaacaacataattaaaaccaaaacttaatccgcagatccctcttgtaagactaagtttcgattctgcttcaatcaagttctaaggtaacaatacatttcccaatgctaaggtcacctaactatgcacacaaatggatgatcagaccanaagcatacaaacattaagcattggaggaagcatngaacataacaggctntaaataggctctgaattcacgat

SEQ ID NO: 175274 - DNA, 405 bp, Glycine max
  unsure (1)..(405): unsure at all n locations
agctntgaattcattctatgaacccgnatgggtcctttcttgctcngcangtanacatctttggtcttctactatcggaagctcttttctttcttttaagcgagtttcgactgatcgtttaagccataatctcacttaatcaatgtgaaaatgaatttcaaccgattgtttgagttgtaacctcgtttaatcacctttaaaataaaattcaaccgatcatttgtgctataaccttcattaatcataaaaaaaataagtttcaaccggccatttacttcgaaagttctcttttaatgagttgaaaaataatcaagtgaaaccaaagctaaaatcaactcgtaaacaagctttcgtccacaagaaaatcacttgaatccgtttaaagggtcaacgccttaaacgatc

SEQ ID NO: 175275 - DNA, 464 bp, Glycine max
ttctcaggaggtgagcttagttgttagatgggtgtgtgttgcttatctctagcttctcaaggaagttttctcaaaaatgcttctcaaggaagttttcttaagaaagcttctcaaggaagctacctagtctataaatagaagcatgtgtaacacttgttgtaactttgatgaatgagagtcttgtgagacacaactcaaagttcaacttctctccctttttcttccttcaatttcgtgctccccccctctctctttctctccctctttcttttccttcattgaagcatcctctccaagcttcttatccaaggctcatcttggtggtgaagctccttcttccatggcttattccctagtggatggcgcctactctcacctcttcgactatgtcttccgcttcatctccatggtggaaaatcaccattaaaggacctcattgaagctcaagatccagcctccatagt

SEQ ID NO: 175276 - DNA, 258 bp, Glycine max
agggttttttttatttgcacccgagagacgaggagataagctacatcctcatgacactcaggatcagatcataagacactatggataagatcatcaagacactccaggagataaatagagaatcacatctgacaagtttatcaatccagtcacgactcaatagacagatcaactagaccaaactgggagctacttgaaagtgaggttctcaaatgatccatgtttctaactgtaccaaagttactttgtacataccat

SEQ ID NO: 175277 - DNA, 429 bp, Glycine max
  unsure (1)..(429): unsure at all n locations
tgcaagcttgttactaattagattagattanatatttcttatatcaaataggagcaaaataattgtcatcgattgtgacgtgaggtgattataaggatgttcacatgtgtgaaaactcaaacagagtcaaatcaattcaattagttcgattttaattttgagagtttgaattaaactcgattcgattcaatatgtataaacccgttaaatgtgtgggatgcttaaccggctcagtttttttaagccgtgatccaacctaattttgcattgatctgacatttaattaaagttattacatatatatattaaattattaaatatataatattttatgttttaaaaatactttactaaattattaaatcaaattattcatgtttttattatattctcatcttgattgtatttatatttttcatattattggat

SEQ ID NO: 175278 - DNA, 438 bp, Glycine max
  unsure (1)..(438): unsure at all n locations
agttagatatatcttattattataatacatatttatctattcgttaagtattatttgtagttagttaatttgtgagttgttaaattatgggcatgagatatggttgtgaataagtgaatggttaatacttgatgtgatattacttgtgtgtgtgagttgtgaattatacaataacctaactcatgtttatcttgagaaaaatatttatgtacgatgtgttaaaaagaaagtgtaggattccaagttagtaacccgaggtgttaaattgtaacacaatgtgttaaacgtgtttgaaaataagtatcaagtcatgaatattatataattcattagcaatgtctatgtgcaaaagttgttataggagttagacttgaatcaagaaggtgagaccctaacagattattcngagtctangccttgggataaatactctcggtt

SEQ ID NO: 175279 - DNA, 425 bp, Glycine max
agcttttctttttacacttctgggaagattatattaatatgaagaaaacaagcctagcgttggtgttggtgtgttctttacttgcaactgctcagggaacaagtaaaatagcgtcttggactggccttttggagagctgctattctccatgatctttcttttaatgtgcgccgccaccgccgccgtcgggtgtaagtggtggtgcctgctcgtgtaagtgaaaaccctagaggagctaaagagtcgaagagggagaatcaaacaacgacaagtaaagagccagattaaatattattaataaaaaaatatatctaagacgggttttgtataaagacgtcttaaaatggcaagaatctaagacggtcctgcgtaaccgtcttagaatggttgtatttatatacatctctgctaccgtgtcacattct

SEQ ID NO: 175280 - DNA, 421 bp, Glycine max
  unsure (1)..(421): unsure at all n locations
ctttagtagggaatctatccttcctaagatggtgtctaacccagtcaccctcattaagaactagctcttttcttcctctattgcctttagttgaatacacctttgtttggttctctatttggttcttaaccctctcatacaacttctttacaaattctaacctagattccccttctttatgtataaaagaagtgtccagtgggaggggaatgaggtctaacggtgttaggggattgaacccatagacaacctcaaaaggggactgcttggtggttctatgaacccccctgttgtaggcaaattctacatgaggaagatactcatcccaagacttaatggtgcctttcagaagagcccttanaagggtggataaagacctattcactnacctctgttgcccatcagtttgtggatgacaagt

SEQ ID NO: 175281 - DNA, 442 bp, Glycine max
  unsure (1)..(442): unsure at all n locations
agcttcccaaattgggacttcatatagattatttattttacaattatatggatttagtttcctattttcacaagctaagaagtcacagatttttaagatgttacatatgcataaaccatatggatttaatcaagtaggacgaaattgaatgttaaaattccaattccgatatgaaatggaaactctactggatttgcttaattgagtattaatcacttgagacagtaaattgaatagttattatgtgaaaaatcattaatcaagggaataagtagtcattcatattctaatcactgaatttctttttatcaataatcactaattttgtatatggttttggtcagcaactgagatattgtattgctggcgtgacaattttggtgtaaactaataacttcacaggtagtgggaattactaganatccaatacgtagagccaaca

SEQ ID NO: 175282 - DNA, 302 bp, Glycine max
  unsure (1)..(302): unsure at all n locations
cacanagataactgataggtcaacactatattactatacattgnnggttaacttgtaattgaagattattacaagcctataaggcactgagtagcagggaaaatatttaattagcaatgcagagggcataatataagcagtctccctagtaccttggcatgcatgatgaaacttaagatggttgcaaaagtagaaactntgcttcattgagtgggatgtcaaaactagtggaatatcggaaaaataaatgaaagcgacagtttagaaccataacctcggcatttgactagatgtaaagatat

SEQ ID NO: 175283 - DNA, 422 bp, Glycine max
  unsure (1)..(422): unsure at all n locations
agcttgactaggcgagtngattttagccttattttcttcttagttattagccaattcggttaagaatgagaaatcccaaagagaaaatgtccggttgattttcctctntattttactaaaaggtatatttttgctattatattattattttatctctttttgatttccaacgtggttacggcacgaccgaacggtcgaaatttattttaaccaaagtttacggatcatacaattcaaacgttcggcggaaatttattttatttttaagttaagcgagaaatgacttgagtaaaatggcttatgcacgtcaacagggggtataaaaagtacatgaaatgagaattaaattacacgaaacacaatgtggaccaccatcggtacatataatgattcgaaaagcttggttcaggtacttacccgtg

SEQ ID NO: 175284 - DNA, 472 bp, Glycine max
  unsure (1)..(472): unsure at all n locations
actccgcttaacatcagaccacttccagggtgctggaactactttatatggacttgatggggcctatgcaagttgaaagccttggaggaaagaggtatgcctatgttgctgcggatgatttctccagatttacctgngtctactttatcagagaaaaatcagacacctttgaagtattcaaggagttgagtctaagacttcaaagagaaaaagactgtgtcatcaagagaatcaggagtgaccatggcagagagtttgaaaacagcaagtttactgaatactgcacatctgaaggcatcattcatgagttctctgcagccattacaccacaacaaaatggcatatgtgaaaggaaaaacaggactgtgcaagaggctactanggtcatgcttcatgccaaagaacttccctataatctctgggctgaagccatgaacacagcatgctacatccacaacagagtcacacttag

SEQ ID NO: 175285 - DNA, 367 bp, Glycine max
  unsure (1)..(367): unsure at all n locations
agcttttaaccttgacttggtttattctcnttccagttngnnnnngcncccatgcttactaaagcgagacaaaaagctagtgcaaatcaaaactccgatatctcatgggtgggatggatgaatgcatgatggaatgcatatgacacagatgcaatctagaaaagcgggggtccggggaatctgtccccatcttatacacaacgtctaggggtagcaaaatgccccaacgtacgtttttaagaaggcgacacgaaccctccgttgttttgtttacaaaagggatcaagacagaacccatatgtgatgcctatgcaaaagacacaatgcgggaatgtacacagtatgacaatattcactgaacataagc

SEQ ID NO: 175286 - DNA, 394 bp, Glycine max
  unsure (1)..(394): unsure at all n locations
taatgatgataacaaaagatgatgacaaaggtgatgacaaaaagctcaaagatcaatcaaagaacaactcaagtgaatcaaagatcaatcaaagaacaactcaagtgaatcaaagatcaatcaaagaacaactcaagagttcaagataagaatcaagaagaattcaagactcaagaagaaagtttagaatcaagattccaggttcaagatctcaagaatcaagatcaagattcaagactcaagattcaagaatcaagggaaggcttaatcaagataagtatgaaaagttttctcaaaaattgagtagcacatgattnttctcanaacatgtttaccanagagnttttactctctggtaatcacataccagaatggtgtaatcgattaccattag

SEQ ID NO: 175287 - DNA, 389 bp, Glycine max
  unsure (1)..(389): unsure at all n locations
agctntgaagggctnatnnncactcctctctctaagttcatcngctggctnagngagccatctgctgagcgcaacaatccttggctaagcgtgaggaagaatctggaagaaggatgagctgtgcatgtttgctgagcaaagggtcatcccgctaagtgcaccgcttcagtccatccactgagccagaaaagacacgctaagcagttcagaattgcgctaagtgcatgagcacgaacaaagccacctatttaagcctgaaatcagattttagaggggggagttggccttttcttgaagcttctgcatgtctatagagttctagagagagaaaggtccaagttccagagaagttgagagattttgtgtgtgaagatctgcagagaccatag

SEQ ID NO: 175288 - DNA, 410 bp, Glycine max
  unsure (1)..(410): unsure at all n locations
acgcatcaacaagaatcaagccaaggatattgtgcaagcaatcaatggggcaaaacacaccaaatgattatgatgatggatggctcaaattctcacaaaggtaaactcatcactttcaaattgagctttcaaaactatcatgacatgtagagaagaatcaaggatttcaagtcacaaaatgtcaagaacttttattttcaaaacaattacccatttcttgaacatatcctataattcaaagaaaaacatgcaaaatcgtacgtgcacacaaaattgacccanaatattaaactaaaaatccgacgaaactaacaacattaacaaattaacacaactaacaaattaacaaaaccaacaaaactatgcaaaccaaagaacacttcctcccccccccatacttaaacaacaca

SEQ ID NO: 175289 - DNA, 397 bp, Glycine max
  unsure (1)..(397): unsure at all n locations
agcttntactnacatatatttatagttttttcgacatcataaactaaggtcactagtaatttatctcttagaaattcccttttcatagatggatatgggtcctttcttatgctttctcgcttgtgttttagacatagttcagaagacaacgctttgttttaacacttaattaataattggagcctattctgggaatttcagatggcagtttcctttcttcttcgactagtaaaaagcgtgacacgaacaattgccgtatctgggtaaccaatccaagtctctcctatggaggctgctctcaccatttatgctctttatcatataccattttgctttttctttcccacacagaccgtgacacgatgccacacaacacctacaatttccaaacctccct

SEQ ID NO: 175290 - DNA, 447 bp, Glycine max
  unsure (1)..(447): unsure at all n locations
atatgagcaagtggattatagttgagctgtctcgattgaagggaagttgtattgataatcggaaagataggaaggaggatgggtctcgtgagttgaccggcgaggagaaggaggttgatgggagattggtgattcatttgaggaaggaggagacgtggttgatggtgagtgaaggaaaggctcgttgaatggaggattagaaacatggctactgagtgaatttggtaaaggtgatgaaagggatgtggtctcaaagggaacataaggtgtgttggctggtatggaaggtgagggtggtttatttagtaagtcagtgatggaattattaggaagaggaggtgaatgttggtttggattgataggagtgatgtgacaaggtaaaattagttcatganatatgacatctctagaaatgacaatctctttngcattaacatccanaatcac

SEQ ID NO: 175291 - DNA, 364 bp, Glycine max
  unsure (1)..(364): unsure at all n locations
agcnnanctacacacacctcttaatagttttttcacctccttgagatgagaagctagagcttagctacacaccccctataatagctaagttcacccccatgacaaaaaacatgaaaataccaaaaaaaaagtccttactacaaagaatactcaaaatgccccgaaatacaaggctaaaaccctatactactagaatggccaaaatacaaggcccaaacgaaggaaaaacctattctaatatttacaaagaagagtagatccaacctcgacccatgggctcaaaaatctaccctaaggttcatgagaatcctatggcctctcttagtagctctagcccaagcctctaggagtcttctatccaata

SEQ ID NO: 175292 - DNA, 411 bp, Glycine max
tgcttgtgattatacttttcttcttatcagtgtacactatcacaaggtattgctctctatttcattgttcgttcaagattcaaatagtcatttgtttgtgcccgtgggtaagaagtttgattgaactgttgttattggccaaacaatgagatctacacaaactcgtttagttataaacaaggtgtcaagtgtcaacacttaacaactttagttaaggtatgtatattgttaaattaaaataagcacagaagactaagaggatgtggtttttgagtagtgatcagcatcactgaggagtggttgagcctggagaaaacctctatagaatttgtcttatcattgatatcattttttttactcattttattgcgaataaatatatttttcaagacaactacgtcttatccatct

SEQ ID NO: 175293 - DNA, 461 bp, Glycine max
  unsure (1)..(461): unsure at all n locations
cacctgaggcatgcaagcttggactctccagagatggaangaatctatatttcacttttttcactcaacacagntcatggcctattttgctagtaatttaaaacttgtctccttggttgcgcatgacacaaaaatgcatgatgttatctatgatgatatcaagcccaagacaactaggaaaggacattgatatttatctcagccccttgatcgaagacttgacaaagttgtgggacaagggggttactgtgtttgatggtatcaaaataagacatttaagttgcgtgcaatgctatttcgtaccattaatgactttccagcatacgagaatttgagtggatatacgtgtaagggccatcatgcatgctttatatatgaagaagacacaggccatgtacaattgaaacatggaagacaaatagtatacactcggcattgacattttctcaaagctgatgaca

SEQ ID NO: 175294 - DNA, 413 bp, Glycine max
  unsure (1)..(413): unsure at all n locations
tcgattacctttgattgtttcatattaaaatcaaaagatgtaactcttcaaatagtttttgactctttcaaattggtttttaagtttttctaagagtcataactcttctaatggttgtcttgaccagacatgaagagtctataaaagcaaggctttgttttgcatttcaagaatcttgaacacttattcatacaatcctttacaagccttgaatctctttgaacttcttcttcttctttgtaccaaaagctntccaaagttntctggttttctaaaccttgaaaacttgtgctattcatcttttcattctcttttccctctgccaaaagaattcgcaaggactaaccgctgattctttttgtgctctcttctcccttttcaaagacaaggacaaccgctgaatctttgtgctc

SEQ ID NO: 175295 - DNA, 437 bp, Glycine max
  unsure (1)..(437): unsure at all n locations
agcttctctggaccatntccacactctattggtaatatgaggtactcatctaaattagattctttttgctgtcaatttaatggaacactttccaattcactgtcaaacctctcagaactcagttacctggacttgtcgtataacaacttcacaggtcaaatggtgcaattcccacttacatcattatctgattcgggccaattaattcacttagatcgttctcataatgattcaaatggtgcaattccttcatcactttttgcactcccactcctgcaaagcggaaatgtacatgaatatgaatatggaaggctagctggtacaaccgattggaactttattagtgtcgaactaggatctattttaggccttggacttgattatcttccattggttgtatgggagcgatggaggatatggtattggcaacttacaca

SEQ ID NO: 175296 - DNA, 458 bp, Glycine max
  unsure (1)..(458): unsure at all n locations
tgaccagggagaattatttctgacccaagtttatattttagtttggcagaaagctaaactaatccaattgtaacaagaccaaccatcttttgttgtaagtgtggtcattagaatgcaaatgtcaaaattatgatatttcttagaggatcactagtaaaaggattgattagtgttttagaagagacgacataaggagattattacctatatttaataggagatccacctatggatattgtgttctatttggagtcaatctctttaatggaaaacctcaagaagcaaaatgtggttgcaaggtccagagctgaagcaaaatatcaagctatgactctcactacttatgaactaatatgtctaaaaacaaaataaatgactcattaaagagaattaaatttgtgacgttggaactgagacatatntgtgataatcaagcaccccttcatattacatctaac

SEQ ID NO: 175297 - DNA, 251 bp, Glycine max
tactcgaccaaatactcgctatatcgcggctatatttatcctaacagaatatactgctatgccttaactgataagatataagatcctaaataaggacagcactttgttcagcttctcatagcggatatacaaccctacactgctcgcgaacctcatggacaccactatgagcatgatatgtcctctgcagtacactagtgatcatccatcattcgtagtaacgacgcaacttcgacaccagctacacttga

SEQ ID NO: 175298 - DNA, 465 bp, Glycine max
  unsure (1)..(465): unsure at all n locations
gtcacctgaggcatgcaagctntatagacaatagatgggngaaaattatgctatttagtgttaactgagtttgtataattctaagtgtttgtaaaaaacaaaaaagaaaagaagttcctattaatcataatattgggagggccactggattatgtggattggaaagcaatgctttatttggcggcgcaagtgggtaggcagctattgtcatagttttaggaaatttgggatgtttacagtgatacaaatcaatttattccatacaaaaatagtataacataaaaatcaaacttatggttacattagcataaaaaataatatgcattaccctattaagtatttaaagataaaaatactacccctgctccctaacacaaaacccatgccaattntcatttgtgtaagntatcaatctaaattcgtgaacttattatacacatgatttgttctggtctctaactatga

SEQ ID NO: 175299 - DNA, 184 bp, Glycine max
gctccgatgatcatgctttaatcttatgcacccacactctactactggcgcaagtgaccagggtgagaatgatggcgaatcccatgttgagaccgtcatttctatacatccaacattcccaccaaccctacatatgtatatatatgagggtgccacaccatctatgtactcagcatccatctat

SEQ ID NO: 175300 - DNA, 345 bp, Glycine max
  unsure (1)..(345): unsure at all n locations
agctagactatggtttatacattattgatacatgantcgggacttgcaggatctgatttgggcaaaattggatgagggaaagtgtgattttcgaaatctgcacttatgcagaaatttgctgtcaaataggtgcaacagaattttggctttgtgcaaaaaaatgctatgttttgctggttgtggaaagagtagtgcacaatgagttctggatgtttgctactagatcccaacggtcaaaatgtagacttatgttctatagacttccattaaattttcgagtccatccaacgggtaacgaattggaacaaggaaatgttactggaatctttaaatgagaaaagttgt

SEQ ID NO: 175301 - DNA, 370 bp, Glycine max
cctctatctctaacagggactacaggaaaaagttaacaataagtctacaatgtaataatggcaagatatggtacctgcatcaacttgctatctattaaaagtttttccacataatcttgatgcaggtcaataagcacgctaaaacttctttaacatgaatttggagagagtttatcaatgtatgatgtgaacctgattaggagcggaatgtttgatacaggctatggagttctggatgacgccacttccaaagagggaagataagtcatggtagatgccacttctggtgaaggaagataagtcacgggcgacaccacaacgattaccttgataagtctgataattggttcaacaaggaacccagagagaa

SEQ ID NO: 175302 - DNA, 413 bp, Glycine max
  unsure (1)..(413): unsure at all n locations
agcttgtatggtagcttgngcttatttcttccctatttccgntagggtttctgtcattgatcaaaaatgacttctgctggacctgcattctctttttccggaactccgactatcacgactgtgaaactaaactggaagaactatttgtcctggtctgcttcggttgagctgtggtttcttggccaaggacaccatgatcacttggaaaaaggtattgatactgttccaagtgacagaaaatctgagtgggagaagctggattatcagctatgtgctgtcttgtggcaatcggtcgaaacagatgttttggagatccttacatcattcaaaacatgttctttttgaagaaagcccgagaaatctttgcaatgatttcaagtttgtgtgtgctactatgaagcacagccctcaac

SEQ ID NO: 175303 - DNA, 463 bp, Glycine max
  unsure (1)..(463): unsure at all n locations
tgagtgagggtgatgatgatagagacatggnggatggttttacttcttccatgtcaaacctttgaaggacttttcggatatgtttgtgttgcgacagtgcaatgcctaaaaaataatgagtgcccatatttttcagggagaactactgtgacagtgcaacaatgagtgtttccaagaatttgtagttgcagctagtgataagcaagtcatccacgtatactaggaagtaggttgtgatgtcttctaaattatatatgaataatgaaggatcactgatgcttgttgtgaagctataagcaacgataaaggttttcagtgtgtcatgtcaggcatgtgatacttgtcgcagtttgtaaaatgctttgtaaagttggcacacataatgtggatgttgggagtctttgatgtaaacatgaacggtttatgaagaccattngtactcttagttttttgtgatgatgag

SEQ ID NO: 175304 - DNA, 424 bp, Glycine max
  unsure (1)..(424): unsure at all n locations
gagtcacctgcggcatgcaagcttgcagcaaaganggggctgatccattttgnttttttcctcattcacaaaactgtgggctgggcatgcccactatatactaaaagttgaaccattttatttttaagaataaaattctcaaattggtgtttggtaattcaagatgcatcatgcgttagaattgtaaagatagacttgaacttactcttaaagtgaatatttgttttgacagaagtcttagagtaaatatttttcattgtaaagatcttgttcgtattaactttgaaagtccggcgatattaattcttaaaaatatttattttatggcaacgaattcttttttttacaaaatggcaatgaaattcggacctagctctaaaaaaaaaaaaaaatttgggcctaaacgttacacacgccacccact

SEQ ID NO: 175305 - DNA, 392 bp, Glycine max
  unsure (1)..(392): unsure at all n locations
tgttcgcacatcgttcacgtgtatgacatccactccattttgtttgatttagaggagaccttcaatcctattacgcaacgtggcggacaaaagtgggcagttaacttgaacggacattattgttaatgcggaaggtattttgcgcttcactatccatgttcacatattattgcagcttgtggttacgtgagcctgaactactaccaatatatagatgttgtttatacaaatgggcacatcttaaaagcttactctgcacaatggtggcctcttgggaatgaagcggctattcctccttctaatgatgcatggacacttatccctgacccaaccacaattcgngcaaaaggtcggcaaaaatcaacaaggataatgaatgagatggattgggt

SEQ ID NO: 175306 - DNA, 405 bp, Glycine max
  unsure (1)..(405): unsure at all n locations
agcttgcctanagaggtccatttggttattgcggccgaaggaactagttccgctccggagtacgacagtcaccgctttaggagcgctgtacaccagcagcgcttcgaggccatcaagggatggtcgtttctccaggagcgatgcgtccagctcagggacgacaagtatactgatttccaggaggaaatagggcgccggcggtggacatcactggttactcccatggccaagttcgatccaaaaatagcccttgagttttatgccaatgcttggccaacagaggagggcgtgcgtgacatgagatcctgtgtaaggggtcagtggatcccgtttgatgccgaccctatcggccagctcctgggatatctcgtggtgtnggaagagggccaggaatgtgagtatgga

SEQ ID NO: 175307 - DNA, 463 bp, Glycine max
  unsure (1)..(463): unsure at all n locations
ctcaaggaagctntcatttagttactgaccttttattttcacttctcttcctcttttgtctccttcaatttcatgccccccctctctctctcattcttttcctccattgaagcttcctctctaatgtgtaatacttcaaagttccacttctctccctcttttgtctccttcaatttcatgccccctctctctctcattcttttcctccattgaagcttcctctctaagcttcttatccaagacactctcttggtggtgaagctcctccttccatagcttattccctagtggatggcacctcctcttaccccttctcctttatcttccgctgcatatccatggttgaaaatcaccatcgaaggacctgattgaagctcacagatgcagcctcagcctncatagaagcttctcaagcaagttccatcacctatgcacacatatgatcaaaacaacctaagttcag

SEQ ID NO: 175308 - DNA, 379 bp, Glycine max
  unsure (1)..(379): unsure at all n locations
agcttgaagaggaggcgtnaatggaggattaataatagagaagggggggagcacgaaattgaaggaataaaagagggagagaagtggaactctgaagtgtatctcataggactttcattcatcaaagttacaacaagtgttacacatgcttctatttatagactaggtagcttccttgagaagctttcttgagaaaactttcttgagaagcttctttgagaaaacttccttgagaagctagagcttagctacacacactccctataatagctaagctcaccctcatgccaaaatacatgagaatataaaaaaaagtccctaatacaaagactactcaaaatgccctgaatacaaggctaataccctatactactagaat

SEQ ID NO: 175309 - DNA, 401 bp, Glycine max
  unsure (1)..(401): unsure at all n locations
agtctaaacctaggagggctgtctgaattaagcctagtccaacaatagggatctgaggacgaagcttggattgattcagtctaactagggattgaggtctagtaatttaggctacaacatagaacacaaaagcatgattgatcagagaaacatctttatatacatcagctggtttgttagaaagacccaacacctttacctactactgccaatcttacttacttgcatttttactgtttttagcctagacttagtttaattttgttctaaatcatcaattatcaatgtttctttcaacaatgccttatttctgaatttaaccctatctaatactagttccctgagttcgatactcaaattcatcagttttaattntaaatacttgacaatccggtgagctt

SEQ ID NO: 175310 - DNA, 349 bp, Glycine max
acaaaaccgggggctgggcatttccactatacactgaaagacggaacgaaatattgttaccaatcaaagtgacgaataggggcatggcaaatggagacctctcctgccgaataactgttcaaacacactcgcacataactctaatcagtacgttagttgtgactatagccctaaattaggaaaaggaattggtgatcgatgtaagaaaaacaaagaaagaccggggaataaaatcttgcaaatatgtggagggacacggtctctttttttcaagtggcgtcataaaaggcctggattccattaaaaaaaaatttgccttatcttggcacccacggccggtatttttaac

SEQ ID NO: 175311 - DNA, 336 bp, Glycine max
agaggactaagcgacggagtatagacacatttaaacgctttatttgctcgacacttttttgaaatgataagtcagtgggaatttggaacaaatgtaatatgctcattttctcataaaatccgaaaagtaatttccagattctctggacttctagaaactactttccaaactacaaaattaagattgcattatggaaaagtactttctataacctataattatgcgcttaagtacattccgaaattatgcttaaatttttgtatacataaacgtattttgacaatacagaatactaaacattaattttgaaaatactgttctgaataaagatataag

SEQ ID NO: 175312 - DNA, 258 bp, Glycine max
  unsure (1)..(258): unsure at all n locations
agctcgggcagcactatatgtttataagattgtgttgggcagcaccnccaggataaatggcgagttaagcatcgcaccagtacccttatcatatttctctatgatcttgacttgacctgcacaaaaacattgattatcaaaccgcgctataatctaataacggtctctcttgccactctctctcgttatctctctctagatatatatatatagactgaacggcatgaaaacctgagaaatgatagcactactttcaca

SEQ ID NO: 175313 - DNA, 456 bp, Glycine max
  unsure (1)..(456): unsure at all n locations
ctacgctaacaagtcgaaacagatagtgagtttatagttatggttatccagntgcggntcagatagcgaagagcgtgtcatacacaataagcgcagcttcgaagagtcctttggacaatttttgaaaccttttcctttactagtatggagtggacagccaaatgaagaagaagaccgtaatgaaaaggtgcaaagaaacattcacacaccaaacaagtaagttgtgttgtgtctccacttctatgtcctccatatatgttngcttacccttctaaaactagctagtaaagtagtaattaacattttgatcatatatatgtgcattatttgtggtattcttttatcgtaattagagttntatctcgttaatctacataataaaggtttctataaaatattaatttagatgaccgaagtaaaactttaattctgattgactgattcaataccagtata

SEQ ID NO: 175314 - DNA, 215 bp, Glycine max
tatatataattatataaaaaatttttttttataataataaagaggatttaaaatttaaaataatatatttattaaatatataatatattttatttaattattttattatatattattattaatagataaatcattatatatatttatttttaattatatatttttttttatttaaattatattaaaaaatataatataaaatttatttttttttt

SEQ ID NO: 175315 - DNA, 287 bp, Glycine max
  unsure (1)..(287): unsure at all n locations
atatgcatgtgcatcacatgatcaagaatttctattgagaattcccctagctagcttggtgaaactgcccacaactgttttaaatngaatactcatatatcacaaacatctattngagacaattatcttcttcgatgccctcttttgtccgcaaatcatagtatctctaatacctatacttctctctcttgtctcaaagtggcacatactatatattgtcgtattatcgttatcactttaaacttgtatcaattactatggatagaatataattacatgacatactc

SEQ ID NO: 175316 - DNA, 240 bp, Glycine max
  unsure (1)..(240): unsure at all n locations
tctatcgtccattacttatagtgtgagcaagaccaatccagatgagtggatccttgattcaagtgccacaaaccacgtcattgtatttcctcatttcttttatatatgcaaaaagataaaccgtgttattgtgatgcctcctaatggtcatatagtcactgcatctcatgcaggcatgatacaattctattaatttctatacctaaaggatgttntgtacatacctagttttaattcaat

SEQ ID NO: 175317 - DNA, 301 bp, Glycine max
  unsure (1)..(301): unsure at all n locations
ccaagncaccgcagctgcaactcctaacaaggacggcgctttattttgttcaaagactcaaatagggtatttccctttacgtttctcttgtctctttatgccttttgaaatttttatcttttcgaggtcgacaagggtgtatcccttgctcttgcgtattcctcaattgtgataacgaaatcatacctacgtagttcttccaaaacagaaccgtggctaatccgttattatcgtttttgaaaatatattctggctaaacaaaaggtcatgtaaagtgctggaccattatacgatcttttga

SEQ ID NO: 175318 - DNA, 280 bp, Glycine max
  unsure (1)..(280): unsure at all n locations
aatactagctggtctacaccaccaccgcccagaggagagtgtcaatttttttaacaanaccaatacgatatcgtccagcacgtgtatctgaccatattatgacatttgaacaacttaggatgtctttaattgcatggcatgaatagaacaactacgaaacacggtatatgaatatgtggtgcgtataaaattgatctatccatgtttcttgcttcatgattggtttacattcttnaacgaatgtcttgggaacgatcagtagtatatgaatgtttgatac

SEQ ID NO: 175319 - DNA, 58 bp, Glycine max
aaaaaaaaaaagggaatgtatctgaaaccaaaagaacggacaaccaaaaaaggacaag

SEQ ID NO: 175320 - DNA, 409 bp, Glycine max
  unsure (1)..(409): unsure at all n locations
ctttgtacaagaatgaagtctcttttccatttgnnagacaagcggcctcagatatcttaagaaggaggggttgaattaagatattccaaacttttctcctaattaaaaatctatcttactttttacttaagttatgaattcccttaatgacaatcttcttaaatattaattcaaatgaagcaacttgaattatgaatataaagcactaataaataaaggagattaagggaagagaaaatgcaaactcagttttatactgattcggccacacccttgtgcctacgttctgtccccatgcaaccccgttgagagatccactaacctgtagattccttttacaagtttaacacacaaagaaaccctctcttgtgttagagatttttacacaagagactccatttcttattct

SEQ ID NO: 175321 - DNA, 248 bp, Glycine max
  unsure (1)..(248): unsure at all n locations
caaatctcaacattgagagtgctacgatcatggtgataccgtaagctttgtacctaccatacacgatcgatacatggccaccatagtttaacccagtggtgtaaagagtggtcactccggtgagcactgatataatatataacgataacacgtaatttgaaattaccctggcatatattatttactaacaatataaaacagaaaaagtgcgatgaatccaccatacattaagatatganataatatta

SEQ ID NO: 175322 - DNA, 415 bp, Glycine max
  unsure (1)..(415): unsure at all n locations
aacaaaaaaataacaaaataaactttcatatagaatttagtcacaactatatatatatatatatatatatttctgcctttgagagcgtaactgtacgttgcatatttatttcttgattgaagctcactcgatttgattagttttctcatccttattacagtaagcttttatgaatttcatatggagagttattcatactttgatgatcacattaaagatgccatggaggacataaaaaaaatgcattttccctgtgaagtcctcccttgctatgtaatatattttttattcatcatcagccatgttatgtaataatcctatctcatattttgatatgtnggtntaacatgcataacagaatatccttaatcatttntatgcanattaagtaaatcatatatnatctatgtctttc

SEQ ID NO: 175323 - DNA, 314 bp, Glycine max
tgtcttaagattaacttcatcccaagactaatatcaacctctagaataaaaacatcttattcttcaacaaaatttctcctttccaaaggtttggtgacaggtaggcagtcatgaacaaccaaacccttataaacatcctttggtgtagccttataagctactcttgcatttgctagccttcttcttttgcttagttttcaaccttttaagcatcatctcctttataagcactaacacttgcatctttcaaaatattagcaacattagaggcagcctttaaggattcatatttctcttccttggaaagattttga

SEQ ID NO: 175324 - DNA, 404 bp, Glycine max
  unsure (1)..(404): unsure at all n locations
agcttctaattcgcaagcttaagattaattctctcatgcacatttttacgttcatggaggggaatatatacacacatacattatggattaatttggagaacaaaatacaataaatttcactaacttgaggttttgtttacttacacagagtttttatgtttttatcaactttacaataatttttcttaatttttaaaaaatattataccgtattttcttataaggaaggttattgtaaatgctataaaaaaataacaagtatttgtagaattttacgaaacctcgagagtaattggcgtaatttattcatttgtttataatttttttattagcataacattcttacatagtatttatcagttntggtgataattattctttcttagaaaatatgactaatcatc

SEQ ID NO: 175325 - DNA, 275 bp, Glycine max
atttaaatacagtaaatttaagttctaaaagattaacatttatagctggtgaaaaaatcctttaaatataaaaagaaaatttaaattacataaattccataatatcataccacataaatatttttattcgtaaattattatatattattcaaataatttattaaatactaaatttataaagtaaaaaattaattttttgtaaattaaaaataattaaattttaaatgaattaaacaagctaagcttgaactttatttttttttatacaagtcaag

SEQ ID NO: 175326 - DNA, 430 bp, Glycine max
  unsure (1)..(430): unsure at all n locations
agcttgtattatggttgatccagtatttttatatatagagtatcagnatatgaattgggtttagcccaggttcataacaaatttaaaaaatntatactcgatttataaaattaacaagagattttaatttcaagttctagttataaaattacattaaatatttaaagaaaaaattaatcacctataatgattatataaaactcgagtatggtctacaaaaacaaaatgaaacattgtctttaaagtctaagtttatatttttttgttaactttgtatttttaacatttgagacatagaactgtacgtactagcaagcagcggcacgttgagtaagtctaggaatacacgtgagatccaataaatagaaattaaaaaatatttgagaaacattaaatttaaagtttataatatataaatatttctaactat

SEQ ID NO: 175327 - DNA, 262 bp, Glycine max
  unsure (1)..(262): unsure at all n locations
gtgggagtacgtgagctcagttggaggtgggcaacatgggatggtgggtttatgcgcgcattgtggatgtggaaaancttgtgtgcaccattctccgaccggcacctatttccacatgtgatgggtaccccataatcctacaagcgtgagatgaggaagtgttgaagggtgaaacttcctgctgttattgttgaccacagagtgatacctgtagatatgtcgcgggggtaatgagaccttggggacgtcatgtggggtgcta

SEQ ID NO: 175328 - DNA, 402 bp, Glycine max
cacagcacaagctaccacagccaagcaaaacagagcaaaggcagataactctgccaaaacaccaaccaaaaatcacagcttttcccactcaaagaccccagttacaattccttcgatccaattcgttaaccgttagatcgactccaaaattttactggaagtctatagtgcataagcctacattttgaccgttgggatctactagcaaacatccagaactcattctgcactagactttccacagccaaccacacacaagcatttttctgcatttgtgcaaaattctgctgcacaatatcacagcaaatattctgcatacgtgcagatttcgaaaatcacccttcctctcatccaatctgtgccaaatcaaatcctacaatcccaaatatgtataaacatgtt

SEQ ID NO: 175329 - DNA, 346 bp, Glycine max
ctcacctctcttctgggtgagaaatacaagtatgtgtatttctgaaaaaatgacatccttagtgaggctggaagtagcatgactgatatatgataataaatagtgttgaactagaacaccaaacgtattccccattactttgtgtggtttgccccggatgcacatggaattccgtctatctacatctgccatttttatttgcgatacagagctagtgtcatttcttgaaccatctactcaatactagataccaccccataagtgattatggccatccacctttagtgcaggtttggaaaataagtccgaccattaggcccccattctttaaacacggtccactttg

SEQ ID NO: 175330 - DNA, 340 bp, Glycine max
  unsure (1)..(340): unsure at all n locations
atataaatactatatcttaagaaatacacatgtagatggcatccttaggacttcatgcagctgatgtttgtcgccagtttcatcatccaccacccttaccttctctggcttctcacgtttattgttgttaaacccatatttatgtcttcttcccttcatggcttgttttatcacaactttagccgaatctcctatcttcatcatagttgaatctcctgtcttattctccaatgacacactntcatggcctgtatctctttttttcatatgttctagtgcttcagcttcagaatgcatagtgggtaaactcactagcatttctgagttaattcctggattc

SEQ ID NO: 175331 - DNA, 265 bp, Glycine max
  unsure (1)..(265): unsure at all n locations
gagagagaaacagatgtcaggtgtggccctctttctctggattgggaacccgtcgtcctccgcatgatagctcccaccgctgccgcttataatgacgataaagccgtctacgccgcccaatgctctggcttgaaatcaaaaccctaaaaaagtatttgttgccaaaaccctaatngaattgatcagttaattgttgtcttcacgataactgtaaatgttgtttaacacagttaacttttggagtgtnatgtngaaaagtttggtg

SEQ ID NO: 175332 - DNA, 329 bp, Glycine max
  unsure (1)..(329): unsure at all n locations
tactaagagatcgctctcaaggaatcctaaggttgtcacaagagagttatatcgataaggtcctaaataaattcgacatgaaagatagtaaaccaagagatacctcgatagccaaaggagacaaatttattctcaaacaatgccccagtaatgaccttgaaagaacaaagctgcaaaagattccttatgcgtcagtagtaggaagtctaatgtacgctcaagttngcacttctcccgatatagcatttgtagttggagttcgaggtagatatttgggtaatcctgtaatgcagcatcggaaagcagcaaaacatgtaatgtgttactta

SEQ ID NO: 175333 - DNA, 285 bp, Glycine max
ttctctcattttcataaaataagagttagataatgatctgaggaagtgcaaggaagagttcatagagtttgagaggcaggatgtgaagtatcgagaggattttaagcacgtgaatcagaagatcaaaaagcttgaggataaagtagataaggtagagggaagtcatagtttatggcaactgaaagtaaaagtatgtgttcatgagacatcttatccttttgtttatactttctatttcaggattcatcaaaaattgaagcccttataaaagagggtgaggaatca

SEQ ID NO: 175334 - DNA, 474 bp, Glycine max
  unsure (1)..(474): unsure at all n locations
agcttgatacatgaatttgaaatntatgttcctcataaaactaggagattgggaaacaaaaacttcctcatcaatatatccatttagggaaacactctttacatccatttggtacaacttaaaattcattattcaagcataagcaagaagtaaccttacaacctctaatctagctaccggtgcatatgtctcatcaaagtctataccatcttgtgggttataacctttggctacaaggtgagccttgaaaacctattttcctagttataacactattttcatcaagcttgttcttaaaaacctatttagttcctatgatgttcaagttattagtactttgtatcaattcccatacatcattccttttaaattgatntaactcatcatgcatagacataatccaaaactcatcttttaatgcatcatcaanatttaaggggtcaacttaagacacacaagccatatgttcacaaa

SEQ ID NO: 175335 - DNA, 323 bp, Glycine max
  unsure (1)..(323): unsure at all n locations
ttacacaattatttttctcaaactggaacacctcaactaaatcatgttgtggagaggaaaaatagatctcttgaagaagaagctaaaactcttctaaatgaaacaaagctaccaaagtacttttaagttgatgttgtgagtactatatgctatactttcaactcttataagacatattttaaagaaaactccttatgagctttacaaaggaagaaaacaaaatatttctcatttaagggtatttggatgtatagatgctttgttttaaacaatagaaaggaatctctttntaactagatgattgagatgatgcatgtttacat

SEQ ID NO: 175336 - DNA, 446 bp, Glycine max
  unsure (1)..(446): unsure at all n locations
cgagttgatttagccttagtttaccttanttattagncaattcggttaagaatgagaaatcccaaagagaaaatgtccggttgattttccgctttattttactaaaaggtatatttttgttattatattattattttatctctttttgatntccaatgtggttacggcacgaccgaacggtcggtatttattttaaccaaagtttacggatcatacaattcaaacgttcggtggaaatttattttatttttaagttaagcgagaaatgacttaagtaaaatggcttatgcacgtcaacagggggtataaaaagtaaatgacatgagaataaaaatacacganacacaatgtggaccaccacgggtacatagaatgaatcgaaaagcttggttcaaggtacttacncccgtgagatcgaagaacgatgaagaacgaatgaagaacgt

SEQ ID NO: 175337 - DNA, 277 bp, Glycine max
ttatgacttgcctccggacttcagcccccgtgccacccttgtagatttaatccaagcccctacttttgatgggcaactcccgccttacgacgactatcccgggcaagacgatgaggaaggagatacccatcttggccccctgctccacctgaaagatccgtccccacatgaactacccctacctaacatattccgccatgttccggcctcacccacacccgttaaagaatctgttcccttcgcggaagataatggaaagattgaggcacttgaagag

SEQ ID NO: 175338 - DNA, 404 bp, Glycine max
  unsure (1)..(404): unsure at all n locations
gcttgacctccaaaactcttcgacggtggctaaagtgtanatgggtcggatggagctgccccatgcagcttgtttggacttggcggaagggttgtcgaaccanaaggtccaggaattctcgagagggtgggggttgcggacgaaggcggacggaggctttgatgtggcggaggcgccgtcgtcaccgtcgtcggggatctccccctcttcgagatcttcgtcgtcgttgttgtcgttggcgaccctgctagggttttggtcctccgtgatggctgatttttgggcatcttccacaaccattgttatgactctctcacactcacaaacgctntttttcttcctttctcagctctgngttttatgagatgcaaatagtatagacgcgttggttagtatttcactga

SEQ ID NO: 175339 - DNA, 224 bp, Glycine max
tgtacgtatagacaaaggagaagaaattgggggtaagaatgggaaaaagaaaaagattgggggagggagaagcaaactcaatcgaataattcccacgtggttgaagatggaagatgaacaaaggtctcccacttggttgtaacaacatcaggctttattcttgcattagataccttaagttgatcagttttttacacatttttgtactctctttccctgaaaaa

SEQ ID NO: 175340 - DNA, 414 bp, Glycine max
  unsure (1)..(414): unsure at all n locations
atggagctancagtatcatggcatacgcaacagggtctgaataatgaaaatcgtggtcatgttatcagaatgatgtataatattaaatagtatatgcacagttgctgtgcaattattcaaattgtgctcttggatcatatatcatactaagcttttcaatatttgatatacgcgaatacattgaattgaattcaatattccaatgttgggcgaggacagaaagaaatgcagtaataccaattgtacaatcaatggctaccgcctctgatattcttatttgtgattcaaaccaccatatattcgcatgttgtgtaagtggttactgattgggaacaacatgatataaatacaacagttttattataccacaagtaatgtcaatattatacaaactagtggagtatatataatata

SEQ ID NO: 175341 - DNA, 266 bp, Glycine max
  unsure (1)..(266): unsure at all n locations
tgaatgtgtagaagtaatgaatatagaggacactaacaactatttgaaaagttcattaaattgatatcctaaaatttgtaaaatcttaattgaataagtttcgtgatattgaatcaacacttgtaatttttttttttaaagttgaataaaatataatgatattcaattatgttttttataatttaaaacactcttgtgacattaaaaaatatatgaatggtggatgaatttgatataatttaannttttattntnaaatatctatc

SEQ ID NO: 175342 - DNA, 449 bp, Glycine max
  unsure (1)..(449): unsure at all n locations
agctntgatgccaacattggagagggtattgaaacttcaagatgatgcgctccatgagaggttggatcaaatggagaacagagatcataatgaagaagaaaggaggagaagagggaatgatggtgttcctagacaaaaccgaattgatggtattaaactcaacattcctccctttaaaggaaagaatgatccggaggcctacttggagtggtagatgaaaatagagcatgttttctcatgcaacaactatgaggaggaccaaaaaggtgaagcttgcagccacggagttttccaactatgctcttgagtggtggaacaagctacaaaaagagagagcaagaaatgaagagccaattgttgatacatgggcggagatgaaaaagattatgaggaagcggtatgtgccggctagttactcaagggatttgaattcaagctccaaaactaac

SEQ ID NO: 175343 - DNA, 299 bp, Glycine max
accttgacccatgatgataatttccatcctcgcccttggaagaaaacaaaaaggaaaaagaagttcccgatcaaaggtcggaaggagacagaagaaaaagaaaattctcaatcaaagatcgaaagaaagcaaaagaaaaaatcccctatcaaaggttggaagaaagcaaaaaagaaagaaaaaaatatacaggaaggtctttggactagacaatatctaaacaatacataattgtcacaagccaacaagataagaaaggaaaccacgactggaagtggtcctctccctttgattaccaa

SEQ ID NO: 175344 - DNA, 470 bp, Glycine max
  unsure (1)..(470): unsure at all n locations
agcttcaaaccaaagcaactcanattctatttatctaaaacccctcaatttagtggatnttcaaggtttgagaactgataatgagaatggggtaattntggagcaaactctcatctcacacaagtctataacattaatctaaactcgctcaaactggttttacgacgaaaactctaccgaatcaaaatttgactcctcaacccccaatttaccctagaaatggctcttgccctcactttggtcattcattttcctcctttgcacagcccaagctttcccacagtcctaaatgacatttcaaactaggattaactcactttaacctccaattacaactaaatccagatttagcttttcaaatccttaaagcatcgcatttttccactcatatcactacattctcactttntaaccctaggttaactctacccttcatctctatcagttnntcatcagccatttcagcatac

SEQ ID NO: 175345 - DNA, 278 bp, Glycine max
  unsure (1)..(278): unsure at all n locations
tatcatctcaagtttccttgtcaagtaaatggatcatttttaaagtccaacgccttataatgatcacctttcaagtaaaaagaatcgcttgattcactcttaagaaagaactacgtaagtctgatttcctcttcgatggagggtacgtaggagcaaaagccccgcttttgtcgacctcaaaaaataaaaagatataaaagttaaggtaatacaatttccacaattctaaaaaataggctgttatnctttgagacatacgtgagatgtggttatacctt

SEQ ID NO: 175346 - DNA, 361 bp, Glycine max
  unsure (1)..(361): unsure at all n locations
agcttgtatactgaatggagtatgttgtctctcnttttatgtctgatatgccttttagaggcttgaanagtgcgagaaaatgagttgtgttttctgcgttttctggaaaacgcgatgaactcgctaagcgagaatgctgcgctaagcgagttcatcaatactcattgtatataagcgttatctgaagaacttgctaagctcacttactgcgctaagcgagttcatattttgaggatgaacactcatcctcttgctaaactgcatgtggctaagcgagcttgaatccctaagcccaagtaacttaaccatttttttggtgatagccgcgtgctaagccgagcattcctgagccaagcgcaac

SEQ ID NO: 175347 - DNA, 248 bp, Glycine max
aagctcactactcatgattcttctaaacctctattctcttttcattttcatctttttatttcataactattttctattgatcccagttaacatcttgtatgacctgcggtgtggagatggggagaacatctcactgtaatacctacctcgagaacgtagtgctaagtataataaaaggactcccatcaacttatgttactcaatcactctgtatattttaagttttttgataatgactttttttacca

SEQ ID NO: 175348 - DNA, 423 bp, Glycine max
agcttattagcaaatgtttatgtatatatttatattctcatgtcttcatgtctgcataacttttatttccacatactaatgggggcgggaaagttaaattccatgggaacatgacaaattattttctaattcccctataacttccaattttacttttatttttcatttattattttaactttaaaaatattcctaaaattgtcaaaaattaaacaaacgcatttttatattcaataaaaaatagcattctcaactataatattcttttagatgtgcttcatgggaatgcaaaacaatttcgtgaaacaaacatccttttagaatactcaataatgtatatatagaaattaagaaagagtgaaaatatttttagtaaattactactagtctttaatagatattatgttcttagagtaaatagta

SEQ ID NO: 175349 - DNA, 206 bp, Glycine max
  unsure (1)..(206): unsure at all n locations
cttatgttttcaatggtntgtgaaatgggtctgtcgaaattactggtaatttgcaagataactgttgggaatgaaggtctcaagcttatgattttcagtgtttatcaagatagtgtttggataaaggatttcaaaatttcaagctttgttgcttatagtgctcttactcgattgaacaagattggtctataccaaacaagncattt

SEQ ID NO: 175350 - DNA, 362 bp, Glycine max
  unsure (1)..(362): unsure at all n locations
agcgttcgcgatatgcgaagatgatattccgagtactttggatttggtacgaccatgctctcctgatttccagctgggaaattggcgagtggaggaacgccccggcatttacgccacaagcataatgtaaacctttacggtttcaaaagctctatagttgggcctaggctttatagttttcatttggttaaggctttgcgtcttttggttntgaatgtataatacaaggatctttcttcatctgttcctggtctctacccattctcattcatttgcatgtttacttctttttctagaacggcagattcgatgacgagtcccccgaaggtactaatacctgtgacccgtctatcaacttcgag

SEQ ID NO: 175351 - DNA, 325 bp, Glycine max
tctagtaccaatttgagtcacactccaaccacatttttgaccacatattgagcatgctcaatagatacgacaaatgataacaactccgccttcatgggtaatttcgcaccaagagacaatgcaatacttcctctaaatgcaccaaacccatcgcataaatttgcaccatttgcatgctgtctatgggaacctctaaaagcaccatctgtgttgtattgtatgtgcccacaaattgtgaaatgccaatctacctactttatctgaacactattatgagcgtgagcatgaacgtgaatttttatggtgatacaactaaccaacaatc

SEQ ID NO: 175352 - DNA, 389 bp, Glycine max
  unsure (1)..(389): unsure at all n locations
agcttaacaaatctatatatggtttcattttagtctctcgntagtggtaccttaagtttcatgggataatttcttcatttggttttaatgaaaaccccatggatcaatgcatataccacaaggtcagtgggagtaaaatatgtttccttgttttatatgtatatgatattttacttgcagccaatgatcagggtttgctacatgaggtgaaacaatttttctctaagaattttgacatgaaggatatgagtgatgcatcttatttcattggcattaagattcatagagatagacctcgaggtattttatgtctatcataggaaacctttatcaacaaaattttagagatattttggatgaaagatngttcaccaagtgtcgctcccatt

SEQ ID NO: 175353 - DNA, 312 bp, Glycine max
  unsure (1)..(312): unsure at all n locations
ngaagcaattnttgttggatcgagtggcctcattattttaagaaggggggttgaattaattattcctaaacctttacaaattaaaaattactctgttaaggcttttactaaattgttaagagaatgaagagtagaagagaaacttaacaganagtaaaagtgaaaattaaatgcacagcggaaagtaaaagagtagggtagaagataacaaacgcacaagagtttttatactggttcggcgacaacccgtgcctaccttcagtccccaagcgacctacggtccttgggatttctttcaaccttgtaaaaatc

SEQ ID NO: 175354 - DNA, 339 bp, Glycine max
gaatcttcgcatcagctctctcatctcaatcttcccctattcaggcaacccttttcgtcttttcactcaattttttttatctttttcctatacactctcacctcccgagattgcatgttctggtggttgttacatgatacgtgttggtggtttgagtaattcaagtttcattttttgtttttaacaaatttcaatttttgtggtgcagataattggtgtgggaggccccagttggagggataatggatatggaaactccaacagcaacaacttatttgatgggtgccaaggacagagtgatctttggagtgagcttgacactgatctttatcactggac

SEQ ID NO: 175355 - DNA, 306 bp, Glycine max
cacttggtgatcctcatatgttcacaaaatccaatgcccatcctttggtagccttgacacaactctacaagcttttcaaaacctaaggcaaaatacgtccctggtccaatgctcgataaacccaatgttcacccttgctaagttgttaactacgtctctagtacatgccacccacgatgagtgacatgtatgcaagatcacaacacacacgttgcatataatactcgttaaacccaagcttcacacttggtgatcctcatatgttcacaaaatccaaggcccatcctttggtagacttgacataac

SEQ ID NO: 175356 - DNA, 430 bp, Glycine max
  unsure (1)..(430): unsure at all n locations
tgggctgcttctggtagcattatctattgtatagattcaaactctgccttttcccttganattcaatgctcaaacaaagttaacgcttgaaaactatccttttacacttatggcttangcatcgtcttctaaatctgcatataacatttatgttgaactgtgatccagtgccaatgattatatatcatttatnagtgaattgctaaacagcatgtataagcaagtattaaagggaatgatgatttgtgatatttgtaacttcttgtctagatatggactagtacactgcaacgaacaattctgacagccactccaattattggatttcccaaggttagtgtcatacttaagtttatggttgtgtacaatcatgttatttatntcacgagaaatatgtngacaaatgtacacattttgacttactatctat

SEQ ID NO: 175357 - DNA, 339 bp, Glycine max
aaaaaattgtgcatctgagtaccttaaatctaagctatatccaaatttcgtctgaaaatagaaatatcatcgtatcatatttcacccatttgcttgcccaataggacccatccttatccttatactagcaataataactaacaatattgctatagccagccacgtccaattagactttattaattactgttaatagaactttatggcttacctatgcttttatactgttaattactatttgaggatattatgtaatttggaattataattgactcacaagtttaaatatttttcctaaatgataatattaaggaactaaaaataaaatttacttttgga

SEQ ID NO: 175358 - DNA, 481 bp, Glycine max
  unsure (1)..(481): unsure at all n locations
ttaagcaccgcggctgcagcttttgcgttccgctctgggctctgtatcctataacaatccctcttaatactagctattttgaattctttagttcctgaatgtgcaaccttaaaattgttgcttgttcccctctttgagaatgaggaggatcttcataggacttcatccagctgatgtttgtcgccagtttccatcatccaccacccttttcttctctgccttctcacgtttgttgttgttaaacccatatttatgccttcttcccttcatgtcttgttttatcacaactttagccgaatctcctatctccagcacagntgaatctcctgtcttatgagtttctcaaacttgtttattcacttcatgaagaactacganactgctgtggagcaaccgagtgagtcctaatgttatatactccttatagcacatgcatagtgacacatcaacattatgttgtggcggaatagatggtatctta

SEQ ID NO: 175359 - DNA, 273 bp, Glycine max
ttttaaattcagtgtttgttgattggtttgaagtgatcgattgcgtgatttgagtgaattggaatgcataaatcatatatgttttgaatcaatgtgtagtgattaaaaaagaaagaacatggattatgatcatgactaaaaatgttagtcagtttgacagtttgattgtgaaggtattcattatccacaacccggtgagagtgtgatctttaagaacgactagcattaagtaatggtttttgcatgaacctctgaatatggaatgaatgcatg

SEQ ID NO: 175360 - DNA, 483 bp, Glycine max
  unsure (1)..(483): unsure at all n locations
ttaagcacctgggctgcaacctgaggcgttcaatcgcatgtgttgtttggctcactcgnnnccataagccttcgattaagcaatctatgatgtggatggatttgacatttgaaatctgaaaagatctcaaggagtgtttttcggattctgacaagcttcgcattaatgatcttcaagatcaaatccacagttgtaaacaaggtgattccagcatttttgagtattatactcgtctaaagattctatggaaagaattggaattgtatccgatgtttttgctatgtacgtgttctagtattcgttcttgtgggctcattcctaaacttaagaaataacgtgaagatgattgtgtaattcgctttttgcatggtcttaatgatgtgtatgcacaaatttggtctcaagncatgcttatggaacccatgccttcttttgataanaccttttctcttgtgcttncatatgatangggaattattggtg

SEQ ID NO: 175361 - DNA, 266 bp, Glycine max
gaatgtatgtatgcatgactttgctgatgtaaaatgaagaatcaaacaatgctcattcgcttgaagattaattcatgattgttgggacaaacaaagccttgattcaagatttcttcgagatctatccttgcctcaaaacgaatggtttcaagtgatccaatgcatacataatcgattaccaatacatgttattgattaccaaggcacatgctattgattaccaatacatgtaatgtattaccaatggtttgaaagtgtgtgattga

SEQ ID NO: 175362 - DNA, 448 bp, Glycine max
  unsure (1)..(448): unsure at all n locations
agctntaagaaccgttcttaagccaatacttgttttgttcaagatagngggaagggggagatttagttgaggctattctaagatgatcattatataaaaaccgtcttagagaagacacattctaagacggttgttatataagaatttccttaaaacacattctaagatagttcttatataataatcgttttaaaatgacttagaacaaacacattctaagacggttcttatatatgaactatcttagattatatctcttctaagacgggtgttatataagaatcatcttagaatatgcatcttctaagatgaattttatatataaaaagtgtcttagaatatgtctgttctaagtcattctaagacggttggtatataataaccgccttagaatgtgtctcttctaagacggttcttatataacaactgtcctagaagatacatattt

SEQ ID NO: 175363 - DNA, 359 bp, Glycine max
tttattcccatcacttttctagcccattgatgagtgggtctcatccactacttatcgcgcttttacctctttttaccttctactatacagataattatagttttatcatttttcagacaattatccaaggattagttacttttatcttaagaattcatttgataattcatcatttctattctaaaagctataaaagatttcatttgggatcaaatgatatcattagtcttttcatttgattgatatgagtataattaatttgctaactaaaaatatttatgaatcttcgtgaacgagagcaccataccaatattatattagaaaataacaacttagattttgagacacacctaatacat

SEQ ID NO: 175364 - DNA, 393 bp, Glycine max
  unsure (1)..(393): unsure at all n locations
agctntcttgagaaaacttccttgttatgtctctttgagaaaacttcctggggaagctagagcttagctatacacacccctctaataactaagctcacctccttgagaagtttccttgagaagattcctaaagaagttagagcttagctacacacacctctctaatagctaagctcacctccttgagatgagaagctagagcttagctacaccccctataatagctaagctcaccccatgccaaaatacatgaaaatacaaaaaaagtacctactacaaagactactcaaaatgccctaacatacaaggctaaaatcctatattactagaatggccaaaatacaagccccaaaagaaggaaaaacctattctaatatttacaaggaagagtag

SEQ ID NO: 175365 - DNA, 318 bp, Glycine max
  unsure (1)..(318): unsure at all n locations
tactaagctcacataaaggtataagaggtataatatntcacaatgcaaagaatctaagaataaaacttgttaagttctttaataaagaatctcacacaaaaatatatatactaaaagaaatcatcattgaaaagaaaaatccaaaataataacttgctaatattaatttatttaagtccttccccttcctttttggtcatcatcattaactctagttcatcaagaataaattaacaattttaagaattttattctcatcaagtgatccaaattcatctcctacaatgtcctacattntagtttcctcttgatggtatt

SEQ ID NO: 175366 - DNA, 415 bp, Glycine max
  unsure (1)..(415): unsure at all n locations
agcttcggagattccacctaactcttgtttgtccattgggtgtccancccgaacctaggataactaaagataaataacatctgacccatgggccaacatgataagtcatcccattaggaaaacacaacggaaattattttccacacctcccatttgcttcctgcacctactctggaatggaatttttacactccaaaaaaatctttctcgaatgtaattttacaatcgagattaagtgttccaaaatcttaaaatatgtgcaggaagaaacatcggagatataggaagcagccaaaacaaaacctgagcatagattggtgtccaattactaatgatcttgttttcaattagttagatgctcgagaaataaaaatttaaatgcagcataactgtatatgaccccatatgctattga

SEQ ID NO: 175367 - DNA, 289 bp, Glycine max
  unsure (1)..(289): unsure at all n locations
aagcattaaggcaatagtgtctgtttgaaaacgccattactataattagatgacaaacaataaatgatacaagagtctaaatcaatagatgaaatgcttcaagtgataattaacttgtctagagaaataacatacattccggaacatctttccttgtatgtacaagaatttgcagcaagacaactttatcacgccagagtgaattctcctcaaggaacttttcaaatgccaagagtttttggggaattncttttatcatatcaagacgataganacccaanattacctg

SEQ ID NO: 175368 - DNA, 341 bp, Glycine max
agcttggaacatgaaaataaattattcttaaatgctgtgaagaccaataagttggattgcgaaaacaccaaggactgagttctaggtgaccaaattgattctttgaaataatatctgggtagggctgctgttcaaactatttcgcttggtacaaaaggcacattcctaattaagctataaagagtagaatattgctcgatctatctttttgacaaaagttattgcccctacaatatatataacttatatttggcccacagtcaattttctggcttgctgaatttcttataacagccatattttctattatgtatcactggtgaaacaatattcttcatcat

SEQ ID NO: 175369 - DNA, 455 bp, Glycine max
  unsure (1)..(455): unsure at all n locations
agctnntcatcctactctcacctgtgttttataaaaaatcatttctcttatcacagctcacttttaccaatccctccaaagggttttataactcagctaattggtgtttctcattttttattagacacacaagatgatgcacgaagatatcctgacaaagaatttggttataaaaaggtaatgatatatatgaatgtcaggtgacaacatttatttatgtgatggaatgatgaagctttatttattacatgacacatatcccccaaacaaagggttcaaaatcccgaaaaaagtgccattaactaatgcataatgcatggttcttaactaccacctcaacaacaatacaatgactctacaaattaatacagtgtgattctctgctacacgtctcaactcccgctgttntaggtctcagcctctcaaagacaactccatctctcattcacatgctc

SEQ ID NO: 175370 - DNA, 275 bp, Glycine max
  unsure (1)..(275): unsure at all n locations
ctttgtgggattngatggtttctgatgaccaatggtccctcctgctttgctccagatttcataagaatcaattgtggattggcagttatataatctagtctattttggccttcactcaagaatcatctttcttccactagtgacaactttgtctagactatatgtaacaattccaaagtttattgttggagagatacctggtgcttggattgtnccatctttgagattttgctaattccccttcctcattacagtctactttacttatgtgtttc

SEQ ID NO: 175371 - DNA, 402 bp, Glycine max
  unsure (1)..(402): unsure at all n locations
agcttgctgngtttcaaatcttgcatatttctcgtttgactatttaggcacccctatttttaaaggcaaaccgaagaagctgcacttgagggctattatagatgaagtcaagcagaagctcacagcttggaagtggaagcttctttctttgatggggagactacaactagtgagatcagtgattgaatgatccttgatgtattcatttcatgtttatttgtggccttcaactttactcatttagttggaaaggcatgttcgtaatttcatttggttgggtgattgtgagcataggaatcttgtcacagtttcttggaaaaaaaatttcagacctcttagtgagggacaactcagacttcgttcttttaaagcgctaaataaagccttaattctgtctctcac

SEQ ID NO: 175372 - DNA, 226 bp, Glycine max
  unsure (1)..(226): unsure at all n locations
tgatgaaagatgatctgatactaatatgctggatacctactaaacaatgtaagaatctgttacattggtcctatataaagactacattggtcctatatagcatagacaaatgaagactacccaagccatataaagactacattggtcctatatatcntngtgcntctacaaattgtatgtggaccaataacaacaccttcacacttgataattaacatttatagca

SEQ ID NO: 175373 - DNA, 331 bp, Glycine max
  unsure (1)..(331): unsure at all n locations
ctttttgtgntcctaaatgggggaatgtgctcaaatatgtggggcaattttggtttggtttcttgcttgattgggttgaattgggggtttgtatgagatggccctangcctataatgcattttgaagtaatggggcatgccacattgtccccgttttcttgctattaatgcctaaacgcgcgcccaccaagtgttcggtgaaatgcctcaatggcattagcgtgtgattttcgtagggaaacaacccatggggcattttggtttgcacatattntctatttttngggacatgcattcagttttcaaagggctagagtaattgccccacata

SEQ ID NO: 175374 - DNA, 289 bp, Glycine max
gagtcatgtcagtttgagaaacacactaataattcctttcttaaccaagtcaataaatgggataagtccttatttgccttaattcatttatatatttgggtttcatcacgtgttgttacacattcaaattttaaatattttgttacattttttgatgattactcacattgtacatgggtatgtttaatggagaacaagtctgagttgttttctatatttaagactttttataatggaataaaaacatagtttggtatcctatccactctttgcatggtgcccacccccc

SEQ ID NO: 175375 - DNA, 380 bp, Glycine max
gtgatggtgcaagtctactattcagatccacaaatgacacacgattgcaccattgtcaattgcccacgcttgactgagcacacgtacttccacgtagcccttattctctgtactattaacaccgggtcgccatgaatccccccaagctttcacaacatccaagaaatttcaacatccaaacatcatgaactatcaaaaccaagcataatagggtagaggcagaaaactctgcccaaaacacaaaccaataccacaacttttttactcaaatacccgaatacaattcctttgttcaatgtggttaccgcaggactactcgaaaatttactggagggtccactacataagtctacatttgaccgttggatctgtagtaaatt

SEQ ID NO: 175376 - DNA, 435 bp, Glycine max
  unsure (1)..(435): unsure at all n locations
cctgcggcatgcaagcttagcaacagtcccagacccaattttcttattctctatgncatgatttctatattaccaattttactagctgttaatgttgcatcatagatttgctatgtcatctagctttggtctcatctctttaccttacaattcagtcaattctatcattaccctctttcaatatacagaattagcaacatgcaaacatatctaatccaggaaattccaccactaatagtcagcctataatccataaccaatgaaatgcctcatctccgatttattccatcttctaattttattgtagtgtctgcaaaataaaaataagcatttggctcttcgtttgaacataaatctatttgttagtatataattcactcaattctgcctttagtcatttgtaacatgcagaactatcaacatgcaaagagatct

SEQ ID NO: 175377 - DNA, 128 bp, Glycine max
  unsure (1)..(128): unsure at all n locations
tgaaattaactcaccccttaaaatntatttcacaaaacctagtcctctcatttatgttcaatcctgtaaatttggtcccaagcccatattttagatgttgactggttccatgaacattgattgaaaga

SEQ ID NO: 175378 - DNA, 373 bp, Glycine max
  unsure (1)..(373): unsure at all n locations
aaatgataaggggncgaacttggatggaataggaatttatatgatacttaattccagagatgaatactttatttccatcatttatatgagtgaaagggaagaaacaccttgcatctcatttattcatagaaataacattgatgaacggactctacctttgttggttatattatgctaaatcctatcttcatataccctaatgtatgggttggaatcaaatcaaccttctttccccctatggtcccgcttgtgtgagagtgactgtagatccatctttgttcctgtgtgattcatcatcagtatttctgaaaatgagtaatgtgtctctaactgcatantaatattcaaacttctcataacattcaaatacatg

SEQ ID NO: 175379 - DNA, 231 bp, Glycine max
  unsure (1)..(231): unsure at all n locations
aatgctttgaattgtgggattcatggcgtcaattatttttctaattctcttgtgaccttaccaaaatattaatatttattctttattttgtttctccaaaaatctcacatatgtaacgatgcaacttgctttaaaataattccatcgcataacctatgagctgctgcttcaacttgtcaatgctctgtttattctcnatccgaactcctttttnaatttcatgttatttaa

SEQ ID NO: 175380 - DNA, 376 bp, Glycine max
  unsure (1)..(376): unsure at all n locations
agctttgatcttccaccaccaccgccactatcatcttatatctctatnnnnatattattagtactttgattttcagccttgtattttggctatatcattatggtatttgaacaatttactattccctatntgcatggtatgtttgaacaaatattatgttatttgactatatgggttttatagataatccttttatgattgttgcttcatgattcttgcttcatggtttggttgttagtttctcaatgaatgttgtatggatgtttaagtatgtttgattatttcaaaattgctacgcactttggctttttattgatgcccaagggggagagaaatgggattaanatcaagaactcacatgagtaatcaatttaat

SEQ ID NO: 175381 - DNA, 422 bp, Glycine max
  unsure (1)..(422): unsure at all n locations
agctngngccaaatattttatctatccctcctttctcacaacattgccacctacctaccatttccttgtatttttttcacatcttggggtggttgancagtttaaacttttcttgaattgattgcaagtttggtcttgaatgaatactcttaagaaaagggtacctttcaactttttgaacgcttcttcttcttcttcttcttcttcgccatgtatgtaatgtatctctgccctttatcaacaggtactgcctcgtgtcattggatgtgtgaatatctgaactcatttcacagaggtcatgcattattctgctgcctctctttgcattcaatacctgctgtcggtttagacttggaattcctgattcaggattgttctaactaagtacactcactaatgcttggttaatgggatttcatttc

SEQ ID NO: 175382 - DNA, 301 bp, Glycine max
  unsure (1)..(301): unsure at all n locations
ataagatcaaaggagcanaagtacgtggaatgtttgatttttataactgagatgaaaatttacgcacctgattccagtgtttgacacttgttgcatggttaggaaattcaagggagctgaacaaaaaattattcacaagcacagagaagaagcagatcaaatataaaaaacatagaatatgaaaatgcatgtatttacccggagaggcaagtaatcaatgaatgtacaaaacataaccactattggcaagaatattatagtgcaacaattggttaccatagacttataantaacacggtga

SEQ ID NO: 175383 - DNA, 461 bp, Glycine max
  unsure (1)..(461): unsure at all n locations
tgcaagctttacatccattaatcaacaatttatcacgtatatgagatcaaatttccttttcagagctatacttactaaaatctagagttgtcccttgtcagggtggacgtggccaaggtaggctctaagatctcgcacgtcgaactgagagtagcctttgttaaaaggacaagagggggacctgcanaataaaggacttcgacactgaagtaagtacgagagttaggtgagaataaatnttgtaaaagggtgagatagaacctgttacttatagagtggagtggaagttgcgggtccttattggttgggattgttacggtgttgtaacaacccttgcagataatgactagcttgtagataattgtagcttacagataatgtgtaccttgtagataattgaatacctgccacgagattaaaaggcacaacatattcaaataatgggtactagatataaccta

SEQ ID NO: 175384 - DNA, 435 bp, Glycine max
  unsure (1)..(435): unsure at all n locations
agcttgtaggattatgggggatccatcatttgtggtactagggggcggncgggcgatggtgcaaaacaagtttttccacatccacaaatcacgtataaacccaccatcccctgttgcccacctccaactgagctcacgtactcccacgtagcccatatcctcgtttctcccaacaccgggtcctcatcaatcctcccaagcttccccaacatccaggtaattcaacatccaaatcatcacaaactaacaaaccaagcaaaacagggcaaaggcagaaaactctgcccaaaactcaaaccacaatcacagctttttctcacttaaagaccccagtaacatttcctttggtccaattcgttaaccgttggatcgactcgaaaattttactggaagtctctattacataagtctacattttgaccgttgggatctact

SEQ ID NO: 175385 - DNA, 302 bp, Glycine max
  unsure (1)..(302): unsure at all n locations
atagaacactttttatatgtctactatcatngntattatttctttcttcgtcattgagggaaacacttaggctgccagatccctccacctttgggcgtattctttgaaagattcatgcccctttttgcacatgttctgtatttgcatcctatctggagccatatcagaattgtactgacacttcctaatgaatgcaaccattatgtcctttcgagaatggactcgggaatgttgcaagttagtattccatttgacagctgtcccagtgagactagtggtntannaaatttccnccccccccc

SEQ ID NO: 175386 - DNA, 381 bp, Glycine max
  unsure (1)..(381): unsure at all n locations
tttctatcttgcttttcttattggacttgtactacttgtttgcgtgtagcatcgcatcttttttatggcctccaaattccaatgcacaannagttgcaataaaagatgattgggttctgggtttagatgcccttgttgcaaattacaattggactgccactataccttcagacacaagactttgtatgtcagaaatatatactgtatttagtttaggtaggcataatttatgagagatgacatatcccttttttatatgttcccttataaatgaacttaatatctctataaaaaagatacacgtgaacaacatactcgttttaatatattgaaaacacaaaactatttgaatttacttagagaatattgtaagaataaaac

SEQ ID NO: 175387 - DNA, 172 bp, Glycine max
  unsure (1)..(172): unsure at all n locations
ctctggatgctttttttttttctacatanatggaaattgaattctgaccaatctcctatgtaataaaatgttaaaatacttcttccgtcctaacaatgtattattttttacattttcatttttgtaatttattttggtttttttcatccttaaataattttagataacactt

SEQ ID NO: 175388 - DNA, 104 bp, Glycine max
  unsure (1)..(104): unsure at all n locations
agccttgaggaagaaagaagaattgaagttgattgactgcgttgaggaaaaaattgattgatgataaaaaaagggaaaantatctgggcatagtgatcataatg

SEQ ID NO: 175389 - DNA, 207 bp, Glycine max
  unsure (1)..(207): unsure at all n locations
tttcgtgcctttattcctgctgctttcactttgcttactgatctaattatttggttctattatatgttataacaagtataccaactcttatattctgttggttttgaatggtgtgttgaaatgattttttaacatgtattggattctttattgttcttcatttttctttccatacagaccgttcgaacgacataatttttnaatttt

SEQ ID NO: 175390 - DNA, 417 bp, Glycine max
  unsure (1)..(417): unsure at all n locations
agcttaacaaggttgcaaaagatatgtgtccatcanaatactntaaagtattcacactacaagtgccttaagttgtaatgcatcttaaacaccttatctaatgctttaatatattttatcccaaactgaccaaatgggttacttgttggagtgagctttagtggccaatccattttcaggtacatttgtatcacgactttgattatatattttatatatacatgaagcaattcaattattatattatttgttgtacgatatagtaacatccttagaataggcgggttgttcgatgatgtgagattaattgaataatagaatatgattcttaatgtgnttgtagttgagtattcttgcacatngaaataaatgattgattggctataacttaacaagattcaaaataattatcaagca

SEQ ID NO: 175391 - DNA, 298 bp, Glycine max
tattacaacctttacccattccacttatattttgggaagacatcgctatggatatcatcaataatctacctgcttcccgtggttatgctactatttttgttgtggtggatagactttcaaaatttgctcattttataccactgaaggctgcttttaatagcaaacctgttgtaaatgcattcatttctaatattgtcaagatgcatgggtttccaaaaacaataatctctgatagagatagtatttttatcaattcattttggcagcagttggttaaagcacatggaactatattggc

SEQ ID NO: 175392 - DNA, 448 bp, Glycine max
  unsure (1)..(448): unsure at all n locations
agcttatctcatgtcagacactctaatatagcagttgcaaacaatcacagtttacttggtgccaacttaaagtggaattaaacaaggtataaacttaaagttcataaaaaagttaaataatgctcaaaataggcaatcctagcttaaattttaccctttccttgatgtcacccaaagtcggcaagtacaacttatagaattcctctctgaatgcatccacaaacctaaataaagtttagaaaccatcaagaataagacaattagaatctgtttgatttgtataaatttaagggacaacaagatacatctactatattatagtattttcacttttaaaggactaaagacgaattattgaccacaatagatatattagcattngtatatcacntaactcgttgtacttaagttggctctcaacttgcattacaacttcattgaactaaca

SEQ ID NO: 175393 - DNA, 238 bp, Glycine max
tttcttaatagaattggatttcacatcctattattaattgatatataaagggacatgaacaattcagaatggtcttttaacatgtctaaattggtcatgtacccttatgtgatgaataatgaactatcgagcattaatttcattaattttgattattcctcccttttgtctgtactggaagacttcaaaaaggtagagaactaattgatattggcacatcatttgatccttcagaaat

SEQ ID NO: 175394 - DNA, 365 bp, Glycine max
cttcaactgagaaccccattggttggtccatataaacattctcctctaattatccattaagaaaggcaattttcacatccatctaatgtagttccaagtcataatgggctactaatgtcgtggtaatcctaaaagaatccttttttgagacaagtgaaaatgtctctttataatcaatgtcatctttctacgtaaatcccataacaacaagtctaaccttgtaacgttcaaggtttccatgagagttatgtttagtcttgaagacccacttacaaccaactctcttattacaaccctttggcaattctacaaagtcccaaacacaattatgtttcatggaatttatcttttctatcatggcattt

SEQ ID NO: 175395 - DNA, 208 bp, Glycine max
  unsure (1)..(208): unsure at all n locations
tttttttttttaaaaaaacagggtagtattaatttaactcatcctcccatgatgactataatttttaggaatttataaaatataatatgtaacttataagttttttaaataatttttataacaatattttattataaaatattatgtatcaaaaaataatacgataaaataattttatagattttttanattttttaatttaattgtt

SEQ ID NO: 175396 - DNA, 172 bp, Glycine max
  unsure (1)..(172): unsure at all n locations
ctgcagctttttggaagatggaccttacttattttgaacncacgncaactcatgttataattacccattctctaatcgatacactatttaaattaatggaacgcgtatatcatctgtagctcttgaaaccatttgcttccgcaatcgatgacaaaatctggaatcgacacca

SEQ ID NO: 175397 - DNA, 322 bp, Glycine max
ttactaagttttattaatcatcttgtaggttacttgatgactgattgtttataaaatgacaaggataacttaacaaatgttgtctttcacctaataactatgtacctttctatataaaatgtaatggactcttacatagacttagaaaagcttttgctgacgataagtgaggctaacatgattaaggataatctattctgttcctcatgatttatatagtaataactaaaaactaacctggacttatatttaaaattaccttaccatttgagaccaacctgtgaactttttatttccatttgaatcccattttgatcccatt

SEQ ID NO: 175398 - DNA, 412 bp, Glycine max
gcttctagtctcaatgttgagagtcttgttattttactctattcaatcggacatccgagtaaaaagttattgtcgtttgaattccctacgagcttcccgtttcaatttggagcgtcttgatctattacaggactcaaccggacatccgtgtataaagttattgtcaattcaattttctcagagcttcggatctaaatattgagcgtctcgatatattacgggactctatcagacatccgagtaaaaagttaatgtcttttgaatttgatacgagcttcctgtttcaatttggagcatctctcgatatattacgacactctgtcgggcatccaagtaaaaagttattgtcgtttgaattttctaagaggtcccgttttaatctggagcgtctcgattattacgggactcaacc

SEQ ID NO: 175399 - DNA, 203 bp, Glycine max
  unsure (1)..(203): unsure at all n locations
ctagcttgacatgaatacatactttaccgttgtcgttttccgtataatcagacgctcaatttatcgaacttgaaaattgatgacatacttatcacgatgttcgtgagtctgtattttcagaccttcaatgaaaggaactctaggaattaacgacatactttaccnatgtcattagggctatattcagacctcaattttactga

SEQ ID NO: 175400 - DNA, 439 bp, Glycine max
  unsure (1)..(439): unsure at all n locations
agcttgcttgcctctagttgacgaaagtgtggtttactattatgtatctncgcacgccacctgactcacgggttggggtgacacaactgtggggtggttgacacaagcgggacttttgctcctacatatcttcaattgcgagactacatagttcttcaatttttgtgtgagactacaaatagtctcaatgttattttactaaaatgcgaacatgctaacatgctttagcaaagaaacaaaccttnaactgaacaaggcaacanatattttnttgaataaaaacaatgcgtctattggagaacgaaagtatgctaataaaatnttctcataaccacaaatgagaattnggatgttagcatttcgtttctaaatgaccatttagaggacacactgttgccaactaaaatagaaaaaaaccactncaagtgtatcaatctca

SEQ ID NO: 175401 - DNA, 326 bp, Glycine max
  unsure (1)..(326): unsure at all n locations
tttattttagaaatgaaataatctgggccatcttttttctcctctaaagacaatatcatcatttcttgcactgaattgttggggagtggaagccatcttctcaatcaaattcgtatccgcagcatgagtcatatcactaatagctccaccactggcagcatcaatcatactcctctctatgttgctaagtccctcatagaaatattgnnaaaggagttgctaagggatctggtggtgaaggctctcacacaatttcttaaatttttgcanncctcgtaggaagtgttggaagagggtgagggggcctnatatgggccccccccccc

SEQ ID NO: 175402 - DNA, 322 bp, Glycine max
agcttatggtaaaatctgggacctagccttggtatatgtctccacagagtccattgcctccctcgcccagtattatgatcagccgttgaggtgcttcacttttggggacttccagctatcacccatggtggaagaattcgaagaaatcctaggatgtcctctagggggaaggaaaccatacctcttctcagggttctatccctcattagctagaatttctataatagtccaaatctcagcgcaagaattagaccgccaaatgcaagtcgaaaatggggtggtcgggataccgagaaaatgtttggaggcaaaagcaagaatc

SEQ ID NO: 175403 - DNA, 209 bp, Glycine max
  unsure (1)..(209): unsure at all n locations
cgcacatcgttcgtgtgtacgatatacactcgacaatgtttttagtagangagaccttcaatcctatcacgcaacgtggcggacaaatatgggcagttaacttgaatggccattattgtcaatgcggaaagtattctgcgcttcactatccatgttcacaacattattgcagcttgtggttatgtgagcatgaactactaccaatatat

SEQ ID NO: 175404 - DNA, 407 bp, Glycine max
  unsure (1)..(407): unsure at all n locations
agcttgtagaatggctagacatgattcatttcatggctnggnttggnncaaggataaaagggggtgccccacattattccatgacacanatgcaaaaaatgatgatttggaaactttatgcaaaactggtcatgcatgcgcctatgcggacgctcaagtgtcaaatntttatggtcatgtgacgctagggctcaggattcatttcctctatattaaatcaacccaatgtttccaaaatatgttcttttatcaatttgtgcattcatccgagtccatttcgggcgtccggggaaatntcacagtattcacccttcaagtgtagacacatctttttcaaaaactagttatgatcaatgaantttntttcaaagaaaagttggaaatcatctcttttcaaaagcatgtcg

SEQ ID NO: 175405 - DNA, 319 bp, Glycine max
  unsure (1)..(319): unsure at all n locations
tcatcctcagatccctcttgttggactagacttatctttaatagcttatgaaagtttagcctaatttagcctaagctttntcctcagatccttcttgttggagtagacttagaccaaacaacattattgtaacaacatacttaaaaccaaaacttaatccgcagatccctcttgtaagactaagttccaattctgcttcactcaagttctaaggcaacaatacattttccaatgttaaaatcacctaactaggcacacaaataattgatcataccaacaacatacagaatttaagcactgaaagaaanattgttcacaa

SEQ ID NO: 175406 - DNA, 468 bp, Glycine max
  unsure (1)..(468): unsure at all n locations
agcttcatcttcaatccaagaagagaatttatagtgtgatntaattganatagatgaagatgatgatcttagtctgtttgtaaaaaggttcaacaaatttttaagagtcagaggaaatcaaagaagatcaaattttaaatcaaaaagaaggactgaagattcgtcctctactccaaaatgttatgaatgcaatcaacctggacatctgagggttgattgcccaatcttcaagaaaagaatagagaagtctgaaaagaaaggatttaatgaaaagaaggcctacattacatgggatgacaatgatatggactcatctgaagaattggaaaatgaagttgtaaatctaagtctaatggccaagagttatgaaagcgatgaagaggtaacatcctctgataacaacttatccatttcatttgatgaattacacgatgcatttgctgatttgttaaaaatcaataaacttgc

SEQ ID NO: 175407 - DNA, 251 bp, Glycine max
tcatttttctctgccaccgcagccgcgccttctacctcttttctaccttgccctacctctgccgccggagatcaaggtcacattccttttttcttgttttcgatttttcgcgtttaatgctttaccctgttttgttggttatgatttttctgttgcttggtttaaattgttgaatgatttgtttctgttatccatataagcaaattcacgtttgctttgtgacaacagtttttttttgtttcttcactctc

SEQ ID NO: 175408 - DNA, 430 bp, Glycine max
  unsure (1)..(430): unsure at all n locations
gatccttaagcacctgcggcatgcaagcttgaaactagatatgaccatanctctggtttatctcctnnaccttaagcaagcattgtattcatttaagatgcaagaaaataaaatggcagaaggacagctagatgtctttaataaattgattcttgatcttgaaaacattgatgttactattgaggatgaagatcaagcattactgttattgtgtgctctacctaagacctttgctcatttcaaagaaacacttctctgtggaatagattctctcactcttgtggaagtccaattagccttgaactctaaggaattaaatgaaagatatgaacaaaggccttctgtacatggggaaggactcatagttcgcggaagacagtntaagaaggataataagatagaagggaaaagattcaggcacaaactcaat

SEQ ID NO: 175409 - DNA, 235 bp, Glycine max
  unsure (1)..(235): unsure at all n locations
aggatcatgtttttttttttctacaacatacaacacaagagcatgattgattaaagaaatatatttatatgcatcaacttgtttgtgagaaagacccaacatttctacctactgctgtcacttttacttactttgcattttatagatttagcataaaagtttagtttaaattctgtttgaaattatcnatcatacatgttctgtgaacaatgcttcatttttgaactttattcat

SEQ ID NO: 175410 - DNA, 348 bp, Glycine max
  unsure (1)..(348): unsure at all n locations
agcttctgatttccttggggttctgttatttgtttcttgttgcagggcgcagtgccaaagaaaatttattgttcactgaagtaactgaaggtctcaattcttatggtgttaccctacatcgccatggtaagtctaattttcttcttattggatttatttatttcgagtcttacaactccagcctaactaatgcacagaacatattttatcttcctgttatacttttgtgtgtgatgacaaagtgtctagggattagttttattgtaagagctatgcaatcttacaataaccactcaaggcagagccaataatacttgntacactagttttctggtattttaaccggta

SEQ ID NO: 175411 - DNA, 392 bp, Glycine max
  unsure (1)..(392): unsure at all n locations
agcttgaaagtngagctcatttaacatagtggaagtaaaagctgaagggggcagtcactatggtctggaaagaatgtgatgagcttaaagatatcaacatgaccacggttgaagcgctagagcgggaaatgaataaagccagaaaggaagagtggagtaggaacaagtttcgaggggctctgtggggcaccagtaatgagttcaaacttataaaggccgagagggacaaatcaaggatggaaagcctgatgttaggggataagttaaagagttgttataggttgaagagaagtttgagagaacacagttgagcaaaatagaaggaagtatgttgataatcattgaccaatataaagagaaggtgaacctagctgctagtcacgggcagatgc

SEQ ID NO: 175412 - DNA, 242 bp, Glycine max
  unsure (1)..(242): unsure at all n locations
gacacttaaatctcagctgaantcaagatagtggatgagattaatgttttgttttnacaagcctacttcttgagtgcatttgtattggtgttaacttgattgttgcatcttatacatttcatattggttttatgtgcatcgtctagtgtgtgtgaatgaaattcctaagttaggaattttttataggcaaaactcttatttccccattactattgaggttattgatgtcacagctctcaact

SEQ ID NO: 175413 - DNA, 421 bp, Glycine max
  unsure (1)..(421): unsure at all n locations
gcttcttccctattttccctataatagggggtgaagtgaanggaaaaaatgttgagccctcctggtaattcgagatcacttgaaattagtgaaaaaaatttgttccgtgaagaaaatcgaagccgaggcgcttccgtaatgtttccgtgggtgatttcgcgaagattttcaactgttcttcgacgttcttcgttcgttcttcgtcgttcttcggtcttcaaccggtaagttcccgaaatcaagcttttcaattcattctatgtacccttagtggtcctcatttgtcttcacgtgcttttattttcattntatttactttccgtacccccttttgacatgctgtagtcatttacttaagtcattttctcgcctaattaanaataaaataaatttccactgatcatttgaattgtaacatcca

SEQ ID NO: 175414 - DNA, 290 bp, Glycine max
aactatttcctctccggagtatgatagtcaccgttttatgatcgcggtacaccatcagcgcttcgaggccatcaagggatggtcgtttctccgggagcgacgcgtccatctcatggacgacgattatactgatttccaagaggaaataagtcgtcggcggtgggcatcactatttacccccatggccaaatttgatcccgaaatattccttgagttttatgccaatgcttggccaatataggagggcatgcgtgatatgatgtcctgtgtaatgggtcagtggatccccc

SEQ ID NO: 175415 - DNA, 382 bp, Glycine max
  unsure (1)..(382): unsure at all n locations
cagaccccgtctgtaataagtttgaatagaaaccctctttggtaaaatgtttctaaaacaagccctctgaagtaaatatgccactggttgtatcgntgcgatattgttaggtntcctacagtgcggtcctttatccaaacttagccaacactgttaaaaaagtttcgaaaaaaaattatattttgcactgtatatttgtaacttttcatttatttatttttaacaaaatgattcatcactaaatatagttatatagtgacaacattaaacactaagttgaagttttactactaaaataaatcttgacacttataatagttatgaatatctatagaatctagtcttaaaagaagaggaagcgagttctccgaaacacgacaac

SEQ ID NO: 175416 - DNA, 256 bp, Glycine max
  unsure (1)..(256): unsure at all n locations
cttgctgaccaaccaaacctgcttgttaggatttttctttcacatatggatgtatacctctgcttttaacaacaccaaatccttatgaatatccattgcataatccaaatccttatgaatggccatacctatttccctattatttttatttatacaaactctgtttaacacaacattatttaaataaccgctaaattttaataaaataggnataatgaattcctgtgttccaaatttcaaaatccaatgaatgatg

SEQ ID NO: 175417 - DNA, 341 bp, Glycine max
atttacgccaatgattactatcgggcattggtgaaaaatatacaaaaaatgtcgggatacacaaaatgttttgcgatttctttatttttattttaaaaaacaaataattttttagtttgctaattaatcttagtcagattcataaatttatatgtgcaactaatataaaaacgtttaattaatcataagtcacgatatacgtcactttttatagataactattataaaacaaaataatagctcgtttatatataataatttattatgaatgacaatataagatttatcctttcgtatacagcatttttatggtaaataaatgttaatggataccattttcc

SEQ ID NO: 175418 - DNA, 454 bp, Glycine max
  unsure (1)..(454): unsure at all n locations
agcttggcactgatgcatccattttgctcatgtcttacgagggagccaacaacctatcaaaaatgtatgtcgggaagggaatcaagaacgggcagctagattagactttaattagagactttctttttataaaaatcagtttataataaaaatttaatttaatctgaatatatgtttcatagttaagtaagtcagttattaatgttgctgaaaaaggttaatganattaaattttaatattagcaaaacatataattatttgaatagataaataaaaatgtaaatttaaaatattgtaatttaatataatgatgataatataattaatgctatcctatgtatattcacttaaataattgggttttaactctttttttcacatgacagtttactaatttaacctaatatttttcttaaacgttatcttggacttatagaagattcgcttatttat

SEQ ID NO: 175419 - DNA, 361 bp, Glycine max
actggcacatagtttctatcctgtgggaacaacaaatttaggactcagattctatcaaacttagatagaaaagtaaacagctgcatattgataggttttcaatgcaaagatgcagtatacatatagaaactaagtgacaacagcaactagagaatctcacgtgcatcaaaacaataaatcaatgtttttaggaaggtcaataataaaaaaaatggtagaatttttcttatacttgtgagtgatactgcgtaagttaactctactagttagagttaatccttagttagtatggacagctgtgtacagctgccaagtagttagttgagttatatagagtcttgtactctgtgctctctatata

SEQ ID NO: 175420 - DNA, 407 bp, Glycine max
  unsure (1)..(407): unsure at all n locations
gcacaatggcgtgataaaaatattgagattatgttgaaagtgtgcatagaggaggtgaatgttggaaataaacctcacaaccacttcactaatgcctggttgggcaaatattgcagaaaagttcaataaggcaacaaatttgagatatgaatataaacaattcagaaataagtgggattctttgaaaaaggaatggcaattatgggctaaacttattgggaaggacacaggtcttggctcggatggggagaagaaaatacgtgctgctattgatgaatggtgngaagccaaaattcaggtgtgtattattaatagaaatagagttttggcaagcgagcttttgtctttaggagaatcagtctattcttttatttatttgcaacttatcttcctaaacttgtttaatg

SEQ ID NO: 175421 - DNA, 250 bp, Glycine max
  unsure (1)..(250): unsure at all n locations
ataaattatcaagatttgaatgttaagaatataataagccctctttttatactaaacactcttactcttggataaataataatctgcaaaaattgtgagtgagtccatgacccctatgtagaaacacatatatataatcgatctcattaaaaaagctttttatggcacgaaaaaattacactgcgtttaaattaacgtaaataaaaagggggaaatatagaagactaatggtanatgannaattttattt

SEQ ID NO: 175422 - DNA, 410 bp, Glycine max
  unsure (1)..(410): unsure at all n locations
agcttcttagtttcagctgatgaagatgtattcgtggctacttcatgcactcctctaatgacaatagcatcatttctggcactaaattgctgggagttggaagccatcttcttaattaaattcctggcttccgcaggggtcatgtctccaagggctccacccctggcagcatcaatcatacttttctccatgttactgagtccttcataaaaatattggagaagaagctgctcagaaatctgctcctggacatctggtggtttcatggtggagcatacaatatggagttttgtcatatgtttgtgcgggtcttcacctgcaaggccattaaactntggaagcaaatggatcagtccagttntaagaacatatgggacatcctcatcagggtattggatgcacaagctttc

SEQ ID NO: 175423 - DNA, 325 bp, Glycine max
  unsure (1)..(325): unsure at all n locations
tactaagcttctttggaccttgaacatgcaactaactactttttcttatccatgctatgtgctcgcgactggtccctctcttcccttcgcagcttgagttcactattgctaccccacagagctccacgaaatttattccggccacactcttccttgcgagccctcttggtctcttgttcaaaggctcttgcggtagttgcattctcttcccgtaatccggcacactccttccgaatgtgtgtagcgaccaacttgaacttctccttggcaagtttcgcctttcctaactcgcttttgagagcttggacttcttnttcctcttccg

SEQ ID NO: 175424 - DNA, 391 bp, Glycine max
  unsure (1)..(391): unsure at all n locations
agcttgaggattatcaaacgacaatattttnttactcggatgtctgattgagtcccctaatatatcgagacgctctaaattgaatgttgaagctctcagcaaattcaaacgacaataactttttactcgaatgtctgattgagtcccgtaatatatcgagacgctcgaaattgaatgttgaagctctcagcaaattcaaacgacaataacttttttactcagatgtctgattgagtcccgaaatatatcgacacgatcgaaattgaattctgaagttctgagctaattcaaacgacaataacattttactcgaatgtctgattgagtcccctaatatatcgagacgctctaaattgaatgttgaagctctcagcaaattcaaacgacaata

SEQ ID NO: 175425 - DNA, 136 bp, Glycine max
ttcggtattcaattttcagcgtctcgatatatttcgggactcaatcatacatccgagtaataaagttttgtcgttcgaattatctctgaagctcagaattcaatttcgagcgtctcaatattttacggggctcaat

SEQ ID NO: 175426 - DNA, 453 bp, Glycine max
  unsure (1)..(453): unsure at all n locations
agcttaccaattcgtaaagttgcctttataagattctntaaagtctgattaatgattttgttcaacattgtatttttttggctttatgaataaataaaagaatgacttgtttcaaactttttcatccactacaaaacgctgcagagatgtgatatttatagaaaaaataattattttatataaatgaatttcttagcctaattataaatatatgtatattattcaccgaaaaaaatatgcattaagtttctattttgttttctattttagaataaaaatttatttgaatttgatattacttttgaataaaatatttttttattcaatttaaatatgcataatactaacaaccttaaattagaacatatgatgaattacagattgttaatttaatatatatgntttatactaaatgggtttcacccttcttcttcgcccccaacccttcactac

SEQ ID NO: 175427 - DNA, 177 bp, Glycine max
tgtaaactctttggttaactttatttcattttttggtccttggttattcttgcctcttttttccttcttgtaattgccatattggaattggaatgagatggtgcctatcttaataatttaatcaaaaacacggcccaccccttatactttttactaataacctccaatttattaaca

SEQ ID NO: 175428 - DNA, 182 bp, Glycine max
agcttaaacattcaactttgagcgtctctatatattacgggactcaatcagacatccgagtaaaaagttattgtcgtttgaatttgctcataggttcaacattcaatttcgagcgtgtcgatatattacgggactcaatcagacatccgagtaaaaagttattgtcgtttgaatttgctcaa

SEQ ID NO: 175429 - DNA, 444 bp, Glycine max
  unsure (1)..(444): unsure at all n locations
agcttgtcgcttccctttttgtggcattttttgccacaaactagttgcttacaattgttacctttgcattagtaaaaccaatcgcatgctaatatgtaaaatgtaaaatataataaaagtaaagaattaaatatgtactaatggttagtcaatttctcatctcattngtgttgacttgtggcatttaacgattattttcttctcttattgacggacatacactcactacatgaattctaattctacttgcttaggaaggtaactttgactataataatggtttaagtaaataatatataacggaaaaattataaatgttgtctttattaaagggtgacagttaccaacgtagttaattatcaaaatgaaatataaataagaaaataatgttagatcactatggttaaaacctttgtcaagatgtgaatcaatacttggcattga

SEQ ID NO: 175430 - DNA, 296 bp, Glycine max
  unsure (1)..(296): unsure at all n locations
tcttacgttttatttgtccctggtcctcatacttcttttcatatgctttggatcatgcttcacttaccactttttttgtttcattccttgcatttcaataccttgaccaattttctgcattgttgcacccctgcaaggttttgaagctctcttttgcttttaacctttcttgaaccttctcatcccatcactaagattccttatctcttaacccaaaaccttttgattcacccaagattgctttggcaacttttttcttatcttttagccatgtnatncaaaatgatgttaacact

SEQ ID NO: 175431 - DNA, 430 bp, Glycine max
ggatccttaagcaccgcggctgcagcttgcctcgggtttggtgtgtcttatttctgctgctgccttatgagttgagtcactcttgttgcaacatatgcagctcagtttaaagccccttgtgttgttgatttctattatggagggatttatgactcgttgttttattgttgtctgctgtactgattccttactttgcttgtacattgtaatacaccgtgatgtgtttcgaacacttcctcattatatttaccacatgttggattccaagctttacgtgtgtccaagcagaagctactcacagtagtttctgcgcttttatcacaatctgactccgttttattcatgtacacatgtttccaccatgctatttgcatgtagctcctctcgttgagttgagattttggtgtaatttcatgtgttacattaccct

SEQ ID NO: 175432 - DNA, 410 bp, Glycine max
  unsure (1)..(410): unsure at all n locations
gctttactctctggtaatcgattaccttatgatgtaatcgattaccaagggccaaatacgttttataacagctataaaaatttgaattcgaaattttaaaagctgtaatcgattacacaattgtggtaatcgattaccagcagttagtaaacgttttaattcaaattttaaaagctgtaatcgattacacaatttctgtaatcgattaccagacaggaatttcagaaaaataatttcaagagtcacaacttttcaaaggctttactcatgaccaccaatggtctatatatatgtgacttaaacacgaaattgctcagagattttcagaacaacaaagtgtntatcctctcaaaaagcaatttcattttatcctcttanagaattccttggccaattcaattgcaattcat

SEQ ID NO: 175433 - DNA, 313 bp, Glycine max
  unsure (1)..(313): unsure at all n locations
cttatgacaccattatggctattataaacacattatgcattaacttcaccaagcatagtcatcttacaaattgtttattccgtgaatgctacaaaatagatatggtcacgaaagaagaaaatcatgttttttttttcagttttaaatcggcttcaacagcgaatcaaaagatcaactggcttgactaagacattagatatggagagttatttccatggcaagttttactccccacaaccagacgtctcagttgctaatttgatgaacattgtgaaattatccaatgagtaagtagcaatattngtggagagat

SEQ ID NO: 175434 - DNA, 474 bp, Glycine max
agcttttattacatcaacatgaaaactttcttcttaaatttaaccattaaacttattgaaataagccaataagaacaaataggagtcataaacccaaataaactctgtataagctcatccaaggattcagtttcaaagtaaacagacattaaaaacaaatcgctgaaagataaaaaagacacattcagagacacataaaggacagattgaagaggtaaatgagaaaattatagcatgtgtggaaagacaaaagttaacctgcttcccaaaagatccacaaagttcaatgtgtaaaaagccatcatgatatttcttggcttctttagttaattgtgtagtatataggacctgccattctgaattgaaaggaaagagatataatagtgaacactacatgaagatgattacaatgaagattatcaaaccagaatacaaatgcaacctctgacataatggactgcagatgaaattgat

SEQ ID NO: 175435 - DNA, 308 bp, Glycine max
  unsure (1)..(308): unsure at all n locations
aacacatgatgcactaatttgccgttgagaacttttctttaaccacattaccatcaaaaacaaaaacattagagtagaccatccacgaaagcacattattggatcttatgtggataaacttctccacaagcacttagaagaaaataaaaaggtgaaatgaaataatcttatcccataagttaaaatcaacttatgccgtcctctcatctaacttctttaaaagtttaaatgggcaagttgatttaacctattggagaagctcaattncttttntttttattatttacttntnctacataagtgtttat

SEQ ID NO: 175436 - DNA, 419 bp, Glycine max
  unsure (1)..(419): unsure at all n locations
agcttgtcaatacttattaccttatgtttggctctaatttatacatggaagtacgcattattntcgtcccccatattgagccagtcaagttttgatctctggtgtaaaatttcctcatcaatctcgttccacctaatcacagtttttgtacacatattcactttatcaattttctctttattcatcctgtcatttacaagcgagtcttgagcttcagcaagatcttcccgagctttggccagctggagtttcgtatgagcaaattgttttgacaaagtacctaaaaattttcttaatcttttcaatntcttccacatcgctaccatatgactaccatcaacagggctattccaactctatgcgacagcgtcatcaaaacctggcagcttggtcacacaattgagaaacttaaaatcctc

SEQ ID NO: 175437 - DNA, 370 bp, Glycine max
  unsure (1)..(370): unsure at all n locations
catgcaagcnnnnatangaataaagaagagacacttcctttgaaaataaagagcatcctactaggaaaaaaaatcacatgctgaatatcctgagagatagcaaataacgatgcaacaatccacacaaagaaaaaagggcaccgcctgtaacaaacagtatctccatagtagcaactaaaccaatacgagcatttcaaagcaaacgtacttcgaggctgaaacatgtgggtgcaaagatgccaacaatatcagtgtataatacataagcatccagctacaaaatcatggtagaaatgcatccaataagaacttcatgaaatcaaaattcgtactacacatacaagctactaatgctgatattcaacatata

SEQ ID NO: 175438 - DNA, 347 bp, Glycine max
agctttggagtatccaagtgccatttctttctcttctttagtccagtcttcttctggcttcaattcatcagtgggctttccttctgtgtccagcatcttgggatgttcccagcctttgatgacagctttccaggttctgctatccagtgatttgaggaaggccaccattcttgctttccagtattcatagttgcttccatcaagaattggtggcggttcactgagccttcttctttctccatgttcatcagaattgatctccccagatctcactctgtgatttcgagtgttggctctgataccaattgaaattctgataccaggggacagatgtcgtacaggatgtc

SEQ ID NO: 175439 - DNA, 282 bp, Glycine max
  unsure (1)..(282): unsure at all n locations
ctgttatgttcccatntatggttattgtggagtaaatttattacatgaatcttgtgttatggttaacgctgtctctagaacatttctattggatttaatgatgaaatctatgcattttcaagtgaaaaagaggctaagtttcgaattgaaaaaagtagcagttgggctatgctcaacagttgggctaatcgattattcaccgctaagcgcgtgtttatagcgcttaatgcaaaggataatctggcatagcatcaacatcaaattcgcgcgctaagcgctata

SEQ ID NO: 175440 - DNA, 434 bp, Glycine max
  unsure (1)..(434): unsure at all n locations
agctcttcggctgtttcattgcatttanaatgaannaaaatcacttttctgctcataaagtgaccaattattccataacttttcaacgagaaaatcattcttgaactaacacatgggaagtttcgaanagccacacagaagatttttcattcactaactacgcgtccaaaccaatgcttaagcaatgatcgacctcccacttagctttacgcaaaaagtttagtgttaacttaacatcaatcttcctgaaactgttattcacgtcttttattctttctttccttgttttttcttctatgtgccaacggcaatgatagatgcacggcatgccaactgtaatagctgtacgcagcgaagcaggattgatccccacctactcctcaaggagtctatgttgtcataactcatcaatgttccctttagctcattttata

SEQ ID NO: 175441 - DNA, 211 bp, Glycine max
aaatgacgaaaagcttattaggtgactaaaaatatacacaaaacattttacagttgctgtttaccaataaacgaagatgaagtttttttaattgtgatatcttgataatatcataattctaaccggtctcattattatgcagggttatttataaaaagtatgcctatcatgcatttgcatcatgatgaaaatgataaatatattgccatcc

SEQ ID NO: 175442 - DNA, 301 bp, Glycine max
ttaagtcacctgcggcatgcagcttgcttgagcttcaaggttattaattataaaaatggcccgtgagggagaagatactcgctgaaggccgggctgattgataaagaaaatacttctggtttaaaataaagcgaatctctctttctattcacatattcaagctatgccacatgtctccgtttgagcggagcaaaaagggcccacttttccttttgactgtgacccatactcatccacaaaagtggggaaaatctgacctttgaaacgctaaaatcctgcctcggattgcgcgccatttctc

SEQ ID NO: 175443 - DNA, 393 bp, Glycine max
  unsure (1)..(393): unsure at all n locations
agctnttatctaccaccaccatctccaccatcatcttagctttctattatgtttaacattattagtactttgatttttagccgtgtatttggctatattattatgacatttgaacaatttattatttcttttattgtcaaagaattcaaaatgacacagtctgagaatgcttttgattcttccctttcctataaacaaaagatttcaaatgactaactgcctaagaattcttttgtttcccccttcacaaagtttcgaaggactaaccgcctgagaactttgtcttaacacattggagggtacatcctttgtggtaaaagtagagggtacatctacttgggttgttgtgactgagaacaagagagggtacatctcttgtggatcagttctagt

SEQ ID NO: 175444 - DNA, 152 bp, Glycine max
tgtaaataaatcttggtttatggttaacgatgtctttaaaaaatctccattggatttaatgaagaaatctgtgcattttcaggtgaaatagaagctaagttttgaattgcaaaatgttgcaattgcgcttatctcatcagttgggcttagcg

SEQ ID NO: 175445 - DNA, 433 bp, Glycine max
agcttatgcacggaaaatgttattatgatattgagatgcccgaagaaacaccatttcctagttaaccatgcattatgtaccatgttcaattatttttttaagtgaaacgggtttatgatcccaacatggttggctcgtggtgcctaacacatgaaactaagaatgtagtgtgaagtttcacgcttcccccttttttgtttttgttttgtagaggaaaacgcaaggatgagcaaacatgaaaacaaatggtatgcaattttgcagatcaaaaagtttgttgaacgcatatgcatgatgatgccatgactcatgcaaaatgtgaggctggaatatgataacggacaaatgcaggatatgtccattatgatgttatgaagagatgcttatgcgatgcatgatatgaatgcattttacggacacgagagcccggaaa

SEQ ID NO: 175446 - DNA, 227 bp, Glycine max
  unsure (1)..(227): unsure at all n locations
aaaatttccctttttggaaacaaaccaacttaatctttgagattgtcctacccgcaagtctaaataaggggtataaatcccctttccttacactgtatttaatgaactattcaggttttggctttttttgttatgtgtctcttaaaggattgttgtggtttccctntgggtgataattaaaaaaacccctcaaaattactttttgttttttggatatgggaggtttt

SEQ ID NO: 175447 - DNA, 415 bp, Glycine max
agcttactcatcttttaccatctacttcttttatctaccaatgatgacaaaaaaagggccacgagtttcataattcttcttctacagcactcccagccaaaacttaagtggacggggaaaaggctttacatgttttagctatgaaatttgcatgaacgagcacgatactcaatgtcaagtgctagttgcttcctgctgcacccaggtcctttgctgactggttgaaagctcaccttgaatgtcaaaaagaattgatcccacatgtgcttaagatcttgatctgcggcaaagtctcctcaagcgaactctttccttcaaggagtaaacacaacattaaaaacttgtaaattacgcatcatattggtaatgcaaccaaatgcaaagttgatatgcacctcactgttgtcatgatcat

SEQ ID NO: 175448 - DNA, 122 bp, Glycine max
ttcttttcttaatttttctactgtgccaaaaaatatagtatattttctatgaaacaccaatacttcaatttgctttcaagctttatattaggttggaaaaaggaaaatttgtccttgcaatg

SEQ ID NO: 175449 - DNA, 379 bp, Glycine max
  unsure (1)..(379): unsure at all n locations
gcgtctcttatattacgggactcaatcagacatccgagttaaaagttattgtcgttgacttttcttagaatcatccgttttcaatttgagcatctcgatatatttcagggatcaataggacgtccgagttaaaacttattgccgtttgatttttctcagagcttccgttttcaattatgagcgtcttgatatcctacgggactcaatcggacatccgtgtcaaaagttgttgtcgtttgaatttgctcaaagcttctgttttcaattacgagcgtctcgatatattatgagactatatcagacatccgagtcaaaagttattgtcgnttgacttttcttagagcttccgtttttaatttgagcatcttgatatattaca

SEQ ID NO: 175450 - DNA, 274 bp, Glycine max
tcggattttctattgtgtcccgttgatatcgacacgctcgaattgaaaacggaagctcttgaaaaaatctaacgacaataacttgttactcggatgtcttaacgagccctgtaatatgacgagacaatcgaaattgaaaacggaagctcttagaaaagtcaaacgacaataacttttaactcggatgtgcgattgagttcggtaatatatcgagacgctcgttattgtaaactaaagctgtgtgcaaatataaacgacaatatactttgactcg

SEQ ID NO: 175451 - DNA, 218 bp, Glycine max
  unsure (1)..(218): unsure at all n locations
aaccaacaccataaccatgcacaactgctacatatgcatcgacgcggctttgtttcaacaacaaaacctgtcatggaatgggcgcttgtatctgggaccatcatggcagatttatcacatgcagcaatgacaaggtatatattcaactggaatctcgagtcctacggaagctgatgctgaatgttatatttatgggctnaatgggttcaacgtttaca

SEQ ID NO: 175452 - DNA, 476 bp, Glycine max
  unsure (1)..(476): unsure at all n locations
gcttataataagacataccagcattgtattgtaccagtccaaagaccacaatattgggtccaaagaggaaggccaaagaaaaatagaaggagatctgtagatgaggacaatctcatatgacataggctaaagaggaaattggctgactttacatgtggaaggtgtggccaaaccaatcataacattagaagctgtaaaaatattggagttcctgttaggtcaaagaaatatgttgcgccaccaacttcaaatgaggatgaccacctattatctcaagataaacaagctttgaatgaggttgaagaagctgctgctcatgttcaacaagatctggtggagattaatttatctcagcctcatttgtcacaagatagtgacatggagttgattgtaaatatttgtcacaacanagtagttttatctcaacctattttgttgcagcactccattcttatatataataattattcatggtc

SEQ ID NO: 175453 - DNA, 106 bp, Glycine max
atcttttattgtctgatgcttcaaagcatattatgtactgaaccaatttctataatttcaaacaaaaagcttatctttataaaaatgtttatccttacaattcttg

SEQ ID NO: 175454 - DNA, 402 bp, Glycine max
  unsure (1)..(402): unsure at all n locations
ctgcagcttatatggggatttttaattgatttttattntttaataatataaaaattaatataatttatatataataaacaaatttctcctccaaattttttagttactgtgatcggatgagtaataggaaatgtttcttttttattataataaaaaagaatattttatttatgtatattacattctatgaataatgataaaaatcaaatattaattacatttaaggaatatatataggcgaaaatcatgtgttatcaaatattaagataaattgattaataattttaaaaattaattgataaataaaatcaactaataataaaaaaaatatgtttatatataagaattgagaggccactatctctactactggacaggtgtctttattttttttaaaaaaat

SEQ ID NO: 175455 - DNA, 191 bp, Glycine max
tggtaaatgatgttctcttctattggattgccttccatgctttgctgcttcaacttcgcccacatgaataaagacttcggcacacgtgaagactgatgacatccccccgttttttagtctctgtccccaatatcttttcaaacatttgaagaataactatggttccataccattagttcaaataatgagtg

SEQ ID NO: 175456 - DNA, 386 bp, Glycine max
agcttccatcacttaagcctattactagataacaatcattgttttcttagcaaagatgatgatccatggttatggcataaaagaattgttcacataaacatgggtcacttaaacaaattaatttcaaatgatttagtagttggtttgcctaaattaaaatttgaaaaagatagactatgtgatgcatgtcaaaagggaaaacaaactaaagtctcattcaaacccaaaaatattgtttcaactactcaacccttacaattattgcatatggatttatttggtccatcttgaactatgagatttggaggaaattactatgctcttgtcatacttgatgatttctctagatatacatggacattattcattactcataaaagttatgc

SEQ ID NO: 175457 - DNA, 417 bp, Glycine max
  unsure (1)..(417): unsure at all n locations
agcttcgagaaattcaaatggacttctcttttcactcggaagtccgattcaggcgcatcacatatagagacactcgaaattgaacagtggaagctctcgagatattcaaatggtcataacttttaactcggaggtccgattcaggcacacaatatatcgagacgcccgaaatngaacaacggaagctcttgagaaattcaaacggtcattacttttcactcgaaggtccgatcaggcgcatcacatatagagatgctcgcaattgaacaacggaagctctcgagatattcaaatagtcatagcttttaacttcgagggccgattcacgcacataataatattagacgctcgaaattgaacaatggaatccctcgagaaattcaaatggtcattacttttcacttggaggtccgattc

SEQ ID NO: 175458 - DNA, 288 bp, Glycine max
accatttcaagtgctttgattaatcaatgacaatgcttacaaagttgagctgcccggtgagtataatgttatttccaccttcaatgtctctgatttacctctttttgatgcagatggagaatccgatttgaggacaaatccttctcaagagggagagaatgatgaggacatgaccaatagcatgggcattgatccacttgaatgacttggatgacctatgacaagggctagatcaaggaaagccaatgttgcttttcaacaattgttgtccatactgtttgaatacaa

SEQ ID NO: 175459 - DNA, 365 bp, Glycine max
  unsure (1)..(365): unsure at all n locations
tattattagtacttaaggttggatctntttttggcctacaacgagtttatcattttgtatacgaagcttatggatttttcttgagtcgttggttgttatgtaccattttggtcggggtttgttgggttttgatgttgcatgtgcatcatttactagctttttgtggttttttgattcatcacaacaacaaagcttaaagctttgttcagatatgtagcattgggtatctntgtgaccgacaacagcaacgaagacaacaaatagtgtccgacatgaaaagacaaggttgtgatgtatttcatttctccttttgattcctgtgttctgtcggtacaaaagattgaaattttttgtgttcttcagtc

SEQ ID NO: 175460 - DNA, 323 bp, Glycine max
  unsure (1)..(323): unsure at all n locations
ctgaatgtgtctcatgtaagaactttgccatgaatatgcttctggtgtgcantatcttttccattgtggtacaatatgagataaaggacaattatcccttaaaaaaagatacattatcatacaaaaaacggagttaccgaataaatcaatattagtctacaaaagtaaatggtatctttaatggataatgtatacctacacaaagtaatttctattaacaaatccaattgaaatgtgacgggacacaactgacataggactcctaagtggaaagaaggttcaacttttgaacctatattagcggaccattataacattattcg

SEQ ID NO: 175461 - DNA, 353 bp, Glycine max
agcttcttagtctcagctgaagaatatgtatttgtgactacttcatgcactacattaatgacaatagcatcatttctggcactaaattgctgggagtttgaagccatcttctcaattaaatttatggcttcagcacgggtcatgtctccaagggctccaccactggtagcatctatcatacttcgctccatgttactgagtccttcataaaaatattggaaaagaagctgctcataaatctggtggtgagggcaactggcacataatttcttaaatatctcccacgatgcatataggctctctccactgagttgcctaatgcctgaaatatcctttctgatggtcgtggtcct

SEQ ID NO: 175462 - DNA, 181 bp, Glycine max
  unsure (1)..(181): unsure at all n locations
agcttaaacattcaactttgagcgtctttaatattacgggactcaatcagacatccgagtaaaaagttattgtcgtttgaatntgctcataggttcaacattcaatttcgagcgtgtcgatatattacgggactcaatcagacatccgagtaaaaagttattgtcgtttgaatttgctcaa

SEQ ID NO: 175463 - DNA, 138 bp, Glycine max
ttgagtcccgtaatatatcgactctctctatattgaatgttgtacctatgagcatattcaaacgacaatatctttttactcggatgtctgattgaatcccgtaatatattgaaacgctcaaagttgaatgtttaatct

SEQ ID NO: 175464 - DNA, 375 bp, Glycine max
agcttcaggcagctcaattgcttatgttgctgcatggaagggcaaaggtctgtatggtggtcaacagaggagcacaaaccacaaacccttgcgacaggtacagatttctgattcaaggccagttgggttaccaagttaaccaatgcatctaatttgccttcaagcttcttagtctcagatgatgcagctgagtttgtagctacctcatgcactcctctaatgactatggcatcatttctggcgctaaactgctgggagttggaagccatcttctcaattaaattcctggcttcagcaggagtcatgtctccaacggctccaccactggcagcatctatcatacttctctccatattactgagtccttcataaaaa

SEQ ID NO: 175465 - DNA, 397 bp, Glycine max
  unsure (1)..(397): unsure at all n locations
agctngcggactataccttcgaccaaactcggccgtgtntctgtctcggcccggatttaaagcgggttgcagcactggctccgcttccttaaccgtactggaggcggntgccgnggctttgttctctatggttttctggagttntaacatgacctccgagatggaagccatttgatcttttaaggccgatagatcggccttcatctgttcctgcacgccctcttcattatccatttttctggattgagtgttataggggtgcctcggtgttttcttanttatgatgaaattcctaaagaaataaacaaaggtgagtatgccaccaaaacatgaatatgcaaatgaatgatcggagcacttggatccacccaaaggttttttatgtaacgtgatgagt

SEQ ID NO: 175466 - DNA, 315 bp, Glycine max
  unsure (1)..(315): unsure at all n locations
tgctcgctaagcgagaacaataccctagagaatgttgttccatatagcagcatgcttggcgcgcatccagcccgtctaacgaggacattatcttttcttgcgcttatcgcatccaagccctcttatcgtacaaccacttactcttgcccagtgagacatgctcactgagcgtggcttcataagatgagaagccccaaatcctttaaaaacactgagaataggggaagtaaggagacaaccagcgtgagaaagaaggaagaaggcaccaaggctgaagataatatattttctttatactttnannattttctttca

SEQ ID NO: 175467 - DNA, 371 bp, Glycine max
  unsure (1)..(371): unsure at all n locations
agcttattaagtataatatatatttaaaataaatttcttttaacatttataaaaatttattaaatattataattaacaaatacaatacttattcaaattaaaaattgtgattaaatattatattcattaaataaatatgattatgatttttattaaatgtaaaaattgaataaaaatgataacaatcaatataaatatgaaacgaaatttggattaaattttacatcaatacttatatttaattccattagacttatatatacggatttataaaaaaagtattttcttgttttttaaaaatccctttaaatattatggtgagtgttgttttcattaaatctaatccatttacatgttatatgtcnaatttt

SEQ ID NO: 175468 - DNA, 176 bp, Glycine max
tgatgttactaaacacaactatatattaattgagtcattggtttttacttttcaatttttttatgaaaaaacatcatattactctgctgtaattttaaaaataatgaatgataataaggtatcccaaaaatataaacaatataattatctaaatatttaaatacctcatttaacct

SEQ ID NO: 175469 - DNA, 229 bp, Glycine max
attttcttagctgtggtactaaaatatggtgggaacgttgaaaactcttggaatactttagaacctgccaaaagcaaatgatatatacggatgttatgttactattggaacaccttgtacacttcaacagatatcaggggctgggtgaaaaaataatctaatgcaaagattctgactcttaattgtactcataagtgggtgacgttgacgtactgtgctataatgacga

SEQ ID NO: 175470 - DNA, 322 bp, Glycine max
  unsure (1)..(322): unsure at all n locations
acgttggaggtgactctgcgcgtattcctttcttggaacacacacccgcgagtcacgcgtcgcccacccttcagaaggtaggttgcgacaaggtccaacgccttaaatgacccccttccaagtaaaaagaatcacttgattcgccccttttcaaagaactacgtaagtctgatttccttatcacaattgaagaatacgtaggagcaagggaaacacccttgtccaccacaaaaagataaaaaatacaaaaagcgtataaagacataanaagataagagagggaaaataaacaaattgaagtcatatttgcacacttgattaa

SEQ ID NO: 175471 - DNA, 454 bp, Glycine max
  unsure (1)..(454): unsure at all n locations
agcttagattctaggagaacattcgnccatatataaacctttacttttcatgcacgcccaccccaatacttgcctctttttaggcacttagcttcatttcattgatttgcaacacacacacttttatacattgttatttatacttatagttgtttttaacacataaaacaatgcgtgtatatacagaaataatgtgtgtatgctatttactttgaccatttcaattcttacatagtatctcccctaaatatgggacaanattgctttaacatataactcccccaaatttaggacaaatttgttttgaaccaagctttctgtggatgatgctttcctacaacctaagacaaggtattaggagataacactatataggctcaaggctcaatcaatcaataattcattcagctcacactgggtgcaagggataaatcatcaagcacaaggtcaactt

SEQ ID NO: 175472 - DNA, 282 bp, Glycine max
tgcaaagaacccattgtgcgttaaaaagctgagaaagcgtttgaagacactcacttttgaagggtgcaatttgagagctgagattactcggaaatagccatgggttttccatggctatggattaacttctgctatgcctaattccattagcatacttaagagccatggaactcacaaagttggatacctggttgtcaaatgaattgagcatgatgcagtcactttcttcaggctgttgcacaaacaccatttttttttctcttgttctgctttgactaaata

SEQ ID NO: 175473 - DNA, 472 bp, Glycine max
  unsure (1)..(472): unsure at all n locations
agcttaagagagcactcaaaccgagaggcgataccctcgttgcctatactctgaagaancagttagggtctcaccttcctgattcaggtccaacccctaaaaacaatttttgcatgcagacaatactcatgaattatacaatactcacgacctcacactagtgtttcaaaaacatttaacacattgtactacaatttaacacttcaggttcctaacttgtaacatacacttttcttttaatacttcggcataaacattttttccaagataaaaaccagtcgggttattgtataattcacaactcataacataagtaatatcacatcaagtattaaccactcacttattcacaaccatatctcatgttcataatgtaacatctcaacaataactaactacagaatatacttaacaaatagataaacatgtattataatgatacaatatatctacttcacagattttatatata

SEQ ID NO: 175474 - DNA, 403 bp, Glycine max
ttgacttgagtcatcaatttattatatttatgtgaccatggcatgaattttaaaagaagagatcaatcatctatctttcaatcttctctcaacatcattcaatatctttcaactgtttctatagaattttctgattctttttctcttcatctttctaaaagattgtgttcaaaactttctcttccaaaaaaagttcttttgtaaaaaacttgcgttattcatttgtttcattcttttctccctttgccaaaagaacgaaagactaaccgcctgaattcttttgtctctctcttctcccttacaaaagattcaaaggactaaccgcctgagaattcttttggttcttccctttcccttaagcaaaagatttcacagaactaaccgcctgagatatctttttgtt

SEQ ID NO: 175475 - DNA, 462 bp, Glycine max
  unsure (1)..(462): unsure at all n locations
agcttgccaaaganagctagattttttnttactactgctnnnggaattgtggcctggtcttaataaatttgtagccttgagattacatggttttatatttcttatcaggttattgtctaaaataaaaaaaaaatggcattccaatttgcgtggtcctggttttcttttccctttgattatatgtgcgcgtgtgagagagtgtgtgtgtgtgtctatatatatatatatatatatgtgtgtgtgtgtgtgtgtgcgtctgtgttaaacttatatatatatatatatatataatcaaaagcatttcagatagtaaaagtaatataaataatacattgaatacacttatagaaattattaagtcgtagaaattatctcttaatagagactatttgtgctacgttcaattaaattgttgagaagatattttaactgaaacaatatagtccgattaattatacatgt

SEQ ID NO: 175476 - DNA, 357 bp, Glycine max
  unsure (1)..(357): unsure at all n locations
agcttaaggcctgtntccatattctgancatttcattgtttcacaagntgctcttttatcaagtccatgcaaaaatatctgagtttatttggtatttgggaaagtccttcattgctcccattctcaatgttttccaaaaaaatccttttgttgtgttctgatccaaaaataagtttaaaaaaatactggtggttaattctttccaaagcatgttatgttcaataaaaaatttctatttaagtcccaaaaagagttataatctataactatgctaatgaaatatcacagaacacatgagttagtcaaaataaactcacgtaagttttgttgaaaaattcaaaacaataaataaggtaa

SEQ ID NO: 175477 - DNA, 63 bp, Glycine max
cggacttacacggcgcctttgagtttttttagactaagcatatgaaaaaagccttctgaaaag

SEQ ID NO: 175478 - DNA, 380 bp, Glycine max
  unsure (1)..(380): unsure at all n locations
tggcttattccctagaggatggtgccttccctatcctcttctcctttgccttccactgcatctccatggtgaanaatcaccattgaaggacctcattgaagctcaaagatccagcctccatagaagctccacaagcaagcttccatcaagtggtatcagagcacaagagcttcaagtaggtgctccttacacctcgattaattattttttctttaccttctcttacattgttttttcttcattattctccatgaatgtcctcacatgtctctgtctaaatgctagtaacatgattctttagagtttccaccgattaaacttgctatagaaactagatatggatttctatggttaaaattcttgttcttgttcttgaccat

SEQ ID NO: 175479 - DNA, 378 bp, Glycine max
cacctgcggcatgcaagcttatcttcttataagggtttcaagcttatgcttgaaaagccttccaggtcaagttttaggatatatggttagaggaacatcttcatctttgtcaagcagtaactccttgcctttgtgtaacatttagccttttggaacaaaacaagcttatctattgctattcagaactaagtgtttggagtggctaagcaagaaaattgtgatccaagcatgaaaggcagacaagtgttgatcctttctattcttgtcaaaaattctgtcttgatatggtttcttatcttctgtgtaggtagataacttcattcttagcttaagttcatagtttgactgctcatagtctttgaaactttttctctcttt

SEQ ID NO: 175480 - DNA, 407 bp, Glycine max
  unsure (1)..(407): unsure at all n locations
acactaaacctctcaagacttgagccaatttgatgatagaaattcataatttccaaagtgagatggttacagcaaatcataagcctcaattcacaatcttgttattttttctttaagcttgctgcataactaatttattaattggttgagtgaaaacgttttgatcaatagctcctttggatatacttcttaggaaacctgcacaaaaagcaagatggattattagttacgtgattgtataatggtttacttatttgtaagaagagccttggtaacaactttccaaatcacgattataccaggtgtctcgtgttggtaaaaaanattattctaacaatgcaatatgaactcatgacatcatataaattcgatactcatanagttgagtgaatgtttgaacgtaactg

SEQ ID NO: 175481 - DNA, 387 bp, Glycine max
  unsure (1)..(387): unsure at all n locations
gacagnctctagagtcttaggaagggtatattaaataggaagggaattccaattgaagtagcaaaaggtttggctaanaaatttaagttaaaaagtttcttccaagagatttactctctggtaatcgattaccagaagatgtaatcgattaccagtggccaaaaatgatttacaacagctattaaaatttgaattcaaaatttgcactgtgtaatcgattacacatatatggtaatcgattaccagcagttattgaacgttttaattcaaatcttaaagcttgtaatcgattacacaaatactgtaatcgattaccagaggagaatttaaaaaatattctcaacagtcacatctttgtatttggtcttgaatgggtataaaggccta

SEQ ID NO: 175482 - DNA, 350 bp, Glycine max
tcccatcaattacatttcatgtgcctggaactttccacataaagtagcaagagacatgttagatagatctcgtgattcaataatgggtgttaccttgggttgccattccctacttaagcatctcacaactttattgataagatcttcatctggaaatatctttcctaaagatgcaagatgattaattatgtgtgtgaatctcttctgcatgtcctggatgctttcatccggattcatgctaaataattcatattcatgagtgaatgtatctatcctagatctcttaccatttgtgaccttcatgtgtacctatagggatcccataatcttctgcacttcacaatctgaat

SEQ ID NO: 175483 - DNA, 392 bp, Glycine max
  unsure (1)..(392): unsure at all n locations
ttgtttctaacggtttaacgtaggaaccactcaaaccttaaacacatttttatgtatattacgtaataaacaagagtttaaaaatgtttgaaagtgttttaacataaaaacaaacatacatttagtttatctatcatcatggagatataaaatagattgaataatttaaaaaatcatagattcaatttctttgttaacaaccttctaataaattaatatttattgataaaaaaaaattcttaccaccatagtttctaaagggggttgattcacaaatgatcataacaattaaggcattcttcaatgcgttcgcgtaattacgggtttaaattaaaaccactttanacacaattaaattagggggtgtcaatgagtattggatagtatatact

SEQ ID NO: 175484 - DNA, 223 bp, Glycine max
ttttccagcatctaacggaaaagcccattcaacaggcccatttaccaatatgcacggcttcaggtgattgtacctacatgacacacattctcttagctagatcacatactgcatactctaaacactgtggatatcaaaaatagcatacgtgcacattgatggtatgtctaacacctatacatacacaaactttatgatgaatcttgactatcaacacaataag

SEQ ID NO: 175485 - DNA, 408 bp, Glycine max
  unsure (1)..(408): unsure at all n locations
agctntgaacactngcagcacataaacttaattgatgttaaannnccaatcattcacataaaagggaagaattaagagagtaaaattaacaattcctaaataatttaatcccaaaatatacctaacatagcagttatcaaactcccccaaattcaaagttttgcttgtcctcaagcaaaagtaactaagataaaaatctagagattaccaatcacaacacatganataactgcattcattccaaaatgcttcattggtcaattctcaagttcatagttgtcataagttcatgaaaggagcatgaaaaagatgcacttcaagatgaattagttagcaagtatgacaaatcacacggagaagtcaccaagcttcattcatcataaggctagtgtttatctcaatcccaca

SEQ ID NO: 175486 - DNA, 465 bp, Glycine max
  unsure (1)..(465): unsure at all n locations
acgcttaagaagcaagagtgattaataatcttgtntacaganccaancaagctgtaagaatcaagattcaagaataatcaagatcaagattcaagaataatcaagatcaagattcacgactcaagattcacgaaacatgagaagactgcttcaagataagtactaaaaaaagtgtttcaaaacattgagtagcacaagaatttttcacaaaatcttttaccaaagagttttactctctgataatcgattaccttctggtaatcgattaccagtagccagcattgttgtcaaaactgatttacaaaggtgtaattgattaccataatcaggtaatggattaccaatattttaaaacgttagatttcaatctcaagaagcacaactagtgataaaacattttcaaatcatgttagacttgtgtaatcgataaacaatactagaaatcgataccagtgttctacacgt

SEQ ID NO: 175487 - DNA, 394 bp, Glycine max
  unsure (1)..(394): unsure at all n locations
agctttataagagcgggacagtgagacaatattcatgtgtgcgccacacgcgaagacgacgctccgagtacatcggatgtggtatcaccatgccctcctgatttccagctgagaaaatggcgagtggaggaacgctacgcaacgagcatcatgtaaacctttacgggtttaaaagctctatacgtgggcctacgcattacagtctttcttctgagaaggctctgtgcccttcgggtttgaactataatacaaggatcattcttcatgtgtacctacgtcgatacccattctcattcaatggcgtgaacacctctttatctgaaacggcagaactcaagaccagacccccgaaagtactcatacctgtgacccgcctatanacttcgagcaagaa

SEQ ID NO: 175488 - DNA, 303 bp, Glycine max
  unsure (1)..(303): unsure at all n locations
agcaagaactttgtttctacctcgaaaccccttgagctacttcacattgatttatttggtccctctacaacttttagttntggtggtaattactatggcttagtaatagtggatgattactcaaggttcacatggaatttttttttgaaaaccaaaaatcaagcttttgattcttttcgcaaacttgccaaggtgattcaaaatgaaaaggtctcaacatcgtttcacttagaagtgaacatggaggtgaatttaaaaatgagtcttttgaaaanttttgtgaagaaaatggaattcaccaca

SEQ ID NO: 175489 - DNA, 447 bp, Glycine max
  unsure (1)..(447): unsure at all n locations
agctttacataccctgtgttaggaagtatctatatattacactcagatagggaagctcagatgatagaaggagaagattctaaatctgatgaagatttaatcaaggcaaaggatgccactaagtaggtgaagtttgatagttgcacaaataaaatcattagtgatcataagcagtttgaagcacctaatgagactgatcaagatcttcaaattcaccctcaacatcagaatttagcaccagttgaggggactaattggacaagtcaaaactatccaaagcagcccaaaacaacaacacccaaaaggcataaagacaaatcaaagctcctgaaagatatggctttgatatactgtctcatgcactacaagtagcaaaagaaattgattcattcgaaccaaccacttatcagaaagtaatttcctggtctanagctaaggagtggatag

SEQ ID NO: 175490 - DNA, 411 bp, Glycine max
  unsure (1)..(411): unsure at all n locations
agtagtgtatgaactctagaagaaaactatatcatacccctccccctcaaagcttatcctaattcactctaagcttatgtcctcctgattccagaaatccttcttggttaatgtaggtttggatgtctgtgaacacattatggatatcagtgatgtaataagagatgaagatcttatggcatccaaatcagactcacatctgaatgggatagatcgtagactttttacatcttgttcttcacataacatccagaaaatggtttcaaacatggttcctagtgtcaaatctaagtggccaagtgcaagagaattgaatcttttaaagcgtanagcaaaaataaactctaaagaccaaacaaaaagctggtgtgaagatggaagtacagaggtatcaggtggtcaaaatttgac

SEQ ID NO: 175491 - DNA, 456 bp, Glycine max
  unsure (1)..(456): unsure at all n locations
agctntcaggattattaatgagggatggtctttatagggttatggtttcttagcaannatggaacagaaggtatttactataaaactctctcttgatactaattgtttattatttcttgttctgttggtagcatgtaacgtgataaaaaatttcattggtaatgcggtggattgtagaaatgaatggcacccctctacttatagtaatctgttaatggataatggatcaaatagcaggcactagtttgagaattagtaaggaagccaaggagaagcccaatcattgggcaacagcaggatcttgtatgagaaattttttgtaggattttatatgtcgaatactacttcttctgttccttttcattttaagtatctttctgaggttctctacattatatggatcagtgtttagccatggtctttntgtcaccataaactattaaactaatgtattct

SEQ ID NO: 175492 - DNA, 407 bp, Glycine max
  unsure (1)..(407): unsure at all n locations
caagctatagcatanatctcaatttcttnatttctgtctcantcaaccaggcctctagtaaggagtatcctatctgcttcaactccaattcagttagcttttctaaagccacactttcttccctttaatcttctagagtctggtctatttcatcaaatccttcctcaccttggcttgcatctatcatttcagntggagtatgattggtcgaattagccaaaatgattgatttttctattatgactggtggatgcttactgaaagctggtccaatgcaatggctacttgactcattgagatttctccttttcccctagctctcataattgcaatcattgcaagtttctgcttcattntgttcacagccatagcccgctgcaatcttctcttctgtgtgcgagttaatc

SEQ ID NO: 175493 - DNA, 451 bp, Glycine max
  unsure (1)..(451): unsure at all n locations
agcttcaagccaggccaccttttctagaaattgttctatggatacaattggcctgttgtgagctaactcctgctggttgtatacaattattagctgccctctgaataagctctgcaacataggaattatgggatgtgcttgttgggcatctggttccatggtttctgttggaggaggtaggttggaagatgaagggatgtcttcagttcttactctctttctcgatgccatctgcaagaaaagaatgtgaacatttgcaaaagtcaaattaaaagaaagacaaaggccgcttagcgaaagagggctcgcttagcgagtcttcaaagagaaagttatactcgcttagcanaatatagagcccgctaagcttaaaaccagctgcaaagatatgtgcttagcgctccctgatccacgcttagcggtttcacacacnaaanaatcattaagttat

SEQ ID NO: 175494 - DNA, 399 bp, Glycine max
gaaattcaatatcttattttgatgaagatcagatgacaaatatcataagaaatattatctggtgctatcaccaattcgatttcatcaattagtttaattagaaataataaagacatctcatgtcacttactaattagcattttttaagtgaattaattctattctttatattatttaaattgagtggatgaaatttggtgtacataagtctaatgttttatatgcaaaaggatgttattgtaatatttttcaaaaacaatcatatgagttaaattttttttgagtgggaatattacaacactgaagacggatacaccaaataactagctttgtcttagtgaaaaacacgccgagagctatatccactaacttacgtgtaagacgagacggacatgatta

SEQ ID NO: 175495 - DNA, 446 bp, Glycine max
  unsure (1)..(446): unsure at all n locations
agcnnttgatttgcacaaggcatattgtgtttacttattacttctatttctatccatgtccagtttataaccttaanaatgtcaaataagtttaaagtcaccatgtgtgggcattcaatctaaagttactcatgccaagagtccaaagtgatntgattaagcacctttcaatgcgagacaacgctcatttggggtaaaatattagatcttgaaattatatatacacaacacatataacaaaatttcagggaccaaccattgaatcaacaggtcagcaactctataagtttacctatgaaacaatgacgagagatgcactatattttctggctttggctatcaccaattttcaagtgcaatgtctaattgcaaaaaagaaatcaactatcaacaagggtttggaacttcactcgcttcttaacactacgcattcgatcatacccaat

SEQ ID NO: 175496 - DNA, 456 bp, Glycine max
  unsure (1)..(456): unsure at all n locations
agcttgaggtggtgaccgttcatgatgtgatatttatatggcaaattgtttgatacaggctacggagttttggatgacaccacttccagtgaaggaagataagtcatggtatacgccacaaggattaccttgataagtctgagttaggttcaacaagaaacctagagagaagctctcaccaaattttatcaaatgccaaaagtttcttttattgaaaacaaaaaccaatacttatagtgtatctgaacaaaaagataaaaatagacatgggccttctaaacaatttgggccaaaattacaataaataaaaattataactaanaaacatatttaacttgggccttcaaattaagttgggccttcagcaacaattagtagtcttgatagtgcctctacctctagggcctcatncttctccactcggaagctttgtcgtctccactcgcgcttcgtctt

SEQ ID NO: 175497 - DNA, 475 bp, Glycine max
  unsure (1)..(475): unsure at all n locations
agcttcanagacttattgtgaatactactatctttaacatgtgtgtcaaggcttataatgatatgttgtatcgtgaacaatacccccatttaaattggtggaatctaaaccatcaatttagttgcaccaacgattaactaactaattacaatctagaaaaggtttgaacataaattaagtaactaatcactttaataattaactgactaattaaatattcacataattcaaatatatacttctaagacttaattattaaaatataatactaacattcaaataattaaaatatttaaatacttacatatctaattttaaacaataaacaaccaaattaattaagaataacataaactaaattaactaaatggtgcaaatctaattttaaataaaaaaacaaaattaanaatatacttatcatgtttccactatngtntcaagtttggatgcatagcanaaacaagaattcactatg

SEQ ID NO: 175498 - DNA, 458 bp, Glycine max
  unsure (1)..(458): unsure at all n locations
agcttgngcaaatcaaatcactcctacatcttatgttagcatgcattttctttctttacccactcctcacgtttggttttttagggaaaaacaccataactaaacgcgccgcaagggatccctatcgcaccagatccaaatctagaacgatgggtaatcaagaggagacgcaggaacagatgaaagccaacatgtcggctctgaaagaacaaatggcctccatgatggaggccatgttaggtatgaaacagctcatggagaagaacgcggccactgccgccgctgtcagttcggctgccgaagcagacccgactctcttggcaactacgcaccatcctccctcaaacatagtaagacggngaagggacacactgnggcacgatggcagccctcacctgagatacaaccgagcggcttacccttatggattgccgcccaactattcaccacccatcttg

SEQ ID NO: 175499 - DNA, 423 bp, Glycine max
  unsure (1)..(423): unsure at all n locations
agctagttagaaactacaattatgtcacttattctgngactataacaacaaaagcaatcactatgacaatggccaaaactccaaaagactttgtaagcatagatctatcgctaaaacatgtttgaaggagagaatccaaatgtcatttggaaacttctttctctcagagggctcaaccttttccataacagactcagtggtcgtattcccaaatccattgaaaatttgacaaagctagaatcgttggatctatcctcaaatatgctcactggtgggattcctacagaattatccaatttgaactttcttgaagtcctgaatctgtccaataaccatattggtggtaaactcgagagtctatcgagtttacttaaagtttatagagtttactcaactcgcagagtacaagtgaacttctaaact

SEQ ID NO: 175500 - DNA, 432 bp, Glycine max
  unsure (1)..(432): unsure at all n locations
agcttattaacgagggaacgtgtgtttccctttcctatgcctccgcagcgaactttattacttaatagagctttcagcatatgcttagggacgacaacttttgtgtggattagctattcaagactgatgctaataatcaacaatagctggtgatgctgtgttcttgtccaccgcaactatgctctcttttgttagcagatgttgtaaggactttagttaccaagcctttggtttttttttactttgccactaataaaagaaaaacactcataaggaagataaataagatgttgttctttcgcaaaattcaatcatggtacaggatgatacttttattataatgtataaaaattgaatggtggaatttactgttgatacctcaattgtaagacaaatattataacgaataggttatnaagaatattaccatat

SEQ ID NO: 175501 - DNA, 450 bp, Glycine max
  unsure (1)..(450): unsure at all n locations
agcttaagagagtccttcagattctgnatatcatttttactntatggcatgagatgaagtgcaaagattggacctctngctagttgttattaatgaatacttaaacacttatgcgtgagggaaacaatggccatgagactgtggtttaagcttctttccttgatatctatcttatgcctaacttcatctaattgttcaggttacattgtattcttttctttggataactacatgccttgtaaaagagaagtgatgagggcattaacttcattctcttatcatgcaatcactaacttttggtgcatacacctttgtacatagtcactgcatagtattgtcacttggggaccagtgaactgttctttatttgcttgaggacaagcaaatctataaatctgggggagttgttagtcggtgaataccaccacnctttgtgtactaaactagtgt

SEQ ID NO: 175502 - DNA, 430 bp, Glycine max
  unsure (1)..(430): unsure at all n locations
agctnttctttctcaatcaacctgtctattgtttaacaattctaattgcaagttcacatttttgttctttctttgtctaacatacatacttgctcaaactcatggaaagaaacacaaactccatcataatcatgcattcaaaccaaaatcaattcatacaccaattttcacaaagagataaatgtgtttcaatgcaatatcatcaagtcaaactattctatatgctttagaacaagcataccaactaatcataaacaaaaacaacagtgtatataaacattaaccaaaatcactaaaaacactgtattgaaactataatcattataataataatccaaaaagcatcattaggaatttagaattcctgtgactggtcctgagtatcatgtgtctgaacatcctnctcatttgtcaaatgaagtactggagt

SEQ ID NO: 175503 - DNA, 453 bp, Glycine max
  unsure (1)..(453): unsure at all n locations
agcttcaccaaaaaagatcgtgtcatccgtgtattgtaataagctaatactgatttcagaactagcaatattgaagcctttgtataggtttgctgccagcgctgtcctcatcagaccattcaatgcctcagctactatattgaataaaaatggagctagagggtccccttgtctaagacccctttgaggcttgaactcctttgtggggctaccgttgactaagactgaaattgaggctgatttcagacacccttccatccagctgatccatttaggacaaaatcctgttcttttcagcatatacagcaaaaaattccatgataccgagtcataagccttttcataatcaactttgaatatgaggcaaggtttatggctccttttagcttcatcaatgacttcattagctatgaggacactctgaagagngtgtctcccttcaataaacgctga

SEQ ID NO: 175504 - DNA, 367 bp, Glycine max
aagtacgatttcagagtgtctaatgttcttttgggtgcatatgcgcgcaatggatcaatggaagaagctgaatcattacatcttcacacatagcagaagggtggttgtccaaactataagacattggaaattctcatggaaagatatgtgaattggcaaaaaatggatgaggctattattaccatgaaaagagctttggctatgatgaaagattgccattggaggccgccacatggacttgtgttagccattgcagagtatttggagaaagatgggaatctcaaatatgcaaacaagtatattacagatctccgtatttaggtctttttagttatcattgataaaatatgcttaaatgccctttctg

SEQ ID NO: 175505 - DNA, 327 bp, Glycine max
ttagttattgaaccaaggagagtgatggaacaactataacatggtcaaagagacatacatcggttgagaagagaaagcaataagaaaataccatgcactatactttctgaaataatgaatctacttactacgttggaatatgctcttaaccacgtatatatcgcggcgatgtacctcgcggataaagtttatatagttttctcaacctactttgatatatttactccatgacaataaaaaaactatgaggtatctagaataaaggtcatagcctcctcatagacggaaatctgaaatcagactttatcacatatgatcaataaaaat

SEQ ID NO: 175506 - DNA, 472 bp, Glycine max
  unsure (1)..(472): unsure at all n locations
agctntagtcaaacagaataatccagaatgttttttaattctgtgttgaaaaagcataacaagactttctgtgattggtttaaagatacaatctttgcagatgaaaatgcttcagaaacattaagaaagctagcagatgggcctaaaagaaatgttattacttggcaaggatacaacataaacaagtattcattttacacaaaagcacaagacgataaaagtacaatgcaaaacaacggggtcaccctaagggctgaatctcaacacttcgcaagtgtgcatgatgccaatccctatgtagctttcatctcttactttgggttcattgatgaaatttgggagcttaactatgtgaaatttactgtttgtgttttcaaatgtanatgggttgatagcaacaccggtgtgcgcactgatgatataagatttacgttggtagacctaaagaaactcggntaccacaatgatcctt

SEQ ID NO: 175507 - DNA, 440 bp, Glycine max
  unsure (1)..(440): unsure at all n locations
agcttatgaattccttcttagttatagtgttcttcanatacatagcaacagatactacctcctcaggtgtcactttcccatcataatccctgccagaacatgactaagcatttgaatgacatttatttccaacagttagtcataaagatttttaagggaaaagaaataaaaacctttatccatgtttcagtgctaactagaatcttataaattctatatgaattgaaaacttgggacggattcatttccaggaggagtaacggccacagagttctggtactggttaatgacttaattcataagagagagaggatcccaagtaatggattcaattgtgggtatgtaagtagcgcttgtttcgtagaatgtcaaaacatttaattctcagttaanatgaaagagaaataggatntggaaaatcttgtggatagacatctcat

SEQ ID NO: 175508 - DNA, 463 bp, Glycine max
  unsure (1)..(463): unsure at all n locations
agcttcttgaagagtagtaccttatataatttattactaaattcctgccatcatgaaagctcaggcagtgattcgcatggaatctgtgataaaatggatgctactgatgtgttgatgaagacctcccatgaggtagtgatatcgagtcacatgtctaatcctctaaatccagagaattcaagctgcttatgtaaattcagtattcaagatagagagagtttgattgacagttgttcaggaatgggtcactttttgaaaaaatcatttgataatgatggaactgttgagccaaaggtgactganaagcacctgagacccctgaaatattctatgttatgccatgacattaataccattagcaatactttgagtggngaagccacaaaggaggatcaacctgacaataatacactcacttcacatttgtacgagttccaaccacaaaaatatggccatcagtgta

SEQ ID NO: 175509 - DNA, 428 bp, Glycine max
agctttaacctcatcggctctcttagtctttatatttgggagccaatccagtccttgtgttcggactctcagccacttatgatagccgccgatgatcccattacggcttcccctaagctctctgtcctttcttcacgccgcatcccatgccttgcgaactccttggagtaccctcgcgttgtggtcaccgaaacctcgtgcgatgaaaggcatgatgctttcgtctaatggcgctcctctcatggggtagccaagctgtcttatggtgagaacgggattataattaatacaaccccttgttcccatcaagggaacatttggacatccttcgcatgaagatagaatcctgattcttccttccttctagcgagggaaccaattaacagacgctcccccatgctagccaagagttggtcccattcgccttc

SEQ ID NO: 175510 - DNA, 411 bp, Glycine max
  unsure (1)..(411): unsure at all n locations
agctngaaggcaaacaggatgttttgagcattttgtttacccacctggccttgaatcagaaatctgtacctgtcacaaggggttgtggtttgagcttctctgctgaccaccatacagacctttgcccttccatgcagcaacctgaagcaattgaccagcctgaagcttatgctgcaaatatatacaatagaccttctcaacctcagcagcaaaatcaaccacagcagagcaattatgacctttccagcaacagatacaaccctggatggaggaatcaccctaacctcagatggtccagccctcagcaacaacaacaacagcctgcttcttccttccaaaatgctgctggcccaagtagaccatacattcctccccaatccaacacaacaacacctcagaacactaacagtt

SEQ ID NO: 175511 - DNA, 441 bp, Glycine max
  unsure (1)..(441): unsure at all n locations
agcttcttatccaagcaatttttgttggtgtatctttttcttccttggcttattccctagaggatggtgccttccctatcctcttctcctttgccttccactgcatctccatggtgaaaaatcaccattgaaggacctcattgaagctcaaagatccagcctccatagaagctccacaagcaagcttccatcaagtggtatcagagcacaagagcttcaagtaggtgctccttaaacctcgattaatttttttttctttaccttctcttccatagttttttcttcatttttctccatgtatgtcctcacatgtcttgttctaaatgctgttaacatgattctttatagtttccaccgattaaacttgctatagaaactagatttgattctctatggttcanatctcttgttcttgttcttgaaccatgaatagtgttgagt

SEQ ID NO: 175512 - DNA, 137 bp, Glycine max
tagatattggacatgctaacctatggtgcaccatctctaaggacctttcatattgagataatggcttgctgctttctttgccaactcttgattcttatggatactgcatgaattgagaatcgacgaccacattatct

SEQ ID NO: 175513 - DNA, 410 bp, Glycine max
  unsure (1)..(410): unsure at all n locations
caagcttgcgagattggtcttcgctctaaatatgatcgaagcggatctgaaaagaggaaaatttaatcatcctgcttggacgaatgagaaaactggggcaaatgaagagggtgagaatgaaggaaaaacctatgttgtgactgccattcctatacggccaagttttccaccaatccaacaatgtcattactcatccaataacaaaccttctccttacccaccacccagttatccacaaaggccatccctaaatcaaccacaaaacccaccttccacacaaccaatgctaaacaccacctttagcacgaaccaaaacaccaaccaaggaaggaattttgcagcaaaaagccagtagaattcaccccaattcggtgtcctatgctaactngctccattatctacttgatact

SEQ ID NO: 175514 - DNA, 446 bp, Glycine max
  unsure (1)..(446): unsure at all n locations
gctcctcgntatctctttcatctgagggtgatacgtgtcattgtttgagaaaacatgggtcttttggttgatttcaacccaactggatgccgggacctttctaacccctcgctctctcatggccttcttcacctttcccacattgttccattcaccagctgctgcatagatattggacatgctaacatatggtgcagcatctctaaagaccttcatattgaatagttggtctgctgctttctttgccaactcttgattcttatggatactgcatgagttgagaattgatgaccacattatctcatccggttcaaatggcatctgagccatcaatntctcagcctcatcaaatcttccactgcgacataacatatcaacaatngatgcataatgctcttttctgagtacaagtttgtaatcttgagccatagaagttaaagtactgt

SEQ ID NO: 175515 - DNA, 314 bp, Glycine max
tataacaactaatgtaattaaacgttgtgctcggaaaattctaactgattgcaattttttataatatataaaaatttaactcttaaaacttgagattttcattaagctcccaaaccttttgtcctccatttgagatcatttcatttgctttgactttctaggaatctaatattgtcttgataagaacaaacgataaatgctgaagaaaaacgcttatagtcttattataataattaatagtaattaattaattaattcgaatgatggcgacttgtgagaaaacgaatcgcactgtaccgttacttgaaatgata

SEQ ID NO: 175516 - DNA, 326 bp, Glycine max
agaaagacattttgaaatatagactaatattaaagaaatttctccttttagacaacctccacactttctcctttgtaaaaagatacttgctagcattgtcacacctcttgggcttgagtttattcctcaagtaaaggagtcgttggataaaggtttggttcgcaagagcttaaatccttgtgctttgttggcgcccaaaataggtattattacacaccaaatccctaaaataggtggtaagatgaatgttctgagtcacgcaaccctctttcgtaaaatcactcatacaccaaacatccttatgattgggtacatagggactcatt

SEQ ID NO: 175517 - DNA, 389 bp, Glycine max
  unsure (1)..(389): unsure at all n locations
agctngtagccattataagagaatgagcatgttattggatttatgactganaatgttagtcagtttgccagattgattgtgaaggaatgcattaaccgtatcccggtgagagtgtgatccttaaattttgagagaaacgactatcatttagtactgatttttgcgtgaatctctgaagtatggactgaatgcatgaaattgaggatgatgaaggccatgtttgattgtgatagccacttagccaaaaagctgaccatgtgcttgaatgatttaccccttgcacccagtttgagctgaataaattattgattgattgaatctggactctatacagtgttatcttctgctaccttgacttaagttgtaggagagcatcatccacagtaagc

SEQ ID NO: 175518 - DNA, 400 bp, Glycine max
aaaccagcaaggccttcaaaaaataatttaaaagggaaacaattatgttcaattccatattacattagaagattaaattttgatttcaaacagattggaataacacacctggatctatgaatccctgtggaatagatattaagaatattaaggaaaaggcaaatgtgatagaagacaacatatccaagcggaagcacaaccattccatggcaccagcaatattgaactttggcctagaatatccatcagtcaatttcatatttgtttcctgaaatcttgatttctgatcaaagcttctaatagttgaagtgccagaaattgtttcagcaaagtgttgaatgattgcggctctgcagactgcaactaaacgtgatagttctcgggctgatgcaatataata

SEQ ID NO: 175519 - DNA, 452 bp, Glycine max
  unsure (1)..(452): unsure at all n locations
agctagcagatgaggaagctgttgatgnttttatctctacncangacgacgcataggttgttattcttaatgatgatgtctaggctcctactgatactcctaaggttcctgcagatcatactgtagaggatggacctctttacaaaccacatggcattgagatatatatatatatatatatctatatatatctctgggtcagtttttttagaaataattctaagataaaaagaaaaaaaaatgacttgatgttttacatatattaagatgagcttttcatcaattaatttgtaaaatgactctcatataattgtttctacaagatgggagatatctaccatttatatgacatattgtgattaatcaactaatgaacattcatcttaacttatgaagaatatattcattgttttaatttcctctcttaaaagtattttacagaacttatctat

SEQ ID NO: 175520 - DNA, 389 bp, Glycine max
  unsure (1)..(389): unsure at all n locations
ccaatatttttcaaacttagcaaccatcatttcagccgttacttttacaactccatcatcatcattcaaactttcaagtagaacacattgaatnttccaaacttgcaaaaaatacaagttggaggttgttagactatggacctcagatatcttaagaggagggggttgaattaagatatcacaaactctttcttaaataaaaattctattttgattttaacccaaaacccaagactcctttcaaaatgacttcctaaataattatgtagattaaacttactgaaaagaagcaatcagcgataataaataaaggagtgtaaggggaaagaaatgcacactcagattatattggntcggcacacccttgtcctacgtccatccctaacaac

SEQ ID NO: 175521 - DNA, 323 bp, Glycine max
  unsure (1)..(323): unsure at all n locations
ttcgaanctcggtgaaagacgctgcatctccgggatgggcgatatgtcttagtcactgatgctataggctttgagtcttacggtaccaatgagaccttttccagtctcggtggaagacctacatcttcgggaagtgcagatgatgacgttgcattgatgctttgactttagtcttacggatgcaatagactttttgctgtctatcggaagagctacttctcggggaagtnagatgaaacgtagtcactgttgcattggcttgagctacggaagcaatgaacttttccatctcgccgaaacctgacttttggaaggaaatatac

SEQ ID NO: 175522 - DNA, 394 bp, Glycine max
agcttcgacggaatatatagaggtctttgattttgtgaggcgacagaggttgtggactcatggaacaagaattcagaatcatttagttatttcagcttccttgctgtgcaccttcgaaccccaacaacaaccacattctaacacgtctctcctacttatttcgtccgaggagaaaaataaaatgtaggatgaatagtcattatagttataaaaaatttgacaaataatttaagaaataaaaaaaaattagggattaaaaaattactaccttcatcatcagaagatgcattattgaataggacaatgaagatacacatatctacattgtttaaaacacacaccatatgcaacaaggacaacaattatgctttactgcattgaatcactgaattag

SEQ ID NO: 175523 - DNA, 418 bp, Glycine max
  unsure (1)..(418): unsure at all n locations
gtgcaaataaattctccacatccacaaatcacgtataaacccaccattctctgttgcccacctcaactgagctcacgtactcccacgtagcccttatcctcgttcctctcaacgccgggtccccatcaattctcccaagctctcacaacatccaagtaattcaacatccaagcatcatgaactaacacagccaagaaaacagggcagaggcagataactctgcctaaaacacaaaccaacatcatagctgttcacactcaaataccacgagaatattctcctcgctccaattcgttaaccgttggatcgactcgaaaattctactggaagtctcgtacacataaatctacattatgaccgttgggatctgctagaanacgctcaaaaccaaatctggactactcttgtcacaaccagc

SEQ ID NO: 175524 - DNA, 418 bp, Glycine max
ctctttacttccgtgggtgctatctggtaatctcaatttctatattaattacatttgtgtgatatttatttatttcatataactgtttctataaagtactgcaatgtcgagtagtgctctagaaaaattatgaaagcacttgacattgaccacgtggtctttttaggagtaatttgagatttgagaagccttttgagggaaaagaatgtcaatctccgaacttggcttcagctcttctatttttgaaatctcctttagaccctctggaagactttcttatatacacccctgcagaaaggggaattaaggaattttaatcatcgctgtcatcattttgtattactcgcttgaagatattacctcttaagacaacgtaccagatcaaattagttctctgactcttattatattgagatat

SEQ ID NO: 175525 - DNA, 170 bp, Glycine max
tattgagaaaacatgaaatcattcacaaaagccattctaaagcgaaaaactcaaatacctaactgcttaatatgcatgctgtatcaaatagatatcaacctgaagtaatgatactccaatctgtccatgcattaagcatattaataatacatcccaccagacaaacaaca

SEQ ID NO: 175526 - DNA, 417 bp, Glycine max
  unsure (1)..(417): unsure at all n locations
ctcatcacccgcaccaaaaatccaaaagggaaaaaatgaactctaatgatcatccaccttgtatcagacattatctcacaactattaaacaataatatttccatctataatataagcttaagcttatcaagattcannactaccagatatcctaacaaatatcataaaacactaacccttatgcaatatacatcttggaacaattgctcagaatctaaatgaaattgatatccctagaaatgaaaaatgtatttgtagacaaaaataataataatagtaactaataacaaaacacatcgctttttaaaagcaaaattatccataatgttcaggaaattgcacagtatttagtaattctttgatatattaaaaccaatagatttcagtgcataatgtcgatacgcaactgacatgata

SEQ ID NO: 175527 - DNA, 427 bp, Glycine max
  unsure (1)..(427): unsure at all n locations
agctngaaagagtttcaagcattagggaacttttttctnntaaagcgggtcccaattggcttcctaattttcagcttacctctttggatgcgagatcctggcagtaaggtgccaattttccatcatggattcagtcacaaaacaaacttcaagatgttggactgtctaatacggggattttatatcctattctcatacggatgtgataagcactttctcaggttttgtatttaaacctctcttacaatcatatccatggtgagcttgggactacattaaagaatccattatctatccatactattgatctaagctcaaatcacttatgtggtaaattatcctatctttcaagtgatgtgtttccggtagatcttcaagcaattcatttctgaaccatgaaatagaattctgaatctgcatacatatt

SEQ ID NO: 175528 - DNA, 395 bp, Glycine max
agcttacgatgtcgagcgcaattgtgtgctttttacagcagaaccgccctctgacactgagacaaaggcgaaccgctgacctgaagtgggcgcctccgggaaatgatcacaagcaacaacacctcaaagctatacccatcagactgctcagacacttccccaccatagccacactcaggagcaacatagtacacagtgcccctcatactaggagtactactcacaccaccactctttggaatctccccactagcagaatcaaagctattattcctcctccctctccataactcaccactcaacccatccatccaccaatccatgttcccacgggtgttcctactcctactcttggccttcctcttatccatgggatcatcactcaatcaccaatc

SEQ ID NO: 175529 - DNA, 459 bp, Glycine max
agcttatcagcttctacagtgtgtctaatgttgcttattgtcatacacattagaaatcggtcttcgaatatgccgatattacttatataaaattaactattcaaacttctcaaaaaattgtctcatcacaactgttattatgattattgctgcacactgcatttgaagctaatattattccttatcgtgttcaaagccttcaacatgctgagtttgacgtcaagacagaggctgcttgcgccatcttttatgtgacttctggaagatcttatgaacatatcaggtatatatggttcaccattacattatatgttccttgctcatgattctacctcattctgatactcacaggtgtggcggtatgttgtgatgaaactgaatcacgcgaatgtcggtctatgataaacattactaatgtcggtgcagatcaccaaggttgcgtcacggactatttgatct

SEQ ID NO: 175530 - DNA, 443 bp, Glycine max
agctgtaagagagattataaaattttatgtatctcctaaacaaaaatcaattgaggaagctttgtcaagttttcccattgaaaaacctctattcttacctttcacagttagtgagaaggctaaaccataaattaaggaacttagaaaaactaaatccttaattgaaggcgtaggtgataaccatactgaattacttaacaagattgatagcttacttaaggtcattccagatactccccaagcctcggaaaatactttcacaatggtaacaagaagtacctccatattaattaatgttattaatgaagatagtgacctaagctcatataacacaacttgagatatgatcagtgtcagaaaagaatatatatccaattaattcccaacactggaaaacaccctccatactatattatcaacgcccaactgcccctgacctacta

SEQ ID NO: 175531 - DNA, 343 bp, Glycine max
tattggcaatcagaatttccattccttggattacggggttgaaccaaactcaatcttttacaaaaaggttcatcaagtcaagttgaaatatggaagtaaccatccttgcaaattggggcaaaagatgaatcgagtcacatcactgcttcgtctactgccaaacatatttaggattgttgatgtccttgttacttccagcttcaccttgacaaagatgtcatggaccatgttgaacatctaaattgattcaaccccatatcctgcgtaaaaattcgcattacttcgactgtacatcattcgcatgccttcatgcttttcattggtagcatagctcgtagcattc

SEQ ID NO: 175532 - DNA, 462 bp, Glycine max
  unsure (1)..(462): unsure at all n locations
agcttatagagcnttgtagtgggttggaaatgaaataatgttttaaatagtagaattaatatattcttaattgaaagagattaaaatagtacatatttattgaaataacacactcgacaaatagtacatagaatttattaatgaaaaaataattattttattcaaatataaaatttcaaaaaaatgcatttgactattttatcaaaataagaaattttgaaaataaagaaattcaatttctttatccaaatacaaaattctgaaaataatgaaatttaatttgtttatccaaacatagaattttgaaaatgaaagaatttcacatgaagcatttgaaattcttagaattctaaaattagaattttaaatcgcctcatccaaacaaactctaaatgtaattgtgatccccctattnttcanaatatgtaatgttggccactctatttaaaatagaaacattta

SEQ ID NO: 175533 - DNA, 385 bp, Glycine max
aaaattacttgaggaagcttcgcccagtatccccattgaaaaacctttattcaaacctttcaaagttagtgagaaggctaaacgaaaaattagggaacttagaaaaactaaatccttaattgaaggcgtaggtgacaattatagtgaattactaaacacgattggtagtttacttaaggtcattccagatactccccaagcctcgaaaaatactttcaaaatggtaataagaagtacctccaaattaattaatgttattaatgaagatagtgaccaaaactcagataacacaactgagatagaatcagtgtcagaacagaatataaatccaattaatttcaaacacttggaaacactctccatattatattatcaacgtccgact

SEQ ID NO: 175534 - DNA, 404 bp, Glycine max
  unsure (1)..(404): unsure at all n locations
agctngccatggnggtggcagacctcgaggtttatctaattgagtcgaagtccaggctggaggagtctgagctgcggctgttcatggagatagaggttaatatgaagcttgaagaggagctgctgatgtacaataaggagactgtggaacagcatgaaaagggctttcacaaggtcgctaggtaggtcgggttctttgtcaaggcccttaacttgggtctttntgaccctttcaaggacatgaaggacggtgttctgcttgacgaggaatatattgctgctgaggatgaggctggtgaggagcaaagcgatgattccaatgtttaagttgccttttgtttatttccttctttcgtggattttggctacaatggctatgtaactatgacaatttttctttcttct

SEQ ID NO: 175535 - DNA, 366 bp, Glycine max
  unsure (1)..(366): unsure at all n locations
agctaggaatagcatttgggcacttatttttattctcctatgaagtccctacatatataaaacagtcccaccatcctaattttacaaaatcagattcatacgtcattggggcatttcaccgagcacttggtgggcgcatgtttagacataaattgcaagagaatgggggcaatgtggcatgccccattgcttcagaatacaccataggcctaaggccttctcacacaaatccttaactcaacaaatcaagcataaaaagcaacccaaaattgccccacaagcatgagcatgttctcacaatttagagcaccanaatgaacaaaatgcaccaacggaaagcaaaanactcaaggatngaatacttac

SEQ ID NO: 175536 - DNA, 411 bp, Glycine max
taccacctcatttcgtgcttgatcatggcttaactggtggatcgcgtgagcaatcattggaaggtggttatataaaggaaagaataaagaaacagtttgaggaagtggttagttttttttcacgtaacaattagttctctctgaattcttatgttttttcaatttttaaaaatatttatctccaaattcttatgtttgtgatattcaagtgaatctatctaaaaaaaaaacaaatgataaatatatttgtttcttatcttaaaaatcagttttaacttcagtaccaataacagtcaatctgttaacgaatgaatagatacagataaaacaacaaaaaataaaaagctatatgagagagagctatgaatcggaagtattgtataaaaaaacaacttgggatgtgaaaggatg

SEQ ID NO: 175537 - DNA, 452 bp, Glycine max
  unsure (1)..(452): unsure at all n locations
agcttccaaaaaattggaggcacatgcaacttttngtttatagngnagaattgccatgtccagttgaccttgctcataatatatactggccaaattacccgtgcatcatttgaagtgattagtataaattgggttcactatatcagcaatcgtaaagtagcataatttgaataaatggaaagtaaatntggattttgccaataggcaatagttatctgcatataggttggcatataggacacatttattcattgctcataggttggcatagaggacacatttattcacagataaagattccatcacctcttgtgctatcaattccactgaaagcgggaaaaagatatatattggtggtacagaatatagcaagaaatgctagaatttcttgcataaatcgcccaagtcaaagggtactatgttntaatctataatagaaaccccaaaaaaaa

SEQ ID NO: 175538 - DNA, 438 bp, Glycine max
  unsure (1)..(438): unsure at all n locations
agctntcatcaagaggtaatcttatcacattatcttcaagcaggtgctccttaaacatccattaattttttgctttaccttctcttccattgttgtatcttcatatttttctccatgtatctcctcacatgtcttgtgctaaatgttgttaacatgattctttagagtctccacctattaaacttgctacaaaaactacatttgattttctatgtttcaaatttcttgttcttgctcatgaaccatgaattgtgttgagtttaggttcctttgagttatgtcttgctattttttgaggctgaaacctaaaccataaaattcttacaaaaatattaaagtagaagaaaacctcaaaaatctagagtgactcgttcacctattgacttctgtcatacaagtcattttagtcatgacacttgtcacatatcatctcttatg

SEQ ID NO: 175539 - DNA, 448 bp, Glycine max
  unsure (1)..(448): unsure at all n locations
agcttgagcagancagagaagttctttgcattttatctttagcacgcattcttgccttctttacccagtcctcacgtttgtgtttttacggaaaaacactatatctaaacgcgccacaaggcatccctatcgcaccagatccaaatctataacgatgggtgatcaagaggagacacaagacccaatgaaagccgacatgtctgctttgaaagaacagatggctttcatgatggaggccatgttaggaatgaggcatctcatggagaaaaatgtggccaccgctgtcgttgtcagttcggttgccgaaacacacccaactctgttggcaactgcgcaccatccttcctcaaacatattgggatggggaagggacacactgtggcacgatggcatccctcacctgtgatacaaccgagccgcttacccttatggattgccgccaaactac

SEQ ID NO: 175540 - DNA, 315 bp, Glycine max
  unsure (1)..(315): unsure at all n locations
agcgtgaagcccctatanttgatggttcggattcctttacganggatattcaaaattacacaatttttttaatatcatcacacccctgaccatgaatggctcactatcgcctccttctacatggatggttgcgccttggtctggtaccaatggatggccgacaatggccaactctcttcctgagcaggttgcctncatgccctacaaacaatgttcgcgtcctcacaatatgaggatcccaccggcaccctgttcaaattgacacagtgaaccacagttcaagctattctttcagaatttgcggatgttgcaaat

SEQ ID NO: 175541 - DNA, 461 bp, Glycine max
  unsure (1)..(461): unsure at all n locations
agctagactaggcgagttgattttatccttattttcaccttagttattagtcaattcggttaagaatgagaaatcccaaagagaaaatgtccggttgattttcctctttattttactaaaaggtatatttttgttattatattattattttatctctttttgatttccaacgtggttacggcacgaccgaacggtcgaaatttattttaaccaaagtttacggatcatacaattcaaacgttcggcggaaatttattttatttttaagttaagcgagaaatgacttgagtaaaatggcttaagcacgtcaacagggggtataaaaagtacatgaaatgagaataaaaatacacgaaacacaatgtggaccaccacgggtacatataatgaatcgaanagcttggttcaaggtacttacccgttgaagatcgaagaacgatgaagaacgaatgaagaacgtt

SEQ ID NO: 175542 - DNA, 336 bp, Glycine max
agctaggtaagagtcttcttgttgattaatgtcaagtatgatgtgtctgcatcaaccagtagatatctgatggtgaagctcctagagagcttgccttgaccgaaagtggtcatcaagtccacgtagtctctggtctcgactttctcgcctgcaaagctgaggagtggaccgacgtgaggttggacagtgttgggtgagacctcgagtctttggaagattttctagtataagatatcagtaaaattgtcctggtcgatgaggatcttggacactatgaaattccctatgatgatggagacaaccatggggttcgccttggtgaccgactcgctgcct

SEQ ID NO: 175543 - DNA, 292 bp, Glycine max
  unsure (1)..(292): unsure at all n locations
tgttataatgcaactccaggtcctgcttttatagactctacatgtctgctcaacaaaaccattgtaagagttacatctcgaccttttattcaacacttgtcactggtaattgattacaccatttagaaatcatctggaatggttcaaatttagttaaaaccttttgaaatcaaattctatcactggtaattgattacaggagactggtgatcaattaccatagagtaaatactctagtaacttataanaattngagaaaacttttcttgtaaaacaaaactgtgcctatgtt

SEQ ID NO: 175544 - DNA, 394 bp, Glycine max
  unsure (1)..(394): unsure at all n locations
tcttaagcaccgcggctgcagcttacctcatgtcgtacagtcttttttttgggagccaatccaatccttgtggtcagactctcagccacttatgatagccgccgatgatcccattactgccttccctaagctctctgtcctttcttcacgccgcatcccatgccttgcgaactccttggagtacccctcgcgtagtggttccttaaaccccctgcgatgaaaggcgtgatgctttcttctaatggcactcctttcatggcgtagccaacctgtcttatggtgagaacgggattataattaatacaaccccttgttcccatcaagggaacatntggacatccttcgcatgaagatagaatcttgattctttcttccttctagcgagggagccaat

SEQ ID NO: 175545 - DNA, 310 bp, Glycine max
aaagatcaatgaggaagcgcacattacacatatgtacatcgttacataccctttccatgttacatagaagacaagctgagaagcagagaaccatcatgacccctcttttgtgaaacacttgccaccaccttgctttgtctttcacggtatccaaaccacgcttgttcttcttctgaaccacaacatcattctcgtacttgagggattccgataacatcttctcgggcttgacattcacccacaccctccttcacgcggctacgacgtggcttcttcgcgagaggaggtgtatcaaaagtggacgagttgc

SEQ ID NO: 175546 - DNA, 375 bp, Glycine max
aagagaaaaatacgaaggtgcacaagtcgatgtctcgctaaacctggaccgcgcgcttagcgagactcaatcgctaagccagacaccaactgcttaacgagtgagatgaatattgaagagaaactgccatgttatcacacgctaagcgcgttatcagctccgctagcgagaagaatagctctactgcgctaggcgcgaaaaaggcgctaagccaaatttcactaactcgcgctaagcgcgaaaatggcgctaagcgcaccttcgcggacaaaacgccttatacaagctcgaattgcacgaaaagataggagaagtccgacaaaactaactgagcctagtgcataacgaagaacaaagagaagccgagcacggaag

SEQ ID NO: 175547 - DNA, 469 bp, Glycine max
  unsure (1)..(469): unsure at all n locations
caccctaacacctgnaatccgatgctctatcgactaaccagtctattttattgtataagccgcgtctttgggcatgccctatttaactcacgtaatcggtgcatctgtcattgttgttaccttttaaccatgacgacattggcgaaccaggtggaaaacctgacctctctgatgatagttgcatgaaggagcttgttgacttcttctttgatggctatacgccgatcatatcctgtcttccttttcttctgtgatataagtttggcctaaaggcagatagccattatgtggcagattatgctgggatggatccccaacatgtcatatggctgtctgacnaataaatctgcatttctgcatagcacattggcgatgcgccgatgctcatgactggtaatgtgcctactataccagagcattacctcggtttaagtctgagtaacaactacataaattcttccatgaggtt

SEQ ID NO: 175548 - DNA, 474 bp, Glycine max
  unsure (1)..(474): unsure at all n locations
gcttcccgcatccgtactgggaaggatctgttttctgccttccttangcaatatcagtaccattccgatatggctcccgatcgcactcaactgcaanacatggtcaagaaggaaagtgagacctttaaagagtacgcatagcagtggagagacctggtagcacaagtggcccctcccatggtcgaaagggagatgattaccatgatggtagacaccttgccagtgttttactatgagaagttggtaggctacatgccttctagcttcgcggacttggtattcaccggggaaagaatcgaagtatggttgaagagagggaagtttgattacgtctcctccacaagtaccaatgctatgagaatcggagcaactgtggcaaaaaggaagaaaggagatacccatgccgccacttctgcacccgcatgggttatgcccccgcagacctctcatggtacccatcagtacgcgcaacat

SEQ ID NO: 175549 - DNA, 379 bp, Glycine max
  unsure (1)..(379): unsure at all n locations
atcttcagccttgtattatggctctattactatggtatttgaacaagttactattctcctattttgcatggtatgtttgaacaaatattaagtttgctgttggactatatggcgtatatagttaatctatttatgaatgttgcttcatgatacctgcttcatggattggttgttaacttcttaatgaatgttgcatggatgtttagtcatttcaaatattttacgcacctgtggctctnttggtgatgccacagggggagagaaatgggattaaatcacgaactcacatgagtaatcaatgtaattgtaagataagcgtctatcccacaccagggggagaattatgagagtgatcgactaccacaacttgtgtgtgttt

SEQ ID NO: 175550 - DNA, 272 bp, Glycine max
cccgcgagcccgtgaaagaaactaaccagaagcacacaccttcggaggacctcggattgacgaaaccccttggaggaacaagcaaacacacgttcagattgagacaacgaagaaacttacttagcgaccaccacaggttgagaccacatgggaagaccaagcaagcatatatccctcataatcaccacgtgtgatatacaaagatgacgagagcagccaaagaattcactcgagccgtaagagtactatattacgtggtcaaagaacacatc

SEQ ID NO: 175551 - DNA, 480 bp, Glycine max
  unsure (1)..(480): unsure at all n locations
cgctgaaactctnngatcatattgagagatgatanagctctatacagtaattgatattcaaatttgacaataggcttataanataatacaatgtttattttttcacatctaanaattcatatatttgccaatgtttggaacttaattaggccatacatataacgaacttttttcttttaaattcatttcgaaataataattcattcgtgaaagtactatagattgcgtaccgagacaagcaagtgaaagttgaaaagtgcccatcacaattaaagatttgataaatgtattgcggttttattttataaacagtcaatattttaaattatgatatgcactctcatttaatatcgcatgcatgcttgatatgtaaagtctcaaaattaataacagatgcttgaaagatttttctgttaataaacaaggtcactgcatcaatttaaatactggtgaacaagctatataagttgtgtaattttt

SEQ ID NO: 175552 - DNA, 438 bp, Glycine max
  unsure (1)..(438): unsure at all n locations
ctnataaggctatctatgggctaatgaagcacttagagctnggcttgangctcncaaatcatctataacatcatatggtttcacaaccagaagaagcaacccttctctctttatctacatctcgggtaacataactgtctattttatggtgtatgtagatgacctccttctcacaggaaataacactacattcatagacacattcattgaattcttatctaatcggttgtcactcataaacatgggggcaccatactactctatgggtattgaacttatacccatgaactcaagcatgttcctctcacaacacaaatacatcaaggatgtacttgagaaatatgagatgcacgatgtgaagtcgtcactcacaccacttgtcttgacgactacactcatgttgcatgatgggacaccaacccataatgctactcaata

SEQ ID NO: 175553 - DNA, 459 bp, Glycine max
tgcactggtaacaagggaagcagagacatctccaccaagtatctttgagtacttgtcagcaagctctttaccatctcgcacaagagcctccaacttatctatctcctctgtggagctatccacgttcctgttcaactgtttaatcttttgtactcgagaagataaagagtcgaaggtttctctgcttctttcgagggtgggtcggaactcttaaccgctgcgaatgatttcaagagcccctttcaacaactctcccgcagcagctccagcgaacggctctgccatcactactcacacacacccgtggaatgaaatgaaagcaaacgaataatatgtactactcacaagacacaccacacccgcgttttttccgttgacgatgactacgctattttcttttagctcgcataatcaaaacataacaaagttactttattctcttcgatatacactaatatt

SEQ ID NO: 175554 - DNA, 65 bp, Glycine max
ctgaccccaataaaccccgacgagcaccaaagggggggggctgtttttcacgccgcaacacgcag

SEQ ID NO: 175555 - DNA, 429 bp, Glycine max
  unsure (1)..(429): unsure at all n locations
agctntgcggatgtggtcttcgctcgaaatatgatcgaagcggatctgaaaagaggaaaatttaatcatcctgcttggacgaatgagataactggggcaaatgaagagggtgagaatgaaggaaaaacctatgttgtgactgccattcctatacggccaagttttccaccaatccaacaatgtcattactcatccaataacaaaccttctccttacccaccacccagttatccacaaaggccatccctaaatcaaccacaaaacccaccttccacacaaccaatgctaaacaccacctttagcacgaaccaaaacaccaaccaaggaaggaattntgcagcacaaagccagtagaattcaccccaattcggtgtcctatgctaacttgctccattatctacttgatactgcaatggtagccataaccct

SEQ ID NO: 175556 - DNA, 358 bp, Glycine max
gccgagacagaaacacgacgatttttggtcggaggtatagtcctcaagcctacccttattgtttgcctccggacttcactccccgtaccgcttcagacgatttgagccaagcccctaccttcaaggggcaactccctcctcatgctgactatcctctgcaagaagatgatgaaggagatgcccatttaggccctctacttcccctcaaggatccggccccccaagagttgccccaaccaaacatagtccgccacgcacccgttatagaatttgttccctttgcaaaagacaacggaaagattgatttacttgaagagaggctgagagcggtagaaagcctccgcaactacccgttctc

SEQ ID NO: 175557 - DNA, 318 bp, Glycine max
  unsure (1)..(318): unsure at all n locations
tactattgtggagacattcttgctgtcacactctccttgctcacaaagaaagaattataccttcacctatgtagactaattntggccaacactattattactaaggttgcctaaaggataaaaacaaatatgcacctaccaaaatgcatacggctggataactaactatgtgacctgatgaaacaaaatgcttatccaatgctgagtctcctttatatgtttaccctaagtatcttttcgatatctgcttctcttctatctacaaataccatcaacttcttgatgctaccagttccacttggacgtctatgcctgacc

SEQ ID NO: 175558 - DNA, 465 bp, Glycine max
  unsure (1)..(465): unsure at all n locations
agctatgcgaatntggtctttgccgactatttgttctaatcgggtctgaacagaggcaaatttgatcatcctactttgatgagtgagaaagctggggcaaatgaagaggatgagaatgatggagaaaccctagctatgattgccattactacacgatcaaatttcccatcagcccagcgatgtcattactcagtcaataacagtccctctcacccaatcatgcacaaagaccatccctaaatcaaccacaaagtctgtctactgcacttccgatgatgaagaccacctataacacaaaccataacaccaaccaaaaaggaattctgcagcataatgcctgtaagattcacgccaaattccggagtcatatgctaacttgctcccatatctactcgataatacaatggtagctataaccaccaccaaggttcctcaacctctatctatctgacgatatgactcgaa

SEQ ID NO: 175559 - DNA, 294 bp, Glycine max
ccccttattttttttaccttctttcatgtgttcttcattttctcatgtatctctccatgtctgtataatgtgttaacatgattctttaagttcaccattaacttgtataaagtaattgattctatggtaaattcttgtcttgtttcaccatgaatggtgagttagttcttgagttgcttgtttttgggtgaactaacctaaattttcaaacttaatgaaaaactaaattaaggattgtacttgagttgctaaatctgttgctaactgacaaatctatgtggcgattattttgtc

SEQ ID NO: 175560 - DNA, 443 bp, Glycine max
  unsure (1)..(443): unsure at all n locations
tcgtctatatagaagaaaaagtatttcggactacttgcatccatatctagacaacaaatatctgtatgtatgatttctaataggtttgagctcctctttgcaccctctttagacttgttagtttgcttacccttaatgcaatccacacaagtctcgaaatcaacaaaatccaaagtactaagtaccccttcatntaccaatctcttaactctctcgatagagatgtgtcctaatctatggttccacaacataaaggattcctcattcacaacacatcgtttaaccccgacggtaacatgcatagaattataagcagcatcattgtgcaattcaatatagtaaagaccatcgagtaatgcaccacaaccaataattctagaattattaattaaagtagaaccagaatccaaaatattaaaagagaaatccatggcgcaagtctc

SEQ ID NO: 175561 - DNA, 456 bp, Glycine max
  unsure (1)..(456): unsure at all n locations
ttaagtcacctgcggcatgcaagctntntggagtagaaacatgggaccaactcattttatttcaaaaaggaagtcatatctagtcaaggtctgagagaccatacaagtttcctaacgatttctaattatgtgggccattaagtctatcatatgctgacaatagccgagaagcccatgaatctcttcgggggcggagtaggtgtctgccatcgccttggccttggctaacaatcggggaagttcttgactcccgttcaaggtaagagcaaaccgatccatccacatggttgcctcttggtgtaaagagtcgatcacccttcctctagcctctttttccgcatacacttgagcatactcatccgcgattctatgctcgtgggccgtggctagacctaactcttcttggtacttggcgatgatagctaacatgttggtctctgtctctcataaacgctg

SEQ ID NO: 175562 - DNA, 317 bp, Glycine max
  unsure (1)..(317): unsure at all n locations
agtctcggattcgaaaacttnacccgtgaagaacgaagaacggatgaagaacgatgaagaacggacgaaaaccttcacgggatttcttacggaaacatctcggaagcgttacggaagcacctcggcttggattttcttcacggaaacaatttttttcacccaaaacagctgaaatacatagccagggggctgagggatccttataacagcccccttcagcctttttataagaaaaagggggaggcggttgccgcccagctcgcccaggcgaccttagctcgcccaggcgagctgggcggcnaccggccctctctttt

SEQ ID NO: 175563 - DNA, 438 bp, Glycine max
gtcccggatccttaagtcacctgcggcatgcaagcttccatcagagttagtgcaactcgatgtctaacatcctttctccatggaagagtggaggaagacattttgatgcaacaacctgaaggttttgaaatggaagggaagaataattatgtatgtacgttgaataggtttatatatgggttgaaacaatctccaaggaagtggtaccagagattcgatgagttcattattactcatgggtacaacagaagtgcctatgattcatgtatctattatagtaaggtgggggatggttttcgcatctaggtgctactctatgtggatgacatgctcatagcatctcaagacaagtctgaaagtcagaatttgaagtcactacttagtaatcaattttacatgaaagatatggaagcttcacaatagatcttgggcatggag

SEQ ID NO: 175564 - DNA, 489 bp, Glycine max
  unsure (1)..(489): unsure at all n locations
tcttatccaaggctcatcttggtggagaagctccttcttttatggcttattccctagnggatggcgcctgctctcacctcttctcctttgtcttccgctgcatctccatggtggaaaatcaccattaaaggacctcattgaagctcaaagatccagcctccatagaagccccacaagcaagcttccatcactaactcttcaagtaaattaccagtttggttgacagacttgaaatccaatttcattttcaactcactcatttaactaatagttcaaatggactgcaatttacctcaccttacaccacttaaaacacctcataaacacaactcaagtcactctcattttaaaatcacatggctgaattcacagaagatatgcaattacaaaggctaaaccaattcatccattatattcatgattaagctnntgattatttgacacaactaagctntgatttatttgcatctcaactaatgggtactggat

SEQ ID NO: 175565 - DNA, 448 bp, Glycine max
agcttaattactgtacaagttaatctttatatgatgataaatctcacttattaatatatctgttgtcacaaaataaacttagccgaatggtgggttggactaaattaacttgctacaattaacacgattcgtcgatttcctaaatagtgatcatgcgacttgatattgagaaggaatctgctcctaagtaaatggatttttcaagctacaccaaatacttacggaagtagtttgaaaatccatttacttaactattgtttctagaatttaaattccaaaaatcttctagaattaattatgggcgaccaccttatcctcgttgaataaacttttccaacattcaattaattcagctaacactgaaagttagccaaatcttacactggttgatgtcacttcactgaatcctcactagccgaatttcacactaaaaaacaatgcttctact

SEQ ID NO: 175566 - DNA, 473 bp, Glycine max
  unsure (1)..(473): unsure at all n locations
taacgcgaacaaggccggcgaagaagcctaaaagttctcttancatgaaatcctgcgctaagcgcgtaatcacctcgccaagcccaggcactaccgcgctcagtgcatgctcacctcgctaagcccaaaaggtcatgcttagtgtgaggtcgcatgaattttaagctaccttatgcctataaaaggagtaggaagcaaatgagaaaggcatcaagactcggagctctctattgaatacacccaaagcttgagcatctctcataggggaaaccctctctctttagccattcttccctcttcctttatccatccttcttcttcttccatctacatcagccnctacagtgtaaaacctctcatgactatgagaggccaaacccncattgttgggatcctagcagccaaagcccttgtaatgtaatctttccttactatctatcgaatgcaatgtcaagttttattaatttcttctt

SEQ ID NO: 175567 - DNA, 458 bp, Glycine max
  unsure (1)..(458): unsure at all n locations
agcttggtcataagctcttaaatatcttcttttcttcttatttcttcatcattttcaagcaaagtccttatgtttggttccaaaatttttttttcatcattggaagcttgagacttcaagatctaatgccttattccttgagaatttcttggaagcttcattcaatgtaaggggagtctttccacttctagaaccctaaccttattgtctttggaagctaggcttcattgcatgttattttgatgtttaaaatttcgtgtttgctgccatgactggaactgcataatatgttgtctttatataatttttaaggttaaaaatgatttattgggttaaaacttagggtcagccttaaacttcacttaaattagagttttctagcaaaagttatgaataaaacaagttntagaacattttattggatacaatctatcacgaaattaaaattgaagtgggaa

SEQ ID NO: 175568 - DNA, 480 bp, Glycine max
  unsure (1)..(480): unsure at all n locations
ntaaaatgtgaattaaaaacgttcagtaactgctggttatcaattaccaaatatgtgtaatcgattacacagtgcaaattttgaattcaaattttaatagctgttgtaaatcagttttggccactggtaatcgattacatcctttggtaatcgattaccagagagtaaatctcttgaaaaagactttttttgacttaaatttcttggccaaaccttttgctacttcaattggaattcccttcctatttaatgtaatcttcctaagactctagagactatcttgatcatccatcttgaatatctttgatttctttgtcttgaataaaactttgagaaacatgtaatcctttggcatcatcaaaacatcagcttgatcctttgtctacaatctcccncttttttatgatgacaatcctaaaatcaagacaagctatatacaagatgatagcatgttcacacagtcctttactcccctatctt

SEQ ID NO: 175569 - DNA, 436 bp, Glycine max
  unsure (1)..(436): unsure at all n locations
agctnggccggagaatgttcattttgcagacaaaaacccatacagagcactaatctgtgtgaaccatacaaattactgatccgtatgaccgatacggatcagtaatccgcatgggtttcttttaaagttaattggatttttttaatttttttaaaattattaaaatatgtttaaaatattggctggtaacaatttttttaaaaaaataattatcgctactgccatatggatcagttcatacagattgtgaatccgtatgaaccatacggatcactaatccgtatgatttttttttaaattttaaaaaatgcttaaattgacttttaaaattgtatttgcttttgtgccatttggatcaatggttcatacggattgtctatccgtatgaaccatatgaatcactgatccgtatgattttcttcttaaacatctttat

SEQ ID NO: 175570 - DNA, 477 bp, Glycine max
  unsure (1)..(477): unsure at all n locations
ttctatagttgatgcacatacgtcatgctgtgactgttctagttggaattaanncattttgatcattcttcactactgtcattcctccttttcttggaacaacttgaacaggactaacccatgagctatctgaaattggataaatgatgcccgcctctagtaatttgagccaccttttacttacctcttccttcattataggattcaaccttctctgatgctgtcgcaccggtttaaaattggtttctagattgattttatgcatacaatatgatgggctgattcccttcagatctaaaatgtgccaaccaatagccgttttacgacgtttaagaatatgcactaattgatcctcttcttccttctctaaagagttactaattatgaccggtttaatctcgtcatcttccaagaagtatataattagatgtgctggaagggtttttaattctgctttgggcttttctggtggtctca

SEQ ID NO: 175571 - DNA, 416 bp, Glycine max
  unsure (1)..(416): unsure at all n locations
agcnttgagaggtacggatttatattagtctgtctcgaagtctcggctgaaagacgctgacatctccggggatggtgcagatgatgtccttagtcactgcatgctatcatgcttagagtcttactgttagccaatgagaccttttcgcagtctcagctggaagacgctaacttctttcgggaatgcgcacatgatgacgtttgtcattgcatgctatcgagctttcagtcttacggaaagcaaatgagactttcttgctgtctcagtcggaagaggctaacttcttcggcgaatgtggagatgaagacgttagtcactgcttgccgttggctttgagtcttacagatagcaattgatacttcttaacagtcttcgccggaagatctgacatctttgggaaggtgatattatgacat

SEQ ID NO: 175572 - DNA, 445 bp, Glycine max
  unsure (1)..(445): unsure at all n locations
tctcggctcatactgagaatagctgtagttcaacacccgtgcaacctaaagcacccacccagagggaagctccccaagttccaactccgaacacgactcgaccggccggtaattccaacacgacaaggaatttccctccgaggccatttccagaattcaccccactcccaatgacgtacgaagatcttctgccatccctcatcgccaatcatttggccgtggtaactcccggaagggtcctcgaaccccctttcccgaagtggtatgaccctaacgcaacttgcacgtaccatgggggtgtcccggggcattccgtcgaaaaatgcttggcccttatatacaaggtcccacatttaatggatgctggatggctgactctccagaagatccgcccatgtgagaccaaccgctcccaacatggangggagcacttatgcatttaatc

SEQ ID NO: 175573 - DNA, 448 bp, Glycine max
  unsure (1)..(448): unsure at all n locations
agcnttgagctaattgagacgacaataattttttgctcgaatgtctgattgagtcccgtaatctattgagacgctcgaaattgaattctgaagctttgagctaattcaaacgacaataatgttttgcatggatgtctgattgagtcccgtaatacatcgagacgctcgaaattgaatcctgaagctctgagctaattcaaacgacaataactttttgctcggatgtctgattgagtcccgtaatctattgagacgctcgaaattgaatgttgaacctcagagctaattcaaacgacaataactttttactcggatgtccgattgagacccgtaatatatccagacgatcgaaaatgaattttgaagctctgagctatatcagacgaacataacgatttgctcagatgtttgattgagttccctaattcatcgagaccctcgaaattga

SEQ ID NO: 175574 - DNA, 381 bp, Glycine max
ttcgagcgcctcgatattttacgggactcaatcagacatccgagtaaaaagttattgtcgtttgaatttgctcagagcttcaacattcaatttcgagcgtctcgatatattacgggactcaatcagacatccgagtaaaaagttatcgtcgtttgaatttggtcagagcttcaacattcaatttagagcgtctcgatatattacaggactcaatcagacatccgagtaaaaagttattgtcgtttgaatttgcttagagcttcaacattcatatttgagcgtctcgatgtattacgggactcaatcagacatccgagcaaaatgttattgtcgtttgaattagctcagagcttcagaattcaatttcgagcgcctcgatat

SEQ ID NO: 175575 - DNA, 468 bp, Glycine max
agcttgaagaccaagtggtagtgaagccttttctttgggcacaaattggagtcttctctattaaaaaatagagctatttgtagtcaacatattcacagctaatatgctgtattgctggtcagtgccccatattctatcgtagatttaaataaaaatttataacaggctgtagaattttattttatcttcaccaaaataactataatcaactcgaactaaaaaatactaaaagataatggagtgtagtacattaagataatcgtattaaatgttgatattgcatattgggtcatggtgatctatggtctatcacaactctgggtgcccttggatacatgtcatgataagaatttaaaaatcgcatcgaatggtagaggaatttattcacaagagaatcaggacaagaaatgtacctttaaagcatgtgagaaacctgattgataaactgaattatgggcaatctcacat

SEQ ID NO: 175576 - DNA, 469 bp, Glycine max
  unsure (1)..(469): unsure at all n locations
aagctnttatggaggctgaatctttgagctttattttgtccttcaatgttgattttcaactatggagttgcaatggaagataaaggagaagaggggagaggagacaccatccactatggaataagccttggaagaagaagcttcaccaccaagagagtgtcttggataagaagcttagagaggaagcttcaatggaggaaaaaaatgagaaagagagagaaagtggcatggaaaattgaaggaagaaagtgcatgagagaagttgaactttgaagtatgtctcacaagactctcattcatcaaagttgtgacatatgttacacatgtttctgtttatagcctacgtcactaactaatgagaatttcatttcatttcatgtgaatctaagaggaatattccaaggatatgccacaggcatcttagtgtgaatggtatgatacaacggttngatgatgccaaagtagaatc

SEQ ID NO: 175577 - DNA, 339 bp, Glycine max
  unsure (1)..(339): unsure at all n locations
gcttcaatctattatttcagctctgattttgttatcagatgcacgagttcgcggttcttgtgggatgtggatntacttttctntgataaagcgagaggaaatgagagagagattggagagaaaactgatattattcactctgaaaaggcagtcacagaattagttataaagaggtatatatagacctctaatcctttgaactaagcaaaacagaattaaccataaggagggaaattctgttaatagaagctaacatcctaacaccagtggggtgctgttagctaaagctaacaggccttacaaactggtgtcacatgtattcaaacatatactctaata

SEQ ID NO: 175578 - DNA, 435 bp, Glycine max
  unsure (1)..(435): unsure at all n locations
agcttcctcggggccatttctgcgaaggctaacattntgaaagttagttttagtgggacattactcttaaagcaaaaatggcatgtaacctcctcccatcaatacaaacatcaatgtaaatttagagcaagcttatgcgcatatttccctacgaacgttcacttgcacaagacatcctattaactaagaaaaatgcacccatatacaatcaaggtagcttccttacctagattatttacatgtacttccaaagtgtatttgttatttacatcatacacgccatcttgtcaaaatttacacacatgcatactcaaagcatttcggggtaccaaaaattgcacatgcgctcatcttggtatttctaatatctatacatatacaaacttcatgatgaatcttgactatctacacaataaagtgctacatttcatgcct

SEQ ID NO: 175579 - DNA, 447 bp, Glycine max
  unsure (1)..(447): unsure at all n locations
atgtgaaaggatgtgactcttcatattagaagtgtgaatttaacgttcaaacacattggtaatcgattaccaaaacattgttatcgattacagctttttgaaatcaattggaacattgtaaattcatttgaaaactttttgaaaaacattctgctactggtaatcgattaccaaagagtaaaaactctttggttaacatgttttgagaaaaaatccatgtgctactcagtatttgaaaaaaattcatgtgcttgaaccttgaatcttgattcttgattcttgaaatcaaatttcctcttgaaccttgaagtgttcttgattcaatcttgaacatcttgaactcattctttgattatcatgaattgacctttgagctttttgtcatcacctttgttatcatcanaacatatttgaatcaatcttgattcatcttgaagcttgcttcta

SEQ ID NO: 175580 - DNA, 331 bp, Glycine max
  unsure (1)..(331): unsure at all n locations
tctgtcccgacatagaatctctagtgcagctgaaagatgctatancnggttcttgatcctatcagaattcagtcatttgtttcttggtttgctctttctccttggaattatctctcattaaaaacatatcaatgtaaccatgaagggttaactgggtttcctttttctggtatcggagaaaagataatgattttcattggtcccattattccagcattggatttgcacacttcttattgggcattatctattcattcattatattagctaattgtagtgtttcttaaataacaatatttgatgcanaaataaaataagatgattagaacta

SEQ ID NO: 175581 - DNA, 499 bp, Glycine max
  unsure (1)..(499): unsure at all n locations
actcaagcttggatcgaagaaactcgcntacttatcagagtggagattcttccnntttgctcaagattctttcgtttagaggactgctagcattacaacacttgtttgttttgtctcagaatgttctcttgtaattcgactctttctctcttctacacgaacatcttcaacttttatataaacttcataacttcaatccattgaaagatcacatctagttgttgtctaatagctttggtgcttgatatgaggtctctactgtgtatagagagagagagagagtggggaccacaaatgctttctgcagcacatcttcagagaagtacaattttgtagtgtcgcctaatgctcatagtcgactctcattgtattaatcgaagtaaattttatcaacataagacacgaggaattaagaatgtccagaccagacgatttanatcttcccttttgtgcgctatagcacanagttcttactatgcctatggaatgtactctctca

SEQ ID NO: 175582 - DNA, 367 bp, Glycine max
gcagcagcacagcaacaaagacgacctttttagaatcctccagagtccatgaaactcacctccaagaccattacgaatgtccgttccacatccatctgatgtaacgcatagccaagatgagccactaatgccacaattactcggaaagaatctgtcttagatacaggagaaaaaatccttgcgtaaacaattccttctctttgactgaaccctttggcaacaactcctgccatatgtctcacaatgtagtcatgtgagacttcctaggttttaaaaacacaccaacatctaatggcctgtacaccactaggcaacagtacaagatcccacactcggtaaaacgccctagaatccatctcatctttca

SEQ ID NO: 175583 - DNA, 423 bp, Glycine max
tgctttatctcaaaaagtatcgattgttgcctctatccctgctgatgtagatttcatgtgcttcgttttcactccccatcttcttctacgttgtctttatttacctctatttgcattagtatgcgtttttttttctggctttttggtttttatttgcatgttcattggttcttctaaagttgtcatttttatctcaaaaagctgtgattgttatctccaaacttcatgaacacgggctcggtttcttgctttatctcaaaaagcttcaatttttatctccaaactccatgaatacaggtttgttgtcttactttatctcaaaaaagttcgatgtttgcctctatccctgttgatgtaggtttcatgtgcttccgtttcactcccaatcttcttctacgttttctttttatacctctatttgca

SEQ ID NO: 175584 - DNA, 379 bp, Glycine max
gctaacatatatatatgtatctatatttatgccctcgcaacactcacactatagctagacaagagaaataattgtcgacaaagactgtacggggcgtcccactaaactctagtttgtcgtcccggcgtccaacgatgagaaaagtatgcttttttgctcgatttaatatgcttgattctaactacccacattcaatgttcattgtctgacaaaataatatatgaatattgtattccgtctgcgtttgcataaactgtaatttgtttaataatatcttattatatgaaacatattgtgtattacatgtcgacatcccttctgtttattacaatgataataaataaaaattaagcttgtttggatgtactattctttacga

SEQ ID NO: 175585 - DNA, 371 bp, Glycine max
  unsure (1)..(371): unsure at all n locations
atatagaagccttcctctcaatacctatgcaagaatgcaattataacatctaactgctccaagtgaagattctctgtagctacaatactcagaataattctgatggtagtcatctttacaactggagagaagatctctatgacatcaatttcttgaatctgcttaaaccctctcaccacaagtcttgccttgtatcttcttctaccgacagattcttcctttagcctatagacccacctattatgtaacactntctttccttctggcaacttagttaaagaccacgtcttattcttctgaagggatgtcatctcatctttcatcactagctcccactcaatagtgtcattctcctgcatagcctcactaaa

SEQ ID NO: 175586 - DNA, 416 bp, Glycine max
  unsure (1)..(416): unsure at all n locations
agctcanagagttaagtggtcgtgtcattttattcaattatggcactactttaattgataacactgttgtatgagataatgactgaccttttcaagagtatctactttaatcaattaccagatgtcttaattaattacttctctattatttaagttgctctcaggtgaacatgaagactttaatcgattaattaggtcatctaatcgattcaagagttaagtctcgtatcagtataatcgattatggaagtaatttaattgactactgatgtcccaataatttttcctatttcttaacccttttcgcaccatattaagtactgattagtcttaactgtcaaattaattatgccatttcattatttgagcccattcaactaatctgatgtttttaatctaatctcacgaaataatga

SEQ ID NO: 175587 - DNA, 443 bp, Glycine max
  unsure (1)..(443): unsure at all n locations
tgagaagnngagaaannngtatgtgtagagggtgcgattgtacctgatatccataagagtggagcccaactgcgggtcctttgttgtatgggctgttataaccatttcggataatttccgacttatatatgatactcgggatcttgtagataatgtcagatataaactatagcttagagataaaagctactaaataattgtaccttgaacataatgtgtggctttgtagataattagctacctgccaatagataagatattcaaatatattcaaatattaataggttagagataacctgtcagttaggaagcccggctgctaaaggtcgggtgttcgtgctcctgttgcaaggctgacgtgaaaggttgacacatgtcttagattgtcatgtatgatgccatatgtattgtgtgggtcctagatagcacaatttgatatatat

SEQ ID NO: 175588 - DNA, 435 bp, Glycine max
  unsure (1)..(435): unsure at all n locations
agctttntggagtagaaacatgggaccaacttatnttatttcaaaaaggaagtcgtatctagtcaaggtctgagagaccatacaagtttcctaacgatttctaattatgtgggccattaagtctatcatatgctgacaatagccgagaagcccatgaatctcttcgggggcggagtaagtgtctgacatcgccttggccttggctaacaatcggggaagttcttgactcccgttcaaggtaagagcaaaccgatccatccacatggttgcctcttggtgtaaagagtcaatcacccttcctctagcctctttttccgcatatacttgggcatactcatccgcgattctatactcgtgggccgtggctagacccagctcttcttggtacttggcgatgatagctaacaatgtggtctctgtctcgcatagacgctg

SEQ ID NO: 175589 - DNA, 425 bp, Glycine max
  unsure (1)..(425): unsure at all n locations
tgtccttgactcattntctccttgaagtgacgtgtcaatcacctttcctccctctccattctgctgccattgatcttcaagaagcaaaggatttcattgatgaagaagatccaaggcctacaagctctacatggagctacatcatgtggtatcaagagcatcttcatctaagtgatgttcttttgcttcctctatcttttgtttggtcaattcactttaattccttgttcttcatcatattctccatgtatctcctccattatcttgtggtttggttctgtttatagtagattcacaaatataaatcgattaaatcttagatctatacttgttcttgcatttctatggttcaaatattatagatccactcttgaatcatgttcttgtcgtgatattaggttctatcttcttttatgcataatctt

SEQ ID NO: 175590 - DNA, 451 bp, Glycine max
  unsure (1)..(451): unsure at all n locations
agcttgttcgcacatcgttcgcgtgtatgatatccactccacaaggtntgaagtagaggagagcttcaaccctataacgcaacgtggcggacaaaagtgggcagcaaacttgaatggtcgtcattggcaatgcggagggtattctgcgcttcactatccatgttcacacattattgcagcttgtggttacgtgagcatgaactactaccaatatatagatgttgtttacacaaacgaacacatcttaaaagcttactccgcacaatggtggcctcttgggaatgaagcggctattcctccttctaatgacgcatggacacttatccctgacccaactacaattcgtgcgaaaggtcggccaaaatcaacaaggataaggaatgagatggattgtgtcgaaccatctgagcaccgacaaaaatgtattagatgtggagccgaagggcataac

SEQ ID NO: 175591 - DNA, 460 bp, Glycine max
  unsure (1)..(460): unsure at all n locations
cggacctatgaaactcagcttgtactctnggcaatttctatagaactagtcacttaataagttatgacttttgaaagaatcttcagaaacaagtcacttgaagaattgtgacttttggaaatgtatttttcaaaatcagtcactggtaatcgattaccattaaggtgtaatcgattacacatcaacagatgtgacttcattttgaattttgaaaatcttaacattttaaaacactggtaatcgattacatgattatggtaactgattacagctttgtaaatcagtttgaaaaaaatgctggctactggtaatcgattactaccttctggtaatcgattaccagagagtaaaacactttggtaaaaaatttggtgaaaacttcatgtcctactcaatgtttttgaaaaagttttagtacttatcttgattgagtcttctcttgattcttgaatcttgagtc

SEQ ID NO: 175592 - DNA, 463 bp, Glycine max
  unsure (1)..(463): unsure at all n locations
agctntggcaatcacctccctaatatcccaggacttcccattaagaattaattgattcatactgaaccatatcagccacataatattgaaaatatcagcagcaagttcatcatttgctcccataagaagaggtcacaaccattccttgagtgagacaagttggttactctgggttcatatcaagtacttagaggtaaaccacatctgctgcaaactggatccacatcaacattgcagtagcgtagtctagagcatataggcagggagtctaagcatgcgtcctagaccagtgttttgcactttggtgttgccttaacaacccataattttgtcaagaagggatcctttgcatctattgtagactcaacttctgttccatacaatgttttagccaagtggtgacctgacagttttacatactccatcgtcagtgtatcgccacaacaaattatccatgagtcta

SEQ ID NO: 175593 - DNA, 450 bp, Glycine max
  unsure (1)..(450): unsure at all n locations
ctcagctttagccaatggcttaccttgaattattccttngatagcccctctgagcctattatcccctttctttgttttgaagctcattacaagccttaagtgaaaaaccatgatatcaccttacccttaaagaattttggagctttggaattgtattgggaataagctgggaataagtgtgggggggtatgtttcattggaagatatgatttttggccatgcttaatgttntattttggccttgcttgatgtacatatattgcctagttctttctttaatcttcaattttgtactgttcaatagaaaaaataaaaataataaaaaaaataacataaaaagtataaaataattcagttgctgcaaattctgcaatttcgtactatttaaaaaaaagaagtacaagaaaagaagtgaagtngaataaataatgtcttgatatgagaacttga

SEQ ID NO: 175594 - DNA, 356 bp, Glycine max
tcctaaaccaaaatcaattgagggagcttcgcccagtattcccattgaaaaacctttattcaaacctttcaaagttagtgagaaggctaaacgaaaaattagggaacttataaaaactaaatccttaattgaaggcgtaggggataaccatagtgaattacttaacaagaatgatagtttacttaaggtcattccagatactccccaagcctcggaaaatacttccaaaatggtaacaagaagtacctccaaattaattaatgttattaatgaagatagtgaccaaagctcagataacacaactgagataggatcagtgtcagaaaagaatataaatccaatttattccaaacact

SEQ ID NO: 175595 - DNA, 456 bp, Glycine max
  unsure (1)..(456): unsure at all n locations
gaaagaccaatatcagctgtggtaatccaatgtgatagtaccgcggctattggaaaaaaattgagaaccgttattacaatgggtagaaatgacagatatgtcgtaagcacaacacttgtagagaattactctcaacaggagctgttagagtggatcacgtacgcactgatgataatttagcagatcctttgacgaaaggattagctagagagaaagtccattacacttctaatagaatgggactattgcccttaatgcgatgatcattcatgatggtaacccgacctatatgactggagatcccaagaactatgttcaatgggtaataacaagttatgaagtgatatgagatgaacatgctgttataagtgaaaagagcatgattcctgaagtaacaagaggatgagttatgatanacaatcatcattcttaatgagatttatactctacgttgag

SEQ ID NO: 175596 - DNA, 472 bp, Glycine max
  unsure (1)..(472): unsure at all n locations
agcttcaggctgctcaattgctccaggttgctgcatggaagggcaaaggtctgtatggtggtcaacagaggagcacaaaccacaaacccttgcaacaggtacagatttctgattcaaggccagctgggttaccaagttaaccaatgcatccagtttgccttcaagcttcttagtttcagatgatgcagataggtttgtagctacctcatgcactcctctaatgactatggcatcatttctggcgctaaactgctgggagttggaagccatcttctcaattaaatttctggcttcagcaggagttatgtctccaagggctccaccactggcagcatctatcatacttctctccatattactgagtccttcataaaaatattggagaagaagctgttctgaaatctgatggtgggggcaactggcacatagtttcttaaatctctcccagtactcatacaggctctctncactg

SEQ ID NO: 175597 - DNA, 485 bp, Glycine max
  unsure (1)..(485): unsure at all n locations
ttgtgtaatcgattacatgggtntggtaatcgattaccagtgacaagttntgaataanaatcaagagatataactcttccaatggttttcacgtttttctaaaggttataactcttctaatggttntcttgaccaaacatgaagagtctataaaagcaagaccttgacttgcattttaagaacaattattgcaacttttccaattaccttttgaacatctctttgaacttctacttcttcttcttcctttaccaaaagctttcaaagttttctggtttctaaactttgttctttcacagaaaaaaaagtgttctattcatctttttcattcccttctccattttccaaaaagaattcgccaaggactaaccgcctgaattctttntgtgtctctcttctcccttttccaaaagaacgaagaattaaccgcctgaattctttttgtgtctccttctctcttgcaaagaattcaaatgaacagtctg

SEQ ID NO: 175598 - DNA, 422 bp, Glycine max
agcttgtggatggtgaccaatcccagaggacttttgtgtatattaaggatgctattgaagttgtcttattgatgattgtaggttcccatatccaatctttttatacaactttatatattttaagttctgattttctgattgcagaatttcatctttaaactattactcttgttggatggttcaactaaatgtgaacgatagattttaacaggaaaatcccgccagggccaatggacatatttttaatgtgggaaacccaaacaatgaggttatagttaggcagcttgctgaaatgatgactcacgttagaggattaagtttgattgtttgatcctattagaatttcaacatggtatttgggaccattcaacatttattttcgttcaattctgcaggtttattcaaaggtaagtggagaagca

SEQ ID NO: 175599 - DNA, 466 bp, Glycine max
  unsure (1)..(466): unsure at all n locations
gtctcacgattgtcacgtgctcatgcaacaattgttagtcgnggctatacaagacatcttgctaaacaaagtcaggttaacgataactcgcctgtgctttttcttccatgctatatgtagcaaagtcattgatcctgtcaagtttgatgagttggaaaatgaggccgcaattatactgtgccagttggagatgtattttccccctgctttctttgacatcatgattcacttgattgtgcatctggtcagagaaatcaaatgttgtggtcctgtttatctacggtggatgtacccggttgagcgatacatgaagatcttaanagagtatacaaagaatgtatatcgtctataagcatttattgttgagaggtacattgcagaagaagccatctgaatttgttcagaatacttagagaacgctaaacttgttggccttcttgagtctcggcatgatgacagagtgggt

SEQ ID NO: 175600 - DNA, 465 bp, Glycine max
  unsure (1)..(465): unsure at all n locations
agcttaacaagctntttgtagtgattgagctttggttcttttatctaanaagactttntaaaaagcttgagcttggcctttatagtaaacaagccaagccgagccgagccttacataggctgagccgaaggacctcgacaagctgctcggctcatttccacccctaattatagcattttgtttttggtcttagttgtcaagtgatttgattaaaatggtttattagcgaaatgtgtatactagtctttcgaggaaatttgatctccacatacaaagcaagtcgtgggatatttcacatattaatgctgatctcatttatctcttttctnttccaataaatgttgcaaaatgaactctcaaagcaattntaattttcataaaaggaattagagtggctccaataaaaaaaaatattaaaaggaaaaaatactttgaagatgaactcgttccatgcaatcgtaagaa

SEQ ID NO: 175601 - DNA, 452 bp, Glycine max
acgctaagccgagcctatctgggctaagcttatttctttgtggtagccattgggctaagcgagcctggctcgctaagctcccatacttagtgaattttcttaaattattggttcgctaagcaccactatgctgagcttagcgcatatcttttgcaacgttgattaggctaaagtgcatgctatttcgctaagccgatgtgttatatttctgagggcgcgctgagcaagttgtatcctgctaagtgcccatcgttaattttagcctttatttttgcttttaaatttgaataaattcggtctaaggaattttgagttctttttagttacagatggcctcgagaaaaagggccagagcatatgacatcccttcatcatccactccaactccttcattaagaacaataggaccggatgtccagagctcctaaaccttagatcctatgctacagagc

SEQ ID NO: 175602 - DNA, 423 bp, Glycine max
  unsure (1)..(423): unsure at all n locations
agctntactatgcaaggaataactaaggattatttcttcatctgacttagcatcaaactttcctaagttttcttttccattttttaataccaagcatttgcaaccaaaaacatgaaggtgtgaaatgttgggttttctaccattaaacagttcatatgaagttttctttaaaatgggtcttattaaagccctattcatgatatagcatgcagtattaacggcttcagcccaaaaatattttggaagaggagtgtcatttaataaggttctagcaatttctttcaaagatctatttttcctttcaacaactccattttgttgaggggttctacgtgcagaanagttatgttcaatgccatgcttatcacaaaataattctttattttcaaattcacccccatgatcactcctaatagatataat

SEQ ID NO: 175603 - DNA, 479 bp, Glycine max
  unsure (1)..(479): unsure at all n locations
tcgaacccttaatagaaactactactttaccctcacagcatcttgtggtcactcttaacctttagaagcattaatcctctaattactttttctgaggcatgcatatggaagacatgaaattactttacatccaattttgatgtcaatctttatgcaccattgtgatgttgctaaattctatcttctgatgaggcatctatgtctctaactgcatatagaagacatgttgcttcatcattcaaatgcatagttcatccttgatcttaattccaacacatcaatttgatgtgataatctcataatttcttctagtcttgattctagtttgtcttcagaacatcatcatgatgtttttcattctcagagtcctttaatacaccattcaaatgttgactctggtacaactttantttgatgtttctgcttattgtagcctttgatatatcttatcgtaaagganaatatcacaataatgggga

SEQ ID NO: 175604 - DNA, 454 bp, Glycine max
  unsure (1)..(454): unsure at all n locations
agcttgtagaaatatggagtacccatcacatgtggtactatgtggcggncgggcgatggtgcacaacangctttccacatccacaatgcgcgcataaacccaccatcccctgttgcccacctccaactgagctcacgtactcccacgtagcccatctcctcgtttctctcaacaccgggtccccatcaatcctctcaagcttccacaacatccaagcaaaacaacgttcaaacagcacaagctatcacagccaagcaaaacagagcaaaggcagaaaactctgctcaacacatcaaccaaaatcacagcttttctcacgtaaagaccacagtaacaattccttcgatccaattcgttaaccgttggatcgactccaaaattntactggaagtctatagtgtataagcctgcattntgaaccgtgggatatactagcaaacatccagaactcatt

SEQ ID NO: 175605 - DNA, 451 bp, Glycine max
gctcattgactccatattggtgcagagaaggatatagatctgtatggggatctgttgaagaacatagaccatagtctcttgcaacaggtgcaaatgtagattttttattcatggcaagctgagttactaggttgaccaaggcatcaagttttcccccaagatttttatttttagtagatgaagatgaattcatggccacctcatggactcctctaaggaaaatagcatcatttcttgcattgaattgttgggagttggaagccatcttctcagtcaaattcctagcctcagcatgagtcatatcaccaagagctccaccactggcagcatcaatcatactcctctccatgttgctaagtccctcatagaaatattgaagaaggagttgctcagaaatctggtggtgaagacagcttgcacacaatttcttgaatctttcccagtactcata

SEQ ID NO: 175606 - DNA, 393 bp, Glycine max
agctgatccctagaggggatggaccttttttgctttggagaggatctataacgatgcctataggttggacctcccaaaagagtatggagtcaacaccacttttaacatttatgattcaattcctttcgcaagtggagctgatattgaggaggaggaactaataaatatgaggtcaaatcctctacaagggggaggggatgatgcactcctcactaagaagggaccaatcactatagccatgaacaagaggctacaagaggatgatctatatctgttgaaaaagaccctaaggttctcatgaacctcaagatggaattctgaggccatgggccaaggatgggtccaatcatctatgtgcatactacactaagatgtcttatatatggtgcttga

SEQ ID NO: 175607 - DNA, 485 bp, Glycine max
  unsure (1)..(485): unsure at all n locations
ntntgaatgaagaatggagaaaccatttaattacttctaacaagattcacccatacggggaatcacattctatgtcatggaaaaatgtttgaggatgataagctaaacatcaacatcctcaaccgtcttacaagaacttgagaaccaaagatcatagctatcaaggaatccaaggacttagtatcaatgtcgatggaagctctcttcaaaaaattgcttgcatatgaacatgagttaattcaacaatctcatgtagaagaaacagaaaagaaaaggaattgcactcaaggttaattattcaaaggaagactgcaaagaaagctctagtgatgatgaagatgcagagaatntaagcttgatggtgaagaagtttggaaaatttctcaaaagatctaaagcaaataaaagatagaaagcaacaacaacaccttcacatgcttcatatgtctgaagcaaggtcacatcaaatctggatgtcttatcta

SEQ ID NO: 175608 - DNA, 387 bp, Glycine max
agctgatggacacgagagagcgatcgtttcttgacttacaaagcgtggattctgagcctgattcaatgagaaactgagccatctgcgctatttatatctctctcattcaagtatagaaacactgccaaagtcattgggtaatttgtacaatctgactacttctgaaggtggctgagtgcataaagctgactacgatgcctagtgacatgtgcaatcctgacaactcgcgtcatcttgagatattgtggactcctataacagagatgccgagagaaatgagttaagttaatcattgacagcgtctggaattactttgtgtgggcgagcacgacgagatagggatcaaagagttgggaggactttcaaattcttgtggtcaacatgaaa

SEQ ID NO: 175609 - DNA, 473 bp, Glycine max
  unsure (1)..(473): unsure at all n locations
actcaagcttagagaccgacgtgcgtncacacgacagaaccttgcgtcatcatcttctacctctcgccccaacaatcttgcacaacactacaaggaaaatgacttatacctacagtcaaaatctgtcactagaagtccaaaatccgtaggtagatgtataaaggactttgtcctacagacgttttttgcgtcaactttgagggggtatacagtgacaactaatagtctgtcactataggctttacctatggatatatttttacctacagtcaaatttaactatcactataggtaacacctactatntcaaatgtgtaggtaaaagatattaatttatacctataatctctaactgtaggtaaaagtcaatttacttgtacctacggtcttctgtaggtaaatgtcatataataataataaaactagttcctaattacatctctctattataatttctaattaaatatacatga

SEQ ID NO: 175610 - DNA, 439 bp, Glycine max
agcttataagaacaaaatagcctcaattatttcctaatatgcatgtgaattaggacgcatcaacaagaatcaagccaaggctattgtgcaagcaatcaatggggcaaaacacaccaaatgattatgatgatggatggctcaaattctcacaaaggtaaactcatcactttcaaattgagctttcaaaactatcatgacatgtagaggagaatcaaggatttcaagtcacaaaatgtcaaaaatttttattttcaaaacaattacccatttcttgaacatatcctataattcaaagaaaaatatgcaaagtcgtacatgcacacaaaattgacccaaaatattaaactaacaatccgacaacattaacaaattaacaaaaccaacaaaactagcaaaaccaaagaaccaccccccccccatacttaaacaacacattgtc

SEQ ID NO: 175611 - DNA, 435 bp, Glycine max
  unsure (1)..(435): unsure at all n locations
tattaatactcaagctgtctcgggttatcgtagagaacagagcccaatctgactcttcgcggctntctttgaggtaactgagattctacgcttgttccttgttaagtttaactcgtctttgcatcatttctgactttggaaccaccattgtatgttttacgtgtcctttgaaaaaaccctatagaaagagactttgttaacgatatctttttttgaaatgggtgttatttttgtgaccttcactgaaccccgatcacattggcatgatcagaattttaaaatgatgttccttttgtagaatctgaaacgcccttagcctttacatgtagtgacaagagtatttgactcaaagtattattgttaaccttatttctgaaatccatagtaatatcccttgatgttggcgaatagagacttgcgttggatcgacaagcg

SEQ ID NO: 175612 - DNA, 393 bp, Glycine max
  unsure (1)..(393): unsure at all n locations
acctgcngctgcaagctaatcgcacctggtgagtgagttgtatattatcacccgcaaaataaataaatcaataaattaataatacgttcatcaccatcaccatcatgctcaatacaaaacgccgggagaaataaaaagaataataattataaccaccgaaggacaataaatcaacctaaatagatctcttcaaacgatccgctaccaatcttaccgataaatnttacatatttttatatatatgaaaataaagaagatatttatattctttttgacataaatatcatgtctctcaattcagtcgatcaaatatattataccattatcatcagtacagtcataataaccactatcactcatcaacacgataaggataaccgtaataataattat

SEQ ID NO: 175613 - DNA, 436 bp, Glycine max
  unsure (1)..(436): unsure at all n locations
ntatatagactttaacgctatatacattgagagatccttgatagtcgtcgtctaatagcttaggcactatacacgaggtcgctattgtgttgagagcaaaaatggaaaccacaaacgcttgctgtagcatatcttcagagaagtacaatgtgccagtgctgcctagtgcttagagctgactctcatgcgattaatcgaaagaaacattattagcataacacataagatattaagaatgtcgcgacaagataatttaaatctttccttttgtgtgctatggcgtgagatacttattaaacctatggacgtcactttcttgtgattggtttagaacttgagactaagtactgtccattgccttgtatatgagccaagagctaacacttatcttctatgatggacgcacagagtatgtacatgattgaactatgctatc

SEQ ID NO: 175614 - DNA, 364 bp, Glycine max
  unsure (1)..(364): unsure at all n locations
nttaagggacaannaagctctgaatgtgattggatattttaatgtgtatcaatatggaactgtattntataaatataatatttaaaaaatataatactgtctactttaaatgaatggattgaatatatattcataaaaaatgattaatgggttggattctttttttatcgaatgaatcgtacatgaattagattttttaatacattattaatggatcatatataaatgaatcaacaatttcttttcaacttaatcataattcagcacgaaatttcttcgatccattcatttgacacaaaggcacctgcattcaccacacatcanatattcaaattcaaactaggtatccattgtaccatttcac

SEQ ID NO: 175615 - DNA, 442 bp, Glycine max
  unsure (1)..(442): unsure at all n locations
agcttgactaggcgagttgattntagccttagtttcaccttagttattagtcaattcggttaagaatgagaaatcccaaagagaaaatgtccggttgattttcctctttattttactaaaaggtatatttttgttattatattattattttatctctttttgatttccaacgtggttacggcacgaccgaacggtcgaaatttattttaaccaaagtttacggatcatacaattcaaacgttcggcggaaatttattttatttttaagttaagcgagaaatgacttgagtaaaatggcttaagcacgtcaacagggggtataaaaagtacatgaaatgagaataaaaatacacganacacaatgtggaccaccacgggtacatataatgaatcgaaaagcttgggtcaaggtacttacccgttgaagatcgaagaacgatga

SEQ ID NO: 175616 - DNA, 478 bp, Glycine max
  unsure (1)..(478): unsure at all n locations
ctaagcttttagtctcgctgagaagagaattctggctacttttgcactcctctatgacaatagcatcacttctggcactaaattgctgggagtttgaagccatcttctcaattaaatttttggcttcagcaggggtcatttttccaagggctccaccactggaagcatctatcatacttctttacatgttactgagtccttcataaaaatattggaggatgctcagaaatctggtggtgagggcaactggcacatagttttttaaatctctcccagtattcatataagctctctccactgagttgcctaattcctgaaatatcttttatgatgaccgaggtcctggaagcacgggaaaatttttctaagaatactctcttgaggtcatcccagctcgtgatggactctggagcaaggtaataaagccagtcctttgccactccctctatagaatgangaanagccttcagaaatatgt

SEQ ID NO: 175617 - DNA, 396 bp, Glycine max
agctgtgtcagatcgctcaagctatgcttcttaagggaaataagtccaaagactcgcgcctagggatcaatgatttaacagataacttctacagagaaccatgtccttataaaaagcagaagacaacacaatccactcatatataatgataagcagaaccactttatatccttttaaatataatgataagcaaatggtttgtgaataggtaattgttattttaacaaaactaaatcttcttctcttctattttctctatactaaaggataaaaaatgtgcatttagatggagacactgctgagatactagagttaacaattgataagcaaattaattttaaaatatgagagggagcaatcacagagagacttatgagttaaattattcaggttact

SEQ ID NO: 175618 - DNA, 444 bp, Glycine max
  unsure (1)..(444): unsure at all n locations
tgctctacangaagcatctaagttggctggttcacatttcaaatncaaacatgggtacctatctgtctttgattcttacatatatatgttgatattggtgggtttttctttgctttcttttggagatatatttcaacataaattgtgaagaaaaagaacagaaaaaatataccttcacaaagatatatagacatttgaatttgtgaatgaaactaggcatgggtttgatgcattctatttaactctatatgtatgttgtatttgggtaggtatgaacatgaactcattcagacaattggattggagtctagagtgcaagaggggaactcactnttggatgttggatccaatcaaagagtaagtatggtggcgatttatggtatccgggttatacgttagactgctatcgcgtgtgcagtgtacaattngattgctgatcaattt

SEQ ID NO: 175619 - DNA, 444 bp, Glycine max
  unsure (1)..(444): unsure at all n locations
agcttangcacaagagagaggaaggggttttgtgtgagatanagagagagagttgcctgaaagacaagtttcgtcaggcacgtgtctattatgatggtgttcaaaagcccggctctgtattcactctccaatgatgattctttgaataactgtccttaaactcacaattccatgacagttatttgaaaatcgtcttctttgtcaattcatctaattacaagattgtctccatgttatctttaatgatgatgtctgataaccatcgttgatggcgtgtcgtaaaaaatatattttggagtagtcttttaacttatccaatctacagtttttcttataattttcactatgtcaatccctacttcgtttttttatcgcaatctctaccaaagttattatcacatattccattagaattcgttttaaactactattaagattatcatt

SEQ ID NO: 175620 - DNA, 454 bp, Glycine max
  unsure (1)..(454): unsure at all n locations
agctnntggcacaaggaagaggaagaagatgtttattgagattcaaagattgtaaaggttgttcaagatcattgaaatgcaaaacaaagccttgctattatagaatcttcatgtctggtcaagagaaccattagaagagttataacttttagaaaaacttaaaaccaatttgaaaaagtcaaaaactatttgaagagttacatcttttgatttgttcagaaactatcactggtaattgattaccaaatcagtgtaatcgattacacaaagcttttttgtgaaagaatgtgactcttcacattttgaatttgaatttcaacgttcaagcacactcgtaatcaattaccaaaacattgtaatcgattacaactntctgaaatcaatcggaacggtgtaaatttagttgaaaactatttcacaaacattttgctactggtaatcgattacaacaatc

SEQ ID NO: 175621 - DNA, 443 bp, Glycine max
  unsure (1)..(443): unsure at all n locations
aatgtgatgtttgtttatgttaanagtatntggcgggggctcctagtggcttactgcaacctctgaacattcccaaccagatttgggaagaaatttctatggatttcattactgggctccccaaatccaaacgatacactgcaattcttgtagttgtggatcatctgtcaaaatacagtcacttcatcccattaaagcatccttaaatagtgaagacactggctaagattttcactaaggaggtgatccgtctacatgaagttccgacatccattttaagtgatagagatcccatctttgttagcggtttctggaaggaactattcaaactgcaaggtacttaattgaatatgagcactgcctgtcatcctanaacggatggacaaacaaaggtaattaatcgctatcttgagactttccttcgttggtntatcgctgatcaa

SEQ ID NO: 175622 - DNA, 146 bp, Glycine max
ctacacaaccaccaaaaaaaaccaacaacagcccacagaaaagaatgaccccaccccacctcatcgcaacacaacaaaccgcgcgcagaacactcaccaacaccggaaccatcgatgccaccaacgattttagaccgaaacaaaag

SEQ ID NO: 175623 - DNA, 347 bp, Glycine max
  unsure (1)..(347): unsure at all n locations
gagcacanangcacacagagtgtgctggttatttggtatctgcccaccaacattncttgcgtgcttggaagttggaaccacatgccgcctctcttctagccaccactacttccaatcctcttccctagtcatctctggtcagatcaagcatcccttgcccttaatttgggtgtgtgaatctcttacaaccgctaacgattaatattagctggattttaactaattgctcatcaaagttgtactctagttgccacttgcccgatatcttcttgcagttgaatcaaggttatttgagatgtaccattcatcaattacacaaagcttaatctctcagagactcaaccctg

SEQ ID NO: 175624 - DNA, 443 bp, Glycine max
  unsure (1)..(443): unsure at all n locations
tcttccgcagatccctcatgtgagactgggcccgatgtttattatcctcttaggtttagactaacttaaactgagtttcatccacagatccctcatgtgagactagactcaactcaagtagcttacgaaagtttagcctaatttagcctaagcttcgtccgcagatccctcatgtaagactgggcctaaactaaacagcattattgtaagaacataattaaaaccaaaacttaatatgcagatcacttatgtaaggctaagtttcggtcctacttcaatcaagttctaaggcaacagtacatttcccaatgctaaagtcacctaactgtgcacacaaatgggtgatcagaccataagcatacaaacatcaagcattgaacatagaanacacaatcaattagatattatgtatttacatcagttgttcattagaaatccccaac

SEQ ID NO: 175625 - DNA, 337 bp, Glycine max
  unsure (1)..(337): unsure at all n locations
cagcttancttcctagaagagggtatctttttctgcctacactattcaagcactgtggactggataacaaatgcatgtatcctaagttattttcctccagtgactcattattaaaaaaaacatacgatcaatagaaattatcacatggtccacacccatgtggcttataaaaatttatacgtgacatgtaatcatatcttcaaattgacaaaaatgtgttgataacatgtcatcgtaacattaatcgagatcacatggctaacgactaagtaactatttctcatttattaagcacaacttaatgacatgaatttaccttctgtattgctaaaacagc

SEQ ID NO: 175626 - DNA, 476 bp, Glycine max
tgaagagggtggcctctgaggggtagagaagcgctttttgatgcaaggatgctggtgttgcagagagattctatatgaagagaatgacattaaattaaatgatagacagatagattcgatcaccagagagagagagagaatggtggcgttttgcgacctgcaaagcaaagcaactgcgtttgcgaggcaaggtaaccctactgtgactgaaaacacgaaacaaggcaagtgtgcgcttatgtatgtctcactttctcgcctctaaccatgaaattaccatttactttcctcaatactacatcaccatcaaattacccgttgatcgaatttttttcccggtgagtgaatacatttttctctcaacttattaattcaatgattacatttattcggtgacgtactattatttgatccacaaaaaattgtggccataaatataaatatgaattttttaataataaatcatttcattatgt

SEQ ID NO: 175627 - DNA, 222 bp, Glycine max
acaaagtaaatttaacaaacatttaacgagacaaagtcataggcgactcaacccaagccctacaaaaaaaaatatagcaaccaaccgaaaaaggagccgcgaacaaaaaatcaggcgaaacaaggattcaagcccaaccttcacgcaaaggtaagataaaggatgaaaaaagatgacgccaataaatcagaggacaaatccaaaaacttcggctagatgaaa

SEQ ID NO: 175628 - DNA, 451 bp, Glycine max
  unsure (1)..(451): unsure at all n locations
tatgcacggaaaangnaangatgaaagagagatgcgcgtttaaacaccatttcctanntaaccatgcattaagtaccatgatcaattattttgcttagttgtagagcgtattttcttctctagatatgggcttatgatccccacatggttggctcatggtgcctaacatatgcaactaacaacgtagtgtgaagtttcacgcttccccttttttgtttttgttttgtagaggaaaacacatagatgagcaaacatgaaaacacatggtatgcaatnttgcatatcaaaaagtttgttgaacgcatatgatgacgccatgactcatgcctaatgggaatgtgataaccgacatacgcgggaatgatatgttcattaccatgcttgatagatgttttataccgtgcatgatatgaatgcattttacggacacgagagcccagaaaatatctct

SEQ ID NO: 175629 - DNA, 451 bp, Glycine max
  unsure (1)..(451): unsure at all n locations
gtgcaagctgcctgttgcagatgcaagtctctattgagcttccaagnatatgacatgtaccacttgtcattttcctatctaattagcatcttccaaaatcagagtctgaaaaaacctttaagtttaaggaagttcctttggaataccacaaacctacattggttgtgcccttaagatacttaatgatcctcttaacagtagttaagtgagattcctttggattggactgatatattgcacataatcaaacacttagcatgatatccggtctacttgcagttaggtagagaagtgatccaatcatacctatgtatcttgattcatccactgatttacctttctcatctaagtcaaggaaggttaatgttgtaacgcctttaaatttcaataactgaaaataaatggttgatgtatttcttgtgttatttgatactggaataattagatgagt

SEQ ID NO: 175630 - DNA, 477 bp, Glycine max
  unsure (1)..(477): unsure at all n locations
tcagaacatganaaccagctatatgcactgtgttatcttttacacataactggtaatcgattaccagtggcctgttactctgtgtaatcaattacacagtattggtaatcgattgccagaggcctccacaacatactatctccatttctaagcctagtaatcaattacacccattggtaattgattaccagaagccctctcacgctcatgatcccatttttaggcttggtaatcgattacacacccttggtaattgattaccagagaccatcttaacttcctgtcttcacttttaagccttgtaatcgattacccacccttggtaatcgattaccagaggctatattccacatattactcaagatccatagctggccagccaccacacaagcctacttgctttgtggtcttaggtcttttatcggatgactgccaagagctcctctgtctaggtacatcacaggttctcactgactg

SEQ ID NO: 175631 - DNA, 433 bp, Glycine max
  unsure (1)..(433): unsure at all n locations
agctngaagctntaagggttctgcggagtccaattgaaactggtttcttcccaatttgttgattcctcgttacattggttgatttccgaaactcgatctctccctcttcattgaggattgattcttcaaattctcgtgaaaaaaaaaatgctcggttatattgcctaatgcatgacctttttttnttttttgttgttgaaaatttgaatgtgggtttgccttcaaaatttggtcttgtgaggagaggagattgtcgcttgtgtttgtagagtgtcttgttgtttttgaagatgaagagaacgaaaagtgatcctcccaactcgaggaggtttagattgtctcattttttgtttggcattggggtgttgtacttgttgtttgtgtcatgtaagttctcacagttcttgagaattgtatcaacgttaagtgggga

SEQ ID NO: 175632 - DNA, 456 bp, Glycine max
  unsure (1)..(456): unsure at all n locations
ctatatgtacattcgaattattttgtntctgcattngtagattctacttgtcagatccgtggtaaactaatttgagaacttgtgccatagaatntatgtaactttgcattgataatcatttttttaatggaattttattaaaattaaaggcctagaagctccccttatgaaaatttatacaggcacaatttttttggtagagttaaaatttagaaggaggagatgaaccagacaaagtcagctcttaatacattgtaagtaaataaataaaaaaaaggcatcacatgaaatacacgtgacttatacaaagattaattcaatccgcatatagccgatagcctgatagtacatccgcattaattggtttgtctcacacacaaaacatgaaccatgtaattatgaatattatggatgggcttaaacatattgtaataatgtacaataaccgctattaaa

SEQ ID NO: 175633 - DNA, 490 bp, Glycine max
ttaagtcacctgcggcatggcaagctagaggaatatggggtaccgatcacatgtgttactaggaggcggtcgggcgatggtgcaaaacaattctccacatccacaaatcacgtataaacccaccatcccctgttgcccacctccaactaagctcacgtactcccacgtagcccttattctcgatcctctcaacgccgggtccccatcaatcctcccaagcttccacaaaatccaagtaattccacatccaatcatcaagaactaacataaccaagcaaaataggcaaaggcagaaaactctgcccacaacacagaccaatatcacagctttttacatacaaataccccagtaacattctcttcgttccaattcgttaaccgttggatcgactcgaaaattatactggaagtctctagcacataaatatacattatgaatgttgggatctgctagaaaacgtccataacccaatatgttctacacctttca

SEQ ID NO: 175634 - DNA, 396 bp, Glycine max
gaagctcacacttgccattgccacatcatatagtcacactttgtgcatgcccttcatgctttacatgcctcatgcaacctaagcatactcagtggagaatctcggacttgatcgtggattagtaggctgaacatatagtcttgttgttgaactttctttcgatttctaagtttcctacatgatgcctatgatgaagttgagttgcggtgctgagttgtggctggatttgtgaatcaaaataagccttaagctctcttgaattgtgttattcaagataactgagcataagcaaacacgaattgtaactatccaagccttaagcaacataaacactactcttgatttctaggttggaatcgctagtgctgacagcttgaacacaaaattgtataaatt

SEQ ID NO: 175635 - DNA, 424 bp, Glycine max
  unsure (1)..(424): unsure at all n locations
cttatgtgtttactgtggatgtaaatgctatcatctccaaacctacaccattggtgagacattatgcatatgatgaagtcgtccttgtttattattaacaatactaacaaatttcacttcctttattgtcatctagttcttgcctaccgctgctctcgattntgttgatgcttcaacacgatgtatgacaatgcaacataggattggcgttcgtggcatatggagcatctccatgcataatgctatacaatatgtggatgaccctcggcacggattcttaatggagaatcacttgatgggtggagatgaggtcgtgttttattaccggcctaaccaacatgtgtgggagatcatcttgaggaacgagcccgtatatgatgaagacnacgactctacttgaatgttgcagtccacacttgatagt

SEQ ID NO: 175636 - DNA, 495 bp, Glycine max
  unsure (1)..(495): unsure at all n locations
tactaagcttcaagaaaagatggnctcgcaaactgcttatttccagaatttgtttctatcaatagacctccaatcattaatggagagggttaccactactggaaaacccgaatgcaaatttttattgaggcaatagacctaaatatttgggaagccatagaaatagggccttatatacccaccacagtagaaagagttacaatagatggcagttcatcaagtgaaagtataacaattgaaaaacctggagataaatggtctgaagaggatagaaaacgagtacaatacaatntaaaagccaaaaacataataacatctgccctgtgaatggatgaatatttcagtgtttcaaattgtaagagtgctaacgaaatgtgggacactcttctattaacacatgaaggaactacagatgttaaaagatctangataaatgcactaactcataagtatgaactatctagaatgaatgcaaatgaatatatttcaagcatg

SEQ ID NO: 175637 - DNA, 464 bp, Glycine max
  unsure (1)..(464): unsure at all n locations
caagctttatgtgcgagtgataaaaagttctttctatgnagccgcggacgtacgcacatacattgtgtgctgaaccacgttaaactgtgggtcttttcctctcttccctttattactttctcttctattattgctctatactaacaactggtatcagagctcttggatactccacgggatttccttatttaaaggaattagtgggagtcttctcatcttagaggaggcagtgggagcaatggcattataagaggggaaggtgaagatcgagaagttccatggcagagatttcacttctggaagatgcgatagaggattatctatatcacaagaagctgtattagcccttatcaggggttaagccacaagacatgaagcaagacgaatggaacttgcttgattgacacgctcttggcgtgatcagattgacattatccaacaacgtcctgtctacatcctgaacc

SEQ ID NO: 175638 - DNA, 486 bp, Glycine max
  unsure (1)..(486): unsure at all n locations
tcgttcgcagatccctcatgttggacgaagccgngtttttattaccttattaggtttagactaacttaaactgagtttcgtccacagatccctcatgaaagactagactcaactcaagtagcttacgtaagtttagcctaagcttcatccgcagatccctcatgtaagaataagtttcggtcctactttaatcaagttctaaggcaatagtatatttcccaatgctaaagtcacctaactgtgcacacaaatgggtgataagaccaaaagcatacaaacataaagcattgaatgaagcattgaacacaaaaaacacaatcaattagatattatgtatttacatcagttgttcattagaaatccccaactagggttnttagccaaccattacaaagaaagcctaacaataaatgagattaagaacagaaaatgatagtttcttacactagaaggggggatcctcctnctcttctcagcatctcacac

SEQ ID NO: 175639 - DNA, 475 bp, Glycine max
  unsure (1)..(475): unsure at all n locations
cattcgtgacctatgatactcagcttttatccanggctcatctggggtgaagctcttctttctggcttattccctagtggatggcgcctcctctcacctcttctcctttgtcttacgctgtatctccatgatggaaaatcaccattaaaggacctcattgaagctcaaagatccagcctccatagaagccccacaagcaagcttccatcaatctcttttgataggttgtcgaagtattgaaaaatcaaaattcctattccttggattatggggtcgaaccaagcacatgcttttaagaaaaggttttcatcaagtcaaggtcaagtatggaagtaaccaacttgcaaaaagttggggcagaagatggattgagttacattgcttttttgtctactgccaacatatgattgagctaaataatntacttaaattaaggactcttgatgtccatgtttatttccagtttcactttgac

SEQ ID NO: 175640 - DNA, 469 bp, Glycine max
  unsure (1)..(469): unsure at all n locations
agctcttcctctagtgtgctctaccaatattttctagcattagagagaaggagaagggatttgagcctcaatttcactatcttcatgcgagggtcatttttctatctacagacattatttcataaatcgcaacggnggaagtctgcggaattgagttttgaaggcggtgtccaaatttcatgattatccaagggttaacgagtccatgattatagttttacttgaacaacagttgggtgtatgaggaaaaaagagagggtntcgagagagaaagttgggaaaaccaatttgagaggaagaggaagcatataaatgtacaaactaacctaataagtatttagttataactagggcattctcagcctattatatactctatatttctttaatttcttctcttattaagaaagaactctattttactctttcattaaatagataaccaattaaacatctcttattttctaaa

SEQ ID NO: 175641 - DNA, 475 bp, Glycine max
  unsure (1)..(475): unsure at all n locations
taagacaacttgtgtaatcgatttagataagggtgttatttattgaaacaaagagtttcnacctttgaagaaattttctaacttcataaattntctttttactcactcatgatgatgcatgatgcacaaaaaatatgatatggactaagatgcaacattcaatataacaaccaatacaaatgccactcaagagagttgggcatgtaaaagacaaaacttcttcaagctcttctttaatcttcaagcttaagtcatcatgttgcttcccctatctctaacagttcctccctttgtttcccttcctcccaatcctaacaacaatgaagaaattgatttcccatctcaactaattccttcctttcaggcatcttcacatcttcgcaagcccgttcagaatcttctntaatccctttnttctcaagccaaaagggtcagtgtcatccatgactctctcatggcattagtggcataagat

SEQ ID NO: 175642 - DNA, 420 bp, Glycine max
agcttcccgcatgcgcacgtggaaggatcttattaccgccttccttaggtagtatcagaacaactctgacatggctcccgaccggactcagctgcaaaacatgattaaacgggaaaacgagtcctttaaagaatacgctcagcattggagggacctagcagcgcaagtagccccttccatggtccagagggatatggttactataatggtggataccttgcctgtgtttactatgagaaattagtgggctacatgccttccagcttcgcagacttggtcttcgccggagaaaggattgaggtggtgttgaagaggggaaagtttgattacgtctcctcgataggtgccagcagtaggaagaccggaatagctggggcaaagaagaaagagggagatgcccataccgttacctcaacacct

SEQ ID NO: 175643 - DNA, 392 bp, Glycine max
ggacacaaaaactcagcttctcagaagatctaaaagcagagctagctcttccccttttaatagctaaactcacctcttgagatgagaagctgagctagctacacaccccctatatagctagctcacccctatgccaaatacttgaaagtcctactacaagaccactcaaatgccctgaaacaagctaaatctatactactaaaggaaactacaagccaaagaagaaatctattctaaatttacaaaagagggacccacctggctggggtaaaattaccggagtatgaccctaggcttttatatttagccagcttggattttatcaacctggggagatgctacttatatagtcatttgaaggaagggtcataccagtattgattttgcttggc

SEQ ID NO: 175644 - DNA, 463 bp, Glycine max
  unsure (1)..(463): unsure at all n locations
acccgagatcctctgagtcagctgcagctgcagctaatgagctctatgttatactctcatgtagctactatctctctttagtctttatgttagtnttttgtttgggctcttatcccctttcatccaggacaaagatatattagtaactatgtttaaactttgatagctaaacaattttaaatttgtgtttaagaacaactgttaatttaattaactcctaacacttaaaaatcactattttttaattatttcattatggtttcttttcatgaatgaaataatttatcttctattgaaacattaaatataaaattttcttatattataataaacaatatctctactacgtatcgatattttgtatgtgtatgttggttatatatgagtacaataaataaatctcaaatgatactttgtttaaagatcacaaatatccttctaaaatcaactatacttcaattgg

SEQ ID NO: 175645 - DNA, 471 bp, Glycine max
  unsure (1)..(471): unsure at all n locations
ngagagactgtnggcatgtgcagcacttcttcatgccatattcatttngnataattcggaacgatcccctcacatattagatgagatcttatgtcatttactacttggcgtctcccgtttccacatatgacacatggatagaaaaatttcccccgcaaagatggtgcattacatttagtaaattataggaattcttcaacaccattctcatattctttagttatacattatgctttcatccaagtttgatccatgtttcccctttgatgtgacacttgattaagttatctgacatgcatgaaaacctcacttttttaattaaaggtgtggccctatcccattcaggaagacattgtttagagtagatctatcataattatattttgctaattctgactataattcgatagcaattcgcattggtctccaagtacactacatgataatggtggcatggtatgatccacaata

SEQ ID NO: 175646 - DNA, 397 bp, Glycine max
  unsure (1)..(397): unsure at all n locations
tacaagcgagctcgcacaaatcttctagacttggagtgatcacatgcagccctctagaacccttaccacccactctgtcaatatgccgagactcacgaaggtcaacaagcttagccttctcaatgtattctgaacaaaaattaatggccttttctacaatgtacctctcaacaatagatgcttctgaacgatatagattctttgtatacccatttaatatcttcatgtatcgctcaaccgggtacatccaccgcaaatgaacaagaccacaacattngatttctctcaccaaatgcacaatcaagtgaatcatgatgtccaagaaagcacggggaaaatacatctncaacttgcacagtataattaccaacctattgttcaactcatcaacttgaca

SEQ ID NO: 175647 - DNA, 474 bp, Glycine max
agcttcagcattggctatggagtcatttctacaattgtggttgagaagtgtctcctgcatttatgcaaaaaattaaattgatgagggagacagactaaacaatataaacagtgaagacaaggcaatgctgagcagaaaaaatcatacaaaaaatggttctacagtataaaatgccatcataaaaaaagtaaaatccacaaaatataaagaagatagaatcatctgtattcaatgaacatatatgtcaacctaagatacataccggaatccagatacaaccaatgactactacaaatgcaactgctgatattataaagttgggcaagaagtaaggaaacctgcagaatgattgatgttttggcaaatgaaaatcagcacatcattaaagaataaaatgatagaaagaaaaggcaataggaaaaattgaatcttataatttatataattaaaagcagtagatgtccacttacttat

SEQ ID NO: 175648 - DNA, 466 bp, Glycine max
  unsure (1)..(466): unsure at all n locations
ctctgggtatttatatgaagatgttttataatgagtcaatttcttcttttcaccgaaaaagtatttatcttgttttaatatagcaattggactttgcttgagaagaatggagttttggttgttttggctagctatggatttccccctgttttttcattgtctttntcatgcgatcctcgtgtcggttaaacccaatgcatgcagctctgttttcgtgttccatgaggtgcttatgtgttgtatcatgtaatgccagttttggaatttctttgatatgtgtcttttgtttctgttntatgaagaggtttgggtggtgctgaaaagtgtgtgtggattaagcaacttgtgatcattgccaatactctaagcatgtntctcanattcacatgtattagctctttcttgtcacactgctgcatgtgcatcaatatctcactacccctttngtgagtcctcaatctcctac

SEQ ID NO: 175649 - DNA, 128 bp, Glycine max
ccagagagaggaaacacaaagcaacaccccaccagtacagatatgaatgaaccgagcaacaaagggaggcgggcacgacactcaaaccaagccgaaacgacacagaaccaccgcaacaaccgaaccca

SEQ ID NO: 175650 - DNA, 424 bp, Glycine max
  unsure (1)..(424): unsure at all n locations
aaattataaatgtgtttcagagtagctgacaactttgacctgtctattcaacaacaatatgaatagtataacaaacagttaccttctcgtcctccttatatgaaaatttcagttgaaaatatagttggatcagacagaaacagaatctgggtctgatcgaaatggcccatataaaatcctcagcaacagtgcccttcaaagtttcgagcaaacacgttacattagcaatcgagttgttttgaaaaaaaaaaagtgggttgcagaggaagagagagaataatcttaaacttgaaaaggtggaanaatataaggaggaaaaagcaaaagaanttttaagaatgaaggagagggatggtatagtataacgaaagtggaaattgagacagagaataatgtcttgctgctgaatgaactgagtggaaag

SEQ ID NO: 175651 - DNA, 394 bp, Glycine max
  unsure (1)..(394): unsure at all n locations
tctaagacgactgcagcatcaagcttaacctgagtatagcagagaacatatcatgtcatgtaatgaagcaatattagaatctctcatcagaataaagctaggtagaatcaagttgtccatatgacatagaatctagaatctgcaacatttgatgaagctcttgggtatcttctagacttccacatgagttatatttcgaggactcatcaaaaggttgaagattgctctgaatcaaagatgcaagacactgcagaagctgagttntatcctttaaaggcataattgattgttagatcagaatgaaatagactttggacaaactaatcaaagaataaaatgtcacatctgcaatagcaaccattggaagatcaatcttaaagaaacttgcattgta

SEQ ID NO: 175652 - DNA, 436 bp, Glycine max
  unsure (1)..(436): unsure at all n locations
tagccattattgagcctattcctccaataactagatatctattgtcctttctccctctctccctctctgtgttaatgtcaaaaccagtacatcatgataaatactaattcatcaaatacaaatagttatagcacacaaaatttattcagtgccctctaggttgacttatcttgtatgaatgaatattcagtgccaagagcctagtcaccccaaatattcaaactttaatctttcgtaatagaagttagaaacaggtttattgtccttcgtaattctcatcatggtttacttttttcacctcaacggctgttttttttgtctcaattntaggtgctggtgcgagtacatcaactgcaagcccgagtaagttaataatgaccaatattgccattaaagacaatatgaatggtatgtactaaaatntgcctttatatat

SEQ ID NO: 175653 - DNA, 365 bp, Glycine max
  unsure (1)..(365): unsure at all n locations
agccatgatgagaaaatatggccttggagctgataatgtcttacatgctaaaattgttgatgccaatggaagaattcttgatagagaagccatgggggaagacttattttgggctataagaggaagtggaagtggaagctttggaatccttctttggtggaagataaagcttgtntctgtgccaccaactgtgacagtttttacagntaccaaaacccttgagcaaggtgcaaccaagattcttcacaaatggcaagaagtggcaccttatattgatgaaaacctcttcatcagagtcatcattcatccatctagtgatgcaagaaacaagactcagagaaccatcgcaacttcttacaatgctc

SEQ ID NO: 175654 - DNA, 479 bp, Glycine max
cactgtcttgataattggtaacacaaccgatctctccttggagctgctttttctaaagaagaaatatcaaatgcttcccaattgcctcattactattgtctttaacaacagcaaagccttattgtatccaatatccatgctagttttccaataaatgtacggaattatcagctttccttcacagccatttaatataaaattgattgtccattgttgcattttttctttcttctttttcactccccctccccactcttggattaataaaaactgtttgtaaaaactgcacggtggaaaccacggaaattacaaagtacagcactatgcaatcatcatcttataagaaataaggcaaaataacaaaactataagcaaagagttacactatccataatccactgatgccatcctccctcaacctaaagtaggcatgttaagtgtttactcatctaacccttgttctatcatctactcttttc

SEQ ID NO: 175655 - DNA, 317 bp, Glycine max
  unsure (1)..(317): unsure at all n locations
agagaagcgatatatttaacgactaagaattcataattaacaaaaatgtgtaatgaaaaaataattttataactactagataaagtacctgtgcacagcacacgtacgaaagagaaaaaatgagagcaaataaaaaagaagaattaacagcggatccatattaaatgaaatgttgatacctttgtatctataaataatgattggacaaatataatataagtatagataaggcatgtgctaagatgcttcgcttaaaaaccaagtgatttcctaaactcactcatttcataggccanataatggttattcattaatta

SEQ ID NO: 175656 - DNA, 481 bp, Glycine max
  unsure (1)..(481): unsure at all n locations
atcctcatagtcacctgcggcatgcagctttgttgaatggcgaagaatgttttttctccaattagcttgggaattaagtgcccaaatccacaattctcagatgctcctctcgaatgctgccactaggcgtgttcctttaacaaccagggaaacagaaagggctatccatgatatggcattattgttataccacgcccagcagctccattatgatagtgcaaccatgatcatgagattcatagcaaaaattcaagctcttgaggaacagatgaattctgttagtgaaaagagttcaaaatatggacaaatatctgctgaagaagacccacaaagcctctattgtctaggtgtccgattgactacagaatggttcaaaaacttcaatntgcaaaacatattgaacgacaaaaggcacgtggagatgaagcttaaggatagcaatcttcaccactttcgcatatttctcgatcacaatatagca

SEQ ID NO: 175657 - DNA, 433 bp, Glycine max
  unsure (1)..(433): unsure at all n locations
tatctanccaagtttaatttggtatgaacagtgaaagtgtttaactacgtcagtccatattcaacggtctgggagacaaattcataagatatttatgaaagatttggccattttagttcatgtattaaagatatgtcaaattgttgatttttatagctgccctttagccataggtaaatatctacaaataaaaggtccatagaagatatttattaattatagtgttgctgataaggccacgatgcttgttaatagtaaagatttatcttcacaaatttccacctgcccatggtgttggactcgacggggaataagggaatagtattcattttatttcacactaattctcttcataaattattttatatgaataaacaaacatgataattaaattaaaaagagtactaatttatacaagtaatcttgtatcatc

SEQ ID NO: 175658 - DNA, 459 bp, Glycine max
  unsure (1)..(459): unsure at all n locations
agcttgcnatagagagtgagagagcgatatctctatatanatgatcagtnttctaataccactcatcgtttgcttaagcgagcaaacatttgaaaatagagtatagtgaatgataaacaaagatgaacgaaaatatattgagaaagcactaaaatcgaaattaacttaataaaagtgatcaaaatctagtgtgcacaccatccgctagcttttgttcttgtactatataacatgtataaactttttgtacatagcccatcaattcatgacttattttctatcgaacaatctagaagtcaaacaaaatgaaatagttgacatgacgataaatatctaaaacaactaactctctcttctcataaacaaaggagaggtttgctacaagtacaaaaataggccactacttattgacatgaccagtttataataaatagagaactactctaaatgaaatgaccc

SEQ ID NO: 175659 - DNA, 413 bp, Glycine max
  unsure (1)..(413): unsure at all n locations
ggtaatggtgttctaatgaatgattatggatatatatatagcggctgagaggcattgactttaatttggctcactcaaattgcacgtattttttatccttgnaaataattaatttacatctaacttatgttttattactgatttgttaattgttgtccaaagtatcttcagtggccagagactatcctataactcgattctttttattaatttttcgctggttttattcttgcctatgttataagaattgttattaaaaaatgtacctaagagtattattacactaattgatgaaattaactggagatgattaattcaatatccttctctgtcgtcacttcttatttaattntattccatatagtacttatgcatattgtgcagacatcacagcctactaaaaatatatttct

SEQ ID NO: 175660 - DNA, 429 bp, Glycine max
  unsure (1)..(429): unsure at all n locations
agctngccgcccagctcgcccaggcgagtctggttgcttcctccagaagcaacaaccttctggagggcccaagtgggccagattgctatttgcacccccatttttactaaatgcacccctttctattattttgcagttcgttttccgtaacgttacgaaactttacgaatttcgtaacgatacctattttccttccgcaaggttacgaatcctcatggattatatattttactcttttttacctttcgaagaagccacggaaactcacggattgcgcaaaaacacctcttttcgacttccgccacattacggaatttcacggatcgcacaagcctgctttcttttgatttctgagacgtctcggaacttcatttattgcatgtcatcaagtaataatctccggacaaaattagggtatgacactatctc

SEQ ID NO: 175661 - DNA, 472 bp, Glycine max
  unsure (1)..(472): unsure at all n locations
tggagaggatgctctaatggaggataagagagagggtgtatattagagaggggggagcacgaaattgaaggaagacaaagggagagaatttgaactttgagttgtgtctcacaagactctcattcatcagagttactacaagtattacacatacttctatttatagactaggtagcttccttgagaagctatcttgagaaaacttccttgagaagcttctttgagaaaacttccttgagaagctagagcttagctacacacacccctctcataactaagctcacctgcttgagaagcttgcttaagaagattcctaaagaagctagagcttagctacacacgccctataatagctaagctcacccccatgacaaaatatatganaatacaaaataaatctctactacaaagactactcaaaatgcctcgaaatacaaggctganaccctatactactagaatggccaaaata

SEQ ID NO: 175662 - DNA, 300 bp, Glycine max
attgaggtgcttcatcacgccaaaaagggtaaaggtaaacttctggtcattcacacacatctctaagataccattctttatgtcaacaacatatttagtggtgagcataaatggtcgctcaaagatcaacgttacctcaacattttcttttatgtccattatgacgaaataaaccgaaaatatgaattcctggacctttacaagaacatcttcaataatgacatgtgtgcttttgatggactaatctgcaagttgaacagtcatgtatgttggcttgagctctaaaatgccaattctctt

SEQ ID NO: 175663 - DNA, 478 bp, Glycine max
  unsure (1)..(478): unsure at all n locations
tatcaacatcaaacttggagaaagagttcttggtgtcaatacatgagaagcaatcaagtataatgttacttccttcactaaagcggtgatccatctccacacatattttatcaatagcaacataaaaaatctctgcacggtaatgatgaagattagtgatagtcctcccttctgctcttgaacgaccccgaactggtatttcgtcatccatatttggtaccagaatacttttagcaacacaaaatccttggacatcggcaaaaaaattattccagccactctctctcattgtgtccaacccagctttgacaacatcaactaattccatgtcattcacaatattaagatcttttctttgcaatatatttgaaagcttcctatgacctgnatcacgccacaatctcattgggttaaactcattaaccacattaggtggcgattctaattcngcttcttggtgtacaacattcacattctc

SEQ ID NO: 175664 - DNA, 288 bp, Glycine max
aaatacttcggattaacttcctaacaaagatcacataacgagcaatacatgtgaagaaaaagagcccataaagaaaaaggatagagaaagtgacacacattgtgcagcgccatataggtggatcgaacgggctctcgtccatcgcagagcttatcgaagaagaggaacctccggaggccgaacctgcggacaaagacagcgatgcaacagaaggagaaggcggataccgatgggagagagagctggagcacggcgacgtaagggcgacagtgacgggcgacgcagtcg

SEQ ID NO: 175665 - DNA, 405 bp, Glycine max
atgataatgttaacttgaaagtatattatatcattatttatgtgcaggtggcgtgatgctaagttgctgattaggtatacacttcatggatcctgtttgattctaaagagattctacctaggttatatgaagcatgtgttgtaatgcaactagcattgcttaattgccacatgatgtgacctatggatgattgcaggataaatggaaaacattagtgcaaacttcaagaatcccccctcaacaaaagagaggtagccttatacagagttttggctgcccttgctaattgatctcagcatcaaccataacaacacaagaagttccaagctgagcctggaaccttgaagttataaaagcctcacctgaatgacagggagtcgaggttgtcaataacttatgatcttg

SEQ ID NO: 175666 - DNA, 303 bp, Glycine max
ggattcaacattggctcttcttataatgaactcacccttgcaattttgtattgagtggttgatacctgtgatgattgcgaacattattcgtgggagcagaatgacagcagtaaggtgcaggaatgagactttgttgaggagctgccaagccgacgtgatgacgttgggattattatgggagagagttgcgttctgcaatcaactcctccataattatatatatgaacaagcttaatctccataatgagtatgatgtgtatcgagttactattcctatccctatctatatatatatatatatat

SEQ ID NO: 175667 - DNA, 383 bp, Glycine max
  unsure (1)..(383): unsure at all n locations
tcactgaataaccattcatttgtntatttgtagttttctttttactataaaaaaattgagttnttttatgtgtgtgtgtgtgggcgcgccgtttattttggccatatcattatctccaactccccctcaagccgaagacctgatactaatagcgtgaattttgcaagactggacattaataataatcactatgatagactctgataccattntaagatttggatttaagtctaacttaatcccaaaagctagctttatgaggcaagggtgtctcctacttctgtacaatattttggccggatcactagtcaatgtggaatcaacaacaaatgaattaataagtaatttgagttctacgtgtgttctcctgaggtatttactaa

SEQ ID NO: 175668 - DNA, 448 bp, Glycine max
  unsure (1)..(448): unsure at all n locations
agcttaacnatatagctgcatggagttcttttttangcgccatccaccactcaaaggagaaattaatttacttgtgcagcaaccaaactatatagttcagtgtgtgatgaggagacaagctaatgctcttgtacatcctttggctagagtgacaacatacacatgcatagtccaaaggctttacaatacatgcattctatcatgtatcttcccacacagtatgaatgaaaggtaattaacattgcttgaaattttatggcaggctagaattgatagagtatcttgataactaatggcagagacataaaaagaacctcgataggattaaaatattaatgttctagaattaggagttaaaatacacatatagatacgcgaacttcgatatacttatcatatttcataacctatctacgagatgaacttatcgcctcatattgaacttatt

SEQ ID NO: 175669 - DNA, 299 bp, Glycine max
gaagtcaccatccctattataggaggcacgcttgatagatgatggctatcatttacctatatctgccgcaaagcttcttgcatatagactgtttgcacactttgcgacgactgaacgatctattggatatctgcacattccataattcacatacataccttggcgtagtacttgacccacccccacatagggtccagtgccttagatgctcctccatacctattgaagatcactatgtttatctctataccaccttctgcgcccgcagagactggcatttcaacacatccagaatagga

SEQ ID NO: 175670 - DNA, 469 bp, Glycine max
  unsure (1)..(469): unsure at all n locations
agcttantcctagaggtgatggacctttttttgtcttggagaggatcaataacaatgcctataatgtggacctcccacaagagtatggagtcaacaccacttttaatatttctgatttaatttcttttgcaagtggagctgatgctaaggaggaggaaccaatagatttgaggtcaaatcctcttcaagggggaaaggatgatgcaatcctcgttaggaagggaccagtcaccagagccatgagcaagaggctccaagaggattgggttagagctgctgaagaaaccttatggttctcatgaacctcaagatagatttttgagcccatgggccaagggtgggtccacttgtctttgtatatattagaatagagttttcttcttttgggccttgtattttggtcattctagtagtataaggttgtagccttgtatttcatggcattttgaatagtctctgtagtacggac

SEQ ID NO: 175671 - DNA, 478 bp, Glycine max
  unsure (1)..(478): unsure at all n locations
ntcacaaggctatgctggcataacatatgtggagtcttatttataataaatatgcccttgttacttaggttctaaaagcaaaatatctccctaactcatcccctatggatgctaaaanaagttgcagacctagttactcttatggtgcatggagcaatttggaggattggtgatggtagatctatcaaaatatggagtgacaaatggatcccaaactctcttgataatgttattcattgggatcataatccagatattgatttatcccaaacagtttatgacatcatttgtaacacccttaaatataatctttcaaataacccattaattctacttaaccaaaaaaggtaaaactcagttcttattaatattgactcacagttagaaaatgtagcataaattnttttcaaaaataaaaactctctaaatgaattccanggaacatcatttgatctttanatcatgcgagataaaacgt

SEQ ID NO: 175672 - DNA, 464 bp, Glycine max
  unsure (1)..(464): unsure at all n locations
tgatcattgttcacaataacattgttggttagtgtctgttttatatattatactcttcactcttgaagctgctaaaccaccagaatcgggagttatgggaatgcctccaatattcagtgattgaccttagcaatnatattaagtggctctattcttctgtggccttaaatttccataaccaacaataaatttgattaacttatctggtttctggagactggaattatggatggctccttataggggggttattgaattgattaatttctatttatatatcaactctatttcaggggttggagagtgtatctacaggatgaacatgggacaacagaagaagccaaagatagaatgatcaacatgtaatcggtttgaaacttttctaatgattgcattatatcctttgcaattctagcttgaagtttgtgtgaaatgaataatttcccacgtgatatgggtatctt

SEQ ID NO: 175673 - DNA, 361 bp, Glycine max
  unsure (1)..(361): unsure at all n locations
ttcatttcattatcactggcactattgacaataaaaaaaagctgaatattctgaccaattttgcatggctctttgtattaaattaaataaaattataaacaaattaatagatcttgttaggttatggaatatggatctagaaaggcaaagctgcctccctagctagctaacactcaaactcatagccacccctctttctctctctatctctcttattcccatcgtatctttatcagccacaatatttgtcgacccagtcattttcatttcacattggtcattatcagtatggaaaaattaatgatgctacaaattatgatgtgngatcaactttcatcttagagcatcaacttggacactc

SEQ ID NO: 175674 - DNA, 424 bp, Glycine max
agctttactcaagaaggatcttgttatttgtgggcacaatattcattgaagactggtgatagtaaaatggaaaaagaggctcaaatattaactgatggaagagggttctgatatgaatatccacgaaatagctgaaagatgaatccattgttggaattggagagcttgcggttgacggtttgattcactggccactgcttctgtggctataaccaagagagctcacctgaatgcacggtttcttttcgtggctgaattttgaatgtacacagccatgataatgaaggcagggagatcttctgacatggaggatgatagatatgatctctgtcttttcttctctaattttttttaccgtgaatggtgggcttgtggattcttttctgtggtcccaatatgatatcatttgatgtgaaaatgatta

SEQ ID NO: 175675 - DNA, 395 bp, Glycine max
  unsure (1)..(395): unsure at all n locations
aaaatagaagcagcagaaaccttctttccaccaagagtataataaccatgactcatatgccccccagaaggcgaatcaagacccatgatcctatccccagggtgcaaaatcccggtgtacacagcgaaattagcagaagtacaagaataaagttgaacattaacgccccaattgttggggtgaagatcaaaagccaacaacgcacgctggcaacatagaaactcgatttcatcaatgtattgattaccagtgtagtacttatcaccaggcattccctcggagtatttgttgcttaaatggcttcccaaagcttccatcactgctctgcacacgaagttntcngaagcaattaactcaattcccttgaattgtcttccgttttccttctgcatgat

SEQ ID NO: 175676 - DNA, 287 bp, Glycine max
aactcgcttaactaaaaaaaggaggagctttttttatcaaaagatcattccggcttcgtgtgtgatctaacaccccctgataatgaagagaaatagaacacagttctggttaatcttctgtccaacaaataatatcactacacacaacccaattactttttttatattagaggaataaggctatttactctataatgggtcgccttatgaagataacactttttctctttgacctattttccattctcctaaaaaaattatttcatacacacttcgtaaattcatat

SEQ ID NO: 175677 - DNA, 465 bp, Glycine max
  unsure (1)..(465): unsure at all n locations
ctgcagctataacaacacaatcgccttaatcatgttcaaatatgcatgtgaattangacgcatcaacaagaatcaagccaaggctattgtgcacgcaatcaatggggcagaacacaccaaatgattataatgatggatggctcaaattctcacaaatgtaaaatcatcactttcaaattgagctttcaaaactatcatgacatgtagagaagaatcaaggatttcaagtcacaaaatgtcaagaacttttattttcaaaacaattacccatttcttgaacatatactataattcaaagaaaaacatgcaaagtcgtacgtgcacacgaaattgacccaaaatattaaactgaaaatccgacgaatctaacaacattaacaaattaacacaactaacaaattaacatgaccaacaatactatgcaaaccaaagaacactcctcctccatacttaaacaacacattg

SEQ ID NO: 175678 - DNA, 434 bp, Glycine max
  unsure (1)..(434): unsure at all n locations
taagcttccattcataaagcaagataatcagatttgactcttctcagtcttacttcgattntttcgctggcaaaaactaaatgggcaaagcttgaatgcatgtaacccaccatcttgtcatagtataacaccggtgatgtgtctactatcaatgttatcatctccctctgcatcattgggggcactacttgagctgccatatccttacacctttgggcgtattctttgaaagattcattctccttcttacacatgttttgtaactgcattctatccatagccatatcaaaattgtactgatactgcctaatgaaggcaaccatgtggtccttccaagaatggactcgggaaggttgcatattagtatactatgtgacggctaccctagtaagatttcctgaagaaatcatcaacaattgttcatttttgagtat

SEQ ID NO: 175679 - DNA, 408 bp, Glycine max
cgcttccataggaatgtaatgtctatgtctcttcatttccaagtaacatagagactattttgagggcgctaatctagtgtgactcgctaagcctgcaccgcgcgcttatgtgagactcactcatctatgcgagacatctactgcttaacgagtgatatgaatattatacatattctgacatgtattcacacgctaatcgccaatcatctgattaaacgataagattgtcttttctgcgctagtctcaagattggcgctaagccttattacacttactctcgctaagcgctaatatggagattatcgccactttgaggacaataagccttgattaagctatatatagctgaaagggatttgtagggtaagaacaactactcgagcctattgcatagcgaataacgatta

SEQ ID NO: 175680 - DNA, 397 bp, Glycine max
  unsure (1)..(397): unsure at all n locations
gatcggtcccttcaaggaccgccaagactatttctacaagcaagggcgcgacgagttcttcatgtcccgcatccaagaataccagtcaacggtcttccgcaccaacatgccccctggccccttcctcgcccccgacccatacgtcgtcgttctcctcgatgccaaaagtttccccgtcctcttcgacaactctaaggtcgagaaaaaagacgtcttcactggaaccttcatgccttccaccgaactcaccggcggttaccgagtcctttcttacctcgaccccttcgaacccaaacacgctctcctcaaacaactcatgttcttncttctcatatcacgtcgcgcacacgtcatctctgagttccacgcgtgctacaaagaactcttccacgccctc

SEQ ID NO: 175681 - DNA, 411 bp, Glycine max
  unsure (1)..(411): unsure at all n locations
attctgcatccatggaccatgttggaattggaagctcttctatctatctctattctctaatctttttcgcacaagtcatttctttctacttccattcaccataacgaaactgcaagctactagtacatacatacataattcatctctctcacactctctaatgttctctctctgtcccctaccactacgcataacactcatccaatataatattctttgtatctcaagcggtggaacactcttctccaccagtacccccatccatcttcttcttcttcttctgtccaccatacatagtatttggctatgtgtattatntatcatgttcattgcgcagcgaatatttggaagtgtttgagtgtggatcttctgatgctgcttcattataattatcgcatcagtttcagtcca

SEQ ID NO: 175682 - DNA, 488 bp, Glycine max
  unsure (1)..(488): unsure at all n locations
catgcacgcttttcctctagatggagtaaagcaagatcatctgccatcattaaattacaattaactaaaaccgaaaactaaattcatttttattntaatcacaaaaaataactcacaattaactaaaaactgaaatcagattcatttttatttcaagagtttaatgtctaatcctttatatttacaaaacagttaagaccgctggagaaaaaaatcacaattaactaaaactgaaaccaaattaattcatttttattttaatccgataaaaactaaaatagctagaaaaaaaaaaaaaagaatgccacaaccaaaatggtatgaaatttaacgctgctgaaatttctcgttntgccccttttccattagtttcccaagaaatcgacaaaaacaaaataaaaattgaatggaaaattcanaagagattctcattctgcaacaacaaagtgaanaatatctntacctttacaacgagagagcatcgaact

SEQ ID NO: 175683 - DNA, 426 bp, Glycine max
tgaatagaaaaatattagaagacttaatatatttgttttatagaaacgggtctatctatactagtagcttgaataaaaaatctgaagagaaaaatatattttaataatttcacatttgaataaccatatttatattatttatgaatatttttttttttggaaaataaaattcaaacttaataatgttgagttataactagttaaataatcaatgttttattttctcaattcctattgaaaacgatttaatttgtaatcccgacaggcctacgtcctatagagtgtcgtcaaagcattccttatagttaatggcaaatgttccagaagacttagtttgggtagagttcttattgatcaattatatttgcctttgagaagttttcacacacactgtttcattcctatcctttataaagttttttcttt

SEQ ID NO: 175684 - DNA, 409 bp, Glycine max
  unsure (1)..(409): unsure at all n locations
cacctgcngcatgcaagctaggccaggttctgatgtgagatgggtcacaggtggccatgtgtcatccttcattctccacaatgatgagtntcgaagagccattaaagatggtcttgatagattaccatggaaagagtctcatttgtgataaataatcctattgcacatgaagaggaaattactntttcattgttgattgtacagtggtcctgtccatttctaatactcacctacacttgtaacatgcataatngatttcatatcttcatatccaaatggagagggaaggagtngtaaattgtcatcaagaaaatgtacattgaagttaaagccatggggatagaagtttgtgaaaaactgataaattgttgaatgggaatttacgggtctgatctgtttaagttttact

SEQ ID NO: 175685 - DNA, 434 bp, Glycine max
  unsure (1)..(434): unsure at all n locations
tttgcgatgcatggtgaaataaaggaaggttcaattgcatatgacagggatacaaatgaatcacggtaaaagtagcaacatactgtatttgtatacaatgtttaatagtctttttaatttctgtaagagcagttccaatgcctgacagcctgagaaagatagttgccaattntttagagcaacccactttatcatatatattcactgatggagagataccagtgcttgtttctgaacaaaactgtatattcactgtagcaacccaaaaaggtgcagcttttcattttttttaaagaaactggttgatgtagtctatagagcagtggttatatatagagctacatctatatatttgcaacagtcatatagagaaaaatctgtattttgacagtccaaaaaaaatttctttcaatattatcaatgtcaaatatctc

SEQ ID NO: 175686 - DNA, 392 bp, Glycine max
  unsure (1)..(392): unsure at all n locations
agcttcttttggaccttgatcaancaattttctcctctntcagaaccatgctacgtgctcgcgactggtctctttcttccctccgcaacttgagttcactatngctaccccatagagctccgcgaaatttgttccggccatactcttccttgcgagccctctnggtctcttgttcaagggctcttgcggtaattgcattctcttcccgtaacccggcacactccttccgaacgtgtgtagcggccaacttgatcttctccttggcaagttttgcctttcctaactcgcttttgagagcttggacttcttcgtcctcttccggtgcttcaaaactctcttcgctgacgacttttaacttggcgagccaatctaaacctcgtatatgaactttc

SEQ ID NO: 175687 - DNA, 281 bp, Glycine max
ctttcataaaatgccttgtggaatcgattacatggctgttggttatcgattactagtgacaagttttgattaaaatcaaagatgatcttttcgatggttctctaatatctctcacgttatactttccaatggtttcttgcctacatgataagcctttaagcacaccttgccttatttaagccctgtattacttttcatttctttaaatcttgaactcttgacatcgtctctttacttttttgcaaaactgttgatgtctggttcaaacctgtcttcacaaa

SEQ ID NO: 175688 - DNA, 469 bp, Glycine max
  unsure (1)..(469): unsure at all n locations
agctntaactgtaattataactagtatnttatgtttaactaatgttttaaaaattggactgacaatngaatcgggagaaaatatttgatcaaggtttattgattcaaccgcagttaaattgtgattgaactagtaattgaatctgtacttttaatttatttaataatttaagtaataaagtataaatttatgagaaattgggatataaaaattataaattaatataaatgtttatgtattttataagataaatattaataattgacaatgatttatatttatgagaaattcttaaacgtttatattatctttaaaacttttagattaagttaaaaatgaaaggaaatgtttttttntataaaaaaatacacgtatttcaatttctttttttgcatcggttntgtattgggttttactcattttggatcgatttgagcaattctttatttggtatgaaatgctcggattt

SEQ ID NO: 175689 - DNA, 449 bp, Glycine max
  unsure (1)..(449): unsure at all n locations
tactaagcttatttgatgatgcanaagactcaagtcgagaatctagtattaagcaagtttcaataatcaaagtcattcaatcaagaatcaagatttaagtgaagatttaagagaagactcaagatatgcaagaacctcaagaaaagcatcaagataagtattgtcataccctaatttcgtccggcgattattatttgatgatatacaacctttgattggtcgcttcgggacacttggcgtccttggttgcacaatgaatgaagtcccgagacgtgtcagaaatcaaaaggaagcaggcttgcgcaatccgtgaaattccgtaatgtgacggaaatcgaaaagaggtgtttngcgcaatccgtaagttntcgtaacttcttcgaaagctaatatagagtaaatacataatccataatgatttgtaacctgcggaaggaaataagatcgta

SEQ ID NO: 175690 - DNA, 450 bp, Glycine max
  unsure (1)..(450): unsure at all n locations
agctattccaaagaggtattctgcattactattaaactcgatccgntgtcgataagcacctttgcgacaatgtggtccatacatctcaccgacacatgtagagccttgttgtgtcctttcccctcaacgggaatctcttcttccgtaaacgcgatgtagttgctggaggttatatgattaacgatgccttcaaaaccctccactgagatatcatgtgctacatgggcatcgttaagaaccttcatcaacagcgcacgatgaggctcggagtttatgagtagttctagcaaagagatccttgcaggagttttattcagtcgctcgactaccttaaactcgctttgttggataaggcggaggaactcatgggcctcttccatagtcacggttgttccttgaagtccctctttcttttcgacttctcttgccatggaaggatctacttccttc

SEQ ID NO: 175691 - DNA, 324 bp, Glycine max
atctcatcaatcccccaaccatggcttctggattaaccgtcttgatggcagcatcaattgttttgatgatgatggtaatcctcttttctgaatcgaaccctcaaaatttcttgattggttgcatagaaaatgcacgaaatgttctgtgaaatttgttacttattgttgttgctgttgtgttgatcacaaaaaataatttgaaaagttcatttattttctaagttgaaaaacataaaaaattgggggtcttggaactttaagaattaatcgtctaattgtggatatgaagtatatttcgtgtctttgtggatgttgcttttggca

SEQ ID NO: 175692 - DNA, 445 bp, Glycine max
  unsure (1)..(445): unsure at all n locations
agctaggaacataaaaattgaatcttatgtctccccaatgacttagtctaaatatctgcaatttgatcattaaagctaattttttcagtactaatttccttagttaacaacttttctcaaacaaannagctgtcaatttctatgtttggttctttcatagaatactgnattagaagcaatatgaagtgctgcctgatcatcccaatatagttgcatcagctaaacttcacaaaattcaagttcttggagttgtttgacccacatcagttcacaagtggctaaagtcatgttcctatattcagcttctgcactagatagaacaacaacattntgtttgttactcttccgagaaataagaattcctnctatgaatacacaatatccagtagtagagcgcctgtctataggagagctngcccagtcagcatcacaatacccaataaca

SEQ ID NO: 175693 - DNA, 326 bp, Glycine max
  unsure (1)..(326): unsure at all n locations
atttcacaaatgataaaagttgaaaaaatacacacccaccaatgtctctgtttatagcctaagtgtcacataaaattggatggaaatttgaatttttatttaaatttcacttgaatttgaatttgaatttgggagtcaaatttggagccaaaatntcaataattatgattagtgaattttagctatggttcatcccactaatccaagattaagtccaagattctcaactaagtgtgcttatgtgtcatgagtcatgtanagcatgaaggacatgcacaaagtgtgactatatgatgtgacaatggtgggtacccaacatatgttac

SEQ ID NO: 175694 - DNA, 377 bp, Glycine max
  unsure (1)..(377): unsure at all n locations
ttatcttaacataaggcatgcgaagtgggtggaattcctagagcaattcccttatgttatcaaacataaaaagggaaaaggtaatattgtagccgatactctttctcggcgtcatgcattactttctatgcttgaaacaaaattgattggtcttgaatgtttgaaaagcatgtatgaaaatgatgaaacttttggagaaatttttaaaaattgtgaaaaattttcagaaaatggtttctttagacatgaaggctttcttttcaaagaaaacaaattgtgtgtgcctaaatgttgtactagaaattngcttgtttgtgaagcacatgaaggaggtttaatggggcattttggggtccaaaagactctagaaacattac

SEQ ID NO: 175695 - DNA, 441 bp, Glycine max
  unsure (1)..(441): unsure at all n locations
agcttgtaatttctatttctagaccanaatccaattattaacatctaggtcattaataagttgaccattatttgactagagaattttctttgaattatccttattctttctagactttagcttaaaaacttaaaagtttaaccatgcctaagtatcctatggtagcatttttttttttaccatttcaacagtttgaaaacactacccaatcagacgacaaagaaataacattgtcttgcacacacatggaaaattgggatgttacaaaaagccacacgagagaatcatatcttgattcgttcgtttcaagtaaatttcaagggcaaattttcttttaaggaaagggaaagtgtagcattctttttttaaagaaatatatntataaaaatatattagntnntattaaatattntttggttttggtcttttaataataataac

SEQ ID NO: 175696 - DNA, 237 bp, Glycine max
  unsure (1)..(237): unsure at all n locations
ctttatttcataaaatgctattactaacattttatacacacatgcangaattatgaagggatttaacttcaggaagataagggcctcaatggcagagtcctgtaatctaagcatatcaccatcaattgctgacttggtgaaaccaaagaaaaggaagtagttgttaacagaattattatgtttaggagaaacagttcctccacagggcacaccatataaaaagaccaagggtgggta

SEQ ID NO: 175697 - DNA, 415 bp, Glycine max
  unsure (1)..(415): unsure at all n locations
tttcttccatattctttatttgttatttgttcaaatgtntctttttcttttggcttaacattattttttttcattttgctattgcaatntgagagaagagaacttcacccaatatatgttacttaattagcttacaatactgatgtttttgtactcataagagatggaagttcatcatccaatgaatttggccaaacatagaaagtgaggatcaggtgcatcacataattaacaattaatatcttatatatatatatatatatatatatatatatatatattcttttatcgggtttcagnttattattattctatctttggttttatcattatcattcaactacttcatatatggtattttattttcctttttgactatatttcaaataaataatgtatctaattttatcctttc

SEQ ID NO: 175698 - DNA, 323 bp, Glycine max
tccatcacatgggcacgaatgagcatggtttgagctcaagaatgattcccaaattgaacgccattttgcattataagaataaacaaacattaaaaccttgtggagtgaaactaaatcacatgtcagttgaaaaatcaatggaccatggtgttgctcaaaacgctcctttagatcattccaaatagcttttgttgaagaacaatgtagaacactaacatgcatctcctttgaaagggaatttagaacccaagaagaaacgatattatcattgtgatgtcaaagcacatagttgatgtgaccaggaggatgttcaagaatggaac

SEQ ID NO: 175699 - DNA, 405 bp, Glycine max
  unsure (1)..(405): unsure at all n locations
agcttatcatttcaatttcttactaagtgatatggatcattttcaaggtctaacgccttaaaatgatcaccttttaagtaaaaaagaatcacttgataagaaagaactacgtaggtctgatttcctcatcgcaattgaggaatacgtaggagcaaagggaaacacccttgtcgaccacaaaaagagaaaaaatataaaaagggtataaaggatataaagacataaaagggaacgtaaaaatcaaagtcatgtttgcacattcgattaaaggctgccgtcccttgtgacggacgtgtggggtgctaacaccttccccgtacgtaaatacaactcccgaacctttcacttaaaagttcgtagatcgcgtcttttccggtttttctgacgttttcctcanataaacgt

SEQ ID NO: 175700 - DNA, 477 bp, Glycine max
  unsure (1)..(477): unsure at all n locations
tctacttatgtggcagggcgggcttacttcactttcttgtctccttctcgagctttgaccaccgctcttccttcccgcgatgcttctcttcatatccgcctgagtgggcttatagcctaaaccatacttcccacgatttcctttggcatttatcaggctagttatgccgccgttgtctttgcctaaacccattttgggttcgtaaccattccccaacaaaactcgggccatcattactgctgcatcggacaggcaagcttgcccagagaatgagtccacggaggaaatgcttaccacctcaaaagactggaaagcagtttctaatgactcctctgcggcctccacataaggcatagaggatgggcagctcaccaagatgtcttcctcacctgacacgatgaccaaatgcccctccactacgaatttcaactttnggtggagtgtagagggcacaactcccactgagtggatccacgg

SEQ ID NO: 175701 - DNA, 474 bp, Glycine max
  unsure (1)..(474): unsure at all n locations
agcttctagccaaatggacttaccttgacttaattcctttgtatagccctttgagccttgtttccctttccttgttntgtagctcactacaagccttaagtgaaaaaccatgatatcaccatatccttaaggaattttggagctttggaattgttttgggaataagtgtgggggttttttgtttcatttgataacatgttttgttggccatgcttcatgatatattttgagccatacttgatgtacattgcatattggttaaatgttggacatgctgaatgagatgttgtttctcaaaggctacggagtaaaaaaaaaaatcagaaaagaaaaagaaaagcagttaaagttgagtgaataggatcttaaatgacaaaagaatgatgaggctctnggttctactctttatgtttaaattntatctntacttcnttttattttcttatntttttcttaatatgcacttattcccca

SEQ ID NO: 175702 - DNA, 402 bp, Glycine max
  unsure (1)..(402): unsure at all n locations
gagtatgagaaaatgaaattgtatcctatgatactattacctaaaaacaaattatttgataccaatggagcaaatagcaacctattgcttttagtatttaaatgttaaagttatatgggtaattaagtttatgggcaattggtgtgctcataaaatgctttgaatagtaaatcatagtcatgcaaccaatacatagatattgcatcttgatgatagtggcaatctagatttttattttgtctattctaaatgtttgtggaaacttaaaaaattgataatgttatgtacttacagtttttgtttttgcaggtgttactgctatgaattactattattattattatcattgagaaggatttaataacacactcaaanacatgtagtctttactaacaaatgatg

SEQ ID NO: 175703 - DNA, 463 bp, Glycine max
  unsure (1)..(463): unsure at all n locations
agcttatgtgaattgccaggcataagaacatataaatggatgagagaaatttaatctatcataaaatnttccacttaaaanttgttaacacgaaaattaatagctaaacatagaaaaaaaaatgtttttcttcattttctttttctttttaaatgaggaaacaaacgtttaaattaaatctagctaatacctttagaaaactagtatagtactccagtagctagccaccactagctagctagctcagctctaaattccttaaactgattctaagcatgaagttatgagtttattattttcaagttggtccatccgcagctaaatcgatgcatatatatagaattttccgtagaaacgtgatacagcaagaatgtaagaaactgaaaagaaaagcgcacacagcggaagacaataattgactaagaaattaatgttaatcactctccatgtcttataattgagt

SEQ ID NO: 175704 - DNA, 425 bp, Glycine max
  unsure (1)..(425): unsure at all n locations
atttataatatatacacaatccataacattttaacaatttattgatcttacatgcacatcaagtacttgagttaggaagatcaatcatttagcaatataaaccattcatacaagtacctgagttatttggacctctgccaacaaaggaagggtgtaaactgtgaggacgataaaccaaaccccatgagttgtccttctccaacataggaagctgaacaggtgaatatccaaacatcacaggcaaactcccattactcacagattgggctcctgagcgttcaccagtggcagcagtatgcatcacatgcatcactccatgtatctgatggctnggtaccccaactgagctggactcttttactgaagggtaaggtacattcaacatatttacaggttgaacagaatatgaagcaccatatgtcatg

SEQ ID NO: 175705 - DNA, 377 bp, Glycine max
  unsure (1)..(377): unsure at all n locations
agctntagccttaggttgttccatgttgctgctcccttatctntaacaatggtgatgaaccacattagcgantttggcgagtatccttcattctttcactgccacatcatgtcgtgcaggcttctgtggaatgatttggtggattttgacgatggatcaaagattcctctgttcttggagggatttaccatcgacatcaccagatctaatagggttctgattctcaaaggagttctagttttcttccccgacatgttcttcaattacagggtgggtgttcatggcatcagtgatgttttaactacacaagacaatgcactttgcattgatggtgatgacgaaaaaatcctattgtgtgcatcagatgaaagaaaaac

SEQ ID NO: 175706 - DNA, 467 bp, Glycine max
  unsure (1)..(467): unsure at all n locations
tcttcttccatggcttattccttagtggatggtttctctctcacctcttctcctttgtcttccgctgcatctccatggtggaaaatcaccattaaaggacctcattgaagctcaaagatccagcctccatataagccctacaagcaagcttccatcaatagtttcattcaaagattcattggactctattggaatgattgtttatgatagtgagtcattcatttcaaggaaataggatatctatgactattattctttccaaaaaattcatattgtgtccttatcatcttgagtcctcttacagaagaagatttctaaagattctgttggacaagtggcctcaataacttataaggggggagtgannataagtttaaaattttcccgttaacaaattttaaccccctcttaaatgatatatgatatgctcagaatgcagaagacgatacacaatcaatttaataata

SEQ ID NO: 175707 - DNA, 381 bp, Glycine max
  unsure (1)..(381): unsure at all n locations
agtcacctgcggctgcaagcttgaatcgatacacatatactgtattctattaccagagcagantttcagaanatattctcaacagtcacatctttttatgtggttcttgaatggctatcaaaggcctatatatatgtgacttgagacacgaatttgctaagagttctttggatcaaaaaggtcttatcctcttaaaaagcaaaatcgttttatcctcttacaaattccttggccaaattacttgtgattcaataaggaattatttgagtgctcaaattgttcaatctatctctttcaagagagatttcttcttttcttcttcttcattctgaaaagggattaagagaccgagggtctcttgttgtgaaagaattctaaaca

SEQ ID NO: 175708 - DNA, 337 bp, Glycine max
caatttcgagcctctcgacatctaatgcgatcgaatctgacatccctgtgaaaaagtataaccatttgaatttctcgacagtttccgatgttaaattttgagcgtatcgatatattataaacccgaatcggtcctcagtgtgaaaagttatgaccatttgaatttctcaagagcttcggttgttcaatttcgagcctcttgacatattatgcgcccgaatcggacatccgtgggaaaagttatggccatttgaatttctcgagagtttccgatgtttaatttcgagcgtatccgattattgttagcctgaatcggacatcccgtgtgaaaattatga

SEQ ID NO: 175709 - DNA, 415 bp, Glycine max
  unsure (1)..(415): unsure at all n locations
agcttatccaaactgaaactataacanatttgtcagtgccaccaacacaaagcanagacanttggcatattcagtacacaaatcaaagtgatcaattcataaagttataagataaggcatgtcagttacattaataattccatccataaagggtttacctagagttgcagatctgaaagtggtccagccatcaatgacacttctgttgccagtaataaatgtgacatcctttccatcgccaagcagaacaatattggtcttatagcttgggatttcaacattttcctcgtacgtcccttctttgacatagattactgtcctaccaacactgttattcggagcaaagttgatagcctcagtgatggtgctaaagttcccagttccatctgcagccacaacaagctctcctccatca

SEQ ID NO: 175710 - DNA, 456 bp, Glycine max
  unsure (1)..(456): unsure at all n locations
tgtggaatgtgaccaatgattctncacttgagcatattcactngctattcgtgataagtcatcatgggaaaatccaaccgctgatgaaagtgagtaagcatctacatatctcttcacctatgcaaggagaaaagcatcattggaatgactaaactatctccctcacacactcccctaagtaacagcttgtatcattattggttgccataaataaacacccaaaaagagatggttgtaaaacccaagatttccttaaagtaaagtgaagccattgtgaaaacataaaaaggctagaatgtaacaatgtgaaactaaatttacttacattacaaaaatgtcaaagcattgtttataaataaataatacatgcattgacactaacatcatatagatcttttacactatcattcaatcacanaccatcatgtatggtnaatttgtaaattttataataac

SEQ ID NO: 175711 - DNA, 457 bp, Glycine max
  unsure (1)..(457): unsure at all n locations
agcttattaaaaaattgagtacctagaatggtctgagaagaggatggagaacaagaagtgcatttacagtactccatttggtattcaaaccactggtaagattggctattctgaatagcagactgcaaattaggcacaagctccggccaaaattctgcttaacaaaatcagcagcagcaatggcacgaaactgcaaccacaaaatcactcaccaatcaaattcatatatactcatacatacttagccacacacacacacacacataacacacacgcagaaattagaacaaaacacagttcataagaaactagaaagcagaatttacatgcataccacttcgactaaaattttgagaacagacaactcgacttgaagcaatgctcgcatcagctgctccttgaactccttgcttatgttggaaggctngacgtcggtgctatcgacagtgcgacgagt

SEQ ID NO: 175712 - DNA, 379 bp, Glycine max
  unsure (1)..(379): unsure at all n locations
tcatggtgaatcaagaatgattcanagatgttntgatgattacaaagatgataacaaaagatgatgacaaaagtgatgacaaaaagctcaaaggtcaatcaaaggatgagttcaagatgttcaagaaggaatcaagaacaattcaagactcaagaggaaaagttaaagaacacttcaagattcaagaagaaggatgaattcaagaatcaagattcaaggatcaagcttcaagaatcaagatcaagattcaagattcaagactcaagaatcaagagaagacttaatcaagataagtatgaaaaggattgttcaaaaactgagtagcacatgaattgttcacaaaacatgtttaccaaagagtttttactctctggtaatc

SEQ ID NO: 175713 - DNA, 476 bp, Glycine max
  unsure (1)..(476): unsure at all n locations
catgcaagctgtaccttcacaaacacttaaacacattattccattaatgcatcacacggtactctatttgaaaatggatcttttactctgtgcctgcaaggactgctgacccttccacctgatagttcatcgcatcaaatagacaaaatatatcataagatataagtctcaaagttcataaatagagagagccacacagtcaaaataagcaaactaaccatgaatgcaaaaacaaatattgaaataaataataccactattatgtgtagtgcagctttccaacttttgtacctaactgaaggagacttgtcaatcacttgagagcctgtagcagatgcaatactgtaattaatgaagcttcattgtgagaactgtggtaaaacctatagtgacagacaattagtcatcattatacgcctcctcaaaggtgacggaagaaacgtccatangacaaagtctatcatacatttacctat

SEQ ID NO: 175714 - DNA, 460 bp, Glycine max
  unsure (1)..(460): unsure at all n locations
tatcanaagaaatatcacccgtgtttatgcagattattttttcttggttatttctaagatatttattccagtgttgtaaaaggtaacgaatctaactcacgtcacgagactttattatcgtgttaactctaagaaaaattacatagctacaatagtttaacattttcatcatgaattaaaggatcttaagatatcgataatgacaattggcgagcatgtatttgttaccgaataataaacttgtttagcatttgtcttgtctagattgctaatagcaccccatctataacttgaaaaataaaactgacatatataggaaattctttcttatgagacatatatatataaagttacaccctgattatattgttcaaaaaataatgtcttaacttattataatattttaaagaaaaataagtggtgatatgacatatattatgtgtaccatcgatttaatttt

SEQ ID NO: 175715 - DNA, 406 bp, Glycine max
  unsure (1)..(406): unsure at all n locations
tcttctngtcctcacaaacctgaccttatcatgagtattaaagcatataaattaaggctcaggagagattgatcattntatggtgtggctgcaaataattaaccattcaaaagtttttaaaataaactaattatgcatgttcaatcaaaattttgttgtctttcataaaaaaaaatgttaatgggcaaacataacggtatacacaaggggacaaccatttaagcttgatgtcaagcaaaacatcatggcttcaaccccacgatgggtcatgggtgcaacccgctgtctcaagtctctacaaacatttgcacagaagttgttcaattcattgcatttataattgggataattgtatcttttnttttaatggatctatttcgaattaaagcttattatattggtgtca

SEQ ID NO: 175716 - DNA, 443 bp, Glycine max
  unsure (1)..(443): unsure at all n locations
ntaatattattatgtctcatcttctatcctagtgtcgattatcgacataatggtcctaacaagactaagctttaatattacagtgtctcagctctagtcctgtgtcgaccaccaacatatgtagtggtcccaacaacatcaagctntgatattataacattaatgtacataataatgaaattcaaatatcaccaaaaaaggtccaaaattgaaagattagtcaacatatggaaaaacaacacataactcacacttccactaacgaaacatattataagattaaaagaactcacaatacccacattatccatttgtctcttaagaatcaaaggcctaagtcctttggttagggatcaactagcaaggaatntgtgtctatatgttaaacaactatgacatagtctntcacaagaattctcatagtcaagtagttcaattccatg

SEQ ID NO: 175717 - DNA, 416 bp, Glycine max
  unsure (1)..(416): unsure at all n locations
agcttcatggatgatgaatcaaattgattcaagntggtttgatgataacaaagatgatgaanaaaagcccaagagaatgatttcaagaatgagtcaagaacaattcaagaatcaagagaaatttgatatcaagaatcaagtttcaagtttcaagaatcaagaatcaagaataatcaagattcaagactcaagattcaagaatcaagagataactcaatcaagataagttctaaattttttttcaaaacattgagtagcacatgaagttttcaaaaaatcttttaccaaagagtttttactctctggtaatcgattaccaatagcaaatattgttttcaaaaagctttcaactgaatttacaacattccaattgattttcaaatggtgtaatcgattacaatgatttggtaatcgat

SEQ ID NO: 175718 - DNA, 319 bp, Glycine max
taatggaaaaaagggaaaaccctttttatttttaaaaccaaaaagcttttctctctcctcactcagccaaagcagaaattcaaaagccttttctctccctctctcacgtagctttcttcttcttcattctccattgaagcttcaagcaaagcttcaacctttggccaccatttctgccccaaatcgtgaaaggagagcatttttggagtcgtgaagtgcgtggctacgagtgggacttcgaaatttcaggtttgggtggacttctttccctcttgattttcgtgggtatggggttttgggagatatgaagggtagtttt

SEQ ID NO: 175719 - DNA, 447 bp, Glycine max
  unsure (1)..(447): unsure at all n locations
agcttctagattagtgtaccaaataactgtttctccagccaagctatcttggaaaaagtgcattaacaacttttcatccctagagtgcgcccncatcttgcgacaatacatcttgagatggttcttaggacaagtcgtccctttatacttgtcaaaatcaagtaccttgaattttggggggatgacaacatccggtaccaagcaaagatccaccatgtccgcgaacggatagtcaccaaagccttcaacaactctcaatctctcctcaaggagatcgagtttccttctttcttctgccgccgagggtggtctttctgtggacaagaatattggttgtgctgtgaggttgtgctgaggcaaagtgttaggtgccggcccctcgacggggatcggngggtagaaatcgacatccccttaggcatactctcgatgatctttatggacctt

SEQ ID NO: 175720 - DNA, 398 bp, Glycine max
  unsure (1)..(398): unsure at all n locations
atttcattgtttgagaagtgaaattgagaatgaggtaaatttggagcaaactctcacctcacacaagtctataacatcaatctaaacttgctcaaactggatgtacaccagaaattccaccgaatcataaattgactcctcaacacccaattttaccctataaatggctctttgttcactntggtcatttgtttttctctcttgcacaacccaagcttcctcataagtcctaaatgacatttcaaactaggattaactcactgtaacctccaaataccactaaatccagatttggccttcaactctaaaaactaccttttccactataaaccatattttactttaaccttgttaacttcccttatcctagcagtttcatatcaattcagacacaacat

SEQ ID NO: 175721 - DNA, 451 bp, Glycine max
  unsure (1)..(451): unsure at all n locations
agctnngtggatatgaagtgtctgaaaaattgaatgtaaaagggcgattgaatntgtaaaacctctatttttgaaaactttaaaattgttaaaaataaagaaatagcctcagtttcggtcaattggatatcaacccggtacccatgtgagtatactctgctaattaggtctcgcattagaaaattaattgtcacctttcaccttttctttctctataaggatgggccttaagtatttgaatcattttgtaaataatttggaaatgaagagacccactttaaagtttgtagtctctatgttttgtattataggagttacggaggttgcttctacttaactatagatttctttacttttttcctccaattntcttttaaagtcctcattctactctgcaatagcaaagaacttaagatgagtcatgagtcactactatccactctctcatggg

SEQ ID NO: 175722 - DNA, 430 bp, Glycine max
  unsure (1)..(430): unsure at all n locations
tactaagcttacagagattntgtaatgacccactaacctagaattaaaatatcttaatgccattaacctatggaattaaaaaaaacttaatggctgagtgtaactgaaattgtggcaaccaaaagtcacccccaacagccaacaagtcagccaccatttggtctcccaaaaggctgatgcctatgttgccaattgggcccttattacaacttgaactaaacctaactaaagcccttttaattgattaacccaaaacatatttttggtcagccaactttacaaggattgggccattatttatacaaactaaacactctaaaaattgagacaaagtggtgtcatttagtcctcctccatttgggccatgatacaactcacaaccttggacttttctcactgaaacttgggctngtattcaaatagtatggac

SEQ ID NO: 175723 - DNA, 436 bp, Glycine max
  unsure (1)..(436): unsure at all n locations
agcttgtagaatggctagacatgatacatgtcanggtttggtttggttcaaggataaaagggatgccccacattatttccataacacaaatgcaaaaatgatgaattggaaattttatgcaaaactggtcatgcatgcacctatgtggacgctcaagtgtcaaattttcatggtcatgtgatgctagggctcaagattcatttcctctattttaaatcaacccaatgtttccaaaatatgttcttttatcaatttgtgcattcatccaagtccatttcgggcgtccggagaatatttcacagcattcacccttcaggtgtagacacgttttttttttcaaaaatcggttatgatcaatgattttttttcaaagaaaangtggaaatcatctcttttcaaaagcatgtcggttnttagctagacaacttattttctc

SEQ ID NO: 175724 - DNA, 297 bp, Glycine max
gaaatatgcttaatttggaaggagtgatgttggtattggacgatggtagaagtatgctaagtttgaatgggtgttcatgttttatagttttttatgctaaagtgctacttctgttgatttgtctcagctttttttctatgtgcatcccatacccagcacaatgccacataaacccaatgctcaagctagcaaaactattgatttcagttacacttatatgctccacaatgtgaagaaactaccgaatgtactcttcccatctactcttttattctgtgacgtatattgcattctata

SEQ ID NO: 175725 - DNA, 280 bp, Glycine max
acgctgaaattgaacaacggaagctctcattatattaattggtcataaatcttaactcggaagtccgattcaggcacataatatatggagacgcacgaaattgaacaacggaagttctcaaaaaatttaaatgctcataacttttaactcggaggtcagattcaggcggataatatatcgagacgccccaaattgaacaatggaagctctcaagaaaattaaatggtcataacatttaactcggaggtccgattcagacacataatatatcaagacattc

SEQ ID NO: 175726 - DNA, 472 bp, Glycine max
  unsure (1)..(472): unsure at all n locations
tctagaatgagatcaacttgatgttctatgcttcttgaatgtgtctttccatgaagaatctccttgggaaagacatctttaaattcctgcaataagggttgaacactangagaaacataaatagttaactgattaaaattatcagtctctctctctctgtcttgtgtatcactccatctctcaagtgtatcactcttcctttttctattcctctgtgatgcctcactattgtctctctattgttctctcttttctctccttctgatttggttatcacacacttctctaagggatagaggtttatgaataattntctggtcatggtgcaggaaagaaatcttgttggtgaagccatcatgcactgctttggtgtcctcttcaatgttggccctcactagtgccatctccatctccttgtcctcaacagtcaaacttacttgggataacctctgaagttttgttgcatggtcta

SEQ ID NO: 175727 - DNA, 450 bp, Glycine max
  unsure (1)..(450): unsure at all n locations
gtcgacctcgctgcatgcaagctntctccccaattttctataaataggtgtataagtgttgtgaaaaagggttcagtctcttaggcacttatctctctttcgaatttgcttggaaaaattgtttccatgaagaaaatctaagccgaggcgcgtccgaaatgtttccgtaaggaatttcgcgaaggtttcgaccgttcttcgacgttcttcattcgttcttcatcgttcttcgatcttcaacaggtaagtacctcgaaccaagcttttcgattcattctatgtacccgtggtggtccacattgngtttcgtgtatttttattctcgttttatttactttttatacccccttttgacgtgcttaaaccattttatttaagtcatttctcgcttaaactaaaaataaaataaatttccaccgatcgtttgaattgtattatccgttaacttcg

SEQ ID NO: 175728 - DNA, 400 bp, Glycine max
  unsure (1)..(400): unsure at all n locations
tggctaatgtggcagatagggaccctctacatatatggtccttttccttgtaaatgggctangcttctttccttcctttctaaggtgacccttctcttgtctgcatgtgtatgctcacaacctataccgaaccttccatggttttcaatgaacctcaccaatcttgccgtgccatcaccatttctgcctatacccattccgggctcatacccatccctcaagataacgcgggccactatcaatgatgcaccatatagacgcggttgcaccggaggagcctccaataagcattattcacaatttctagtgcttcaaaagatgtttccattgactcttctgcttccacataaggtgaagaggatggacaactcactagtatatcttcttcccttgacactat

SEQ ID NO: 175729 - DNA, 368 bp, Glycine max
ctgcaagctgagataggaagtgttaatggtgaaacttcctgcttttattgttgaccacagagtggtacctggagatatgtcgcgggggtcaggagaccttggggacgtcaggtggggtgctattgcccaaaaccaagcttgaccaatcccgacccaacccgggcatagtcggtcagtgagaacctgtgatgtacctaaacaggcgagctcctggcagtcaacagataaaaggaacaaagaccacaaagcaaggaggcttgtggtagctggccagctgtgaaacttgattgatatgtgagatataggctctggtaatcgattaccaagggtgggtaatcgattacaaggcttaaaaatgaagacagggg

SEQ ID NO: 175730 - DNA, 387 bp, Glycine max
  unsure (1)..(387): unsure at all n locations
tgagataaggaagtgtagaagggtgaaacttcctgctnttatttgttgaccacagagtggtacctggagatatgtcgcggaggtcatgagaccttgtggacgtcatgtggggtgctattgcccaaaaccaagcttgaccaatcccgacccaacccgggcatagtcggtcagtgagaacctgtgatgtacctaaacaggcgagctcctggcagtcaacagataaaaggaacaaagaccacaaagcaaggaggcttgtggtggctggccaactgtgaattttgtgtgatatatgggttgtggcctctggtaatcgattaccaagggtgggtaatcgattacaaggcttaataatgaagacaggaggctaagatggtctttggtaatcga

SEQ ID NO: 175731 - DNA, 282 bp, Glycine max
taacgcactgacatagctgtaaataacttgagttcgctaacatcacttcttaatatactaatgtgtttcaccaattgttaacctcagttttttataaataacaaccgatgttgtattatttcccaaattaaaagccctaatctcctttccctctctcaccttgtatatcacaaaatgcacgaggtgtacgccaacgaccgctccgaggaatatatgggccatgccattcatgagctctactggaatcactccgacatcattatttccacactttgcaacgac

SEQ ID NO: 175732 - DNA, 260 bp, Glycine max
  unsure (1)..(260): unsure at all n locations
caccacatanaacccttgcaccttctgtgcaacaatctgaagtaattgaacagcctatagcttatactacaaacatctacaatagacctccttaacctctacagctacaggtacaatcccgggtggaggaatcatcccaaccttatatggtcgtatccttcacaacagctctacaacaacaacaaccttattttcaaaatggtgttgggccaagctgaccatacgtttcttctccattccaacagctacaacaacaacag

SEQ ID NO: 175733 - DNA, 465 bp, Glycine max
  unsure (1)..(465): unsure at all n locations
agctaggtggaaagaacttgtagaggtgggtcatggnngattgaaggataagccatggtggcaaaagatgcaaactcgtgaagagttggttgaagcttccgctatggattgcttcagctcttcatgctgttgttaactttggacagtatccatatggaggtttaatcctgaataggccaactattagcaggagattcatgcctgagaaagggtctcctgaatatgatgcgttggctaagaaccctgagaaggagtttttgaagactattactgcaagaaagagaccctcattgaccttacagttatagaaattttatcaaggcacgcatctgatgagttctaccttgngcagagagatggtggtgactactggacatctgatgccgggccattagaggcctttaagaggtttggaaagaatcttgaagagattgaanagaagcttatagagaagaacaatgatga

SEQ ID NO: 175734 - DNA, 344 bp, Glycine max
tcgtgtcggtattgattcttggtgtaaccctctgtaccttcatgtaccgctcaattggatacatccaccgtaaaaaagatgaccatataattggatctccctcaccagatgaacaattaagtgaaccattatgtcaaaaaatgatggaggaaatacatctccaattgacaaaggacaatggtagcctcattctccaaatcatctaattgttgagggtcaataactttgctacagatagcattataaagaaagcacaaacgagttatggcaaccctaactttgtcatgcaagataccccatatggctacagccaatagttgttgcattaacacgtgacaataatg

SEQ ID NO: 175735 - DNA, 465 bp, Glycine max
  unsure (1)..(465): unsure at all n locations
agcttcgttccttatctccaaactccatgaatatagattcatattcttgctttatcccaaaaagctntgatttttgcctccctgttttcttctacgttttctttttacctgtatttgcatttgtatgcgttttttcggattttttttcactgcatgtagtttaaatgttctaaagcttagaactttggttttttttgctttcgtttcagatttgtgtcaatgtaacaatttttggtttttttcgaaagcaacattaactatgtccttatatattccttggaatagttagtcacgcacggnggagtagccacaatgtcatcaggatgatattatcggtttgcaattntccaatgcattctattttttattntgtggttgggttagggagttatttgaaccaatttgcttaacttcaatcctctttttgtgtgacatcagtgagaatgacttctantttgttttcac

SEQ ID NO: 175736 - DNA, 366 bp, Glycine max
  unsure (1)..(366): unsure at all n locations
ngctctanattacattgatgtttgtatttatgggaggatgttatatgccatttttgctttaagagtagtgtcccactggtaaaattaactttccaaatgtttgccttcgcaggaatggccccgatgaagcttgcctcaaagatgtccaggaaggacaaggcggccgaaggaactagttccgctctggagtacgacagtcaccgcttcatgagcgttgtacaccatcagcgcttcgaagccatcaagggatggtcgtttctccgggagcgacgcgtccagctcatggacgacgagtatactgatttccaagaggaaatatggcgccggcggtgggcaccactggttactcccatggccaagtttgat

SEQ ID NO: 175737 - DNA, 452 bp, Glycine max
  unsure (1)..(452): unsure at all n locations
gatcccagagtcacctgcggcatgcaagcttgcacccagctcgttcagcgagttgtgttgcttcctccagaagcaacagccttctggaggaatcttctggagggcccaagtgggcctggttgctatttgcacccccatttttactaagtacaccccctaccttttttttggtgattcttttttcgtaaagttacgaaaacttacgaatttcgtaacaatacttgttttctttccgcaatgtaacggaaccttgtggattacataatcatccccttcttgacttacggaatattacggaacctcactaattgtgcaacgatgcttccatttgatttccggtgtgtcacggaaccttacggattctgcatcaatattntcttttgttttccggcatgtcccggaatttacaaattgcctaatgatgggtgccaagcacctcacaaggaccaaac

SEQ ID NO: 175738 - DNA, 446 bp, Glycine max
tcagcttctatatagctgaaccattttatcaataaacacatgttgtttttattcagaaaattagagtttatctcttttatcttagtgagagtgattctcctaaattcttgagtgattcaagaacaccctggctgtatcaaaggactttcacaacctttgtgtgttgccctcgctggaaagagtgattctttccttcctatcatctccacccttgttctttcaaaccacaattccagaaaatccacctctgcccaaaattatctcgtgaccataactcccatttcacacactcaaattaagtgattcttgagcctaaattgaatttcataacgagacctttcacctcgttgtggaatcacctcatttggagccctgtagcttccgttattgccatttctatatttctgtccagccaccacttaacctacgttttaccatcccattca

SEQ ID NO: 175739 - DNA, 412 bp, Glycine max
  unsure (1)..(412): unsure at all n locations
agctngtacttggctcatctcctatcagatcccttgctagaacaaacagtaaggtatcaatataaacttgttccccaagtaccaagtttgagtgttatagatatgatttgatcacaataaataggaaaatatctcagctgataattagggattatactcattattagtcattatgtttccttatattgtactcttgattcattataaatcagaataacatgtgtgacacaactacacaattgcagtaagtagcattgttatatggtatctaaagcttaggttattcttgacagaggaataacgaaaattgtgctctacttgtcccaatggacctctatgctaactatccctcttttcggcgatttttcccattttcgccgcaatgtcccctttgacgnaacactaacacgca

SEQ ID NO: 175740 - DNA, 429 bp, Glycine max
  unsure (1)..(429): unsure at all n locations
tgtaatggtaagaaaagagcaacacacacagtcatctattatgcagcaagtaaaaaaaanaactgtaagtacaaaataaaagtgtgtgtgctgctaattaagaaaaagaaaagctaagtgaggaaaagaaagtaatagagctggaataaaaagaaaaaggtttatctaaggatgaatgctctcctagaacctaagcttttgcatcctagaaaaaccatgaattgtttgcagcccaacctcattacaagcctagaaaagtccttcggattcagtttgtgtgttcttgactgtatggcatgagatgaattgcaaagattgagacttgtgttagttgttgattgttgaataagcctaaacaattgtgcttgagtgaaatagtgatggtgagggttnggttaatgatccttccttgatatctatcattcttac

SEQ ID NO: 175741 - DNA, 422 bp, Glycine max
  unsure (1)..(422): unsure at all n locations
ctgcagctagaagcaagttaagggtttattttactttngtatcctatgccacacctttgctggggatgaaccaatttcttcatctccctgagtgttattccaattggcactttctttcttcaaatgaccaagctcgctcaacaaatattcagcattgatgtaatggcattccatccgagtcttccagaaaaggagttccacaaacaagaggggttgctttttcattttctttagcatctttttgaccaaacaagtagagaaaaggatcaaaatgtaaggacatcaatgctgaatttatagacaccttgaatttataagatataaagtagagaaaaggatcaaaatgtagtaaaatcttagttggtatactcatatttacatctaaataactatacctgcatagtccttgcanggacatcaat

SEQ ID NO: 175742 - DNA, 383 bp, Glycine max
  unsure (1)..(383): unsure at all n locations
cttcatcttctttaccttttcaatttcaatttcattttctttttctttggtggtaattatttattatttatctgggtttgtaatggtttgaatgtgtgattttgtttgtggtttactgtggaaatatgtgctgcagattgacgagcatgtccagagggaaatcatgaaccacagatcattgaaacaccccaatattattagattcaaagaggttagtaaaagtaaacttatgctcctaataatgagtaaaaggatatcttttattntcagctaaatgataaaattctggcaaatagtagattcgtttttggtcttcaagactccctactattggaaccgctttcttgtatgttaatccgtgcttatatgctcatctaatattt

SEQ ID NO: 175743 - DNA, 473 bp, Glycine max
  unsure (1)..(473): unsure at all n locations
cgcttcaagaaaataaaggttctaaagtgtgtttatctaaactttggtcagcatcaggctgcttgggagagcaatggtaacaccattcaatttaacaagtgtctttgcaaacaccctacacttcctcaggtcatcttaactccatcgctccacttaccaccttttagagaatcccgctggaagatgaaataatcaattctaaagtaaattgatatacaacagtgattaacagttaaaattttacttcaaccgacgtaacggaatccagatcatttgtcatctcaaaattcaggttccattaatattgttcaaagatgatcagataaaaatatccaattaagggagcatactcttctttttgtaagtgctgttcaactataaacaattntagggtgaggctgcggtgattctcgtgtattatactactcaagctattcaacacgaacatatggaaatgatattaaaattaccat

SEQ ID NO: 175744 - DNA, 457 bp, Glycine max
tctaaagttgagaatcagcaactgttttctattaaaatctatgttaatggttggactatctttcaccttttctttgcagatgatttcttttcaccagtgcaaagtcttcccatgtgcgccttgttagagaggttctttattctttctatttaactttagggatgaagataaatgtacacaaatccaggtttcttccttccaagcatgttcctagagccaaggttcttaagtttggagggatgttggagtttcaacatatttacaatattgggcgatacttggcaaattataggggtgcatcttatattcttggtgagtcaaattatagaggtgcatcttatacttggcaatcactgattaaagttgttgattatttaaagcatggttatatctatagagtttgtaaggtacatatctctctggatgagagtggtacatatggtgaattatgcgatac

SEQ ID NO: 175745 - DNA, 467 bp, Glycine max
  unsure (1)..(467): unsure at all n locations
gcttcaagctaatctccttaatgtgtatagcatccctcatgtngtaagcgtacttctccaatgcatgccttgattgtaccttgttcctatacatctcatcttcagcnttgtacttctctgcttctgatatcatcctttcaatttctttcttcgaaagccttcctttgtcatttgttatggccagcttcttggatattcccctagatttttcctcggcagaaacatgtaggatgccatcataatcaagttcaaagcaaacgctaatttgaggaacaccacgtggaactggaggaatttctagcacaaacttacccaacaagttgttgtctctagttcttttcctctcaccctcgtatacatgaatcaagatattggtttggttatcaaaatgtgttgtgagtacatcttccatctntgtaggaatgctagtattcctaggaatgaagtacttcatgaatacctcatct

SEQ ID NO: 175746 - DNA, 465 bp, Glycine max
tgttggctccatgcatgtgtttaaagtattccatgctttgattggaggttggtatcctttttatggcgttatcatgtcttgtcaacaagaaatgcatgcacgtatatatagtcattcagttttgtattaacatagcaatgaattcgtcatctgacttgttccaaatgttagaaatcggagcatcgctttaacaactttagttaaagctgtaaattggtgatatcaccaattatcttcttcttcttctttttttttttactgaaatatcaccaattatcctaggactggctgttcaggagaaacattatatcttagaaattcgtccttttttgtcaaaaaaaaaaagtaatggttctctccccaattagaagaagtacttattactagtcaaacttgttgaaacagcgtgatacttctgagataaaaaataaagaacataacataaaactgctactataattaatc

SEQ ID NO: 175747 - DNA, 385 bp, Glycine max
  unsure (1)..(385): unsure at all n locations
gatgatancgatagccacaggggcaatgacgttacaaggcactgtttcttatccatttgattgaaactttcagaaggaacaatataaatgcctttgtggatgataaacttaatccgggagatgaaatatggtcatcacttgttgaagcaattgaacaatcattcattttgctgatcatattctcccaaagctatgcttcttcctcttggtgcttagaagaacttgaggcgatacttgaatgcgataagaaatatggacggattgtaattccagttttctaccatgtggagcctgcagatgtacgacatcaaagagggacttacaaaattgcatttaagaagcatcaaanaaaaaacaatactgaggtgcaaatctggagacatgc

SEQ ID NO: 175748 - DNA, 364 bp, Glycine max
attacatacacaacaccttggaacacaagaagaatcttctcctcttttctttgaattgaaatctggtcctcattgatgtcctttgatacgtataaacttacagaatctctttacgaaaaaactgaaatcatcatcttcttctatttcattcaagtcctctttttcaccttccttttgaatagaagatgaagttttaagtgaaattactttatttttcgtgtcatgttcttcatggtggttaaatctcataagtcccattactgtattcctgaagctatcccaaaagagtcgcaagagacatgttagtgaaatctcttgattctgcaatggcaattacacttggttgtcattacctgcttaaaca

SEQ ID NO: 175749 - DNA, 390 bp, Glycine max
agatgcagcttcaacacccaaaaaatatttgttaacttatgaaaattactcctaacgagatatattttcttatatcataaaagttactatagtaaaaggatttatctttaagtttacttggtaatatggaattatttttacaacatgaaattctatctcaaaaaattgtttttaccatgatgcaatttacttatattgaataaaaaagctttatacatgtgtttagttgtaaatagttcaatctttattagtttgaatttaccatgaccattaaaattgctcataaaaagatattaaatatactattatatactataaactctctttgaataaaattacttttagctgtaattgactatacatttaaaactttttatcatggttaagata

SEQ ID NO: 175750 - DNA, 400 bp, Glycine max
  unsure (1)..(400): unsure at all n locations
gtccctgagtgggagaagcctaagtctggctgagagattatgatttntatgggtttaacaggatattaccaaagattcatagaaagtttctccaagttagacttaactttgaccaatctgactcgtaaaggttaagcttttgaatcggatgcccaatgtgaacatattttccatacctttaatgagaagttgatgaccgctcccatggtagtnttgcctaacccgaaagaacaccgtgaagtgtatggtgatgcatacaacatgggtttatgaggagtgttgatgcaaaatggccaagtagtgtgccatgattctggacaactcaagactcatgagaggaattatcccacccatgatctggagttggctattgtagttttgcccttaaatatggatgcat

SEQ ID NO: 175751 - DNA, 420 bp, Glycine max
agcttgaaggcatgtaacccaccatattctcatagtagaacactggtaacgtgtctactatcattgttatcatctccctctccatcattgggggcgttacttgagctgccagatccttccacctttgttctgtagttgcattatatccgaagccttatcagaattgtattgatactgcctaatgaaggcaaccattaggtccttccaagaatggactcgggaaggttccagattagtatatcaggtgacagctgccccaataagactttcctggaagaaatgcatcaccaatttttcattttttgagtatgcccccattttcctgctatatatcttcaggtgattcttggggcaagtagtccccttgtatttatcgaaatccggcaccttgaacttcagagggataacgacgtcggacac

SEQ ID NO: 175752 - DNA, 447 bp, Glycine max
  unsure (1)..(447): unsure at all n locations
tccatcacctacatgctccaatggagcttacatcatgtggtatcagagcaatctttatctatgtgatgttcttttgcttcctctatctttttgttcggtgaattctctttaattccttgttcttcatcttattctccatgtatatcctccatggtcttgtggtttggttatgtttaaagtagattcaaaaaaaaataaaccgattaaatcttagatctatacttgttcttgcatttctatnggttcaaatttgtagatctactcttgaatcttgtttttgtgttgattntaggttctatcaattttcattcataatattcttgtgttgaacctttagatctaaatgttcttccaaaatattgattagaanataaaacacaaaaatctaagtgaaatcacttatccatgttgcttatagcatgttagcatagaattgcacttatctct

SEQ ID NO: 175753 - DNA, 390 bp, Glycine max
  unsure (1)..(390): unsure at all n locations
agcttgtgctnngtttattattattcctattatcatgagaaactaggtgtgtcctacaatgacttgcgaaacaaaaggtgatcaaataacaagcagagatttaaaaggtactaggttgcctcctagtagcgcttctttaacgtcttgagctggacgcctgatgacttgtcggtcacggacctagtactttgcttacctttggctttggacttggtcgcctattggtcggccatgtgtcgtaggcaatactctaacctttttgtggatgagttgagatgaactctagaggtggtggcggtgcgtttgttgcccgctgccaaccatccctaggctgttgtggtgtttcgccctgcgcccgtctgggggcgcaatacttcttgatgaaagccc

SEQ ID NO: 175754 - DNA, 392 bp, Glycine max
  unsure (1)..(392): unsure at all n locations
tgtcgatatgcacctaatgtactcccttcgatttttttcaacgacgacgaggataacggtgaatccatgcgatggcaatagacgagtaatgaagtccatcgataggtcttcccatactccctctgggattggtaaaagttgtaggagccccgccagtcgtctggtactggccttggtttgttggcaaaccttgcactcccttacaaaacttttaacgtcttggcgtagtcctgaccagaagaaaccggactcgagacgatgagtggtcttcgcgatgcccacctaaaggtgtagcgtggtattcaagtgggagagatggaatgccaaggttgcccttgttcaactagatgcgcncttggaataatatcacgtcattatggatgcgatattca

SEQ ID NO: 175755 - DNA, 488 bp, Glycine max
  unsure (1)..(488): unsure at all n locations
gatccttaagtcacctgcggcatgcaagctnntaccattaaaaatgacaagtntactattattattctttctttctattcttttcttgcaaggtacttttactataataagttgtttttgtttcgaacgaatattataagtctctgaaattacaagcctcttttttttcaatttttttataactgttttttagcattaagatcctttatttttttcaacgaataatttactgaatttgttgattgaattaaaacgattgttttagaaataattagattattcttataaattgttgaatcttttttagtttcgttcaattcatctattttttgaatttaaatttaatggcaggtatattagaattttcttttatatttgataactagaagacaatcatgtgtgaatattatcaaatcattatggaagaacaaatttctctccatcttaaagcaatacatctcatttttgtgatgtggatatattatgtt

SEQ ID NO: 175756 - DNA, 466 bp, Glycine max
ggaattataatgtcaatggtccaatagtaactacattaatgatataatttaaaataagataattatctaaaatctattgattattaaagatgaagttgtttaacccatttatatcttgattattaaagatgaagttgtttaacccaattatatcttgaatgaatttgaccaattcttttttcgaagtgttgttatatatgtttctatactacttttaattaggttattttggttaatgataatgaaaataaaatagagaaactaattaatcttaacaccactgcaaaaatgatatacaattacattcaaagaagtattataaccgtttttgaagccaacatcataaaattttttgactgtccacgacgatttcataaagaatctcattataataatttatcccgcctcataacttgcacatcacacaataataatacttgtatgatacaaaacacacacacacaca

SEQ ID NO: 175757 - DNA, 322 bp, Glycine max
agcttgtgatgatagggactataatatgatttacatgatgtttctgacataatgatggggaccctaatgagaaaaggaggttaattccatctctctcttgtgtgtttgtgtgtgcatgacagaggaggttacctagtcgggagcttcatgtggatcgacacacattatgaacaaaaaggaaaagaatggacaaacacatgtggtgaaggcatgctaaagttaaagagacggttatgtcgggaattgggggtgcggccttatactcagtgggaaagtgttctctgacatctatctacaagctccaatgcattgtccaaggttt

SEQ ID NO: 175758 - DNA, 450 bp, Glycine max
ctcagcttctatttttatgaggatatttgagatgtcgatgttgtttcatgatgtaaatatttgtcattggatggttttaattgtctacctttcttaatgtataatttatttatttattttttaaataattctatgtcatgatttaaatcattcattataaatttcaaatataattcccgtaactaaagatatttattataaagttgaattgtataaaagcaaatcttatttcaatcataatactctaacacaactaccttgaaatggaggtaataccagagagatccaatcaattggaataataagttgtttgatgaatataatgtctttcctcctttggcttcgatataaaatgctgtcctgtcactgacgcgacgtgattacgagtatatttctgtttaattaagtagatatttcataattaatgcaattatttctgtaccaattgat

SEQ ID NO: 175759 - DNA, 350 bp, Glycine max
tgcaatgtgttagtgcttctattagtgagacgatccacctgctcaaacaatgcactatctttcacacatgaagcctgaaagatgcaatcacgtcgatctattatcagtttcctggccggatggtccaaaacctaattataattatcctcataaggtcgaatgaatttttgtttgtcttgaaaaaatacccaccggattacatgacattgtgtcggcataaagatcaatagatactgtgcattaacatgctgagaaatatctagtcattatcgaagctacctgttctcgcttatccatatacttttaatggcagactggtcggtgcttaaatgttaaatcagtatgtctgt

SEQ ID NO: 175760 - DNA, 428 bp, Glycine max
  unsure (1)..(428): unsure at all n locations
ctttctctccactcnttacgcatcaannccattttttttttactttaataatatcattatgtaaatcaatttcattgtgtgtgtgtgtgaaactcattgctaatgtcgnttttctctttcttttttcttggccaagaatgttggtttcaagtttcaacccataattgacacttgttttgttgaaaactatattctcttggcttcaacaaaggatattgattgtttctagaatgatggaaagacaaatttataatggacaaaacttagatgcagtccttaatgctcgtagtgtgttgctctgcaatcatactccacatatgattgaagatcattcccanagtccttacaaccgctctaactctgcccctcaaatctctgaacatcaaatctgacgctcccacaaaaactcatggctccctctctcccac

SEQ ID NO: 175761 - DNA, 307 bp, Glycine max
agcttctcatgatgctgcttctgaatattcgtatctatttgcattgtcagcacccttggttcatccaaatcaataccaccatgttgttgcctcaatggctctacttgtacttgatcactttggacaaaacacattacggtaaggctaatctcgtgatgttccaccattctccatccatagcacaatgcttctctatcatctggtcctccaaagaacaacactgctacttgataaggtacttgatttcccgctagacggttagagccactatagggtttttacccgctgtggaatgcaagaggtgtgg

SEQ ID NO: 175762 - DNA, 457 bp, Glycine max
  unsure (1)..(457): unsure at all n locations
cgcatctaaagtaaatggtgtgtcctctattatntgatttaaagtactcaatattggtccattagaatataattatacatttattttggagtaaaatggcagcaataagattataagattgcatgtaaattatgcaaagatccatcaatagaccaatccttgtgagttggaatctaatgatacataaattcttttaaaaataaattagtttctgatgaatttttcccctccttatttcacatttaatttgctctaaaaatctacttggtggacttcaataaaaaatgtaaaatcgacgtacttctattggtctactaagacataaaacgcagtacataatatctatatgcttatatccacctaataatttattgcatagaagaatgatctttagaagttatcaacaacttatatatgcatataatgatagatatataaagtcagacaaaatagattc

SEQ ID NO: 175763 - DNA, 491 bp, Glycine max
  unsure (1)..(491): unsure at all n locations
gtcacctgcggcatgcaagctntntcttccttgttttgcgttttaattgattaaaatgtatgcataaatgaaacgaaaacaccttgggcttgccttgcagcatgaaaagactccttttgccgctaagctactacaatttaattgtttattaggtgcagttcatgtgtatttataacttttgaaggataaatcatttatgcacaaactgtttaaaattgtgtgtctctaagttatgctgaacatgcaatattatgttaaatattggtatgcattggatttaatcctttaaagtttattacatgttgaatggatatacgtacaatgttattttgaattggtatacatgtaattttttatgattcaatattgagcatatttgcattattaagtatgtttatgcaaaannnaaattattttgaatgttaagtgattaatataattntattaaattagagaatagcacaacatctttaattaagtaaatatatgct

SEQ ID NO: 175764 - DNA, 447 bp, Glycine max
  unsure (1)..(447): unsure at all n locations
tttgatgaatcgacatgattgtgttctcatttctcttagaagagngatatgactatcaatactaaagatgtgggtgagtaagtagttgaaagtcaaccattaagggatcagtgttaaattgatggaaggattgacattcgatcagagagatacataatttatgattcttgagtgcataaccacatatatatttgaagtaataaggtcaatcagatatttgatcaaagaaatacacgaccttgagttttgagtgtgaagcacgaaaaaatttaaagtagtaaaattgatagacatatgatcaaatacatcaatatataactcctcacccttgagtccataagcacaaaaaagnttataatagtaagaatgagagacatattaccacataagcacaatattcatattatatgaagtattaaagtatatttttctcttcttttcactctc

SEQ ID NO: 175765 - DNA, 201 bp, Glycine max
tcaagggtatatgttagcaaaaccattacttgaagtaaagtacttttattcatatatgttctctcatacaatttgaatcttaatgatgaaaccggcatgatcttattaaaatatgccttatgctttacgaatactttaacatgagaatatatgaaaatgtttaactgaccaagaaagtatgttggtaacatgaaagtgaat

SEQ ID NO: 175766 - DNA, 495 bp, Glycine max
  unsure (1)..(495): unsure at all n locations
agtcacctgcggcatgcagcttanaagctggttgggtctcaagggtttacacaaattggtccttnnttaaaagatgagtcaacggagcggcaatctgagcataattnttgacgaagcagcggtagaacccgattaggcccaagaaaccgcgtagggccttagttgttgtcggaggcggccagtggagcatagcttgtattttagaagaatcgggctcgacacctcgacgtgaaacaaaatggcccaagtactcaatccttcgttgaccaaagatacacttggaagctttcaaacggaaatcagcttgttgcagagtacgcaagacgcaatccanatggttgaggtgggattggaggtcactgctatatactaaaatgtcatcgaagaagaccaaaacanacttgcgaatgataggccggaagagggagttcatattatcctggaaagtcgacggcgcgttgcaaagcccaaaaggcatcacgacatattcataat

SEQ ID NO: 175767 - DNA, 328 bp, Glycine max
tagtggaattgatattggtggttccttgaagatcaaggagttgcatgagaccatgaaattgcttgtttgagaataagtgtccttggttctgagattggaagtcttgaaatgcttggtttggatcagtcatgaagaatgatgatgactggggtggtggtggtggtgattgcactccaaatgatgatggtgagtggtgcagatttggtgagattaagtgctcaaactttggtgcacttccaaggctcaatatgctgttagtagctgcttggtggttctgaagctgagcactaatgcctaggctcatgtggtttgtgccatacaaatgatg

SEQ ID NO: 175768 - DNA, 483 bp, Glycine max
acctgcgagcatgcaagcttgaagtgagaaagtgtggaagagtcagtcttcctacttttattcgttgaccacagagtggtacctggaaatatgtcgcgggggtcaggagaccttggggacgtcaggtggggtgctattgcccaaaaccaagcttgatcaatctcgacccaacccgggcatagtcagtcagtgagaacctgtgacgtatctaaacaggcgagctcctggcagtcaaccgataaaagaacaaagaccataaagcaaagaggcttgtgtggtggctggccagctatggatcttgagtgatatctggaatatggcctctggtaatcgattacaaggcttaaaaatgaagacaggaagttgagagggcttctggtaatcgattaccaaggggtgtaatcgattaccaggcttagaaatggagacagtatgttgagttgggcctctggtaatcgattaccaatactgtgtaatcaatta

SEQ ID NO: 175769 - DNA, 460 bp, Glycine max
ctaagcttaatcaccaagcagaaactatacctcatagtttatccacttggttaaaacaacagggcttaaccatcaagagcagaagcaaaacaatgattcaatgcttaaccatccatggaaaaaacttaaacaatgcttaatcaccacagacagaagcttacatcaacaaaatagaagaataacaaaatgtgtcttctatgaggaattttcacaaacactttgtgaaccaacaatattcaaggcttaaccactcatgacagaagctaacaaatgaacaatgcttaaccaccatacatggcagaagctaaaatcatcaaaactagccaaaaaataagccaaaaacttcagaagcatttaatcaaacaccttgtatgcaaacataatatggacactagacatgaagaaacttacacaaacttcatgtggagtcatcacatgaaacattatccaacacaacact

SEQ ID NO: 175770 - DNA, 238 bp, Glycine max
  unsure (1)..(238): unsure at all n locations
atctccatggtggaaaatcaccattgaaggacctcattgaagctcacaaatccagcctccatagaagcttcacaagcaagcttccatcaagtggtatcagagcacaagagcttcaagtaggtgctccttaaacctncattatatttcagctttaccttctcctctattggttgttcttcatttttctccatgtatctcctcacatgtcttgtgctaaatggttttaacatgattcttt

SEQ ID NO: 175771 - DNA, 399 bp, Glycine max
  unsure (1)..(399): unsure at all n locations
cacatataatactcatcttctccgcaatttctataataggaggagaagtgaagtgaanaagggttcagccacttatgcacttgtctctctttcgaatttgcttgaaaaaattgcgtccgtgaagaatatacaagccgaggcgctttcgtaacgtttacgtaacgtttccgtgaggaatttctcgaaggtttcgaccgctcttacacgttcttcatcgttcttcgatcttcaacgggtaagtaccttgaaccaagcttttcgattcattctatgtacccgtggtggtacacattgtgtttcgtgtatttttattctcggtgcatttactgtttatacccaccttttgacgtgcttaagccattttatataagtcatttctcgcttaacctaaaaatgaaa

SEQ ID NO: 175772 - DNA, 461 bp, Glycine max
  unsure (1)..(461): unsure at all n locations
tcatagtcgacctgcggcatcaagcttaggagcttgagcctgagctnctttatatcactgtgctngntatgaaagcaggccgngtactactccagagcaatactgtttatggaagtagtttatgggaactgacttggctgcatataaataatattgctccgccgttgcaatctgaggtgtttcccgagcaagactcagagcatttgcagcacaaacagactgataaagttgaaggtttggggcctgaagaaagcaattctgtgtcttcaaatgaaacagcaggtaaaaatggacctggtattggttaatcatagcagcagccccatggctaccggaatnggtttttgtttgtcttctgaacccatgatctctgtgcttcattgatcggttttctttcgttctgaagttgcttggttctcttgcagtgattatgcacaacattacacatctcattcacatct

SEQ ID NO: 175773 - DNA, 232 bp, Glycine max
tattgactacatagctttataatatcacaaatgatcccttatgctgatactaatatgaacattcctttagaccaatgtctaccattcaacaacaaaaatataaaatggtattttctcacactaaggaacctatttgtattacagattcaatcatgttgacagtactacggctttaatcttggaaaggaacattgagatgcacactattctaatacatcaggagtaccactaa

SEQ ID NO: 175774 - DNA, 418 bp, Glycine max
  unsure (1)..(418): unsure at all n locations
agcttgtcggtgaatcaaattctaccatatcgaccaaaatgggtaaaatcaagggctaataggttatgattattgcgtttacacgactacatgtatatgtgtgctacattatgttatgttatgttgngttatgttatggtgtagttgtagtagttgtacttcttggaacagaaccttcatcccccttctactcctatagttatagatttgtagacgtagaagtgaagaggagggagggggttgagttgggtttggtggatgaatagaatcaaatttgggattagacagttggtttggttgtttgatatgccttacattatattacattacatgtgattcccaagatttttgtcttgtagagtttcatacctatgccccaccacgcatttcatatatcaccatcactttaatataataa

SEQ ID NO: 175775 - DNA, 403 bp, Glycine max
  unsure (1)..(403): unsure at all n locations
ataactctgagactcgtgtgttttccactaagtgtttttacttttcaccttgacttcatgcttagctcgggatttcgcgctaagcacgcatttgggcttcctcgtgggccttctcacgctaagcttgtgttatgtgctaagcctgaacttgtctgctaagcgagagtgcgcgctgaacgagctgtccaattcttcttcaatactttttcttctagatttttgcatcaatttcttctaaagtgcttgaaatcttcttcttttgacttctgctaataaaaaatcgcaaagatgttaaattctgtgttatttcattaaaatcaataataaagtgaaaaaattattatcattattagccgaaaatgactatcanantagcttagattgtgcagttatcagtatatat

SEQ ID NO: 175776 - DNA, 417 bp, Glycine max
agcttatagcactatcatcttatacagtttttgtgatgttaaaattccaattattcatataataagggagagttaagaaagaaaattaacaattcctacataatttaatcccagaatatatttatacataataattatcaaactctcccaaatttaaagctttgtttgtcctcaagcaaaagtaactaattacactaatatagagtttagagtttaccaatcacaatacatgagatagctgcatatattccaaaaacttgattggacaattctcaagttcacatttgacataatttctcgaaaggagcatgaaaaggatgcacttctagatgaatcaattagcaagaatgataagtcacacggatgagtcaccaagctctattcctcacaaggctaatgtttctctcaatccacaag

SEQ ID NO: 175777 - DNA, 368 bp, Glycine max
acacttaaaactcagctcccatagattgcagaacatgggggagatcttttatttgaatagctgtactttgggggcttgctgctatacatctcacactttggtatgagatcttcattcgaaatatttttcctatgatgcaagatgataactatatgcgtaaatctgtttcgtatatcgtgcatggtctcatattgattgattataaacagctcatattcatgtgtgagagtgtttattctagatctcttaacatcactggtaccttcatgtgtaactagtaatgtatcccacatttctattgcattgctacaatctgaaactctgaaatactcatacatgtctaatggtgaagtaactatactcttggc

SEQ ID NO: 175778 - DNA, 419 bp, Glycine max
  unsure (1)..(419): unsure at all n locations
agcttatagcggatcaacttgatccgtatatgtgtattttaattntattaaatgtataacattctttgatatttgagcatatgtttccttctattttactgcacaacccgttgccttctattttactgcacatctttgatatttgagcattcccatatgttgtacattcttttcactgtggtactttatttcccatgcatgaataacatgcctataatctggttaaataatgattggaacgtatgtcctctcttaaggaacttatgttaaacctatttattgtgaaagacattctcttcgattttacatgtgttttacattgtatatacccattaccttagacaatgaaaatactcagttgtgtggtagcttttcctcataatcaatttatcatttcttctatttgtgaaataagtcaa

SEQ ID NO: 175779 - DNA, 439 bp, Glycine max
tcaatggagaatgaaggagaaagataaagcaacgtgaggtagagggagagagagcttctgaaaatgtggtgttgagtgaggagagagagagttgctttttggttttaaaaaaaggcttttctcttttctttttattttatttaagctatgccacatgtctccatttgagtggagcaaaaagggtccactttctcttttgattgtgacccatactcagccacaaaaagtgagaaaaatcttacctttgaaaagctaaaatcctgcctcaatttttgtgccgtttctctagttccagttcctcgcgtttctctgcgtccgtcgaagccagttttctaaaataaccaatatatatatatcataacgctcagaataaaaccccgagcgtgggtcaaaggttggttttgctataatttgagtcgcacacaaaacgatgatttta

SEQ ID NO: 175780 - DNA, 343 bp, Glycine max
  unsure (1)..(343): unsure at all n locations
atcttatttgttgctgtgagcttaatggtttggcctngagcttttctttctctctttctttgctctcttttcttttaggtttccactctctctcacacacacactctgcaataatctctcttctcttcttcagtctctcaactactgcctaaccaaaccttccatttccgcaggcaggttcgttactgattcattttttttaatgtttttaccaaccatttgttctctctctctctntgttgnttctggttcggatagaatgtgcggctcttgngntatatatatatatatatatatatatatatatatatattcacgctctcaaatattcatttttacttct

SEQ ID NO: 175781 - DNA, 452 bp, Glycine max
  unsure (1)..(452): unsure at all n locations
tgtaatcgattacaacttgtgtgtaattgattaccagacatgaaaattcaaatttcaaatctgaagagtcacaactcttcataaactaactgtgtaatcgattacaacagttatgtaatcgattaccagtaaggaattttcgaaaataattctcaagagtcagaattgttcaagaagtttttgaatgaccatcaaaggcctataaataggtgacttgggatacaaaattccttagagttttcctgaacaaattgtcttatcctctcaataccaaattgtcttataactctcaatacaattccttggccaaaactcttggaaattcaatagggaatcttgagtgatctttaattgtaatatctttctcttaaagagagaattcttcttcttcttcttattcaaaggaattgattaagggaccaanggtctcttaagttgaaggatttctgaac

SEQ ID NO: 175782 - DNA, 440 bp, Glycine max
  unsure (1)..(440): unsure at all n locations
gctttatgtgaaaggatgtgactctttatatttgaatttgaatttcaacgttcaaaggcactggtaatngattaccaaaacattgtaattgattacanaattttgaaattaattggaacgttgtaaattcaatttganaactttttcgaaacaattttgctactggtaatcgattacaacaatctggtaatcgattactagagagtaaaaactctttgttaaacatgttttgagaaaaatcatgtgctactcaatttttgagaaaaatttttcatacttatcttgattaagccttctcttgattcttgaatcttgatcttgattcttgagatcttgaaccttgaatcttgattcttgactctaaactntcttcttgagtcttgaattcttcttgattcttatcttgaactcttgaaattgtcttgatcacttgagttgtc

SEQ ID NO: 175783 - DNA, 426 bp, Glycine max
  unsure (1)..(426): unsure at all n locations
taaagaagttgtctcttttacatgctcaactcacctgagtggcatttgtatnggntgttatattaaatggtgcatcttattccatatcatatgtttgtgcatcatgcatcatcattagtaagtgagaagaaaattttctaagttagaaaattttcttcagaagacaaaactcttttgtttaatcgattacaaccttatcgtaatcaattacacaagtgttctaaaacttgtagagttatatatcgtatcagtttaatcaattacaaccttaccataatcgattacagaagtggtctaaagcttgcaaacttgtgtctcgtatcagtttaatcaattacgacccttcttgtatcgattacatgattggttttgagacaatgactgattatttaggagtctatactttaatcgatgacatgtgataca

SEQ ID NO: 175784 - DNA, 388 bp, Glycine max
  unsure (1)..(388): unsure at all n locations
aactattttctatttngactagactcaaagtttgttggtttctaacgtgagaatcaaacaagttctaactgtgtgtttgaataaacatttgcctaatcaattttaaaagaaattgatttcataaaatcggtttcagaattgattttgaagtgaaacaatttattggtgatttttttaaaagcaagctagtagtcaatttttgtaaaattagagttgttcttttaaaggtatttcaactcaattaattctttaagggaagatcaaacatgtgaatttaaatgactcagcatgacattaaacatgcactatgttgtgttgggttttgcattcnacaaggaaaaacttccgtaaagaatcacattanccacacttggttcttgttaacaac

SEQ ID NO: 175785 - DNA, 367 bp, Glycine max
  unsure (1)..(367): unsure at all n locations
atgtgtcttctttgaaattgacgtgattgtgttttctcctactaatgaatctatttaacttctgatgtgtgcttgcaatgtcctgtcttaatttctaatagaatagttctgattgatttggttgttttacctttgagctagattgatgttattcttggtatggattgattatcttccaaccacattttattgaattgctttaagaaatctattgtctttcctgagtctaatntgagtgaacgtgatatngttttatctgctaactatgttgatgcatctttgatagatgatgcacagatatacatgatcttagctagtatgagtgttgagaccaaaacccttatgattgtatacccttggtgaggga

SEQ ID NO: 175786 - DNA, 473 bp, Glycine max
  unsure (1)..(473): unsure at all n locations
agcttatcattcataatggttngcgattgttatacagtgtttaatgcacaaaatccacaaaagaaaatttaatggaaaaatctacaaaattatgaaagttgagtggtaaaattcatgaaaataaaatttgagcggtgaaattcgtaaaataataaaagtttgatggtaaaatacgtaattatgcaaaaataaaattaactactacttcaggaatgtgattcttaagtattttatttggataaataacaattntcattcttgaatgtatagagcgctgacaaattcgtcctcgaaagatagaaattcaaattttatttccgaaagtgaaaaatgtgtgacaacttatccattaactttcatccattatctttaatganagagcctacgtgacacgttcatgaacgaatttgtaacgctctacacattttgggacgaanatgactaattaccaaatatatcatttattcttcatc

SEQ ID NO: 175787 - DNA, 473 bp, Glycine max
  unsure (1)..(473): unsure at all n locations
tgccctgctgaaggatngcttgtaactagcatgcactggttcatgtgcgcatcatatgctntggtctgtgaaatgaaattatattttcccttctatctgttattgttattgatgcgatttctgatacgcatgtgaatgacccatatcacatgcacaaccatataccacgccttcaataacaatatttagtatttacagaaaaacaactatgatatgactagtgacttcatgcaaaatctgcatgattgaaaacagaatagaaaataatgttaaattcattttaattgcatcacaattcacaactaatctaacatgggaaattatttaaaaattctcttattgttcactcccaatatggtagttactagacttaacatacttaaacatanggtttagctaggtctgctctcactggtagatgtatcactaanattctctgatngagatgcacagagccatatgtacttgtacac

SEQ ID NO: 175788 - DNA, 476 bp, Glycine max
  unsure (1)..(476): unsure at all n locations
agctnggacgaataaggtgatgcatctatgttacacaacttctaacaagtatgaaaattgtaaatatatattggttttagggtttacacacgaatggataaaaataattgtttgtgttttacaaatgcagggttaagtttgcacattgggccttaaagagactactaccgaatagccttggagacctatgtagtgtttgagaagccatgaacaatatgatcactctacaacatattgaaattaaggcatcgtttgagacaactacacatgtggttgggcatgtttttaaagttaccttatacaagaaactatttggcatggtatcaaggtatgtgttaaaccagattggtgctgagtttgagcatgtaaattatgctagcattgatagttctcattatagatatataatgagaactactcacggtcttccatgtgcacgtgagctagctagatatgttcttggtgcataccacttg

SEQ ID NO: 175789 - DNA, 192 bp, Glycine max
aacaatgtcattactcaatcaataacaaaccaactccttacccaccacccagttatccacatatgccatcccttaatcaaccacacaagctgtctaccgcacttccaatgacgaagaccacctttagcacaaaccaataaatacaccaaccatgaaatgaattgtgcagcgaataacctgtatgattcaccc

SEQ ID NO: 175790 - DNA, 470 bp, Glycine max
  unsure (1)..(470): unsure at all n locations
agcttcctcattggcagacttgtagaagaatgtctctcattatttctcacactgtactatantaaatcaaattattttatgttcatggtcaagggacttctccctttatctgtacgcagatttcacctcatcttagaagtctgctgtcctcggaaacaggatttcatattccgtgatttatatagtattttctatgccaatagaaataacctgcaatgaaagtaaccaaagtggtatttgaaatatgtgttagagcatttgataattttagtcttttaatttccctgtttctgtttctattcgtacagatttgctttcctgtaattagtttctattctgtttcctgtaattatgctagcaagattctctcttgtaaattagtcactcagtaaatctgtaatcagcctgtatacagaattgtgaaaatattaatctttttctcttatctcaagtgtatgggatggtgatgc

SEQ ID NO: 175791 - DNA, 388 bp, Glycine max
attttaaattaaaagaagcacgatcaggtcaaattaaactgtgtatatataaattacgagagaataaaaactactactccatgcatcttattataattaatatcccatattattgtacatagattaagaaaactaattaatggatgaaaaaaaaaatagtttacaaaagaattgaatgttatatatgaatagtgaaaataatttaaagtaacaaaatatcattgtaaattttagctatatcataatgatacaagaatataggaaaaaacattatattcattcaaaagtaaatgagataaaaattaaaagccaacgttatgagaatagagttattatgaatcgatagtgtggaacttttttaaagtttgtccttataaagtgatttgaa

SEQ ID NO: 175792 - DNA, 488 bp, Glycine max
  unsure (1)..(488): unsure at all n locations
agcatgccagctgtgagagaactgcggcttcagatgtataataatcttttttcaganttgngtcaacaaaatcttcaaatctgaaagcttcaactgccacccggattgtaccccccatcaatacctttccggatagaacttgaagaacaataaccccaaatgcatatatgtcactcttctcaataaagcgtccagtggtaaggtattcgggagctatatatcccatggcatcacttgctttaagagctgagaagacaacatcatctgcaagaagcttacggaggccggcatctgtgatcaagggggtaaattcatgggctagaataactgtttctactgaaatgtttcggtgtactattgcaagcttgcttgcttcattgctgtgcacataaccaatacctgatcatcaagaaatagtcagtgccaaaaagaaaattccaatataatccactatggtcagcatgtnggggcaccatcacatacatatg

SEQ ID NO: 175793 - DNA, 435 bp, Glycine max
attgagctcatacatacttgtatgattagcattaactagccgctgaatattaaggatgaattattgatgtaactaatctcaatactaaagatccagctgcttattctgtggtaataaacactacacattgcacgaactataacattttcacctcattttctttgcttctatctttatactagtattaaagacagtgtaaagaatggtatgaaagttacaatcattgttacaagtgagacaactcagaaagaggtcttcataacgaggtttcaaactactcacgctaagaaagaatccatagaggttttaaatactcctgccaaactatgagtcaactttgaaccatctataacttactttatattacatggtcaattaagtttatttaataatatttaaaggcaattttcgagacaaaatatcctaatctctaat

SEQ ID NO: 175794 - DNA, 468 bp, Glycine max
  unsure (1)..(468): unsure at all n locations
gatccttaagtcacctgcggcatgcaagcttgtacatggcaacattttatcctcttatntcttcctcaacaccaaacagtatggctgcgtgtctgaccttggcctggcaaccatatcaagctcacttgccttaccaatatcacgagcagccggttaccgtgcaccataagttacagacaccagagaggcagcacagccctcagatgtttacagctttggtgtggtgttgctagagcttctgactgggaaatcccctatccacacaactgctggcgatgagattatccaccttgtgaggtgggttcattcagttgtgcgcgaggagtggacagctgaagtgtttgacttatagctgatgagatatcctaacatagaagaagagatggtggaaatgttacagatagccatgtcatgtgtggttaggatgcccgatcagaggcctaacatgtctgaagtagtgaagatgat

SEQ ID NO: 175795 - DNA, 438 bp, Glycine max
gaactgtgtaatacctgcagccacgatctttgttgtatcctctcataccgataaggaactgaatatctatattgccgcaacgcaaggtgttgcaattgacctgtttgctccctcttgtgctttggagattggaaaggaagatgcataaagcacataataatatggctgaaggagccatcgatttgagagggtgggaacggggataattaagagtgcaaagtgtgcgggtgggtgaggatggtttctttaattgtgattcattagaacaagttaccaagggaggaaagaagtggaaatggaagccccaagtcaaattttttaatgaactacaattgtcaacaatggtcaattcggagaataaagatcaagcgttcttgcgtggcattctcattaaatggtcccgacctaatgaccaattcaaagacagaagaaatgctg

SEQ ID NO: 175796 - DNA, 409 bp, Glycine max
agctttaccatcaaattgatatatgctttattaaaggcaattacaattcacttaaatttagtaatgatccactaatctagggaattaaaagaacttaatggctgagtgtaactgaaattgtggcaaccaaaagtcaccccaaaagccatcgagccaatcaccaattggtctcccaaaggctgatgcctaagctaccaattgggcccttattacaacttgaactaaaccaaaataaagcccctttagttgattaacccataacatatttttggtcagccaactttacatggattgagacgaagtggcaccatttagtcctcctccatttggaccatgatacaactcacaacctttgacttttctccttgaaacatgggcttgtatcaaatagtacggacaacacttgttg

SEQ ID NO: 175797 - DNA, 474 bp, Glycine max
aagcttgctattataaattaacatgttcatcatgctatgatgtatcttacatgcattggtcattattgggaccaaatgattaatgtaggtattttcttgtttaaatttcacatgcacttctagtcttaaacattatcaccacaacaattgaatgtttattttaattatcataatgttatacatttaaatacaagtgatctatattttaattatcaaattcactctcatccctcgttctacctattgattcatgagtaccaaatcttgatacttcttttttatttggtaatccattagcaaacaaacataaaaaaatagttaagaaaaatgaaagaaggaatatatacaaaatgaagaagaaccacttgccatggttgacacgagagcttgatcccgaatacagttccatagatggatggaatgaagaagacaacataatagatcatgtagatcactctttgtcatgtaattata

SEQ ID NO: 175798 - DNA, 359 bp, Glycine max
  unsure (1)..(359): unsure at all n locations
agctnggcttggcttgactcattntcactcctagtgtcgnaggtgtacaagaaccacactaatctatcctaaatttggtggttaaattctattgtggtgatgaatacctaagagagtaatagtttaaaactaattaattaattaattattttatccgaggtccgctaatttggtcgaatatggtgcgaataataatgctcaaatatggtctaggaagggaattattgtgatgtttatgactgtgcaaccgatcattttgatttgatagatttatctgaattcatatcctctccagcaaagtccttttacaacataaatgtancaactttctatgccgttgaatgcatcttgtgtgtatg

SEQ ID NO: 175799 - DNA, 408 bp, Glycine max
  unsure (1)..(408): unsure at all n locations
tcgcgtgttgcaacatccaattggctcttagtctttcctttnttcacattttaagaccttttaggttcgtcctagtctctacttcttccatgtttggtataccttcatacacatcttgaagagaaacccttgagcttggtgcattggcagagcttgcatgaaggattangatagtgatcgagtagagagtagcatggagttgatgaagatatgttggatataacatatatgggcataggaatgagaggggcaccattttgaaagagacatataagaaattaaggttttgtgatgggttaagatgagttgggtcttgaataggtgttaggtcgggttcaagtaatgggcattacttcgccctntttatttgactctgatgaattaatggcctatcaacacttgatttga

SEQ ID NO: 175800 - DNA, 414 bp, Glycine max
  unsure (1)..(414): unsure at all n locations
agcttactttctgtaaggaatgcatcttaatatattatctaatttaagaataaatganaagtgcacaccaatcaaagtcatacccgcactcactaatggaatgtagtagaatntgattggtgaccattcggtccaactggcacataaaaatatcaaaatctaccacactgcacaggtgtaaattgttagattccaatttatgtgccactgtgattattctnttaattgtaagaaactagactgcaagtgaaatatcaaagtttatccttttagccaatttacaaaaatcagaagaaaaaaatcactctcaggacacatngaatanttaaaaacagtattcactcgtgaagcgtaagcaattattgatatgtgacaatgatccttatcaatagttatttaacttacagcccgatc

SEQ ID NO: 175801 - DNA, 442 bp, Glycine max
  unsure (1)..(442): unsure at all n locations
tataagctctatttaaaccatatttctactcaatatggtactaaacaccacccttgatactaaaaattatgcagccccaaagatgccacaactaatgcgggctatggatgaccacaattatagcgactttccaacaataagcaatctaatgtagaattttaacatgcctaactacagaaattttgggaacatttaagttcaagcatataaaacaaatcttgcaagaaatcaatggatgacaattccccatactgtagtaaattattatgcanatacataatgagagtgcaagcatactcacttctgccacaaatggccaaagtttggtcagtttcttgtntatccatctcacctgtaaaacccatgcatggaagagtatacacactacacatcatactaaataatagtgcactgataaaatatttaaatccactgttatatc

SEQ ID NO: 175802 - DNA, 476 bp, Glycine max
  unsure (1)..(476): unsure at all n locations
agcttccatcatcaagttaccaatgatcttctatgtaatttatgtgcatatatgctttatatgcagtaacttatttgccaaataaagtttctacaaaattagtatctacaactccatatgtgatatgaaaaggactagaatgaatctcaaacacaacaaggtttggaattgacccacttacattaagagatcgcaaatagacaaagttgaggcaatgtctaggaaatgtagattcattgggtatcccaaattcataatctctatcgtgataacaagcctctaattttaatcaaggacttgtcaaattaacaatttaataaaacaataaatatgatagtaaaataaagaacaattctttactaaaatngataacctgatgaattggatcttaggcatacatatttatccctaatatgttcaactntcttattcctacacgatgtgaaactntactccacacttgtactacaacaatc

SEQ ID NO: 175803 - DNA, 446 bp, Glycine max
  unsure (1)..(446): unsure at all n locations
ttcattctttgtgtgtgagcctatgtcaaatagtttgttattactgatgtttcttacataatcaaacaattgttaacatctccacttatgtttacactgtggtcatgttttcgtttatagaattcattcagaatatttgttgttgattatcgtctcctaatcaattgggtgttcattttgttattggctgctcatcttccaatcatgtcttgtcaaactacttgataatctgtcatgttgttacttctgttatgaatagagagagacttcgctcttgttaatcacgttaaggtgtttcgagaggaaaatacttgagtaggcatgatccttgntacctatagatgaaagtcaacttagtaagtcatgtacctgtgttccttaaggatgtgcttatttaccacctaagtgcaagattgagaatcttataagtgtaatacccatacaaa

SEQ ID NO: 175804 - DNA, 466 bp, Glycine max
agcttgagtgagtgtcatttcagtagagggtcaaactcgttgctgaattccaggtgcgagccaatggggaggcatagtcatatagcattcagatgggtgctggacaactattatttccctagccacctgttcagaaaataacactttaggaaaagggactgcaggtgtaggattatagttaatgaaggccagaagaaacctctgagcatctgctaatagttcccttggagcagctcttttgaatctatccaaatgcagaggagatggatttggactcggttgagtggatgatgcatacttgcgaaggggcaagataggagtagtggactcactatctgatgagcaagaggttggatcttccttatttccagtgaaggaaaccgcccattctttgtcaccaatctctgggttggccttggcaccctcgtcttatgtgtcatcaatggaagaaggatgacggcaccca

SEQ ID NO: 175805 - DNA, 459 bp, Glycine max
  unsure (1)..(459): unsure at all n locations
gcttgttactcttcttccagtacctaatgaaccttgngtataaatatctatggactttattttgggacttcctgtgtcaaggggggatgagattcaatttttgtggtagttgatagattttctaaaatgacacatttcattccttgtcataaaattgatgatattgttcattttacaaatttatgtttcaaagaaattgtaagacttcatggtgcatctaaaattgtgtttgatagggatacaagattcctcagtcatttttggaaggtcttgtggggaaagcttgatactaaattgttgttttctacatcttatcacccacaaacaaatggaaaaattgaattgtcaatagaactttaactcagttgcttatagtngtcgttcaaaagaatttgaagaatcgggaagaatgctgtccatttgttgagtttcatataataagagttgttcgtcatctac

SEQ ID NO: 175806 - DNA, 484 bp, Glycine max
  unsure (1)..(484): unsure at all n locations
catgcacgcttgcccagagaaggaatccacggaggatatgcttaccacctcgaaagactggaaagtggtttctaatgactcctctgcggcctccacataaggcatagaggatgggcagctcaccaagatgtcttcctcgcctgacacgatgaccaaatgcccctccactacgaatttcaacttttggtggagtgtagagggaacaactcccactgagtggatccacgggcgccccaacagacagctgtagggggggttaatatccattatttggaaggtgacttgacaggtgtgagggcctatctgtactgggagatcgatctctcccctaacctctcggcgggtgccgccgaatgcacgaaccaccattgaactcggctttaagtgggaagcatngaatggtaatttctccaaagtgctctcgggcatcacgtttaaacaggaaccattatcgatgagcactttggctacgacatggtccata

SEQ ID NO: 175807 - DNA, 368 bp, Glycine max
tccctaatttatggcgcctcctctcaccttttctattttgcctttcacttgcttttcatgggggaatatcaccatttatggacctaatttaagctcatagatccaaccttcatataatccgcacaatcaagcttccatcatctactgtataaaatcaaaactaacatgaaaatatgtacaattcataaaagaaccataaactgggggaaagatgctaatctcatgtaattattcaatgcaaaagttagtcgtaaataacgactaacaatgctattatgcaagcaacacaagatgacttcaagcctaatttcatgatcaagaatacaagatcaagagacagataaactgagttatttctggtaaaaaat

SEQ ID NO: 175808 - DNA, 501 bp, Glycine max
  unsure (1)..(501): unsure at all n locations
ccgtgatcctctgagtcacctgcggcattgcaagcttcaaccttggtgctcatttctgccttaaatcgtgttaggagagcattntcggggtcgtgaagtgcgtggctacgagtgggacttcgaaaatccaggtttgggtggacttctttctctcttaaatttcgtgggtatggggttttgggagatatgatgggtagttttgttagttttctgctgtgtgatgtttatttgtgaaggaacttgttgagaacttgttgaaattgccatgttggaatgagttaaacatacccattctgttttagggtttttgtgatgatgtttgtgatgtttatatgctgaaattgcttatggaaatctgttagagacgaagggtagaactaacctatggttagaaagtgagaatgtgttgttatgagtggaaaaagagtgagactctgagggtagaagggctagtctgaattctgtggtaaatggagggtaaagtgagttaacactatcttg

SEQ ID NO: 175809 - DNA, 418 bp, Glycine max
tcattcttagaaggatacatcaccatgatattagcctaccatcattgtaacaaaagcagagaacatatatgaaactatgagcagaaacgtaaatgaagataaaagcatgaaacgtaaatgaaactaagaacaaaaaacataaatgaaactaaaggtagaagaagaaacaagaacaagattgtaattagaagcagaaaatggaaaattgcattacgtgaatagtagcattagaacagaaaaatgtagaaaccctataccgtgctctgaataatgaatagcccccttacatgaatcccaaggctactatttataatggtcactcatagccattgtgtcctattacaatactctgtgccataacgaaatataaactgaacacaaaaaaataaaattgcaatctgctaattagaaattaact

SEQ ID NO: 175810 - DNA, 453 bp, Glycine max
  unsure (1)..(453): unsure at all n locations
agctgctcacacctattatggtaaaatcgctgtcctggtttctttaaccgttggatcatcttaaaaaaatttttggaggttcctaggataaatttccacaattctaccattgagattgttaatataacatctggaatgtgagatatgattttttttactgaagcagaaaatttgagtgttgcaagctttaaattacgtgcaacagctgaaaacagccacttcttccttcttctcttcccctaaaccctccccaacgcccccaagcttcttcttcatcacccacaaccaccggtggccaccgcgagccgccattgtttgtcgttgaatccccacacaaagaggaacactctaatcgaagcagaatcttcaaaacttatctcaaggattcggtagagaacaaagcctccaatcttaccttcgcggttntcctcgaggtaaccataattctaagtc

SEQ ID NO: 175811 - DNA, 424 bp, Glycine max
  unsure (1)..(424): unsure at all n locations
tcccacggctttatgaagactctcccaaaatctagaggtttttctaggatctctatcagagactatgctagaatgaacaccgtgtagtctaactatctcactgacatacaagctagtcaacctctctaaggaatatctgatgttaattgggatgaagtgagcagatttggtcaacctgtctacaataagccaaatggaatctaaacctttgggggtcctangtaaccccaccacgaaatccatcgagatgctatcccacttccactcatgtatctctaaaggttacaacttccctgaaggcttctggtgttctatcttatctttctgacatactatgcacgcaaggacaaactcattaacttcttttttcatacccggccaccataacatatgcctaatatccttggacatcttagtcgctcct

SEQ ID NO: 175812 - DNA, 447 bp, Glycine max
  unsure (1)..(447): unsure at all n locations
agctntctaacatgcttctttgagaagctatatccttatctatccacacccctctattaactaaattaacttccttaaaaataattacggatgaaaataacgtaacaaataatcaaacatcaaacataattactaataatatatagatatatatatatatcagggtgttacaataggcgtatgtatggtccatggcaatgtgttgtctcaaccctggccgcctctcctgagaccagtagtaagtcaaccaacatcaacccgcctcgtcgacgtgtagaggctggaaggtatggaagtcgccaacaatgggaagatgaagaagagacaccacgtcgtctagggtgatggtacacctccccatgggaagatggaaactactagtctccatgtgccaactctncacaaacgaggatataagtccccgatcgccagtgtctactgaacatg

SEQ ID NO: 175813 - DNA, 433 bp, Glycine max
  unsure (1)..(433): unsure at all n locations
acggctggtcatgatatatgtcanggtttatccagcggttcaaggataaaggggttgtcctacattatttccatgatacacatgcaacaatgatgattaggaaattttatgcaaaactggtcatgcatgcacccatgtggacactcaagcatcaagtttttatggtcatgtgacactatggctcaagattcattttccctatttaagtcaacccagtgtttccaaaatatgttattgtaccaattcatgcattcatctgagtccattttgggtgttcgggaaaattttcacagcattcacccttcatgtgtattacacacattttctttcaaaaattgggtatgatcagtgaatttttttcaaagaaaagctagaagttatctcttctaaaagcatgttggcttttcaactgaaagaatatatgtttggtctt

SEQ ID NO: 175814 - DNA, 367 bp, Glycine max
aggttattctgcccatggatagtaaggatcgagcctttggcaaatggtccccaaattgggaaggaccgtttaaaataattcagatctattcgaatggtgcttatgaattagaggaattaacccctcagaaacgtactttgagcataaatggtaagtatttgaaaaaatataaaccaacactgctcgaagttaaaataagcatataatatgatgacataatggaaacataaaaatggcgataacagtatattgccacgaaagggcatgtgtcaatattacatcgaaaagttgaatcgaaatacagaattcgaaatatagaaatcataagttctactaagtcatgaccaaatgctcatacagctttttc

SEQ ID NO: 175815 - DNA, 346 bp, Glycine max
  unsure (1)..(346): unsure at all n locations
actgtctcatcgtttatgcgagacggataccaacatgctatctatcatcgccaagttccaagaagagttatgtctagccacagcccacgagcatagaatcgcggatgaatatgcccaagtatacgcggaaaaagaggctagaggaagggtgatcgactctntacaccaagatgcaaccatgtggatggatcggttngcccttaccttgaacgggagtcaagaaacttcccgattgtatccaatgccaatgcgatggcagacacctactccgcccncgagagattcatgggcttctcggctattgtcagcatatgatagaactatatgcccacataattagaaatcg

SEQ ID NO: 175816 - DNA, 465 bp, Glycine max
  unsure (1)..(465): unsure at all n locations
agctngtactttatctcagtcataataattgtgaggctaagtaagtaattaagtgactaatgtatcgtagagaaagccctgatcttcacgaagtgccactccttgattcaaattaactgtgagccaggaagagtcgtccacgtcgttgggttgaatggaagaacaacgaagtggggctacgtggtttcaaatgttcaccaattacaacgaaaaggggctagggttcgaagagggggtacgaggtttcaaatgactaattcttcagtcaattaccacaaacagttgctagggttcaaattgtaacgatgaagggcttcaatgcaaggtgggagctgaggttctgcaattcgcacgtgcttggtttttttccccaattacaacggtctttaacttaaacctgtcgtaanattattgcatataacattctaaggcgggttgtattaacagtcttataatgatagtcgt

SEQ ID NO: 175817 - DNA, 453 bp, Glycine max
  unsure (1)..(453): unsure at all n locations
tgctaagcgatatntgcagattataaatacgttcctcatcgtgaaaaacacgaattttcgctatcctcttctccaaaatgccatccaaaccctaacacctccttctccaccacccatgaccaccggtggccaccactatccgccgttacttgccgttgaacccccacaccaagaggaacattgtaatccaagtgaaatcctcagaatcctcctcaaggattcggtggagaaaattccccaatcctccatttcaaagcttctctgaagtaatcttgacttctaagcctttcttgtagttagtttgagttcctcttagtgtctctcgtgtgttgggtactgtaataaggtgtttttacacttcctttgaaaaccctggaaatgagatatgtaaactatcttgtatacattgagctatttcatgacttcatgaacctcgcacattgtgacatctta

SEQ ID NO: 175818 - DNA, 362 bp, Glycine max
  unsure (1)..(362): unsure at all n locations
agcttctgttttcaatgtctagcgtctctatattgtacggngttctatccgacatccaagttaaaagttattgtcgtttgattnttctaagagcttcccttttcaattacgagcgtctcgatatattacgggacacaatcggacacccgagttaaaagttattgtcgtttgaatttgctcagagcttctattttcaattacgagcgtctcgatatattacgggactcaatcggacatccgagtaaaaagttattggcgcttgaattttctcagagcttctgttttcaatttcgagcgtctcgatatactacgggacacaatcggacatccgagttaaaagttattgtcggttgaatttgctc

SEQ ID NO: 175819 - DNA, 381 bp, Glycine max
cttggagtttccaagtgccaattcgtcctcttctttagtccagtcttcttctggcttcaattcatcagtgggctttccttctgtgtccagcatcttgtgatgttcccagcctttgatgacagctttccaggttctgctatccagtgatttgaggaaggccaccattcttgctttccagtattcatagttgcttccatcaagaattggtggtctgttcactggtcctccttctttctccatgttcatcagaatttatctccccagatctcactctgtgatttcgagtgttggctctgataccaattgaaattctgataccaggggacagatgtcgtacatgatgtcacgacatcacgcttcataacatgcagtttatgtgtg

SEQ ID NO: 175820 - DNA, 450 bp, Glycine max
  unsure (1)..(450): unsure at all n locations
agctngtnatgattaagaagagagaactatgacgataaacaaaatagaaattgtaggagatgacaacttgagaacaacaaataccttggcaaagtacatagcaggatcagtagcacaacgcagtatggttaagagggcactctcaaaattgccagatgtttccttctttattgcctgcatgagaaagacaagttagagtttgcacacagaataaagaggggaaaaaataggtcactacttgtttggaggcatatatgtacaccttttctagcgagtgtccatatgaagctatgtaggtagaattgactgcagccaaatgtgcgccgcttttttcactaaaaatntttatgaacatcttctcatcagntcctatccttttcttcccctgattatagaagttgtttgcatcctnctgtactattatatgatctagctctaaggcctcatagc

SEQ ID NO: 175821 - DNA, 325 bp, Glycine max
  unsure (1)..(325): unsure at all n locations
tgtattttttttttgagatgcccttttaatcaccctttgccttataaccatgcgttaagttccatgtgcaattattttgtttcgctgcntggtgtatttgtttgttttagaaatgggtgtatgatcccaacatggttggttcatgtggcgccacacatgccactaacaatgttttgtgaaatttcacgcttgcccttatttgttcttgttgtgtataggaaaacgcaacgtttatcgtcttgataacaagtggtatgcgatattgcaaatccattaatcttttggacgcgtatgcctgatgatgccatgactcatgcgaaatatg

SEQ ID NO: 175822 - DNA, 449 bp, Glycine max
  unsure (1)..(449): unsure at all n locations
agcttcttgatgttgagggaggggatcgttgattcttctctacttaggcattgagattcgtccttgttgttcactcaaagtatttttttttcttctctcaaccttgttaacttgttcaattgattgtttgaaattgttgattggctgggaattttatttctctcttgttttttgaattgaaccggactgttagtgtatgtaaattaattacattgtcgaaatttcaagggccgataaattattattattttaaaaaatgcaaaagggtttaatgaataggaaaattgaaaaattaaagatacaaagggattagtataatttagccatcaaattaatcataaaggctcaatnttttacccataaaattagtttatgaaaataggagttacaataaaataacacgacatttttatcattattacatgagggaaanaaanaccgtttaatga

SEQ ID NO: 175823 - DNA, 427 bp, Glycine max
  unsure (1)..(427): unsure at all n locations
tgccccaacaaggaaataatggcgaaaagtgtcgagttccctatcgtaacttctcctgaccatggtgtgaaaacgcatgcaccatacaatggctaatgagctggcaatgaacaccaccttcatgaaggtgttgtaaacggagatgaagtccgtgaacagatccaaatagcgtgccacgaacacaatcgcgtagagctcttgagtcttgcgagaaatccctgaaaataaacagttacaatcaatcgatgaaatgatggaaatcaaacatagggaattttgtttggcggaggaatgtgagtgacggagtgacactcgagaatganaatgtgggaaatagaattgaaaaaatagccccaattttgggggaaccgcgagataagagaangagagagagagagagagagagagagagagagagagagagaga

SEQ ID NO: 175824 - DNA, 408 bp, Glycine max
  unsure (1)..(408): unsure at all n locations
gatagcaatcctagactaatacatggaatgcattttatanttttctgttcagctccttctattgattcttttacctattatttttcagtgtatacatttgcttgaggaatttcagtcagcggcttcggaatttctctttaaccctctntgcgtacgtgttctttaccttaattattgaaattccatgttaattggttttggatcattttgtttttatttggtgataagtatctttttttttctgaatttcccccacttttgtatcaggtggcttggcaagattactttggagacatacatttcccagtttcatatttggttaaggtgtgtatgcatactgagcccttctccccatgttatacgtctgaaatacattaagatgacttcatgatgcatttatacagtagt

SEQ ID NO: 175825 - DNA, 462 bp, Glycine max
  unsure (1)..(462): unsure at all n locations
ctgtcttataatgattttttatttgcaaaatagaagtttcctctccatgatattaatataggtagaaaaagtggtgaaaaccttaattgttcttgcattaatattcaagttgattctagtttaagtacaaccataattgggatgaaatgtaacgtcaatatgttgctctacctgtgctcttagcctataattgggatcaaagcatttgagacatcatattctgacatcaaatagaaagcaacttggttgctgcctatcatgcaccaatgcttctcataatgccacaagcagttaaggggaccgcttttcaaagcagttagattcattctcaaatcatatcaaatcctatagccattgcggttgcttccatgtgttgtggaggggatctccaacgttgcatggtttctatcatatattgcctanttcgggaggcatctgtggaggatgtnggacaatccaaca

SEQ ID NO: 175826 - DNA, 341 bp, Glycine max
  unsure (1)..(341): unsure at all n locations
ctctcaatatatagcgccgattttttttcgtttaaaaggaggaccactttanttctcgagagcttctgatgccaattctcacctgctctatttatatacgcggctgaatcggacatccaggtgattagtcatgaccatttgatgttattgagagcatccgctgatcaatttccagctacctgatatatcatgcgccggaatcagacttcccgnngaacagnatgaccataggaattgcacgagagcatcggttggtcaatttcgagccttatgattattctgcgcccgaattcgactactttgcgaaagttatgaccatttgaatttctggatagctttcg

SEQ ID NO: 175827 - DNA, 391 bp, Glycine max
taaaagcataatatcatctgcaaaagccaaatgagatagctgaatacttgcacagttgggatgaaatctaaaattggcatcatccttgaggctgctcatatctctggaaaagtactccaaacagagcacaaacagataaggggagagaggatccccttgtctaagaccccgctgccctttgaagtgaccataaatggatccattgactgccacactaaaagaagtggaagaaacacattccatgatccaagtacaaaactgggttgggaagccaatggacttaatcatacaatccaagaattcccaggaaatggaatcataagctgtatgcaagtcaattttcaggaggcatctcagagagaaacttctgtggacatatttgtgcataatc

SEQ ID NO: 175828 - DNA, 307 bp, Glycine max
atagctgcatcctttatataacaatgagctaacgaaattgatagaaaaatattttttccctcatcccttgaactatcatttggagttgaagtatacttctcacattatacactctaagaatcacattctatttacagaatatgatgatgggctacataatgtatggaagccttatgacgcttgaaattggataaaccactttgtggtcacaaaaccaaaaattacatgcatgccttcaagttagccagccttacatgcttattgtgggcaaatcacttataaatgctctcatttattatcttttttc

SEQ ID NO: 175829 - DNA, 450 bp, Glycine max
  unsure (1)..(450): unsure at all n locations
agcttccgcatcaagcaaaatggtcgatttcttgggttgaacatgaaattcttccattatttggagcattccttctgctttccagggttgttttgcttctgcatatccccagattagtgtctcaaaagtcttcaaatttggagaaaccccaaattcacccatcttgtcaaaaaccctcatggcattgtccattctgccaacactgcaccatccacttatgacagttgtaaatataaccacatttgggtggacacctgatttagtcatgacagtaagcatttcttcagccttttccatttcttgtgctcgcacataacctttagcaagaatactataagcatgcgcatctggcttaacaccagaatttagcatgttattgtagatttccttgcattnttccaagaatccagcttggctccatgcattcattatagtactatatgttatcac

SEQ ID NO: 175830 - DNA, 410 bp, Glycine max
  unsure (1)..(410): unsure at all n locations
tctccactatgttgctatatatatggggagaagtgaagaagaaaagggttcagccccttaggcacttctctctctctcgaatttgctgatgaaaattatttccatgaagaatatccaagccgatgcgcttccgtaacgtttccgtgagtaattaagcgaagattctcgaccgttcttcaagatccatcgttcgttcttcgttttcttcagtctacaacgggtaagtacctcaaaccaagcttttcaattcgttctatgtacccgtggtggtccacattttgttgcatgtatttttattcttgttttcgtctactttttatacccctgtngacgtgcttaagccatttatttaagtcatttctcgcttaatctaaagataaaataaatttccaccgatcgtttgaattgat

SEQ ID NO: 175831 - DNA, 356 bp, Glycine max
  unsure (1)..(356): unsure at all n locations
agcttctagccaaatggacttaccttgaatatattcctttgatagcccctttgagcctatgttccccttctttgttttgaagcgcattacaagccttaagtgaaaaaccatggtatcaccttacccttaaggaattttggagctttggaattgttttgggaataagctgagaataagtgtgtgtggggaggggtttcnttttntctctcttttttatttctcctctcttttctttccttctcttctctctttctccactctcttcctctcttcaacccttatcgtttttatctccactctttctttttatacattttttctatatattagatccttcttcttcttttcatattcaa

SEQ ID NO: 175832 - DNA, 454 bp, Glycine max
  unsure (1)..(454): unsure at all n locations
agcttgccacccagctcgcccaggcgagcatggttgcttcctccanaagcaacagccttctggaggaatcttttggagggcccaagtgggcctggttgctatttgcacctccatttttactaagtacacccccctgccttttttttggtgattctttttcgtaaagttacagaaacttacaaattttgtaacgatacttgttttctttccgtaatgttatggaaccttgtggattacataatcatccccttttttacttacggaatgttacggaacctcactaattgtgcaacgatgcttccatttgatttccggtgtgtcacggaaccttacggattgtgcatcaatattttcttttgttttccggcatgtcccggaatttcacaaatggcctaatgatgggtgccaagcatcttacaaggaccaaacaaaagtcgcatgtcatcaagcaaag

SEQ ID NO: 175833 - DNA, 472 bp, Glycine max
  unsure (1)..(472): unsure at all n locations
tccatatggatggccggcagcgggcaacagacgcaccttcgccacctccaaagcccctcagctcatccacaaaaaaagttagtgcattgcctacgaaacatggtcgaccagtatgcgaccaagtccaaagccaaagataagcatagtactatgtccgtgaccgacaagtcatcaagcgtccagctcataacgttaaagaagcgctactaggaggcaaccttgtaacttttaaatctctgcttgttatttgatcacctttgtttctcaagtcatagtaggacacacctagttgctcatggtcctaggaatttaattaaaacaagcacaagctcagaaggtagtcatacctcacaaaatatatatatgtgtgtttaggtagtgaaaataccttagatatgcatgtatatagcaaanatacctcacaaaatatatgtatgtatgtttaggtagcaagataccttggatatgcatg

SEQ ID NO: 175834 - DNA, 260 bp, Glycine max
  unsure (1)..(260): unsure at all n locations
agcttgatcttgaatatcttcatntctttatcaagctatgaacaatatacttggccttcatttaactgtctttgggcttggcggccacactcaacaaagtactttcgacacctactattcgttgatttcaccaatgctgtgatgggaatgttgtgacaatcctttaaaaccttattgatacattcatgagaggttcgttgaccgtggccctattgacagcctctatctgtcgtaagccatcgtccatttatacttcgaga

SEQ ID NO: 175835 - DNA, 395 bp, Glycine max
tctaaggaagtcttctcaagatagcttctcatggaagctacctagtctataaatagaagcatgtgtaacacttgttgtaactttgatgaatgagagtcttgtgagacacaactcaaagttcaacttctctcccttgttcttccttcaattttgtgctcccccctctctctctctctccctctttcttttactccattgaagcatccttccaagcttcttatgcaaagctcatcttggtgatgaagctctattttcatggcttattccttaatggatggcgcctcctctcacctcttctcctttgtcttccgctgcatctccatggtggaaaatcaccattaaaggatcccattgaagctcacagatccagccttcatataagacccacaagcaag

SEQ ID NO: 175836 - DNA, 414 bp, Glycine max
  unsure (1)..(414): unsure at all n locations
tagctngtaattatcatgataactngnttttttngtattnnatttattttctaatgtttcaaagttatatgaagtattatttaatgttgttctgaaatatctatactactgcacctacantttactaaccatatttttctttaaaatgcaagtatactaaactacattntatgaaaatgtgtgaaagtctatgaattcaagtgttggtccctgatatctatataatgacaaatgtatgacattgatttaaccgctcttgtatagtcagattacatcaagaactctgtattgataaggctagtgaaatgtttcctaagatttaagaatcaagaattttaattcaccacgtcatactgggttgaccaccgcaatgttgatttacaattttctaagatgccatgcttcttaacactg

SEQ ID NO: 175837 - DNA, 451 bp, Glycine max
  unsure (1)..(451): unsure at all n locations
agcatgtcttgcttncatgtcatattcaanagcacacattatttatcaacccgtagaatgactttcggttttcgaagctatgcacatgatgcaacatatttcatgatacatcatggcgcatcgtttcaagagagttagctttttgtccaaatatgccttccaaacataaaattatctaatgcgaaatattactttgtgcattcacaacaatatgaataggcaacttaactatcaaagttgattattttatcgcaaattaanaataatggtttgttgttttgcatttatatcatcacacaaattttcaaaagataattactatgaatggtcgggtatgagagattggaattgatacgtgaaaagtagggttgattcccatttgccgtattataaaataaattaacattgaagttaaactctaatttattgcacctatatatatcacaaaata

SEQ ID NO: 175838 - DNA, 355 bp, Glycine max
  unsure (1)..(355): unsure at all n locations
tacttacgaagcacaaataaatcacacttgattcatattagacacgtatcgncttcaatgtctagacttgctcaagtcgagctgggcctagagatgaaatcacaccacatttaaacgaatttatttctctattgagcacgacaaatttgttacatagtggcttggctcactctaggaatattggaatacttccctttatttctccctatcatgttaggaccatattatctctaacttgaaccccccctcttctgtcttcgaccagatacaaaatatgcttcatcgacattacagttaaaattataaattttcaaatttacaccaaatagtacgtgtaatggagaacatgaattat

SEQ ID NO: 175839 - DNA, 403 bp, Glycine max
tatcattagctgttctagcgtaatgaggattataaaaataggctaatgattaaggaagaggacaaaacgaaaaaaaggatctgggtgtaaatcatatcatttcacatacaaaaaaaaaaaatcaactgacaacacagatcaccgaataataattctttttttatgatatagcagtaattaaggcatatttttactttgatgaatggggttctcactctatgaaggataaaccactttttattcctttatgactcctaatttttctcattctctcacttaaaaaaataattaatgtcaatagcataagttatctgttaatatatcatttctcatcatatgatacattaatagtattgcctttaatatatgtttaaataagtgtggtcatatatgttattttaca

SEQ ID NO: 175840 - DNA, 420 bp, Glycine max
gcttctcaaagaagtttctcacgaaagctttctatttataaatagaagcatgtgtaatacttattgtaactttgatgaatgagaatcttgtgagacacttcaaagttcaacttttctccctctttttgtccttcaatttcatgctcccccttctttctctttctttcttttcctccattgaagcttcctctctaagcttattatccaagtcactctcttggtggagaagctccttcttccatggcttattccttagtggatggcgcctcctctcacctcttctcctttatcttccgctgcatctccatggtggaaaatcatcattgaaaggattgcatcatctcctcccccttggaaaggatttgacctcaaatcctgaggttcttgatactctgggctccttcccttgacacttgtaaa

SEQ ID NO: 175841 - DNA, 403 bp, Glycine max
  unsure (1)..(403): unsure at all n locations
atctgaaatttatgcttaaatgtttgttgttatgaaaanttgtttaaaggtgttaattacaaggattaagccatatatagtttaagtgtaaagttctaaggccagagtattattttgaaacaataattgttttctcgggactgcctttttaatagtgcaggaccctatacctagcctagagatgaaattgtctaaaattatgcacaaatgggctgatcacacacactgatcaatgtactatatctggctttatatgagcaagatatctgccccagctccttatctgcagcaatcttttctccaattttcaacaatttgggattcacaccatgaacattgcaaattacagaatttggtaaatcctgagtagcaactgagagacgaacaacctgaatataaatca

SEQ ID NO: 175842 - DNA, 351 bp, Glycine max
agcttgtgaaaatggacacggaaaggcctgtgttatgtatgcatttcttagcaacaatttattttatgtatagatcttgacctgtttagttgatctcttgattgagtaaatgaagttattttactaattgtttatttaacagatgtcttgtttttaccgatatctggtcaaatgggtacaaacatgaaaacaagagtggataaaaaacgttggtccatggtgcaatgggccttgtttatttgagacccttgatgctattgaagttccaccacgaccctagcggtcctttcaggtattgtctttctgaccatcatcttgttcccactttcgaggtccttattggttatttca

SEQ ID NO: 175843 - DNA, 460 bp, Glycine max
ctaagcttgtcgaaagttggaatttataattgaaagctattaagttgacttattgttatataaatgtttgataaaattatttactgaaataattgataaaaataaaataataaaattaaataaacatatttatattatattcttatataatttttaatttttttatgttaattagtaaaataaaatacacatatcatctatcgataacaatatcttgatgtaatgctgaaataataaaataaatattgtaaatattataatggttaaacattgtaatataaaaatatccaaataataagaataaaataaataaaaataaatttattatctatcattatcaatatgtgattaaagagtaaaaaaaagaataaagaagaaaacacaaaatatataataaaatgatatctttctatgttgaaaagagtaaaaaaataaatctaacaaatattttaagaataaa

SEQ ID NO: 175844 - DNA, 416 bp, Glycine max
agctttagaacgtttccatggcttgctgcggaaatcaccaactcatggattcactgagcctattcagctgaatatattcattgatggtttgaggctgcagtccaagcagttattagatgcttcagtcggaggaaaaatcaagttgaagactctagaggaagcaatggagctcattgagaatatggtagctagtgatcacgctgttttgcatgataggacacacatccctaccaaaagaagtctgttagagctttcttcacaagatgcattgttggcccagaacaagttgttggctaagcagcttgagacactcatagagacacttagcaaattgccaagactgctgcaagtagctcaaccatctcactcagcagttatgcaggttgggggctgaagtatttgtggaggggctcatg

SEQ ID NO: 175845 - DNA, 313 bp, Glycine max
tagatttgcatctgtctattggaaaaagaaaaatatacatacctgtgcatgttctacatattttgcattttgtgcattatgcattaatattcttcacacactaactgtttgacatattgcaatggtatttttaatggtattatatagaatatgtgtgagtagtagtgttttacattgagtagtagagcaaagtagtagtgaaacaaaatagtattgcagaggcataattaatgcattgtgtgtcgcagaagtaaattgtcttgtggagtttggctgcacaacttgatgtccaaatattatcctcaatactgag

SEQ ID NO: 175846 - DNA, 254 bp, Glycine max
cacgacataccaacgactaatggaccgagtcttctaacagaagatcaaacgaaaccgcgacgcacaagcggacgacaagggcctcatgccacaaaagctagcccaacatatggaaatactacaacaagtcgtcggagaaccctgcaaagatgacaagcgcctaaacccccaaaaaagcactttcagggcaggtagaggcaagatccaccgcgtcatgatcacccattggggagtgaatgcaagcccgacaaatg

SEQ ID NO: 175847 - DNA, 392 bp, Glycine max
  unsure (1)..(392): unsure at all n locations
gctatcctatcttttgcaaatcttttctgtttctctctcagagcatatgttccgcttgatttaatcacttgaccattttggagtgacgctaatggagccgtttgacgtttaatcaatccattgaaattctagggtttgtcccccccttttttttgtttaaacacatcgacgggtaagaacttttgatctgcccctatgttcacttgaggctcatgcacgatgcccctcattgtcccagtgtaaggctttgaggtaccaatcgttgtctttcgtcatgaccttgtagatgggaacatattgggtgggaacttctaatctgaccctaggttcacttgaggttcatgcacgatgcccctcattgccctagtgtagggctttgangattaatcgtt

SEQ ID NO: 175848 - DNA, 338 bp, Glycine max
gccatcttctcattaaaaatctggcttcacaagagtcatggtctcaagggctccaccacaagcagcatctatcatacttctctccatatgactgaagccttcataaaaatattggacaagaagctgctcccaaatttgatggtgagggcaactggcacatagatttttaaatctctcctagtattcgtataggctctctccactgagttgtctaatacctgagatatccttcctgatagttgtggccctgtaagcagggaaaacttcttttaaaatacatctctaaggcattccactcgtgaggaccttggacaaggtatacaacagcctttgcactc

SEQ ID NO: 175849 - DNA, 402 bp, Glycine max
agcttgacatcgaggacgcgacatatgatatgggaagggatgttggcacaggcagggagcggaaaatctgggaggtgtcgctccaagtgtccctgagggaagtacacgacaacgctccctttcttgggcaatgaaatcattggacccgcgcaagcgtgccagagttcaacgcacaccgtggatgaagaggatgaggatgatgatccacacgacggcgttacatcgtcctcggtggcgttggtgagatctatgataccagccatgaagcgaaagatagagtgaagggaataaatagaacaagagagtgaaggatgacaagtgagaaatgatgatgatttctgaaggaggggtgttgtgtatgttgctcttcatgcctgctggtgcttgtgctggtgctgcatt

SEQ ID NO: 175850 - DNA, 440 bp, Glycine max
  unsure (1)..(440): unsure at all n locations
acttaatnntatgtgtcggcatacttacttttactttcttaaaaactcnntaaataggggacagcatggttttatttattaaatagctctctttataaaaaaaaagccttaacctagtttcttttcttaattatcatagccttaacctaggagtttacttctttaaaaagtttgatctaacttaatctgatatagctggttaggcttgttgaacaatatggcctattgttatttctaaaggagctagataaaatatggaataaaaattaaatgacatggaatggaaggatctatctatgaaatttataagaatttgtcatgcggcttatgtgaggacataagtctcccattttctggcccgatttgggttgcactggcttatgttntgagttacgattatttcatctccttctttagttgccacgatggttctactacct

SEQ ID NO: 175851 - DNA, 407 bp, Glycine max
agcttagaactgcaagttattctatgattattttttatgatttactcttccaacgatcttagatgaaagctcacgtagagaaggcaacaactgtgataacaagtaggttcaaaaggccagtgagggtgtcaaatctaccagtgttgaagtttctgggaaaggaaatgatcttgttaaagatgagccaattagtttattgcctcaaaagaggataaacaaagcttcttttactaaattaaaatcaagaaagaagacttcagtcccatcagctaatggtaaatctcaaggattaaaagtgacatctcaggttgatgagccaccttgaactgatgactacttttctataagtaaagatggtataaaatactcaaacacttgcttagtttcgaaacttcatgcttacctca

SEQ ID NO: 175852 - DNA, 445 bp, Glycine max
  unsure (1)..(445): unsure at all n locations
actcagctgttgcaatgctacagctccacacttgtctttctcttgtagntgacctataataagggcatgtttggttgtggtggatgaagcttgaaaaagtacgtttgtaaaagacactccttcattacattttttatctcatcttgcttttaggaggtctggatccgcactgacgcgcacatattctcaaacgcattttctttcttgatgattagtttatcaaccttgtccattatacttgatgaaccacgacctttttaaaggaaaataaaaattgtacataaatacattgatattttctttcataatttaatttatttaactaaagaaaattgaagaagaaaaaaaatacacttttctgctatgataccaccaattgctgccgttcaacaagtttcgtgaattgngttatatatccacttacgggttatattatttagcatta

SEQ ID NO: 175853 - DNA, 413 bp, Glycine max
agcttcgtcaactgttttgggagtggaatttgcattggagttgggggagaaatttggaagctaggaagatatatagcagtgtcctttttctctgttaaatcaacttataacttagtgatgaaccatatagctaggttagcgtgtaaataatagtgaacagaagtttttaatcatctttggaattgtaaagtccctctgaaaatcgcttggcttttttatggcgctgcttatgagaatgtaaatcatttgttttcctccggcctgttcggtaccgtttctcaacaaaatgggtttatgtctatatactttattggaaatgtctacgattcttcatattatttatagcatatggctctatccttaattaggcaagatgttctagaacttctaccatattatctggcactcagtaa

SEQ ID NO: 175854 - DNA, 434 bp, Glycine max
  unsure (1)..(434): unsure at all n locations
tgccgcccagctcgcccatgcgagctcagctttttcttttgagctangctgcttcctccagaagcaacaaccttctggaggaaccttctggaaaacccaattgggccagattgctatttgcaccccctttttactaaatgcactccccttttctatttttttgtaattctttttccgtaacgttaccaaactttacgaattttgtaacgattcttattttttcttccgcaaggttacgaacccttacgacttatgtatttactcttttttagctttcgaagaagttacggaaacttacggattgcgcaaaaacacctcgtttcgatatccgccatattacgaaatttcacgaatcacgtaagcctgctttctttcgatttctgagacgtctcaggacttcattcattgtgcgacaaaagacgccaagtatctaa

SEQ ID NO: 175855 - DNA, 404 bp, Glycine max
  unsure (1)..(404): unsure at all n locations
agcttgaaagagtatggaacatttgtacattattaataannatnacttaatgaagntattgtgagtttcctttcttgctctattacagaaaaactttgtgcttgtgtacgaattacttgatgaagttattgtgattttttctttggtggttgtagactaagatgagtaaagaatacccaaggcctcactcgtgtacaacgttgatgacctcaatgggggcaatgcaagccacaatctttgcactctgtattgagaaggattggagccaatggaagttgggctggaatattaggcttctaacttcagctttttcggtatgctaatttcataattatataacaatggatggtgaattagtataccaataattaattattaataaactaaaatattgtggcagggaa

SEQ ID NO: 175856 - DNA, 416 bp, Glycine max
  unsure (1)..(416): unsure at all n locations
tatctaagctatacatgcctaagctacaataatcaattttatgctacacttgngaatgtgtttgccatataaaacatgcaaattaaaaaccaaaactatgtactaatggaaggtcttcaatcttctagcatcaacctttagatcctcaactaaccattgctcacctagtttgaagtcagtctatagagcatctatttgattaaggatattgattttagtgtgtagagaagttggtaggttatatagatgaattatttattcgacaaagatatggaatttttcatagacattttttatcttgggatttaattcggttaattctttctacattttctctaaggtgacatttaattcaacaaccctttgattcagcaaagcatgttttttcttgatggactttccttttagcatccact

SEQ ID NO: 175857 - DNA, 411 bp, Glycine max
gatgcagctgagcttgtatttatcttatgcactcctctaatgaccatagcctcatttctagcgctaaactgctgggagttggaagccatcttctatatgaaatttctggcttcggcaggaatcatgtatcctagggttacaccattggcaacatctataatacttctatacatattactgagtgcttcatgaaaatatgggagaagctgctctgaaatctgatggtgagggcaactggcacatagtcttttaaaaatctgccagtactcatacaggctcttctcactggattgactaatacctgagatatcctttctgacggttgtgggcctagaggcacggcaattcttttattcagaatactctcttataggcataccgactcgtgatggaccgtggggcaacgttata

SEQ ID NO: 175858 - DNA, 432 bp, Glycine max
  unsure (1)..(432): unsure at all n locations
tgcggcatgcaagctttaattgatcactattaaattagcttgtgtttttctttcatattctctatnnttttattggttcaaatgtttctttttcttttggcttaacattattttttttcattttgctattgcaatttgagagaagagaacttcacccaatatatgttacttaattagcttacaatactgatgtttttgtactcataagagatggaagttcatcatccaatgaatttggccaaacatagaaagtgaggatcaggtgcatcacataattaacaattaatatcttatatatatatatatatatatatatatatatatatattcttttatcgcttttcaggttattattattctatctttgggttttatcattatcattcaactacttcatatatgtatctttattttcctttgtgactatatttc

SEQ ID NO: 175859 - DNA, 440 bp, Glycine max
  unsure (1)..(440): unsure at all n locations
gccccattagaaaaggcataacatactccattctgtctttatttctccaagnngaatcccatcacatgggcacgaatgagcaggtttgagctccaagagtgattcccaaattgaacgcaattttgcataataagataaaacaaacataaaaccttgttgaagtgaaactaaatcacatttcagttgagaaatcaatggaccattgtgttgctcanaacgctcctttagatcattccaaatagcttttgttgaagaacaatgtagaacactaacatgcatctcctttgaaagggaatttagaacccaagaagaaacgatattatcattgtgatgtcaaagcacatagttgatgtgaccaggaggaggttcaagaatggaaccatccacgaaaccaaatttctttttgccaaggaaagccatcttcattgccttttttcatg

SEQ ID NO: 175860 - DNA, 423 bp, Glycine max
  unsure (1)..(423): unsure at all n locations
agcttcctcggggccattcctgcgaaagtttatatttttataagtagnttacaagagatataacaatcattacaaacaagggccaaacaacacttcttatggcacgagtgtcaacatgcactttataaaataatcatattggggtcgtgctattttatgacacatacgtatttgcacacataaaaattttgtatgaagcattttacgacacctatccatgtacatatttttttgacaaaccttttcatgctacatcctatatatatacacacacattgttttggaaggcttcttttgttacctactcacaaatacacatattttgaaaaacacttttacgctacccatccaacactttgtaaggcactttatgctatatatattcatattatgcaaggcattttcatgctatacatattcata

SEQ ID NO: 175861 - DNA, 425 bp, Glycine max
tccattggtggaacgaccttagaagactctattatctgtctgattttcacagcatccatcagaatatggtttggagagttggttgtggggacaaaatcaaattttggcaagattcttggctgactgagggctgtaaccttcagcagaagtataatcaactctacaccatcagcagacagtagaatctcaccatttctaagatgggaaagttctctcataatgctcggagctgggagttcaaatggagaaggagattatttgattatgagtatgcgatggctgttgacttcatgaatgaaatttcaggcatatctatccagaatcacgcccatgatagcatgttttggaaagctgattctagtggtgtctactccactaagtcagcctataggctcctgatgccatccatcagccctgctcctttc

SEQ ID NO: 175862 - DNA, 411 bp, Glycine max
  unsure (1)..(411): unsure at all n locations
agcttgtgcattcaatatcctgatgagggtgttccttatgttctcaagactggactaatacatttgctgcccaagtttcatggtcttctaggtgaagatcctcataagcatcttaaggagttccatattgnttgttccaccatgaagccccctgatgtccaagaagatcatatctttctaaaggcttttcctcattctctagagggagtggcaaaagattggctatactacattgctcccaagtctattttcagcagggatgaccttaagagggtgttcctggaatttgaagtctaacatttcaaaacattggtaatcgattacatgattatggtaatcgattacagcattgtaaatcagtttgaaaagaatgttggctactggtaatcgattactgccttctggtaatcg

SEQ ID NO: 175863 - DNA, 445 bp, Glycine max
  unsure (1)..(445): unsure at all n locations
ctcaagctntgatgatatggtcttcaccgaagagaggatcaaagtgggtctatttatatgcaaatctgatcatcatgctttgataaatgcaaaaaaaataaaaactagggcaaatgaagagggtgagaataagggagaagcccatgctgtgactgccattcctatacagccaagtttcccaccaacccaacaatgtcattactcagccaataacaaatcttctccttacccaccgcccagttatccacaaaggtcatccctaaatcaaccacaaagtctgtctaccgcacttccaatgacaaacatcacctgtagcacaatccaaaaacaccaaccaagaaattgaatttgcagcgagaaagcctgtagaattcaccccaattccagtgtcctatgctgacttgcttccatatctacttgataattcaatggtagctataaccct

SEQ ID NO: 175864 - DNA, 417 bp, Glycine max
agcttttaggctcatacagttgcatgttttgagtatttctatgacataccattttaatgagacatctactatgaaggctcctttaattgattgcttactgttctattccctcacactcttcggtattatatgcactcatgattccaatcccagacactttctaaaccacaaccatttattctactcaactgaccacaacaccatatataaatgtcgaattctaactaaaacatgccatatataaatgtcctagatactcataagctactatgaagaagttcttgctatgagttatgaagaatagttccttgcataggtatccttagggaagatgaagcttaagaactttacattatccgggaaaagttgataaggtgtagttggtgcttattgtggtgcatgttaaaggtttgatga

SEQ ID NO: 175865 - DNA, 401 bp, Glycine max
  unsure (1)..(401): unsure at all n locations
acacatggtaacacattggttaaacacactcatttgcaacacacctgccagttcaaggtttttgacaaccgtaatacacacatcaagttttcaagaccccttggatcacctaacggcttgccatgacatcctaccgcacttcatgaattatagagatggctagtcttataactcatgactcaacagtggatttatggtataacaaacattaaggatgcaagacacatacaagcattattatcaagtctcatttgctcatgcaaaagaaagcacaaataataattcaagcatgctcaacaaagtaatcataagtaaccacacagagtgtacaccagaatatgataagcacataacacactagccgaanaattcgacctgctctgataccactaaatgtgaca

SEQ ID NO: 175866 - DNA, 391 bp, Glycine max
tgcggctgcaagcttagggctgagaacctatataacagcatctaggttttagtttagggcactttttcgtttttgggagaaaagaataattttaggttttgcaattccagtttttactattcaatctacaatttcgttttctgcttcaatctgcaatttcgttttctgctgattaatggaaggctaagtctccagcgttgttttctcttgaggatcaagcacaactctctttgagattttattattactattgaattttaatcaattttttctcttcaccaattactctgtatttgttgctattaatccatgcatgcttagtgcttgattaattgtcactgcgtttaatttacgttcatgcttaatgatcagtttcgttcatgaataattg

SEQ ID NO: 175867 - DNA, 454 bp, Glycine max
ggtttctttttagatatacttggacaatgcttttaaacttggtgggacttgcagcccatactcactactagaaaatatggttttaccgtcgtcattttaacatcggttttataaaagccgatattaaaaaaacacggtggcataattgtaaataatttgagttcattaacatcggtttttaaaaaatcgattttgtgtcgatattaacatcagtttttattaaaaccatgatttttatatataaaaaaaacaatgttgtatttttacccaaaattaaaactccaattatttcccttctcttttcgtgctcactctcttcaccactctgcacttcccaaacccttcaaacacttttgctctcaccactctcactcacgacggtcctcatcttcaccactcttgctcgcgacagtgctcagattatgttcttcttttacttagctcataattcatg

SEQ ID NO: 175868 - DNA, 426 bp, Glycine max
catgcaagcttatatggaaactaaaattatttttttattactctaagtaatattttgtctctattactaagaagtcactaaaccatgcataacacaatataaaaatgttccaaagctgcttattaaatgatttaaaaaatactataaaaaaaggcgattgcactacagccaacatatgttgtagaataacacacagttgatctcacttcaagtctgtagttcagttttgatagacctgaactatcaattaaagttgctcaaaatcatacaataaagaaccaaaaattagagagcaagacacaaaaaattcataaactagttttgtacaattttgatatcatagaaaaagaagagataaaagtctagtttttattgtaggatatgatatgttccaacctagcattgatctaaatatctgtaagcatg

SEQ ID NO: 175869 - DNA, 444 bp, Glycine max
  unsure (1)..(444): unsure at all n locations
ntcatagataagtaccataatgtntacatcgttcaagctttcaaatntaaggtaccaaagtacacaacataaactagtacctactgaatataaattagtcatatccaactacacatcctaataacaaaataaaacaagaaatgggtcttcacttttcttcatttttatactggatctttatcagcagccttccttctagtgaaccttggtgttggcatgaatagtatgggtgctgttggtgggccatccacaacaggtgcatctactattgaagtgtcggaaatgttcttttgtttgggtcttctttgctactggtggaacatcaacaataggtgcagggacctacatgcaaatgccaaacatgaataacacttgtaatatataaaaacaaattggttagtcttaggagaacaaaatatttaccatgaactccatgtcactatc

SEQ ID NO: 175870 - DNA, 417 bp, Glycine max
  unsure (1)..(417): unsure at all n locations
agctntatcggtggtttgtcatccaagaattctccaaacataatccaagttgattggcaccccaaatggatcaaatgcaacaccgatggtgcttctcatggtgctcctggcaaagcttcctgtaggggtatttcttcataattctcatgttgttgttctgggctgttttgccttgcctcttggttctggatctgttaccactatgtttctttttaagacggttttatgaaaccatcttaaaaggtgcataataaaaaaccatttttataatagtgcagagctcatgctgatatgacaacaattgatattgttcatgttggtttaagttgagggtagaacgtgattccttactgttgntacagctttttaaaatttntatttagttacctgctgtcgcacacgaaaaagtgttagggg

SEQ ID NO: 175871 - DNA, 409 bp, Glycine max
  unsure (1)..(409): unsure at all n locations
ntgcttctacagagagatttcctaatatgatggggatgtgtaaacatccattgtcctctaaatgtcttgtgggtcttactttatatagcaagttccatttgagtttttcaataagtggttcctccttcttgccttgtagtatctctatttatttatcgaacttggccatcctctcattgtctccttgcttatggatacttagcttgctaaaatcaaattgtggaggattaagtgaggattgcataccttgggttgaagggttggcttgtgctttcatctcttcctctagcatggtgctttgttttacctcttcttcttcttcacctctcatgtcacactctatggtggagataatagccttgcaatgtctctttgggttctccattgtagctatggaaaatccaattga

SEQ ID NO: 175872 - DNA, 400 bp, Glycine max
  unsure (1)..(400): unsure at all n locations
agcttgcatcataaagtcgtgctattatattttttnttatagccggtgcccatacgctgaagctgaattcagctttgttgccatttatcaaattcacgtgattcatatcttcctgaagcggagggaaccattcttcttaggaaaatctggttagtgattaaccaatttcaatatagtcaaaagcaattcattcaaaacgccgctaagtagggaaaagtccaagatgctattttgcccatgctcaaatttggttcataagagtaggacaatggaatattttggcttgcgttaccttcaactataaatcttgaattaaacaataaaaagatagtttagattgggttatctttaactataaactctcgatcagacagtaaaaagatctataccatggttgatt

SEQ ID NO: 175873 - DNA, 450 bp, Glycine max
  unsure (1)..(450): unsure at all n locations
ntatctccaaggcatagaatgattgcacttcttgctntttcttcatctctgannnctcctttgagcttagagattcagacatcctttcttcttttttaagagcttttgcaaaaccatgttgaatcaagattgcttccatcttgattctccataacccaaagtcatttcccctgaaaacttctcaatatcgtactttgttgatcccatctttcttaatcttgtcctcacagacgacgccacttgttggttcttgtgtataagttctacttctcttagaacctgcacaagatcaaaaacaagaaaacacagcaaagaaatacacagtagagcaagacccaaagatttacgtggttcagcaatgtgcctacatccacgggaaagtgcagcttctcatcatcacattgatcatgaaattacaagttcaatacaagcagcaactagctgtgatct

SEQ ID NO: 175874 - DNA, 416 bp, Glycine max
agcttcttatccaaggcacattcttggtgtgtatatctccttcttccatggcttataccctcgtggatggagcctcctctatcctcttctcctttgccttccactgcatctccatggtggtgaagctcaaagatccagcctccataaaagctccacaagcaagcttccatcaagtggtaatcagagcacaaaagcttcaagtaggtgctccttaaacctccattaattttcaactttaccttctcctccatggttgtttcttcatttttctccatgtatctcctcacatgtcttgtgctaaatgtttttaacatgattctttagagtctccaccgattaaacttgctatagaagctagatttgattttctatggttcaaatttcttggtcttgttcttgaaccatgaattatgttc

SEQ ID NO: 175875 - DNA, 409 bp, Glycine max
  unsure (1)..(409): unsure at all n locations
agctnggggcatatgatatatatgctctcttttaagggggcttgttataaacttgaattgtcatgaaccaactctgtcaaaagattaagctgttagcctgttaggtgaagacacacatggttttatgttatatatctaaaaatagtaatctattaatatagcttacaggttcattatacatacaattttaggtccaagtcatcgcatatattttcatgaacgaaatcaggacctgcatattcattattagattcatatatgaaattttgtccatacttccatagtggccattgacacattttcagcatatgattctcttttctatctctttctcaacaacaatgagcccaaggagcaaagttttcttatgagcatcaatcaagattgtacattatttatatacatgata

SEQ ID NO: 175876 - DNA, 455 bp, Glycine max
  unsure (1)..(455): unsure at all n locations
tggttntgggcaatagcaccccacctgacgtttctaatgtctcctgacccccgcgacatatctccaggtaccactctgtggtcaacgaataaaagtaggaagtctcacccttccacacttcctcatttcaagcttgtaggattatggggtacccatcacacgtggtactaggtggcggtcgggcgatggtgcaaaacaattctccacatccacaaatcacgtataaacccaccatcccctgttgcccacctcaactgagctcacgtactcccacgtagcccttatcctcgttcctctcaacgccgggtccccatcaatcctcccaagctttcacaacatccaagtaattccacatccaatcatcatgaactaacaaaaccaagcaaaataggcaaaggcagaaaactctgcccacaacacaaaccaatatcacagcttttcacatacaaataccc

SEQ ID NO: 175877 - DNA, 364 bp, Glycine max
  unsure (1)..(364): unsure at all n locations
ctcctcnnccaggctaatccctatggatggtgctcctctctctcttctccttgcttcctgctctcatggtagaaaatccccttgaatgacctcattgaagctcaaagatccagcctacatataagccccacatgtaagcttccatcacaagttgtgtgggaatatggaagcgacaacactcctacgccagatggcattaatttcaaatttattaaacaattttgggaggtgatcaaagccgatgggcttcaatttatggacgaaagggaccaatgctttcattctacactcatttctaaggcgcatgatccacaaaaccttaatgattntacgtctatttccttaataacatgcatatactaaa

SEQ ID NO: 175878 - DNA, 365 bp, Glycine max
taagaaaccatggataaactatagtccttaatctttggaaaagaccttaatcccttcctttttattttcttaaacgcgattggcttggctatgagatgatatgcctttatgtagtgtgaaagacctcaccatattgctactttccatatattaatcttcaagatttggcataaccattctcttattactttgtttattttgcccatgtatggcacttcttgtagtgataccaacaagttatagatagttgacgtcacgagactacttgatgttacattaatacatatgatacttcttttgtatacatcacaattttagtgcatttgattataccacaagcgatgcacgtatattattatctttca

SEQ ID NO: 175879 - DNA, 409 bp, Glycine max
  unsure (1)..(409): unsure at all n locations
agcttgaatatgtagagcctattctgttttattgttccattcngcctatatatataggccccaattatgcagaaaaggttatctatctcatagtttagtgtgaccaagctgagaagtgagaacaaataagacttaatttaaaattaagtattagtcatatgttacgttctatagtgcaactttatcattccctcactaacatagtaccaaccttacctaccagtcaccactaatccttataaacttagaattatgcaaaaaaatgatatctagtgccttgattcagtaccatatgttgattacagaaagatacactaagtccctgtggattttgcttacacttactaatatctaaccatgccatactcatcctaaatgacaccatatgtggccctataggtctatctat

SEQ ID NO: 175880 - DNA, 447 bp, Glycine max
tcttatccaaggctcatcttgagggagaagcttattcttctatggctcattccttaaaggatggcgccttctctcacctcttttcctttgtcttccgctgaatctccatggtggaaaatcaccattagaggaccccatagaagctcaaagatccagcctccatagaaaccccacaagcaagcttccatcaagtggtatcagagcacaagagcttcaagtaggtgctccttaaacctccattaattttttgctttaccttctcttccattgattttcttcattttttctccatgtatctcctcaaatgtcttgtgctaaatgtttttaacatgattctttagagttttcaccgattaaacttgctataaaagctagattatattctgtatggctcaaaatatcttgttcttggtcttgaaccatgaattgtgttgagttaagttcctt

SEQ ID NO: 175881 - DNA, 421 bp, Glycine max
  unsure (1)..(421): unsure at all n locations
agcttattctactaaggactttagacaacatgcattttattntttcttttcagaatcatacagattgttcgcattcatggtagcaacacgcctagagggtaccttcacatcaggattcaaatattgtaataattctttaaaccttctatgttcaacaatagagaatggaagatcatgctcaataatcatcatagatatcatctcacgtaccgcactttgatttatttttttatttcttaatctcccagcatgatcgagaataatatttccaacatcactattagaacgcatcttcaaatatacatcacatttccccatatgatgttgtaaggttgaagtcttattcttatagtcactacccacacaatctttcaaacaatatttgcatatactcctcactttcacatcattatgtataaca

SEQ ID NO: 175882 - DNA, 451 bp, Glycine max
  unsure (1)..(451): unsure at all n locations
tcagtaataattaattcaaccctccttcttaattatatctaggctctttgatccaacgcttctcttgcttctttgtagcccatctgctagaaaaccttggactttacctcgaactctagctccacaaaatcaaatatcttatcctgtgtgtcgcaacctacccttcggcgggagggcgacgcgtgactcgcgggatgcgtgttccacgaaaggaatacgcgcggagtcgccaccaacgtttatttgaggaaaacgttggaaaaaccggaaaagacgcgatctacgaactttttaagtgaaaggttcgggagttgtatttacgcacggngaaggtattagcaccccacacgtccgtcccaagggacgacggcctttaatcgaatgtgcaaacatgactttggttttttatgttcccttttatgtccttatatcccttataccctctttatat

SEQ ID NO: 175883 - DNA, 424 bp, Glycine max
gacctgcagctgcaagctgcagaagaagaagccagcatggtattcttgtggacttcaaaaaggctaacgattcactctcatggtcctttcttgactatatgctgcaaagaatgggattttgtccaaagtggagacaatggatttcagcatgtctcacaacaacaaccatatcagatttagttaatggcagtccctcaaaggagattgtcccttctaggggctcgaagcaaaaggaccctctacccccattgtattgggataatgctgcggttttgaacgcttcgctgagaggcttcgaaatggtatcacgctcgaggattaattaatccaacagccactctggagttatagggggagatgttaatcggatcaatgcagcatctcacaccttgaattgcagtcttttagagacccctttcaacta

SEQ ID NO: 175884 - DNA, 433 bp, Glycine max
tgtcccaactttcccatgaagtggtgtcaggggacatttttctgtcattgaaccaaaaccattaaccgagggtccttagtaaaagtatcccacttagtatttaaaatggaaagggggtaatgatgggttgattgtcctccactgtgtttggtaagtcagcaataacgttgaccaagtcaggagattgatgatatggcttgagaagagaataatgaaacactagatggatatgcgattcaggtggtaattgtagttgataggcgactagacctatcctctggagtatttgaaatggcccgtaaaagtgtttggctaacttagaataagtagcaccagtgactgaggtttgatggcgagatcgaagcttgacaagcacccaatcgcccttctgaaagttgacttcgtgtctattgctatccgtgaagtgcttcat

SEQ ID NO: 175885 - DNA, 379 bp, Glycine max
agcttgaagcaggagccaatttgagaaattgagatgagtttgtgagtgatcgcgagaccctataggtgaaggaaacatcctcaccacatgtatttttgcaatccttcatcttgttctactctttgtagtaaagaaggcttcttggtatgcaaaactaaatcctttgttggatcttccctgtaggtacctgaagtaaatatattcctatccatttaatgatgctttgcgtgatctctgagctatctgcttttcactccaatatgcctttaccttgatcacgtagatgcatgctatgttagggtcattcaacaggggaaacctggcctgactctaaagtccttgatagcacaaggctaagttgtcacactatcacgaagaa

SEQ ID NO: 175886 - DNA, 380 bp, Glycine max
acatgcatactcgcccaatatcaccaagtgaaccacggaaccttgtacgatacaatactggaatgaattccatgccaccttactacttccttcatatacaactccactaccttctccattctatactacatattcactggaataaaatgagcccatgctgttaggagatctactatgacccatataccatcatgtccccgactactcttaggtgaactagatgcaaaagacatagatatgctctcccatctgcattccggaatttccaatggcttcaatgctcctgatggtcgctggtgctcacccttactcttttgacatgtcaaacaccacgctacatattcagctacatctatcttcataccatgccacccaaaact

SEQ ID NO: 175887 - DNA, 406 bp, Glycine max
agcttctttgagaaaacttccttagcaagctagtatttatctacacacacccctctcataactaagctcacctccttgagaagctcccttgagaagattcctataaaagctagagcttagctacacacacctttctaatagctaagctcacctccttgagatgagaagctagagcttagctacacaccccctataatagctaagctcacccccatgacaaaatacatgaaaaaaacaaaaaaaatccctactacaaagactactgaaaatgcctcgaaatacaaggctaaaaccctatactactagaatggccaaaatacaagacccaaacgaaggaaaaacctattctaatatttacaaagaagagtggatccaaccttgacccatgggctcaaaaatctacctt

SEQ ID NO: 175888 - DNA, 225 bp, Glycine max
ttctttgattatagtagcccgggacatttctatcccttgacattatactgtttggttggtaaagcataaccttgcgggcgattttactcaccgagcgcctactgtatgcttctatgacgagcaacatatcccactgtggagtgatgcttgagagggacctatgcgtctctcagaaattctgtatcatcacacaacattcgcttgtcgagatgacaaacatggaat

SEQ ID NO: 175889 - DNA, 190 bp, Glycine max
aaatggtaaaacccaaacggacaataaccccgaaccccacacgaacacacaaaacacaaagtgccagcccaaagacaaacgctcacccaggccccacaaaaaaaacgctcaaaaacccccaagcacgccacatacacgaaccacccaggcacattccccaaagaagcccttgaaaccgaaaaaagggaaa

SEQ ID NO: 175890 - DNA, 458 bp, Glycine max
  unsure (1)..(458): unsure at all n locations
ntgaatatgtgaggagagaaacttttcactcactcgcttatttttatttcattcaaataacatatatatatacaaataggagagagacagcttgacaagctttgacaagacagtacacactgttgtcttcttcaacaagataaaatagggaaatctactctaaagatacatctaacaatacccataattataacaaagataaaaaaataaagatccatgtacacatggttgaacaaaaaaaaaatctatcctaaaaattgaagattagagagagagagagaggagagaaaatcgtcccaaaacttctccaaaacaggaaaaatgaacaaaagaattaacaactatatccaaattgttattacaaggcttnttaaagaggtactaattcagttattnttttgccacatcatcattcgctgcaatgaatccttacttcttcagcaaaagatctttttcac

SEQ ID NO: 175891 - DNA, 313 bp, Glycine max
catgcaagcattgagcaaaaccaaacgacaataatgtgttgcccggaagacagacagagtcccgcaatacatggccacgctggacaatgacgcggcgaagcaacgctacaaatgtccacagcggaaacgatggactcggatgtgccgagagaaccccgaacaacaccgagacactcgacggcgaactctgaaacgaggagcccctccaacgagcttgacgcaaaaggccctgtcccccagagccccgggacaacgagacgctcgaaaaggaatggcgaaaggttaccaaatggaaacgagcatgacgactaaa

SEQ ID NO: 175892 - DNA, 277 bp, Glycine max
gttgaattggttagagcttcaacatgaattcaagcgcttgatatattcggaactcatcaacatccaagaaaaagttattgtcgttgaatattgttcagcgtcataattcaatttcgagcgcctcaataatacgggactgaacgacatcgacaaaacattattgtcgttgaatactcaaccttcaaattaatttcatcgttcgattatacgggtctaatcaacatctgaggaaaaagtattgctttgaatttgtggagcttcaattcaatttgaccgc

SEQ ID NO: 175893 - DNA, 406 bp, Glycine max
  unsure (1)..(406): unsure at all n locations
agcttgaccttggtttagacatgattgatcttgatttgggacttgtaggatttgatttgggcaagattggatgaggggaagtgtggttttcgaaatctgcattttgtgcagatttttgctgtgaaattgtgcagcaggattttgcacaagtgcagaaaaatactatgcatttgctggttgtggaaagagcagtgcataatgagttctggatgtttgctagtatatcccaacggtcaaaatgtaggcttatgtactagagacttccagtaaaaatttggagtcgatccaacggttaacgaattggaacgaaggaattgttactggggtctntaagtgagaaaagctgtgattntggttggtgttntggcagagttttctgcctttgcttctgtttctcggctgtgat

SEQ ID NO: 175894 - DNA, 388 bp, Glycine max
agcttctcaaagaagcctctcgatataagtttctcatggaagctgtgtgaagctctctcggtaaaaacacccttctgcatttgttaaccgttggatcatctccaaacttggtctggaggttcataggacagctttccacgatctgactgttgcgatttgcgatatgaattttggtgtggtcaagacgcttcctttcccgagagcagaaacacttgagtgttgcaagccttatttttcgtgtaaccttggaaaaacagacgttcctttctcttcctcttccccaaaaccatttccaacgtcccaagcttcttctccaccacccacaaccaccggtggccgtcataagccgccgtagctctccgttgaaaccccacaccgagaggaaccc

SEQ ID NO: 175895 - DNA, 342 bp, Glycine max
  unsure (1)..(342): unsure at all n locations
cagtgggacgcccaaactaaagcacaacacgttctttctaacaaggagtagtttatcttataagccgtgaacttcttactcaagtagtatacaacgcgctctcgtcttccggactcagtatgttggccccacattacatccatcgactcgtccaaaatcgtcataatacaaaatgaaaagccttcctggtaccggcggcataaacacaaaagggttcatgagacactgnttgatccttccaaatgcctcttgacaattctcattccaacggacgaattggtttttgcggaaaagattgaataaccgctcacaaatagcggtgagctgtgatatgaatctgac

SEQ ID NO: 175896 - DNA, 403 bp, Glycine max
  unsure (1)..(403): unsure at all n locations
agctnttgtcactccacccaaattgtgccttattttgaccaaagctaacaccactgacaaccttgagaaagctgtgcaccctgaatacaaaggcttctttgaatcattttctattttgtcatacaaaggtgtatgtgtttgctgaaaaccgtctttccctagattgcgaatcatgtcttctataccatgtctgatgtcttcatgaaccagctcagtgtgggagactattggcatatgtggcaattccccatgccatatctattttgtgtaattcggaatgatcctgtcaaatataagatgtgatctaatgtaatttattgattggcgtctcccatttccacatttaacacatggacataaaaatttctcatgcaaagatggtgcattacgttcagtaaattgc

SEQ ID NO: 175897 - DNA, 437 bp, Glycine max
  unsure (1)..(437): unsure at all n locations
tcttgaaagttgatgcatgacaaagtctttttcttctatctctgnngaaaaaattatataccatgcaaatgcatgaaggtgaatcaattcataaacatatagataatttcaatcgtattgttcttagtttgagaactattgatgttgcggtggatgacgaggaccaacttgttctgaaaaggccaattaccaatttatatggtggtggtactagcttacgtgagggtttaatggtaagaggaagaattgagaaaagggaagaaaactgtccaaaaaaggtgtctaaattgcgcaacatacataataacaataacaaatgccataattgtcagagagaaaggcactaatagagaaactacctggagctcaagacaaagcaaattcttcattgtatggtggagcagtagtggcttataaaaatctgatgttggaatgtt

SEQ ID NO: 175898 - DNA, 452 bp, Glycine max
  unsure (1)..(452): unsure at all n locations
ngaagtgagaaagtgtggaagagtcagtcttctttcttttattcgttgaccacagagtggtacttggagatatgtcgcgggggtcaggagaccttggggacgtcaggtggggtgctattgcccaaaaccaagcttgaccaatcccgacccaacccgggcatagtcagtcagtgagaacctgtgacgtacctaaacaggcgagctcctagcagtcaaccgataaaagaacaaagaccacaaagcaaggaggcttgtgtggtggctggccaactatggattttgagtgatatctggaatatggcctctgataatcgattaccaagggtgtgtaatcgattacaaggcataaaaatgaagacaggaagttaagatggtctctagtaatcgattaccaacggtgtgtaatcgattaccagcgcctaaaatgggatcaggaagttgagatggcttct

SEQ ID NO: 175899 - DNA, 411 bp, Glycine max
agcttcaaagtaaaaaaaaaaagttctttttgaaagaaaaaaaagcatttgattgactgtgttttcaagacgttcatgtgacctcattttatcattccgaaaagtttgttttttttagagagaagtagttatcaagaataggatgttggacaaatggcctcagttatcttaagaaggggggttgaattaagatacaaagactattccccaattaaaactttcactctctctttttggattaacaatgcacccttaacatgaattactcaaaagacaattcaaaataaacttctttaaagaaaaagataaaatagcaataaataaaagaagtttagggaagagaggaatgcaaacttgatttatactggttcgatcacttctcgtgccttcgtccagtcctcaagcaaccca

SEQ ID NO: 175900 - DNA, 444 bp, Glycine max
  unsure (1)..(444): unsure at all n locations
tccatcacgctaaggcgttggaccattatcgatctcttgtggtggncgacaaaagtggggcttttgctcctacatatccttaattgcaatgagaaaatcaaacctacgtatttcttgcagaagtggtaaagttacatgttgatcttatgcttntgaatggtccatgttaaccgataaaagcaaagaggaccgtttaaagaattggaccttaaaacggtttcaagttgattttgcggacaaagcttgatttgtgagttgattttagccttagtttcactttgggttttagtcaattcattcaaggaaacttccaaagaaaaacgtncgaatgatttttttgattattttattcaaagatattattgttattaattattatttttaccttttcgaattaacttgagataaaacgtgaatgatctgttggattatatttgatagtga

SEQ ID NO: 175901 - DNA, 364 bp, Glycine max
ccccatcaaacaatcaaaattaaacttatcattataaaaaaaaccaacataatacttcaaaattggccaaaccatagctggaggaaacatatttgtgagaaggggaaaatgtacaaatattactcatttcatttcaagaatttatggcaaacacaattagtctcattgtgaaaaacataccataatctgaagcaaaatgctagctgaaaacataaaagccaacccagcaatgctgctattccaggaaagagatcgttaaaagttgatctaccttatattagaatataatcaatcatgctacaaaactcagagaagttatctttacacttacactgcaaagataaaacacttccgaacaccaatt

SEQ ID NO: 175902 - DNA, 440 bp, Glycine max
  unsure (1)..(440): unsure at all n locations
tatngggttagaggtggacaaatgagttttggttttgttttttagatcttacaaccaccgcaactaatgtgagtctgtgtctaaaatttgttcaaccatttatgtggaattttatacgagggaaattttttgtttttcagaaaattaagttgacaattttatttggaaaaataaatttggaaatgtttattctaaaaataaaattcttattaaaataacgttttccgaaaaaaatttacttacgtttctataaaattatttttattctctaaaaaaatatcttccatcgaagtaaccatattttaagaattatggacctaattgaaataacaaagggtaaaattgacttggttttaaaaattataagataaaccttatattaatagtaagacaaaattgaataaaatatattaatagtggggaaaattaattataaaaaa

SEQ ID NO: 175903 - DNA, 416 bp, Glycine max
  unsure (1)..(416): unsure at all n locations
agctntcaaatgttntaagcaatgggtgattcttatgaagaatcaaacatgaagtatcttaggactaccaatggctngaaattttgttctacgaaattcaatgaaatttgtaaagatgaacacattgtaagacaaagtattgtacactatactctgtagcataatggagtagttgaaagaatgaacatgcctttgttggaaagggccagatgcatgttatctaattcaaggttgaatatgactttttaagctaaggcagttaacacaacatgctatctcgtgaatcgctcaccatccattgccatagattttaggacccctattaagaatggtctaacaaacctgttgaatactcaatggtgaaggtgtttggatgtccaacatactatcacataagtgaagataagttggagctc

SEQ ID NO: 175904 - DNA, 459 bp, Glycine max
  unsure (1)..(459): unsure at all n locations
ttcttttgagtttctaatctcttccttattagcacttgctatgatgatgtcatccacatacaagagaaggtagagaacacacatttttccctctttcaggatatatacatagttgtcatatctgtttctaatgaagccatatctgatcaagaactcatcaaatttcagataccacattcgagggctntgcttcagtccatacaaagattttttcagcaaacacaccttgttctccccttcttcaaaaccttcaggctgattcatgtaaatggtttccttcagatttccatggagaaaagttgttttaacaactagctgttcaagttccaaatcataccgatttaccagaccaagtatgattcttattaaacaatgcttcacaactagtgaaaaaatctcattgtaatcaattcctttaacctgtgtaaagtcttttgctaccaatattgccttgaatct

SEQ ID NO: 175905 - DNA, 360 bp, Glycine max
gacggcactccttatattatgacaaatgatgtgcatccatgtacagcttgtatgccttggaccctcttcattaatggagaccttttcttctataagatcaattggctatggaatggataaggacgaaaggacattgcatatgccactttcattgagaagactatgccttaacaatgtcaccaccataggataccatggataacagcttgaacgctggacaagatgattttatggagacggagagagggggccacacaatttatgcctcatatgatgcctgatattggaagtgtaatttctcacatgatcgaatttccaaataatgcacacaccaggcctctatttatatcctatgtgtca

SEQ ID NO: 175906 - DNA, 374 bp, Glycine max
  unsure (1)..(374): unsure at all n locations
ttcttcattttgttattgctagaataacaatatctttatcgatggttccttgacgtcaatggggatcatgtcgtctgtgccatatgtgagtcggtaaggagtttcattggtcgctatttggggtgaagaatggtaggcccacagtatactatggagttcctctctccatagacccttanacttgtcgagtctagtgcacagggcatcgaggatgactctgttggctgcctctgcttgaccgttagtccggtgatgttcaacagaggtgacgaggtgcttcatgcctagcctcatcaagaagtcttcataggtctgagctttgaatcgagtgtcgttgccggtgacaatggtgtatgggaggtcatacctgcata

SEQ ID NO: 175907 - DNA, 418 bp, Glycine max
  unsure (1)..(418): unsure at all n locations
agctngcttctacaagaggtgtcaaccctacttttttcctcaaagcacgaaggcttaaagagaccctttaatttttgcggcctgacaccccaacacaatcatcttgcttcctcttggccaaaatgaaggaaggaccattaagggtgacctcaaaatcaccaataatagggcaaacctcaacagtaggttgacccccttctatagcagtaggagcaacagcaactggtagtggcacaatcccgctaacatgttaacctgcttcacaaggggctatgaatcatgcaggttttgatgatgctaaaataatttacttcataatggttgtcatcatcaaaaagggggagaatgtgaatgtatgtatacaagtttttgataatgccaaagtatatagaaacaagattgcttcaagaaacattca

SEQ ID NO: 175908 - DNA, 386 bp, Glycine max
gtcatatctagtcaaggtctgagagaccatacaaagtttctaacgatttctaattatgtgggccattaagtctatcatatgctgacaataaccgagaagcccatgaatctcttctggggcggagtaagtgtctgccatcgccttggccttggctaacaatcggggaagttcttgactcccgttcaaggtaagagcaaaccgatccatccacatggttgcctcttggtgtaaagagtcgatcacccttcctctagcctccttttccgcatatacttgggcatactcatccgcgattctatgctcgtgggccgtggctagacccaactcttcttggtacttggcgatgatagctaacatgttggtctctgtctcgcatagacgctgag

SEQ ID NO: 175909 - DNA, 403 bp, Glycine max
ttcagattgatagcccgaacattcttttttttttcctgaataaacatatatttcatgaaaataatcgtatttaagtagattaagagtattattataaataacaaaattctcgtcaaataactatattatcacgtctgagagtcaatattactcactagttaagatgaaattgatcaaaaaagaaaataaattttcattatttaatatgaatctcacacatacatttattacactacttcactttaaatattttttttcttaattttctttatgtttcattctacacaacccaaaccatatatacctaaatgtggcagtaaaaaagaaaccgataataaataaaggagtaaatgattaagtccggatccttaaattggcaagagtatgttgcttgtcccatgat

SEQ ID NO: 175910 - DNA, 449 bp, Glycine max
  unsure (1)..(449): unsure at all n locations
ctcttcttgctaaacacgaacactctttcttctctatgtntttntcacttaaaaaccattacgagctgagattctatgccgagggtgtctgcgcgttaagcgcaagtgattgagcactacgcgcaccttcacatgacttcagattcttcagactgcttctttgcgctaagcaaacctggtgcgctaagcgcgaatcctcatgtttcaacttctcttcctatccctttcctgcatttctataaaataaaaaccaccaaaatagaatgaattaacagttcaaggtacctactgcacaaaaactcaaaggatgtcagaattctaatgattcacacaaaaagaagcaataaaatgacagaacattgttaattcttatatgttttaattacataatctacttatgcatatcagttattattgagaaaaataaaatatacttcaatgatctctac

SEQ ID NO: 175911 - DNA, 434 bp, Glycine max
  unsure (1)..(434): unsure at all n locations
tttatataagctgaaccatgttatcaataaacttaagttgagttttattcacaanattagagtttatctcttttatcttagtgagagtgattctcctaaattcttgagtgattcaagaacaccctggttgtatcaaaggactttcacaacctttgtgtgttgccctcgtcgaaaagagtgattctttccttcctttcatcttcaaccttgttctttcaaaccacaattccagaaaatccacttctgcccagaattatctcgtggccataactctcattttacgcactcaaattaagtgattctagagcctaaattgaatttcaaaacgagacctttcacctcgttttggaatcacctcatttggagccctgtagcttgagttattgccatttctacatttctgtccagccaccacttcttaacctacgttttac

SEQ ID NO: 175912 - DNA, 402 bp, Glycine max
  unsure (1)..(402): unsure at all n locations
agcttctcgatatattactcgcctgaatcttacttccgtgtgactagntatgacaatttgaatttctcgatagcttccgctattcaatttaaagcttctcgatataatatgcgcctgaattggaccccccgactgataacttatgacctattgaatttctcaagagctctcattgtacaatttcgagcgtctcgatatattatgcacctaaatcggccctccgtgtgataagttatgaccatttgaatttctcgagagctttcgttgttcaattccaagcttcttgatatattatgcgcctgaatcggacatccgttcgaaaagtaatgacaatttgaatttctcgagagctttcgtttttcaatttcgagcctctcgatatattattccactgaatcggac

SEQ ID NO: 175913 - DNA, 417 bp, Glycine max
  unsure (1)..(417): unsure at all n locations
tctcgatatattatgcgcctgaatcggacttccgtgttttatttatgaccattngaatttctcgacaccatacgttgttcaatttcgagcgtctcgatatattatgcgcctgaatcggatgtccgtgtgacaagttatgaccatttgagtttctcgagagctttcgttgttcaatttccagcttctcgatatattatgcgcctgaataggacttccgtgtgacaagttatgaccattggaatttctcgagagcttccgatgttctatttcgagcgtctcgatatattatgcacctgaatcggactttcgtgtgacatgttatgaccattggaatttctcgagagcttcctgtgttcaattttcagcgtctcgatatattatgctgctgaatcggacttccgtgtggaaagtatgacc

SEQ ID NO: 175914 - DNA, 383 bp, Glycine max
  unsure (1)..(383): unsure at all n locations
agcttgttcaaattcaaacagcgttcttgtcttatctttattggctgccacagagaaagacagagagagatacacggcgacagagttaagagttgggtcatccantcctacacctcctggatgacgcattcttcgagattagtgggaggttctagcgtgcccatctccttggaattttctgccactggcaatgtttctctgatgtggcggcaccattgtcaacctgagggaaaaaaattagagcaaatccgccatgccaattgagcgagaaataaggcttctgtgaaaaaatataaaaggaaaaatataaaaccttttggcgcttaaggggaggaggattaataatgaatgagaatgaatataccagatacaaaattgagaaa

SEQ ID NO: 175915 - DNA, 435 bp, Glycine max
  unsure (1)..(435): unsure at all n locations
ctcagctttagccaatggctaccttaataattttttgtttgccccttgagcctatgttcccctttctttgttttgaagctcattacaagccttaagtaaaaaaccatgatatcaccttacccttaaggaattntggagctttggaattgttttgggaataagtatgggcggggggtatgtttcattggaagatatgatttttggccatgcttaatgttctattttggccatgcttgatgtatatgtatattgcctagttcttgctttaatcttcaatttcgtactgttcaatctaaaaaaaaatcagtttctgcaaattcttcaatttcgtactgttcaatcaaaaaaaaagaagaagaanagaagtgaagttgaataaatgaggtcttgttatgaggacttcgattgggagccttgcgttgatttgttgatatt

SEQ ID NO: 175916 - DNA, 407 bp, Glycine max
  unsure (1)..(407): unsure at all n locations
agcctcaatccacgagagagagcaacctttcttactcngactgaatattcaactgaaagacatctaccaccagagctacaatcaagaaaaataaataccaatcattcttactgcgcatatgaaggatatctaaccaattaatgtactacttgagaaaatttttgaacagcataatcgcttactttccatgagtattttccaagcaaataagccctgtggctggatatactagctccccctatggatctctgatggcagcctcaatcaaatgaatgtccatgggtccatctccatttgttctaactggtgttggatgcacccctccaaaggtggcaatgccgccattcttataaaagcgtatgtggaaattggccctcacaataactccacttcccctcatgtcacaa

SEQ ID NO: 175917 - DNA, 450 bp, Glycine max
  unsure (1)..(450): unsure at all n locations
tgaagcgcttcctaatcatggagaattgggttgtgattttatttggaaggccaacgntcaccaatcactacaaacaggaaatcgaaagatgtagagaggttaggcattggaaaagagaggtcaggtgcaagatttagagtagcattttaaaattaatctaagccattaatttaaaatgaaatagaagattcagattgagagtaatttgaaacctaacatgatgaggggtaaaaagaatcttaattgacctttagccttgatcaaccacccaaagtgatagcttcaccaagtctagaacatcgatctgagaaattataattactttatatataattgaacaaaagaaaatagtaggttcaatctcatccctccaaattcaagaataagaaaaatgcagatacatgtgtgtgaatatatgtcatagaattgaatagattgggttccattcca

SEQ ID NO: 175918 - DNA, 86 bp, Glycine max
agcttgagatgaggaagagtagaatggtgatttctttctgcttctaactcggaagaccacagaggcggtactctggaagatatgtc

SEQ ID NO: 175919 - DNA, 330 bp, Glycine max
  unsure (1)..(330): unsure at all n locations
cggacacaactttatagacacaccctataagagagnatttttatagncattaagagatagagggtcattgagcttggggataagggctatgaaagatgcattgcttctttttgggaaagtgcccttgatatataactcatcccagaacccaataaaattagcgtttacaatcttccaacattgcttaatatagtcgaaattgaagccattcggaccaggacttttgtcttcaccacatgcccacacagctgatgtgatttccgatctagagaatctagcaaccacgctatctttctctccttggccaaaggaaggaaactgaacaccatc

SEQ ID NO: 175920 - DNA, 348 bp, Glycine max
  unsure (1)..(348): unsure at all n locations
ncagcttatagtagttatattgcccgcgcatatttgcttgggtttgaccttcttgaatgtcttgatatttgctttgaccttctttaatgtgaataatatgtgtttatccttaacaaacccaacttcttgtctcagcattctcaggtgggtgtaaacttgtgtccactcttctatcttctttcccaggggagagagattttatatgttaatttgttttaccaaggcatgtgggaaggtgacactcccaaggtttcaattttgtatttgcttttagagcttaattcatattcactaactatataaatttatcttatatcattatctaatcctgatgggggattatgaaaa

SEQ ID NO: 175921 - DNA, 438 bp, Glycine max
  unsure (1)..(438): unsure at all n locations
tcatacaattaatatagaacctatattctaatgtcacattctatcagagggttgngttcccgtgccctctagcatgaggttcttcatagtcatccacctattcatctgctcccccgaacacaaagttcaagatcatcacaggatccaaacacaaacagcaaaccgggaatgagttatcacattcctaactactagagagaaacaagacaacatatagtagccaaatacaatntacttagcatatctcacattatttcatcacacgtctcattcgttttcacaacattcgcatactcaatagtcaaaacacaatatcatcaaatcaatcaatatagaacaatacacaagcggtatgccgtagatacactaagaatcaagcctatatgcaatgtggtaccatggcagtgaaaaacctcatcgggcgcctatgagtacatg

SEQ ID NO: 175922 - DNA, 411 bp, Glycine max
agcttcaaccacagtcttactagtgttattatacttcattgaaacaaaatgactatactttgtcaatctatcaatcacaaccataataatagtaaatccactagagttaggcaatccagtgataaaatccatagtgatatgctcccgtacctggttaggaatgggtaatggctgcaataaaccagtaggtaagacatgctcatacttggcttgctgacaagtggtgcaagttcggacaaactccttcacatcttgtctgagtttaggctagtaaaattgggcaaaaattctagccattgttccagcaattccagcatgacccctaataggagagctatgaaacttgcttatcacgtgttaaataagaagggctttggaaggtaacaccaatctcccctttccatataataa

SEQ ID NO: 175923 - DNA, 422 bp, Glycine max
  unsure (1)..(422): unsure at all n locations
gcctggtagctttcccgttcttctctttcngaaaanttcttctcttatgtccacaatcttgtccttgtaaccctggtcaagaacatgacgttatgtaaagaactctaactcactcattggttctcaacaaaaattaaaaattactaagtggtaatcatagtttctattaatctttgcatgacataattgaaggatttaattatatgtactgacagaataaaatttattttatatagtgatcggttgataatataaaaaactttgcacttttttaattaaataataataataacaactaacatataaaaattagtcaaaccgcgtaatttgacaccatacaataatttctcgcaaaaatatgtcacgcatactaggtttgtttattcttaataactgtacctgttttaactcatgcttcagct

SEQ ID NO: 175924 - DNA, 439 bp, Glycine max
  unsure (1)..(439): unsure at all n locations
atccttaagtcacctgcggcatgcaagcttgatgttgntcatcttcttcctggtgttttcatatcaaagggtgccctcttcgggacaaataggatggccttgaactcaagctggccctccacagagaaatgcttcacagccaagtgctcttcccagtcattggtgaggctcttgtagaaagaagcgtattcatccttggtgatctcttctggctttcgcagccaaattggtttctgcttgttgatgagttgccactcatgagacacctccttgatcttcttctttttcttggaatccttctccttctcctcgtcaacatcctcaatgtctccttcttcctccttcttgggttcatcatcttcatcatcgctgatctctgtctcggttgtcttctcactccaaggtaaataggattactaatgaattcagaacgcttctt

SEQ ID NO: 175925 - DNA, 423 bp, Glycine max
  unsure (1)..(423): unsure at all n locations
actgctcaagaagactgagcccttctcatgggacgagactcgtgaacaagcattcctggatttcaagaagaccatagtcacaccgcccattatgagtcgacccaagccaggagtaccactattcctatatctctcattagctgacaaaaccgccagctcagccctcgtacaagaggaaaagaggcactggccccctatcttctttacaagccacatgctccatgacaccgagaaacactaccaaatgataaaaaatgtggcgctagcactcatcacctcggcatgatgacttaggccctacttctagagtcatcaagtggtagtaaagacgaactaccccatcaagaaggttttgagaaagcctgagctcgcaggaacgatggtagcctantccgtcgaattgtaatggttgcattcactacg

SEQ ID NO: 175926 - DNA, 409 bp, Glycine max
gctagtacccaaatacatctacatttctttgtttttatatcaaaatttctagacaagaaaaacttcacatcatttatgaaattcatttactaccaaatatcaatatgttatccagatacaaacataaaataacatgttcattattattaaattgcttcacatacacacatttatcactatcattaatttgaaaatcatacaaaagaataacttaatcaaacttttgtgtcaatgctttggagcttgtttcaaaccatacaaagatttaacaatttatttttcaagataaaatattttcaaagaaagtcacatctttagactccataatagtaccattagaaatttcagatacttctgaattaataactaaaaatccataagtagtattatgtaaaaatatccacaaaat

SEQ ID NO: 175927 - DNA, 456 bp, Glycine max
tctacttatgtggcagggcgggcttccttcactttcttgtctatccgcgagccttgaccaccgctctttctttccgcgatgcttctctttatatccgcttgagtgggtttatagcctaaaccatacttcccacgatttcctttggcatttatcaagctagttatgccgccgttgtctttgcctaaacccattccgggttcgtaaccgttccccaacataactcgggccatcattactgctgcattggacaggcaagcttgcccagagaaggagtccacggaggaaatgcttaccacctctaaagactggaaagcggtttctaatgactcctctgcggcctccacataaggcatagaggatgggcagctcaccaagatgtcttcttcgcctgatacgatgaccagatgcccttccactacgaatttcaacttttggtggagtgttgagggaacaact

SEQ ID NO: 175928 - DNA, 440 bp, Glycine max
gatccttaagtcacctgcagcatgcaagcttggtaagtaaaagaaatgttgtttctttctacttcttgcgcgtgtattgttggatcaagtggcctcgaaataattaagaagagggggggggtgaattaattattaacgaacctttactaattaaaagattatccttcttaatgttaccaaaagtaaaagccataattaaagtgcatagcggaaattaaagagtgtagggaataagaagacaaacacatgagttttatactggtttggcaataacccgtgtctacatccagtccccaagcgacctgtggtccttgaaatttcttttcaaccttgtaaaatcctttacaagcaaagatccacataggatgtaccctcccttgttttctttgaacaacctattggatgtaccctccactagaactaatccaccaaaagatgtc

SEQ ID NO: 175929 - DNA, 445 bp, Glycine max
  unsure (1)..(445): unsure at all n locations
ctcaagcttagagctgcgactacccgatgatggaagaaatngngattactttctttatctattaagaagctaacatggagatcattgatagtgcctttcattcgtagagtctcgggggctgagtgccccgataatgcatgtagactgagttgagcaggaggtgactcacggggtaattctggtggttctggtggtaattctgggttcctcccttcgtcaagtatcggttcatcgttatctgctatcaacaggaatagtgatgatgaacacttgtggcctcgtgaaaatttctcatcacaatggaagcataatcctttttctcgacgtcgtgccagttcctccaatgagaggcgtttgaacggaatcgagggacttaccactttatgtggtgtangtagtaacggtggcgtcnaagtgcttgacggtgatcgtgatgctaccgttg

SEQ ID NO: 175930 - DNA, 415 bp, Glycine max
ccttaagtcacctgcggcatgcagcttgatctaccccaccaccgccacttctatttttatttctccaaactcagaatattactagcactttgttctctagccacgtatttggctatattatcatgacatttgaacaattgaggatctcttttatctgcatggcatgtttgaaaaatcatgaattatgctatatgactatgcggattttatatattcgatctattcatgtttcttgcttcatgattggttttatatccttcaatgaatgtcccgcgaatgattaacagtgtatgtatgtgttatactcgttatgcactctggctttgtattgatgccaacgggggagagaaatatggattaaatcaagaactcacattaggtattaacttaatttcagtgaagcctaaactccaaa

SEQ ID NO: 175931 - DNA, 401 bp, Glycine max
  unsure (1)..(401): unsure at all n locations
acatcaccttnntcatcttctcactaaactgcagattccgactcgatatctcaccattgctgattgtgatgctggtgttacttcgcctgagttcttgctttgggagcaacaggatcagctccttctattgtggcttcaatctactgtttccggcgaggtgcttccgcggcttgttggttacaaaactgtgtggcatctttgggacaagctccacacacacttttactccattgttcgtgtgaaaaaacggcaactccacaatgatntacgtaacatttnttctaaacaatagttcaatttctggctatttgttttgcattcaaaccattattgattctctctcgtcgattggagagcatgtgtctgaatccgatcatgttgacatcgttcttgatgggtta

SEQ ID NO: 175932 - DNA, 454 bp, Glycine max
agaacaagctaaacatgcaaactaataactgaaactttattatttacccaaattataaaatgttctaaaagcaggaaatgataataaaagtgttcaaaagacaggaaaatagaatataaatcctgtcatgagtcctatgatgctttagatgggtcatcatatggagcagaaggggcaaaatccatggctgcaacatcatcttcatcctcagagagctccatcaccggtgtcgtcattggggatgcctatagaatagagagctccagcacaggtgtggtcactggtgatgcctgtggagtcgtctctggagttgcctccgcagtgtcctcatgagtagctaggtcagtctctgggtcagcctctggcatgtctagctctgggatatctggtgtggcttctgggtcaacctctgaatcatcctcctgtgtagcctccggctctgactgagactcct

SEQ ID NO: 175933 - DNA, 151 bp, Glycine max
aacagatactcatgaatgtacaaaccgcacggtttggtgcaaccatcagtcaccgtaacaacgcaggccgaataaactatacatacataatacatggcgtgcatccgtgtcaaagctctcatccaacaaaacaaatatctttgcttcggag

SEQ ID NO: 175934 - DNA, 301 bp, Glycine max
gaccaccacagagaaaaaactctggtaacttccaaaatcacgagaaaaacccttcttgcaaaacaaaattgcgctatgtttggttcctgaaaaaattattttcaatactccccttgtgaaaacaacctctcttgaatcttgatacttctagatggcatctcttgaatcgccgaaacaatctggatgtaatctagatcttgaacttgttgactcaatcttgaaatcattggcttgggcttgttcttatcatcaacaacacttgaatcaacttgactcatcatcatgaagctcgctctacaag

SEQ ID NO: 175935 - DNA, 316 bp, Glycine max
agctttgagcaaattcaaacgaccatatctgtttattcgtatgaccaaacgagtcccttaatatttctagatgctcgaaattgaaaacagaagctctgagaaaattcatacgataataaatttttactggaaagttcgattgaatccaatattatatctagactcacaaaattgtaaacagaaactcagaggaaattcaaatgacaatcaagttttacttggatgtccgattgagtccctcatatatcaagatgctcgaaattgaaaacagatgctttcagttaattcaaatgacaataagtattgactttgattt

SEQ ID NO: 175936 - DNA, 426 bp, Glycine max
  unsure (1)..(426): unsure at all n locations
tttgtattcaatttgagcgtctcgaccattttatgtctcttcggatatccgagncaaaagctattgtcgnnttgaattgctcagagcttctgtttgaaattcgagtgtctcgatttattacgggactctatcgatcatccgaggtaaaagttattgtcttttgaatttgcttagagatactgttttcaatttcgtgcatctcgatatactacaggactcactcaaactttccagtaaaaaattattgtcatttgaattttgtgagagcttctatattcaatttcgagcgtcttgaattattaaatgactcaatcggacatctgagtcaaaagttacattcgtgtgaatttcctaagagcttttgttntcaatttttagcgtcttgataaattactggacacaatcagacatctgagttataagata

SEQ ID NO: 175937 - DNA, 426 bp, Glycine max
  unsure (1)..(426): unsure at all n locations
tcctcggggccatttcctgcgaaggcaaacatttggttttgtttttntaccaagaaatgctactcttaaaacaaaaatggcatacaacatacaaacatcaacgtaagtttagagtaaacttatgcacatacttctttacgaatgttcacttgcacaagacattcttataactaagaaaaatgcacccatgtacaatccaggcacttccgttacctagatcatttatatgtacttccaaggtgtatttgctacctacatcacatgcacttccttggctaaatttacatacatgcatactcaaagcatttggggtaccaagaattgcacatgtgcacattccggtatttctaatatttatgcatacacaaactttgtgatgaatcttggctatctacacaataaggtgatacatttcatgctttattc

SEQ ID NO: 175938 - DNA, 413 bp, Glycine max
agcttgtggtagaacttgcatgtgttttattcttgcatgtgcaagagctataagtgacactaaaaaatacttgtaactttgatagcttaatagaaatttgatggatcgtcaagaagtgaacgtaatctcaagtttgagatgaactaatacaattctccgtgtgctttctttttcttgttttaattgacaaagaatttaatgaatttgtttttaaatcttatatatttttttgtttcacaaagaaaacaatttttctcattgtttaacaaagtctgtatcaaaaccttctttcatctgtttttatgtttatctatatcagacgataaacatgtttttatctttaaaaaaaattaaatgtctaaaaacacaagtgaaattgttatgtatttccttctacaagaataatgcatgta

SEQ ID NO: 175939 - DNA, 422 bp, Glycine max
ctatgaaactaagctataaaaatgtcactgctaaaaaagcatttatgatttcatctatacaacaacggggcttcgggtaccgtcgtcaaatacaacgcggtggcattattgtaaatacggtgacatgaacgacgacctttttggccaaaaccgtagtcatatttgacgcgatgatagtgttgtaaataacccctcataaaaacaacgacgtttcaataaaaaatatcatcgtatttgactacaggcaatgaatacaacgttttttaagacaacaccatcattgtttcaattttgcaaattaaatttcatctcagaaaaaattgtgccgccattacctttcgttgtgccctcgatctctctcgtgcgctgccatccctagcctggtaaactccattaaggtttttggttctttgtgttaccta

SEQ ID NO: 175940 - DNA, 395 bp, Glycine max
  unsure (1)..(395): unsure at all n locations
agctntactaatgtgcaaggggagagtcgcttctaatnnnnccccncgngacacattgcatgtgatggataattttaaaggccaagagaacattgccaaggatagaggggttttcaccaaaagcttattgtccttgagagttttgtctgctttctattgattaagataaacgattaccaaatgccgtaattgattaccacgattttggaaatgtagaacaaagggcaattgatcaaaataattgattataaaggctttgccattgattatagcgattttattaagtaaaatctttatataccttcacttgtactatctcttgtgtgactcttttactaagcttatcttttctaaacatttccaagagtcaacaaaagaggatcttgtgcatttct

SEQ ID NO: 175941 - DNA, 456 bp, Glycine max
  unsure (1)..(456): unsure at all n locations
cgcttgctgatntagttttcgtcggcgaaaggatcttagtgtgtctgaaaataggcaaatttgatcattctgctttgacgaataagaaaattggggcaaatgaagagggtgagaatgagggagaaacccatgctgtgactgccattcctatacggccaagtttcccaccaacccaacaatgtcattactcagccaataacaacccttctccttacccaccacccaatcatccacaaaggccatccctaaatcaaccacaaagcctgcctaccacacaaccaatgctaagcaccacctttatcacaaaccanaacaccaaccaagaaatgaattttgtagcgaaaaagcctatagaattcaccccaattccagtgtcctatgctaattttctcccatatctactcgataattcaatggttgccataaccccatccaaagttcctcaacctccatttt

SEQ ID NO: 175942 - DNA, 346 bp, Glycine max
agcaagggcatcagaccccctactaatcaagctttcatcaacaagcactgcgtctccaggcaggcgcagggcgaaacaccacagcagcctgtggatggctggcagcgggcaacatacgcaccgccatcacctctagagatcacctctgctcatccacaataaggtttgagtattgcctacaccacatggccgaccaataggcgaccaagttcaaagccaaaggtaagctaattactaggtcattgacctgacagtcataatgcgtccagcttacgacgttcaagaatcgcttcttcgaggcaaactagtaccttttgaatctatcttgttatttgatcacttttta

SEQ ID NO: 175943 - DNA, 396 bp, Glycine max
  unsure (1)..(396): unsure at all n locations
agcttgtaccccaagctatttaaattctttctaagtttgtgtgtgatgttctcccctgtgcattgattggcatgaactcatcgctcatgagccatcacataaaagttgttgtttacatgctattggtatgacactaaaacntttcattttacttgagtaagatggtaagagaaacactcatgttatttgaatttatttgtactattttattggatttaaatgcacaattttgttgtttttggtcaggggcatttttcaaatttctcttaatacctattacttaacttgcttgccccctccatgcctttgngggctctctctccatttacatttcaatggattcatataagaggatcttttttttcatcgtcttgttttaggcccttaaagatggat

SEQ ID NO: 175944 - DNA, 452 bp, Glycine max
  unsure (1)..(452): unsure at all n locations
nttgtaccaactcanaactcgccaaaatcacaactttttactaaaattccaatttacataatcagtatcattcaatcctagtatagaacatcacataaacacaggaaaaaaataaaatttttctttaccaatcttcagcacaaacacaagcaatgagggttttgagaactttctcttccaagctttcaactttaccattttccaccaccaaaaataatttttgagcccaccaagattacaaagtcataataaattgaaaagaagaaatgaaagaaagaataaagaaaagaaagaaggaaaactgaagaagaaatggaaataaaaaaatgaaccactctcacctttgctacgagtttttcttccaagaacttagaaagcaagtaggaaatgaanaaaagaagaatgagagaggcttagacattacgatggttataaaggaagtgatgagtgtg

SEQ ID NO: 175945 - DNA, 417 bp, Glycine max
  unsure (1)..(417): unsure at all n locations
agcttcctcgaaataaaattatgagtggcgccgctgtctctctctcaaaaggatgggantttcattagtcgtggctcacactttcatcttttggggtttctgaccagcctccaccacaatgctcctgagaaacatcaaattgcactctgcctcatcctcctcctttgtggtttgttcttcaacaaccaccatgtttgtctcacctttctcacttcctcctcgtcaagaaatatgacatgcaattgacgatctcaatattggtggttaggatggaatggattaccacatttgtaacacaagcccttcctcttacgtttaaacaattccttatatgaaagatggatctgtgtgtgtgacccgacccatacacaatatgaggacttgatgggccggtttgggttgtttggcccacttcat

SEQ ID NO: 175946 - DNA, 385 bp, Glycine max
attatcctgctttgatgaatgggaagccttgggcaaatggagagaataagaaggaggaaggaacccacgatgtgactatcgttcccacatggctaaatttcccaccaactcaacaatatcaatacttagtcaataccagcccttctcactacccatcatcctattagctaggaacacccaatcatccacaaaggccacccctaaatcagccacagaacccgcttgctgcacatctgataccaaacaccacccttaacatgaaccaaaacaccaaccacagaaggaattttctagcaaagaagcctgtagaattcatcccaatcccggtgtcgtatgttaacttactctcatatctactcaataatgaaatggtagccataatccc

SEQ ID NO: 175947 - DNA, 420 bp, Glycine max
agcttgcttgtggggcttctatggaggctgtatcttttagcttcaatgaggtcctttaatggtgattttacaccatggagatgcagcggaagacaaaggagaagaggtgagaaaaggcgccatccactagggaataagccatggaagaaagagcttcaccaccaagatgagccttggataagaagcttggaaggatgcttcaatggaggaaaagaaagagggagagaaagagagaggggggagcacgaaattgaaggaataaaagagggagagaagttgaaatttgagttgtgtctcacaagactctcattcatcaaagttacaacaagtgttacacatgcttctatttatagactaggtagcttccttgagaagctctcttgagaaaacttccttgagaagcttctttgagaaaacttc

SEQ ID NO: 175948 - DNA, 306 bp, Glycine max
  unsure (1)..(306): unsure at all n locations
ctgctctacaccctcatgtgtaagacaaagtctantctgtagtctctttgaactttgggaaggggatacaaaagatatctcaggcggttagtcctttgaaatcttttgttaagggaaagggaagaatcaaaagaattctcagactgtgtcgttttgaattcttttgaaagggagaagggagacacccaaagaattcaggtggttagtcttgtgttcttttgngaaagggagaagagaaacacaaaccaattcaggcggttagtccttggcgaattcttttttggcaagggaaaagagaatgaaaag

SEQ ID NO: 175949 - DNA, 419 bp, Glycine max
agcttatcctcgtcatcgataaacctcttatacctctttatgacagaaagcgcttctttgccaatgagcttttttcctttccaaagggggcctctgggccttccgtcgtggtattgccggaaacacaacgccgttttgaacgaattaaattcaacgaaggtcaatgatgttgaagacacgtcttttatgggttagatacttctcgtaaactctcccagtagtaacgaagcaaaatcaaggattttccaattttttaagaaggaacgactcgccatcacacattcacactacacaaataaggcactgtttggtttgagaagagatgtcccaaatagaattttgatacgaaggaaggaaatcaaattacgcagaccaaagttttgttttgtaacttacttgtttattgagacgggaatgga

SEQ ID NO: 175950 - DNA, 461 bp, Glycine max
actcagcttgcactttagggacatgagaaagtggggatctggtaactttggttactttcttgaaatgataaagctcttagcttcttataataaggaaatagatgaaattatctcggaaaacgtccctcaaaatgtaagatacatttcactcactatccaaaaagatattctatatgtctttgctagaaaggtgcaagatgaaattcaagaagagattggtaatgcaaaattttgtttcattgttgatgaagcccatgatgaatctaaaagagaacaaacaactctagttcttatatttgttgataagaatggatatgttaaggagcattttttggatatgatacatatgcaagatactacatcatccattcttaagcatgggatatgttcaatattgtctcatcataatctcaacattcaaaatatatgaggtcaaggatatgatggagctagtaatatgt

SEQ ID NO: 175951 - DNA, 371 bp, Glycine max
  unsure (1)..(371): unsure at all n locations
agcttanacatatgccacccacggaggttctttttattatagtatttcngcctttgtcctcatttttacattttgaggtaatcgtttcctctatcccaattaatatttttcaatttctcagaagtactcgcgggctccgaatattaaaaataaaaatatattctataactattaatattaaaaaattattctattaataataacaattttatccttaaatcacttcttaaattttaaatttttcttctaacttacattaactcttcactatttttatattattaggtttttttattcttgccattttttattaactggtttatttttttattatctaaaaaatttaaagaggcacgaagcgattctctttc

SEQ ID NO: 175952 - DNA, 461 bp, Glycine max
  unsure (1)..(461): unsure at all n locations
ctaagcttgtcacaacaatctanaagctagtttctgatgtggccttgcactttatctaggttcccaacatgaagggaaaatgattgttgagtctttgaattctacctaaaaaggtttgtctggattgaatctcctctttataggcagataacatcattctaagttctagcctataatttgatgattcctagtcagagaaattcagactagcttctggatcaaccaataaaatatcttcagtctggaaggtcacgtcagactaagaatgatcttagggaagaacaacattagatgtgcatagaagacttatcaactgttgtaaattcatggtagtggagaaaggtgtattantagatgcacactttctacttttccagatgatcgcgctaagaggataaaccttgtactntgttggcaaatgctcaaagatatatgtgttgggatagggaactgtagtctgt

SEQ ID NO: 175953 - DNA, 410 bp, Glycine max
agcttcaacattcaacttcgagcgtctcgttatattatacgactcaattagacatgcgagtaaaaagatattgtcgtcttaattggctcagagcttctacattcaatttcgagcgtctcgatatatgacgggactcaatcaggcatccgtgtaaaaagttattgtcgtttgaattggctgagagcttcaacattcaatttcgagcgtctcgatatgttacgggactcaatcatacatccgagtaaagagtttttgtcgtttgagttggctcagatcttcaacattcaatttcaagcgtctcgatatatgacgggactcaatcagacatccgagtaaaaagatattgtcgtctgaattggctcagagctctacattcaatatccagcgtctcgatatatgacgggactcaa

SEQ ID NO: 175954 - DNA, 453 bp, Glycine max
  unsure (1)..(453): unsure at all n locations
tactaagcttgagcaattcaacgaaataactggtactcggaattctattgagtcctataatataataagacgctcgaagttgaatgttgaagctntgagcaaatttaaacgacaataactttctagtcggatgtcttattgagtcctgtaatatatagagacgctcaaaattgaatgacgaagctatgagcaaattccaacgacaataactttntactcggacgtctgattgagtcccgtaatatatcgagacactcgtaattgaatattgaagctctgagccaattccaacgacaataactttttactcggatgtctaattgagtcccgtaatatatcgagacgctctgaagtgaatttngaagctctgagcaaattcaaacaacaataacgttttactcggatgtctgattgagtcctgtaatatatggagacgctcgaaattgaatgttg

SEQ ID NO: 175955 - DNA, 412 bp, Glycine max
  unsure (1)..(412): unsure at all n locations
agctngttcttgactcatcttctctttgatgtgtcgtctccaatcattcttcttccttatccaatacactgccattgatcttcaagaagaaaatgactccattgatgaagaagatccaaggcctacaagctccacatggagctacgtcatgtggtattaagagcatcttcgtctaggtgatgttcttttgcttcctctatcttttttcccggtcaattcactttaattccttattcttcatcttattctccatgtatatcctccattttcttgtggtttggtactatttagagtagattcaaaaaaaataaactgattaaatcttaaatctacacttgttcttgcatttctatggttcaaattttatagacctattcttgaatcatcgttttgtgttgatattaggttctat

SEQ ID NO: 175956 - DNA, 362 bp, Glycine max
  unsure (1)..(362): unsure at all n locations
aatactagctccataaacattctttctttattaagaatactagattaactatgattactaatgattaatgtaaagttaggacacatcacgggaagcatatggtaaaacttctatactttactcctttatatttcgccactctacttgatacctattnaaaaaatagtaatattcattgtgcaacggtgctaataaaacaaacattgaaaaatagtagatcatcctatcttttctaacacatcaaaagactctaacacttacataaattttatttttatagatagccaaaacaggaattgtatacaaatatttgcttaatgtcttattgatataaacaatgtgaattacttttaaataattaa

SEQ ID NO: 175957 - DNA, 413 bp, Glycine max
agcttgcctgtccgatgcagcagttatgatggctcgagttatgttggggaacggttacgaacccggaatgggtttaggcaaagacaacggcggcatgactaacctgataaatgccaaaggaaatcgtgggaagtatggtttaggctataaacccactcaggcggatataaagagaagcatcgtgggaagaaagagcggtggtcaaagcttgcggttgaggcaagaaagtgaaggaagcccgccctgccacataagtagaagctttataagcgcgggtctgggagacgaaggtcaagtggtcgcgatatacgaagatgatgttccgagtacattggatttggtacgaccatgccctcctgatttccagctgggaaattggcgagtggaggaacgccccatcatttacgcaacga

SEQ ID NO: 175958 - DNA, 442 bp, Glycine max
taagctcttatgtgaactgaagactcaatattggtttttatatatctaacatgtcccatctagcatggacaaagcacatgcctgttttatcttgtgctaaaatgccatttttgctagaataacggggaaagcaagaataaatcctgaatactttattcaaggaggtttgaggatcaattatctcaaaatattaagctgttagggaagtttagtttagtatctctgataggaatctatactttaatgaatgtgtgtaaatcatcctttaatatgattacatttcttagtcagagggtgggtttttttatgtaataggtttaaatacctcttgtattcccattcccatatgatagactgagggaagtaaatgaggtatagaactgccaagtgcatatggagtgctacagaaggatgatttacacacattcagaatgccttgtgt

SEQ ID NO: 175959 - DNA, 409 bp, Glycine max
  unsure (1)..(409): unsure at all n locations
agctcggatatcagagaaaaatattctttttatttgaaaaagagaagaacacgaangtgatggtgaaaagtattataaagaacacatggtttatattatttctactttttattaaattattttaacatttttaaaagatattgaaattgaatagaaaaaatcatacgaatattatattaattatatacttcatactctcctaaataatgatacatgtaaaaataattttgcttaattttatcaaaataattttgatttaatcaagagtgttgttaagaaaaaatatccaaacataatatccactacaataaacacattttatactaaacttaagtttaaaataaactttaaattcaaacttttattcactgacttttattcaacatgccttaactttacgattttctta

SEQ ID NO: 175960 - DNA, 456 bp, Glycine max
  unsure (1)..(456): unsure at all n locations
cgccctattgcagtgacagntntacaattagtgaggcggngctcatttatcttgcagngagagcaaaaagaagggctattttcatactcaatcttttgcacaaaagtcttaggtgattagttcgtgtaacatttgtcttctcttctaaccttatttgaataacgatagaaaattacttccttttttttttcttaaaacaacggttcataaatgcatggtggtgatatttgggttgaagtatcaagtttattaaacaaaaaaaaatacttaaaaatattttacgatgatgtaaataggtaattattgaaaaatttaataaatttaccttatgatgatttgatcaaataacattgtaagattgttttatattactaatgcattttttcctgaaaatttgtggtgaaaactagaataaatgatagtcacaattaaaaataaatcataaaaactgaaaac

SEQ ID NO: 175961 - DNA, 434 bp, Glycine max
  unsure (1)..(434): unsure at all n locations
aaaatgacagnnatacaacatatgaaatttttattattttttcccaccgcgagngatnntaaataactcgggctcatatttcttcaagtatctgaatttggatttaatgtcaaaatttatttatatgaaaaaattattataagtgatttgtatcttgaaaaatactaataacatactttataatatatagttgttcttaacacacttaaaaaattattgaaattttagaaattacgagtaaaacttgttaaataaggagtgaagtctacataattttataatttttaatatattttaattaacaataaaatatatttaaaagagcatgttaaaaaaatatgtaataaaatttaactccttgtgtaccaatttaagaatatatatcgagagagagaaggttgaatacaatcgatttatgtgatcctattaaatat

SEQ ID NO: 175962 - DNA, 401 bp, Glycine max
  unsure (1)..(401): unsure at all n locations
agcttgcgttggcccaaatcccacgctttgcttgangcgggatgataggaaagaaaatatctgattgaataattgatttacttcttatatcattcatttattcattccttgattatagcctctagattgatttagtcattccttaatcggaggttctagaatttttataatctctatatattggaagcatgctattctctaatgctatcaaaagaacaattataccaatctttacaatttatctatctatgttttttttatctgcctttttattttacttttttgtacacattccaatgttaactttcttttttctgcagtttatacatttaaaagatgattacaaaggcttcaaagctattccaacaaggtttagttttggttaatttttctttaaattc

SEQ ID NO: 175963 - DNA, 441 bp, Glycine max
  unsure (1)..(441): unsure at all n locations
ntatctattatcaacctatgatggacattccaagatccttgctatgtngatcatcatcatcactcttgaaaaaccatcatgatagcttcctctcaatgagtcacgaaattgaaaaatgatttttggaaacttggagactcattacaaagagaactatataaagaatatattatataactaatataatcaattatgaccatttttgtaatcggttaaatcgctaaaaatagatctagatttccatttaagatcaatgtaatcgattaacaatacattataattgattcattcaatctaagaaagttagaagcattgtaacaaattatcaaaatctcttaatcaattacaaagaatttacaaggactctttctaatatgagaaggaatgtaattgaataccaaaaggttgtaatcgattaattcgacaaatctcacttagaat

SEQ ID NO: 175964 - DNA, 391 bp, Glycine max
atcatcatcactctggaaaaaccatcatgatagcttcctctcaatgagtcacgaaattgaaaaatgatttttggaaacttggagactcattacaaagagaactatataaagaatatattatataactaatataatcaattatgaccatttttgtaatcggttaaatcgctaaaaatagatctagatttccatttaagatcaatgtaatcgattaacaatacattataattgattcattcaatctaagaaagttagaagcattgtaacaaattatcaaaatctcttaatcaattacaaagaatttacaaggactctgtctaatatgagaaggaatgtaattgaataccaaaaggttgtgatcgattaattcgacaaatcttacttagaatga

SEQ ID NO: 175965 - DNA, 409 bp, Glycine max
  unsure (1)..(409): unsure at all n locations
agcttcttattnacacaccaaaggcgaaatgattatttatttggttncaaaggacagaaaaattcatatgcaactgcgcaaggaataatgtgaaacatgtcttctgcctgacatgcacattcatgtgatttagctgcttgtcgcactgtcttgactaggcaagctataggttttttcagaattaacctcctgacatctttttcatgttcaaactactggcatattttttcttaaaaaaaaaattatttgatggtatatattcatttcatttaattctctaaggcggggcataactgtaatggatgattgtcaataactttatgaataaaatgattctttgcataggtgataatcacttagagcaatactcatcacagaatcatttacttggaaaacaaaagctcatgaa

SEQ ID NO: 175966 - DNA, 198 bp, Glycine max
  unsure (1)..(198): unsure at all n locations
tttgttatgcactacattanggtaggttagtgtaacgttagcttaatggaaccttatggtagaagacggaacatttaggtagaagacgaaaggggagaagacgagaggacgctggaaaaaatggcgcaaaaggatgacgactgagtcttccggaagaaccttatccggaaagtttccggaagaagantttctcctcta

SEQ ID NO: 175967 - DNA, 344 bp, Glycine max
aaaacaacaaataagggttcttcaaactcaaacgacatccataaaaacttttctcgcaaaaacaagaaacgctgccacactagaactaataaacctacgagcataaagacattcaaacaataaaacatcacatcaacctcaaacacacaacaacaaccacttcctccatctcaaacccaatatggtgaaagatcaagaccatacaacgagctttagaccaataggaattaaaagcaacaagcaatgcaccctcacaaggcaactaccaaccaaaaccaaaatcgcatcgcaaaaatagaaggccagacccccgcaaatacggccgcccccccacatataaaaca

SEQ ID NO: 175968 - DNA, 305 bp, Glycine max
tatgaaaaaaaaagacaacagaaattggaacccaagaaaaaacaaacatataaagatagcagagagagctctagactgaggtgccatctcccctaaagtttactcaacaccaaaatagtagagagatgtaaaaaaagactcatgaataattcgttacataaacaagagatccataacaaaagaaggaagcgtggaaaaaacaaaagatggagaaaaacgcagcacgtcctcttaaaacgaaatccgcatgaaaggaagagagaaatatcatatcctcatcagaagaaataaaagcaaatcaaaaa

SEQ ID NO: 175969 - DNA, 366 bp, Glycine max
tcaagcttacatatgtcctaactcaggagttggattctttaatagaagagcaatcatgtcttctatgtcaaaatgtatatattagaagctctatatgactagaaacatgattcttgaggtagcccttatcaaggagtaggtctcagaagcctacaatatcatagaatagaaaactaagaattgagtaggctacactattcataagcactcaccaaaagcaacaaaagaagatattatgcaatatggtattaaggcattgcatctgaagcaacaagctctctaaaagacacaagtgaagttggagaataaagcttgttatcatctacaagtcctaatcccatcaaggaaaccaaaagagaggaggat

SEQ ID NO: 175970 - DNA, 456 bp, Glycine max
  unsure (1)..(456): unsure at all n locations
tcagcttgcttggagagcttctatggaggctggatcttcgaacttcaattangttctttaatggngaatntccaccatggagatgcaacggaagacaaaggagaaaaggtgagaggaggcgccatccactaaggaataagccatggaagaaggagcttcaccaccaagatgagccttggataagaagcttggagaggatgcttcaatggaggaaaagaaagagggagagaaaaagagaggggggagcatgaaattcaaagaagaaaaaagggagagaagttgaactttgagttgtgtctcacaagactctcattcatcaaagttacaacaagtgttacacatgcttctatttatagactaggtagcttccttgagaatctctcttgagaaaacatccttgagaagcttctttgagaaaactatcttgggaagctgagagctagctacacacacccc

SEQ ID NO: 175971 - DNA, 312 bp, Glycine max
ttatctatccatatgtacaagatgaatcatcacttgagtaggaagattgtcttctaaaatagaaacttcttcagtgaaaaaactctttggttttaatcattacacaagttgcttgtagctcgtacataaactctagttttggttcaacccatttcgaattatttggaatccatctcactattctattaagaccatggtcgaattttcatgagactgccttaatctattatcaggcgagcgtcaccattactccgtctctaaaagggtgtcagaaaggaccagaacatttcatcgatccctccagaaactacg

SEQ ID NO: 175972 - DNA, 366 bp, Glycine max
  unsure (1)..(366): unsure at all n locations
actgcacgacaatgaaaaatgagtgacaaggtgatagctttatttntttctagggtaaattgggtgttgaggggtcaaggtagtgcattgctggttatgggaaaggtagtacctattgggttctggacattttctagcaaatcccaacggtgaaaatgtagacttatgtactaggaacctccagtaatattttcaagtcgatccaacggttaacgaatcgaaacaaagagaatgttactggggtatttgagtaaggaaagctataatatgtgaatgtgttttgggcagagttttctgcctctgccctattntcttggtttagggtagttcatgatagttggaattggattgctgggatattatgga

SEQ ID NO: 175973 - DNA, 406 bp, Glycine max
  unsure (1)..(406): unsure at all n locations
agctgtcctatcttttcagttaccgtttaccctcctttggancattnttttatttctcttttgtatgatctgggcatttttaattaaagaggcattttttctttcctttttttagatgggttgtttttgaataatttatcgaaagagactgatatcacttagaagtcctaatatttattatgactntacttattttttaactaaaattataaataattttatcactttgtagcttttttttacaacttttgaaatcacaacttttttttattttttttttggtattacaacttcagagttctaataccatattattttttatgttttatagttattaccacatattaaaaggttctaattattttttacacaattttttttatttcttttaattcatctcattatg

SEQ ID NO: 175974 - DNA, 456 bp, Glycine max
  unsure (1)..(456): unsure at all n locations
cgcttgcactgtcatggatcttctcatggcaatatcgtattgctttacntgaaaagacagccaatatccatcactacaaagacacgcatttgtaaaatggtggacataatttgactcatccaaagcagatccagaacaagtaaaactctggttccaatcccatccagaattcctcaaagcagctgatccagaaacttccgtgtttttgtaccaaaagtctcatctggcagcatttttagcaggatcgaaatcaaaggagatcctaactaaaaatctaaaggaagtcttgcaaatgttacagcaggaagatgaaggttcatcctcaaagaaggaagaaacaagttctgctgaagaagaagaagaagaccccttttaccaaaacgaggatgattgttttggtatctgtttagattaaatttaatntcngccacaaaatcgtctgttcgaattaatgtg

SEQ ID NO: 175975 - DNA, 409 bp, Glycine max
agctttggataaccacagccaattttatgtttgttctaaatatagaagggaataaaggtatcaatggcggttaaaacgggccgaggcataaccgggttgagggagtaaagctcaatgtttcttccttctaaggtagaattgatccagatgcctcactgtactgggaaatgaatactgagcacgtatttgcctgcaatgactacattgatgcgtagaaagtcaagctatcagcagctgaattctccgactatgccctggttcggtggcattaataccagacagaaatgttgagagacgaactacgagagggttatacatggactgatattgaaaaggtgatgataaaaagtatgtgcccactatctataacataaccatgcgacaaaaacttcaagggctgtcccaaggg

SEQ ID NO: 175976 - DNA, 453 bp, Glycine max
  unsure (1)..(453): unsure at all n locations
tcctcgggccattcctacgaaggcaaacatttggatttttattntaccaagaaatgctacccttaaaacaaaaatggcatacaacctcctccaataaatacaaacatcaatgtaaatttagagcaagcttatgcgcatatttccttacgaacattcactcgcacaagatattcttctaactaagaaaaatgcacccatgcacaatcaaggcactttcgttacctacattatttgtatgtacttccaaggtgtactacctacaccacatgcatttccttggctaaatttacatacatgcatgctcaaagcctcttggctaccaaaagttgcacacatgcaaactttatgatgaatcttggctatctacacaataaggagctacatttcatgctgtattcaagtgtttttactacctaaaagccgcatgcaaattcaagtatattttcttttgcc

SEQ ID NO: 175977 - DNA, 379 bp, Glycine max
ctcaagtcacctgcggcatgcagctgcctatagaggtcaggattgtctttgttgcgaagaactagttccgccccgagtactaagtcaccgctttaagagcgttttacaccatcagcgcttctaagcctttcagggatggtcgtttctccgggagcgacgcgtcctgctcagggactactagtttactgatttccaggaggaaatatggcgccggcggtgggcaccactggttactcccatggccaagtttgatccacaaatagttcttgagttctatgccaatgcttggccaacagaggagggcgtgcgtgacatgagatcctgggttttgggtcagaggatcccgttcaatgccgacgctttcacacagctcctggga

SEQ ID NO: 175978 - DNA, 448 bp, Glycine max
  unsure (1)..(448): unsure at all n locations
tgcctcanagaggtccaggaaagataaagcggtcgaattatccattttcctctcccgagtatgacagccaccgctttatgagtgctgaacaccatcagcgcttcgaggccatcaggggttggtcatttctccgggagtgacgcatccagctcatggacgatgagtatgccgatttccatggggagatagttcgccggcggtgggaatcactggttacccccatggccaaattcgacccagacatagtcctcgaattttatgccaatgcttggcctaccgaggagggcgtgcgagatatgagatcctgcgtgaggggtcagtggatcccgttcgatgcggatgctatcagccaaatcctatgatatactttattgctggaagagggccatgagtgcgagtatggacataagatgaaccggtccgaggttttgatgaagacgccatcccc

SEQ ID NO: 175979 - DNA, 387 bp, Glycine max
  unsure (1)..(387): unsure at all n locations
gagcttcttgacaatctgatctatatgtttttttgctaattgctaagntgcaaagtgattcaaactcccataaacacttttcctaggtaaggggggaattgatgaccaaaggaaggttattaattggtaaagatttggaattaaggaaagatattctgaagtggttacattcttaaggaaagattctaaaatgttttccaaaatacccattttgtaatacaagaatgttgatttgtatggcatttaaaattggtatcctggaacacattttgactttacaattgtattgcagagcattccataatatacttgtaaatcccaaaatttgtttcaaaatacccatttcaaaaaagtgatttggatttttttattttgaaagatggattt

SEQ ID NO: 175980 - DNA, 447 bp, Glycine max
  unsure (1)..(447): unsure at all n locations
nntttctatgattggacagtcgtataataatctttgttttaagtaaaatgatgacatttttgtaaataaatgaaaaattntaaagatgattttgataaacccgtttttaaaaaagctttacgacattttagggtatgtttctgataacaacgatgtttaagtttcaatcttatattatattctatctctcaatctgtttcaaaccctaacttaaggttaagattacacagattaaaaaataaaaaataaaatgataataaatattgaaaaattatattatattagataagaaatatatcgtcaaaaatgatatgtaataataatactcgatttagattttgaaagatttatctatataatatttgaattatttttatcttcattacatataagataaattgtgtatgtgagaaaaattagtttttgaagataaattttatcattgtt

SEQ ID NO: 175981 - DNA, 397 bp, Glycine max
  unsure (1)..(397): unsure at all n locations
agcttggattntccaggttttgttttatttctcatttcgnttgatcacttgcatgtactagaaattgaggttgatcagtagtgctatacaataccatatcagttgcttctggatcatttgtcaaacaccattacgtaacctagtactctgcttaattaaaaaaaaaaaattgaggtcaggttatttaagtgtatttaaaaaaaaataggtttttcttatataaaataagtaatttttataatattttgatatgtttgttttaaattgttttacttaaaataaatgttttttttgtttttttttaaaacaaatactatctactttttataaaaaaaaggcttgtataaaaaagcacttttttaatttcttttttttttagttcaccctttttttgttc

SEQ ID NO: 175982 - DNA, 431 bp, Glycine max
tgtaatcgattacacatatactgtaatcgattaccagttcttattttcaggaaatattctcaacagtcacatctttttatgtggttcttgaatggctatcaaaggcctatatatatgtgacttgagacacgaatttgctaagagtttttcagaacaaaaaggtcttatcctcttataaagcaaaatcgttttcttctcttacaaattccttggccaaattacttgtgattcaataaggaattatttgagtgctcaaattgttcaatctatctctttcaagagagatttcttcttttcttcttcttcattctgaaaagggattaagagaccgagggtctcttattgtgaaaggattctaaacacaaaggaaggattgtccttgtgtgtttagaacttgtaaaaggaaattacaagatagtggaactctcaag

SEQ ID NO: 175983 - DNA, 384 bp, Glycine max
  unsure (1)..(384): unsure at all n locations
cctagnggatggggactctcctctcctcttctcctttgccttccactgcatctccatggtggaaaatcaccattgaaggacctcattgaagctcaaagatccaacctccatagaagctccacaagaaagtttccatcagaagtcctttatcagattttgataagctttcgacagaatggatgaggtggagagttcatgatatgctaattgaagagtttcaaggctgnatatatttacctcttcatctgatttaaagtctggatcttctgatgaaacgcaactgtggtttacaataatggcataaactcgaaaatcctaatgagtcattagagacatctaacaacaacattcaaaattgccccatgtgtggcgtctcttgtcaat

SEQ ID NO: 175984 - DNA, 416 bp, Glycine max
agcttcgttctctgtgtgagtcattatcatatctgatgccctcacatagttgcacatgtggaggaattaaaccttggtgcgattttgaacaaatggagtatgctatgcagttcttgatggggttgaacgaatccttctctactatcagaggtcaaattttatccatggatccctttccctcgataactaaggttttttccttagttgttcaagaagaaaagtaaaaggaagttggtgcttccacctttgctcgtgaagtttcacatgcttttgccttgaagccttattctattgcatgcaatcatcctacaaatcgcttcaaaggatcttccaagaatcgccccttgtgtgctcattgtggtatgttgggtcatactcaagatcgttgcttcaagttgcatggttatcctccaaat

SEQ ID NO: 175985 - DNA, 381 bp, Glycine max
  unsure (1)..(381): unsure at all n locations
gctgacaatatgtgttaanaaagttacaaacaagatagtttctttctccatgaaggnttctcggctctgacaaactattccacttctctttgctatgttgacttttacatacttgacatcctcgcctccttatcatctgtatagctcgttggaggcaaatctgctaaactgtcttcaccgcctcctacaatcttaatacttttttttcgtcataaatcgaatgttcaggaatatcaattcaacctagataccataaatcatttatagtagtcaatataataagattgtagacaaccattcaaaagatcaacattaattgaaacctaatatccctcaatcaatctttgagctaaggattgttcaatttaatgtacatcacta

SEQ ID NO: 175986 - DNA, 361 bp, Glycine max
agctttacaaatttcataagcctgataatttgtttgttccacaaataagaaaaggtgacctttaacaaaaaggatatcaaatcttttctcagtaatattttgcagcatttggtggaaaaataatacagccaggagctaacccagtaataactaataatatcaatatgtaatgatgtgtatttgtctgcagatgaattttaaaagcagacgtcatcattttcttatataaaagttagtagaaagtgagatggaaaaaaaaaggtcagatggtctcaggagaagagacgatttgtttgatgtattatgaactaaagaaagggatttcccacaggcatatacccaaactacaaagcacatgtcc

SEQ ID NO: 175987 - DNA, 389 bp, Glycine max
  unsure (1)..(389): unsure at all n locations
gtggaaagaacttgtanaggtgggtcatggggatnttaatgttttatccatggnggcaaaagatgcaaactcgtgaagagttggttgaagcttccgctaccctcatatggattgcttcagctcttcatgctgctgttaactntggacagtatccatatggaggtttaatcctgaataggccaactattagcaggagattcatgcctgagaaagggtctcctgaatatgatgcgttagctaagaaccctgagaaagagtttttgaagactattactggcaagaaagagaccctcattgaccttacaattatagaaattttatcaaggcacgcatctgatgagttctaccttgggcagagagatggcggtgactactggacttctgatgcc

SEQ ID NO: 175988 - DNA, 401 bp, Glycine max
  unsure (1)..(401): unsure at all n locations
agctntaaaatttggattaaaacgttcactttctgctggtaatcgattaccatatatgtgtaatcgattacacagggcaaattttgaattctaattttaatagctgttgtaaattcgttttggccactggtaatcgattacatcctctggtaatcgattaccacagagtaaatttgttgaagaacaatttttaacttgtaatccttggccaaaccttctgctacttcaattggaattcatttcctatttaatataccatttctaagactctgtagactgtcatgatcatccatcttgaatatctttaattgctttgtcttgagtaaatctttgaaaacatatgatcattgtatcctttggcatatcaaacattctgttgacctttgttacatttggacatt

SEQ ID NO: 175989 - DNA, 434 bp, Glycine max
  unsure (1)..(434): unsure at all n locations
tctagagaaagctacatgaagctgcctcggtaaaaacgttgatttctctttttaaccgnnggatcttctcgaaatttggtctgcaacttcacaagacacttgtccatgatcttaccgttggatctttgagaacatgtccagagtgtgctagaagcctcttaatgaagcttctggaggaagcctcttaatgaagcttctagagaaaactacatgaagctgcctcggtaaaaacgctgccccgccttcgttaaccgttgcatctttttgaaacttcttcaagacacttgtccaggatctgaccgttgggatctttgagaagatgtctggagtgtgctagaagctttcgttcccaagagcatctcttatttaagcatttcaacctttgctttcgggtagcttaagaaaaatgtcatttcttcgtctttctttctttc

SEQ ID NO: 175990 - DNA, 419 bp, Glycine max
  unsure (1)..(419): unsure at all n locations
agctagcttctacaatcccnccccctgttgatgatgacaactctgaaatcaagaaacacacacacacacactttttcctagtcgatcactcacataaatttccattctccccctttgtttttgagtttatgcttcatttgaaatttagttaattacttatgtgagttcttgatttattccctatttctctccccctttggcatcaacaaaaagccaaagtgtgtaacaagtataagacacacatatactattaatcattcacaaggcatacattgaagaatataaaccaatcatgaagcaagaaacatgaatagatcaaatatataaaaaccacatagtcatataatataattcataattgttcattcaaaccatgcaaataaagaaatactaaattatccaaatgtcataataatata

SEQ ID NO: 175991 - DNA, 413 bp, Glycine max
  unsure (1)..(413): unsure at all n locations
ttttttctagaaangctacccttaaaacaaaaatggcatacaaccccctccaataaatacaaacatcaatgtaaatttagagcaagcttatgcgcacacttctttacgaacgttcacttgcacaagacattcttataactaagaaaaatgcacccatatacaatcaaggcaccttcgttacctagattattcacgtgtacttccaaggtgtatttgttacctacatcacacacatttcctttgctaaattcacatacatgcatactctaagcactttggctatcaaaaattgcatacgtgcacatcttggtatttctaatacctatacatacacaaacttcatgatgaatcttgactatctacacaataaggtgctacatttcatgcttttttcaagggtttttactacctaa

SEQ ID NO: 175992 - DNA, 387 bp, Glycine max
agcttgtagagttgagtctcgtatctttttaatcgattacaactatctcataatcgattacattgttgtttgagagaatgattgatttattcaggagtctcggctttaattgattaccaagtggattaatcgattacttctctctcattaagtgttcagaggcgaacaagaacactttaatcaattatttagggcatctaatcgattgcattgttcttgagttatttccagatgctgggatgaactctttaatcgattacttagataatctaatcgattacttagtaactcaatttcttaatcatttggttatgaagatcttttcttggaagtgagttgtgtcttttgagttgaagaagatcaccttctcaatccaacaagattttt

SEQ ID NO: 175993 - DNA, 452 bp, Glycine max
  unsure (1)..(452): unsure at all n locations
ctatgaaactcagcttagacaactgtgtatcaatacttgatgtgttatcgatcaaaacagagagtttatgcctntgaagaaacttttctaacttagaaacttttctcaaaacaaaccatgatgatgcatgatgcaatacagatatcaaatatactaagatgcaccaaccaagataacaaccaatacaaatgccactcaagagagttgggcatgtaaaagccaaaacttcttcagaacttcttcaagcttttccttgagcttcaagctttagccttagggtagttcaccatgttgctcattgttcgtggtcggcaagtgtaccggatcgcacaagtagtataaaacagtaagaactgagtatcgaactcttggggaacttgtgttatctggtaagctatttcgggaaataggtgtctggtatgaaaatatgattatggttatgaacagttatg

SEQ ID NO: 175994 - DNA, 411 bp, Glycine max
  unsure (1)..(411): unsure at all n locations
agcttganaagaaatctcaaggactcgcatgtctcttgnggactggatgtatgcatgggttgtttccgaaccagtataatctcttgtgtttgtcttcttctttcctacactctttaatttccactgtgcactttaattagcacttttacttttggttaagttaatatttttgttctttactttcttaacattatagtaaaatcctaagaagggtagatttttaattagtaaaggttcagtaataattaattcaaaccccccttcttaattattccgaggccacttgatccaacaacttaggctataaatagaggtcatgtgtgtgcattttttcaactctgagcatttgaaaattaaacttcagatttcagagctcttttagagcacaaaaattcgtgctcttctcttcct

SEQ ID NO: 175995 - DNA, 439 bp, Glycine max
  unsure (1)..(439): unsure at all n locations
actcagctatcgccttgggaattacccttctgagctatagtgttctttttttgcaatgnntatcttcgaaccccaaaataataagaataataataacaatcaaagaggcataggcaccatgaggcttacgaatcctgtattttcttttttcatttccacttttagttttctttcttccagagatcaaccaacctactcacaaaagataagtgtgcggtctttcatttaaatccaagttatacatacaagcaaaaatctgtacaatgtttacaataaaacagcagcaaatctactatatgaccccatcctgtaataaaaatttgtggtgtgataattagcaatggaattgatctaaccatcaattaatcaagaaaatatgctgctgcttcatctactgattctgcagccagagctgcttcggctattctaattaacattg

SEQ ID NO: 175996 - DNA, 412 bp, Glycine max
  unsure (1)..(412): unsure at all n locations
agcttacatnttccctctgttgattgcatatgtgcaatgcccacttgaggtcattaatctccacccaagcagggatgttgccgttcttgacttctcctacaagtttggtaacaatatggtacgtaaatttaaacttatgttttatttgtctaatttcaaaaatcctgatcgagttgagaagctcaaatcttaaatgttagaaaaaaaaatcattttatctattagtaccaaatttggctccaagttacatgcatcaccgtattagtcctttaaaaatgcatcaccatattagtcctttcaaaatgcatcagtacattagtcctaaaatttcagttattaaattagtccttcaaagattcttttgccaccaatttagtcctctaaacattgttgtaccacattaatccttcta

SEQ ID NO: 175997 - DNA, 442 bp, Glycine max
  unsure (1)..(442): unsure at all n locations
gtactcctctgcaccaccataaggtaccatcaacttctaactatgaaggttggggtcgnataaaatagttttcccttctgatcattntaatcaacatgaaagaattttgaaggattgggtcaaatttatggccatagctgtccctcactatcaattttattgtcatactcaattttacacaaccaaaagagagagaaagggaaataatttctcaaagcatcaaaacctttaaattttccaaggataccatagaatttcttcgccgcccaagacaacgacgactccctccactgcttctacgtcaaatccgtcaaggaaatgccctactacatctccgtcctccaaatcagcgccgccattagctctgccgacgccgaggcacccaccgccaccccctccaaggccgttccatctttcaaggaaaacgttggcagcggcttaa

SEQ ID NO: 175998 - DNA, 386 bp, Glycine max
agcttttcacaaagattacggttattattgttacttagccatggtagaagtctgtacatattgcctcccttgcccagtattatgatcagccgatgaggtgcttcacctttgggaacttccagctatcacccatggtagaagaatttgaagaggtcctagggtgttctatatgggggagagaaaccatacctctttacaaggttctatccctcattagctagaatttccaagatagtccaaatcttggcacaggagttagaccacaggaagcaagtcgaaaatggggtggttggaataccgataaaatatttggaggcaaaagcaaaatcttggcaggtaaaggcgagtgggccccgttcatagatatcctctcactgttgatattc

SEQ ID NO: 175999 - DNA, 381 bp, Glycine max
ctcttcatcaacccttggcattcttgactccatttcattgaagcgcatatccacttgcatttccaaagtgtcaaacctctcaccaacaaaggttttaagaccatcaaacttttccaaaatcttcgaaagaagagatgaatcttctccctcatgtccttcttcaccatcatttctagcacccttctttatccaagagccatcatgctccttaatataaccaaaggatgctatgactctagtgcctataaagaatgatctcttgattggaacatagggttcaaaatcaagaaggatgttgaagtgttgaacgaaaagggtaacaagatgaggataaggcaatggggcattcaatcgcaatgccttatgcatgtgatatctaac

SEQ ID NO: 176000 - DNA, 385 bp, Glycine max
  unsure (1)..(385): unsure at all n locations
agctngnnaagattgtttcttacgatcatttctgagtatggngtatccgcatcaacaagtaaatatcttattgagaagctcttagagaattggccttgaccaaaagtggtcattaggtccacatagcctcatgtctctactctttctcctgcatagccatagagtggacccacttgaggatggacagcgtcaggggatacctcgattctctggaaagttctccagtataggatatcattggagcttccctggtcaatgagaaccttgtacaccatgaaatctgcaatgatgattggaaacaaccatgtggtcgtcctgtttgatgggggtgatacccttcaaatccctatccgcgaaagagataagacggagactttattgggat

SEQ ID NO: 176001 - DNA, 297 bp, Glycine max
  unsure (1)..(297): unsure at all n locations
ggagagggaaaccattactggaaaacccaaatgcaaagttacattgaagcaagagacagaaacaactgggaagccaaagaagcgggacccaaagcacccaccacggtggcgggaaacacaacaatagagaaaccganagaagagtgcgccgaagaagaaagaagactagcgcagcacaattgaaaggctaaaaacactaataaccccgccctaagaaaggaagaataccacagggtgccaaattggaagggcgccaaggataagtgggacactctacaagttacacatgagggaaca

SEQ ID NO: 176002 - DNA, 325 bp, Glycine max
  unsure (1)..(325): unsure at all n locations
agctnggaagggttgatggggacctttgttaataggaacgaggataagggctacataggagtacgtgagctcagttgaaggtgggcaactggggatggtgggttcatgtttgatttgtggatgtgggagagttgatttgcaccatcgcccgatcgccacctattaccacatatgacgggtaccccataattcaacaagcttgatgtgagaaagagtggaaaattcagtctttctacttttgtttgttgaccacagagtggtacctatacatatgtcgcgggggtcaagaaaccttggggaccttaggttgtgtgctttttcccaa

SEQ ID NO: 176003 - DNA, 441 bp, Glycine max
tcaagaatcaagatcaagattcaagattcaagaatcaatgattacttaatcaagataagtatgaaatggatttttcaaaaactgagtagcacatggatttttctcaaaacatgtttaccaaagagtttttactctctggtaatcgattaccaaattattgtaatcgattaccagtagcaaaatggatttgaaaaagttttcacactgaatttacaacgttccaattaatttcaaaaagttgtaatcgattataatgttttggtaatcgattaccaatgcctttgaacgttgaaattcaaattcaaatgtgaagagtcgcatcctttcacataaaagccttgtgtaatcgattacactgatttggtaatcgattgccagtgattgtctctgaattaaatcacaagatgtaactcttcaaatggtttttgactttttcaaatt

SEQ ID NO: 176004 - DNA, 388 bp, Glycine max
agctttacaatcaattggacagcgtgcatgtacaattgtctccaagcgatattgtggtgcttagcatgaatcagcaactgcaggtctctctcatttcttctatactctcagtctcatctattatgtattttatttcattttttatgtagaactattaaatatcagtatattatccttggtaaccttctgccatcaattattcaagggaatatttcaaggttttgataaagggaagggggatgaggggggtgcacattatgcttcaattactagtttcctggggatttggttaatatgatccacacatcaagtatataaacaactttcatttctattaagctattcttatttgcacagttgaatatttttaatgtttgaagtttgaact

SEQ ID NO: 176005 - DNA, 256 bp, Glycine max
acatgactaccctctattaactgccctcctcaactctatgactgacgggtactcggaaagcaaattataacgagcgtttcccaggagccaaactcatgagctaagaagcccctcctgcttatacatgctgacaactatgggccaatcaagccaagcttactaagtgataagagactattacctcctttgccttgaaacgttgtaaagcaaaacatgggtgaatagttacatcctatacataaaacctttcgccttc

SEQ ID NO: 176006 - DNA, 308 bp, Glycine max
ccctaaaacaattttggctgccgacactgctcattaattattccattcccacgaacttacacttgtgttttaaacacgtttaacacattgggctacaatttaatattagttcttaaataggaaacctacactttttttttaacattgcgcatcaacacttttctcaagataaacactggtagggttattgtacaattcacagcttataatacaagtaatgtcacatcaggtggtaatcacacacttattcacaactaaaactcatgttcacaatttcacatctcatgttggcacaattactttaatca

SEQ ID NO: 176007 - DNA, 200 bp, Glycine max
agctaactatataggttgaatttcttactaatataaaaaaagtgtgggaaggttatgacatgattgggggctccagaatcagaaattaactaatctgggtagcctggctacccctccaggtattaaatagtttcctcccttggtaagaagtggacccaacctgatttattttggattggtcttaaactgaacttggtggc

SEQ ID NO: 176008 - DNA, 424 bp, Glycine max
  unsure (1)..(424): unsure at all n locations
tagtcacctgagctgcaagctggccttaagctgaataattgaatggtttatgcactttatcanattattctgttcacatggttacctctaggatcaactgagcacgaacaatttacggtcttaaaaccaatcaccagcatgttttgcatattaacaagcacattgatttccttcaccgggcgtgcataaccattttccataaggcttgtcactcttcgccccggcaaaatataagtggcttagtaagtctacggttgggatcgtcagcttcattggtaaaaccaacacacctgcagcataattattcagaacatatgctatatagagaaaagaaatgtcctattatcatttatattataaaataatacaccttgtactcccaattataatatcaagcatctaccatacaatatctctggtttca

SEQ ID NO: 176009 - DNA, 417 bp, Glycine max
  unsure (1)..(417): unsure at all n locations
agtcacctgcggctgcagcttgcacactttattataagcatactatctgtgatcgncaaatccacccacgctatgatctaactaacaaaccatctacctctacaatttggtcttttgaaacttaactatattttggaatactctaattaccagaaaaattaataaattctctaccttttccttttatgttccccaactcaaatcaccaaaaacaaaaacaaaaatgaacaaatgacagggaaaaatgaagttgtgacaagcaaatcttaaagcaatttaatttgtggaagtatagacagcataaaggaaaaaccaagtactcaccataaatctatgaattcatcaacaacttcaggagcactttcctttgaaaagtctactataatagaacctttagaggtaatcacaacctatgat

SEQ ID NO: 176010 - DNA, 271 bp, Glycine max
  unsure (1)..(271): unsure at all n locations
agcgncnaatcttctatgtttcntctccctttttttaacagcaaaaagccaaagcacagggggaaacaacacaagggcggaagaatattaatnnaactgactaaacgtcacataatcattcataagtcacaaacaaagataatccagtcataaaatactaagtgctaaataccgaaatataacttaagtcagaaaatgataacttataaaaggcatagccaaatacacggcttaaaataaaagatactaaaaatctaaaactaggaaggtg

SEQ ID NO: 176011 - DNA, 58 bp, Glycine max
  unsure (1)..(58): unsure at all n locations
tgtttggccagctgttattcaaaaggtaattttatatcataccatatatgngtcctat

SEQ ID NO: 176012 - DNA, 366 bp, Glycine max
  unsure (1)..(366): unsure at all n locations
atgcaagcttctcagaattgcctctctcaaaatttttttatcaactacatttctatcatccctagcattataaaaaccaacacaannaataacccacttaattctactattacatcccaattcaacccattacaaactttgaagaagcacccatttcacttgcttttggttgggatccaattttcatcgtcccatttcccaattggatcccctgaacacgaagcaagccttctgatcctacccctgggagaatcctcaaaacttttaacctgaaccacattggcagaggcagaaacacactctacctctgtctttccataganatccaaaagccctgctcaagatacttgttggagaacaccaatt

SEQ ID NO: 176013 - DNA, 303 bp, Glycine max
  unsure (1)..(303): unsure at all n locations
catgcaagcttgagatgaggaagtgttgaagggtgatttcttcctgctnnnattttttaccacagagnggtacctggagatatgtcgcgggggtcaggagaccttggggacgtnagcggggtgctattgcccaaaaccaagcttgaccaatcccgacccaacccgggcatagtcggtctgtgagaacctgtgatgtacctaaacaggcgagctcctggcagtcaacagataaaaggaacaaagaccacaaagcaaggaggcttgtggtggctggccagctgtgaattttgtgtaatatgtgga

SEQ ID NO: 176014 - DNA, 316 bp, Glycine max
tttctcagccatatatattcacccaattgcctggacacggtcaaaaacattctatctttgtgtcctaaaagcacgtagtgtaatttgttttacacaagcctagttagggtaggacatgcccttaccaaaacagttgagtctaattttacatcattgagttactctacttacccgacaactgacaaacaaaagccatccggcgcatgttcattaacaaattagatagtttaaccatttcacaactatcatggctctcttcatgcatagtttagagattgctaacacatacagccggaaattatgtcccccacataat

SEQ ID NO: 176015 - DNA, 313 bp, Glycine max
  unsure (1)..(313): unsure at all n locations
tttcttgtgacactataaagaggttnctgattttctaacacactataataatgagcattgttttacttttcactttctatgaaaaaactcatattactctgcttgtattttaaaaataatgaatgataataaggcactcccaaaaatataaacaatataattatctaaatatttagatacctcatttaacctattgtaatattaaaggaggaaataactttttttatagttcgaaacatttccctaatttattgagtgaacaaaaatgataatagcagacacaattaaaaatattcttttttaataatccaaa

SEQ ID NO: 176016 - DNA, 281 bp, Glycine max
ttaagatgaatggtctctccctctcaaactgtgacaaaaggaattcccattgttaaaccaaggaaatagaaaaaaaaatcacaagtcttctggaaagaggctggccatggagagaaaataagcagttgaggaattggttccaaacatgtatagtagttttgaatacattaattttgataagaagacatttgagacccaataaataaagaagtacataatacacattcactctttatacactgaaatgcaaagaccgtaggagaatcactaacaaaaaaagg

SEQ ID NO: 176017 - DNA, 337 bp, Glycine max
catttacctggggtgaaaaacaagagcaagcctttctttgctcaaagaaaagcttactaaggcacctgttctagctcttcctgacttttctaaaacttttgagctaaaatgtgatgcctctggagtgggagttggagctgtattgttacaaggtgggcaccctattgcttattttagtgaaaaacttcatagtgccaccctcaactaccccacctatgataaaaagctttatgccttaataagagccctccaaacttgggaacattaccttgtttccaaggaatttgcattcatagtgatcatcaatcacttaagtacattagagggcgaagcaagt

SEQ ID NO: 176018 - DNA, 363 bp, Glycine max
  unsure (1)..(363): unsure at all n locations
gggcganggcacaaatcaattctcccatttccacaaggcaagctaaacacaccatccccagntggccacctttacattgagctcacgcactcctacggattccttatcctcgttcctctcagcaccgggttcccatcaaccccttcaagctttcacaatatccaaacaattcaatttcatttgtcatgaaactaccctaaaccaagaaaacagattggaggcagaaaactctgcacaaaactcattcaaattccacaagtttttctactcacataccccagtaacattctctttgttctgatttggtaaccgttggatcgccttgaaaatttaactggatggtcttaatacataaatctaaat

SEQ ID NO: 176019 - DNA, 284 bp, Glycine max
  unsure (1)..(284): unsure at all n locations
tttctaattagaaatgcttgntaccttggaaatgtggagaaagggaattggaagtgaaaaaaatcttactgaaagcagcaatggcattgcttttgatgatcttttggtagtttctatgtcaaaattcttttttatttctttttctttctttccttaccatttgtatccttttataatatatttttttcactccatttaacatttgttacataaaagacatggcagtaccaatatattacatcatcagatgtttgatagtggataatcaacctaagaaagaacta

SEQ ID NO: 176020 - DNA, 286 bp, Glycine max
  unsure (1)..(286): unsure at all n locations
agctntgcttctacaacagggagggcnaccttataagatgtatgtgaacaganacgncgacaacgtcctcggccggaacatcctataaaacaagatattctgatgtcttgatgatgccaaaggatcaagtgcttctcaagttttattcaagacaagaatccaagaaaatcaagatatatgatcaagctgatctctagaatcttaggaagaagtttccaaattgaaaaggcaaaaggtttggccaaagaactttatctaaatcattttaaattgagatttactctct

SEQ ID NO: 176021 - DNA, 377 bp, Glycine max
  unsure (1)..(377): unsure at all n locations
agctngaggtttttataagcctnggtttctctgtaacccaactggccatgaatcaaaaatctgcacctgtcgncagactctgtggttatgccctctgccgaccaccacacagacctttgccttctatgcaacaatttgaagcaattgaacagcctgaagcttatgctgcaaacatcaacaacagacctcctcaacctcagcagcaaaatcagccacaacaaaataattatgacctcttcagcaacaggtacaatcccgggtggaggaatcatcccaacgttagatggtcgaatccttcaaaacagcagcaacaacaacacaccttatntcaaaatgttgctagcctaagcagaccatacgttcctccaccattcgag

SEQ ID NO: 176022 - DNA, 376 bp, Glycine max
  unsure (1)..(376): unsure at all n locations
agcttgcatacaagattcttttgcctgtttcttataaccttctggtagggcatatagatgtcttcctctaaatcccatgcaagaatgcagttntaacatctaactgctccaagtgaagattctatgcagctactatgctcaaaataactctgatggtagtcatctttacaactggagagaagatctctgtgaaatcaattccttgtttctgctgaaaccctttcaccacaagtctcgccttgtatcttcttctaccgtcagattcttcctttagcctatagacccacctattctgtaacgctttcttttcttctgtgcaattagttaaagaccacgtcttattcttctgaagggatgtcatctcatctttcatcgc

SEQ ID NO: 176023 - DNA, 307 bp, Glycine max
aaaaactgatttaaagcttaaataggtgggttctgtcgcctcgtgcgcttagtgcaaatctgaatcgcttaacacgcataagtggattttgggttaacgcacttcttttccttaacggatgaactgaaacgatgcgcttgatgacctggagcggtgcgctcagcgatcctgcaagctatatttttttggcttcttcctcacgcttagccactgagtgtcacgcttagcgaatgcgtcctaagccagcagattggcttagcaagaaggtgaaatcagcacttttgccaatttgcttattaacctgaaa

SEQ ID NO: 176024 - DNA, 293 bp, Glycine max
gtaaaatttaaatacctatctctttcggacgtataaactccatgaatctctgtcataatttccagcccaccattagcgagcttgccactcgttgaacatatctctcggcttcaaatttaaatgctaagtattgtcagtctttcagcttcgaattgcaggttgttcttcgttgccattgactttacatattggcatcaatgcatcatgttaagaaaatctctgtacgtataatgcatcaaataaacaggaaggatgcaacctgtgactgtgaggggtgtatccaatttagtaat

SEQ ID NO: 176025 - DNA, 287 bp, Glycine max
gcattgctttcacagtatccttttcgctttacttctttctgaatgacacaaaataattttgcttgatcaataggttaaaaaatcctcacgagatttaccccttggaattggttataaattggttatttgttgggggatatatatgatgggttccattgttgtagctggtttattactttattatgcaattgaaccacataccccaatatcatttgcatttgctaaccaagggaggaatgtgcacccaagcttaaaatttgttcattaagttttggggctcaaactat

SEQ ID NO: 176026 - DNA, 251 bp, Glycine max
cacattgcacatgccaccaaaataaaaccgtttttttctttgttggagggaaaatacgtaggtgtagctctttatcacaagaccgcagaaataactactacttctatctcatattacacatttaacatctatcatttaaaaattttatttcatttttaaagctcgcaattttctgattgatttcgcacacacctgggattaatatccctttgtctgaaggcctagaaaaaactaaaccttttcccaaacac

SEQ ID NO: 176027 - DNA, 449 bp, Glycine max
  unsure (1)..(449): unsure at all n locations
ctgaggctgcaagctgaagcaactgatgcntnggtattttggtacctagctgaccttgaacttttatatttgtcctgtgcaagggtctgtagtttgtgctcctttgtgaccaccacagacctttgccccttcatgcagcaacttggagaaattgagaagcccgaagcttatgctgcaaatatttacaatagacctcctcaacctcagtagcaaaatcaaccacagtagaacaattatgacctctctagaaacagatacaaccctggatggaggaatcaccctaatctcagatggtctagccctcagcaacaacaacagcagcctgctccctccttcaaaatgttgctggcccaagcagaccatacattccttcaccaatccaacaacaacaacagccccagatacaaccaacagttgagggctcctcacaactcttcctcgaagaactt

SEQ ID NO: 176028 - DNA, 427 bp, Glycine max
  unsure (1)..(427): unsure at all n locations
gaccttaagtcaccgcggctgcaagctgagattattatattgatntttttatgcaatgnggnccgattagtgaggctagctaaccaatttgaagccctcatgacatgggtgttctgttttgtcataagtacaccctctgtgtaaaatggtcagctatgcctacatgtgcagctgtgctactaatatattttgagaaatgttaattacaagataaaattgtccatggactaataatatgaaatatttctacactgttattaaattgcaaattatctcatatagtaatttattgactcttggaataattatgttaaaagttaaattaacaatatttcttaattaatagtgtaagtctggttatattaattgtatataattaaactttaaatataatatattttatatgctatcattgttatcttcctgt

SEQ ID NO: 176029 - DNA, 358 bp, Glycine max
  unsure (1)..(358): unsure at all n locations
agcttgtaataaagtaattaataccttttattttacgttattcaaagtatcaagnggattgagatcatacacaagtccctttacattttcccaagtacaaccaatcaactttatcagattggggtaacctttcaatgttggattagttcaaaattttactttctcctgaaaaacagaaccattgacttttcacaatcagtgagacaaaattaagttggaagcaggataggaaaaaaggtcatttatgagtgaaagagatagagagagcacttgctttgataatcaaattcttatcattatatttggaacttatttgttccattctttcaccatcccatatcttcactactacatgttg

SEQ ID NO: 176030 - DNA, 351 bp, Glycine max
  unsure (1)..(351): unsure at all n locations
ccgcagcatgcaagcttcctttttttttttgagaagcnttcnattatgtatttttgagaagctacatccttatctatccacccctctattaactcaaataacttcttaaaaataattacggatgaaaataacgaaacaaataatcaaacatcaaacataatttctaattatatataatatatatcagggtgttacagcaaccgccttcttgtaggaacatcctagaaggcccaagtgggtctggtttttatttgcaccccccatttttactaaatacaccctacccttttttggtgatttttttttctaacgttactaacacttaccaaattttgttccataccttgtttt

SEQ ID NO: 176031 - DNA, 330 bp, Glycine max
agcttgcaaccatgtacattgtggagattttgtgactacatggggaacccttgagcatagtgccaaataagaccttgtttacctttaggtttgggagagttacaagaagcctataacctaagggaacttagtcatccttcaccctcaataaatagttaaccgaaaaactatttatccctaaagaccttcttagagcttgtgcgatggaacaaaaaggtagttggaacgagtgtttagcccttgtagaagttacctataataataatttccatgccagtacagggaaggcaccatttgaagccctgtttgggcagaattgaaaacaccttt

SEQ ID NO: 176032 - DNA, 225 bp, Glycine max
  unsure (1)..(225): unsure at all n locations
acatctgtccccctgttgatgaatcatgaccccgggaatgccataaccatgttcgtgttcatgcccacgttcatgctcttggcttggatttccatcattatcatcaccaccaccgcagncttgcccttctggtacatcaatgccgatcttcccgctggtggacatcaccaccacaccctcgctagctttctgcgtttcgtctggcggggtgaatcgaggtctcgt

SEQ ID NO: 176033 - DNA, 128 bp, Glycine max
  unsure (1)..(128): unsure at all n locations
tggaaaaaggccctagggttctaaaaaccctaagggtaaattttaaccccatggccaaaggnggggccacttgtctttgaaatatttgaataggtttccttttttgggccttggatttggacatctaa

SEQ ID NO: 176034 - DNA, 414 bp, Glycine max
  unsure (1)..(414): unsure at all n locations
ctgcaagcttatagcgcggtctggagactatgtatagtgnnccatttattaanagangnccgagacatggattggtacacctgccctctgattccanccgcgaattggcgagtggaggaacgccccgacattaacgcagcgagcataatgtaaaccttcacggttttaaaagctctatagttgggcctaggctttagagtttttcttttggataaggctttgtgtatcttgttttattaatttataatacaaggatctttcttcaattgttgctacgtctctacccatactcatccatttgcatggtgacttcttttttgaaacggcataaccgatgacaagtcctcctacagtacttatactcgcgacctgcttatctacttccgaacatcatctaatcacaccgtatgatca

SEQ ID NO: 176035 - DNA, 386 bp, Glycine max
  unsure (1)..(386): unsure at all n locations
agcttngcaacttactctggactcgcgggttcnacttaatttcgatacnggancnaacngccccatcctttattgaaaaacaatcttaatcccatgaacaccagatacaaatcaatggttattaaaaaagtaactcaccccntccaccgggtaagaatccttcgtgaaattgatattcaaccctgatccaaatcacacacaaactttaagaaggctcccctagatattccttactcgaccgcacactactaaaaaataaggtttctacattggttattaagaactntaatatcggtattaatcgatgttgaattaccgatggtaagtataatataacaccggtttaaaaacgatgtggttagcaaaaacaacaatgatttccaaaa

SEQ ID NO: 176036 - DNA, 284 bp, Glycine max
  unsure (1)..(284): unsure at all n locations
agcttcattgtttatcaagccaactnacatcagtttgccccaagagactcaacatagggatgcacaggtcaaagttgagtttgaaaaaaatggtatgaccaagtgaagggccaattggcaagaagaatgaagctatgcccagcagccaacagaaaaagaaggaagtggtacttgaacnccgtgatgatcctggacattngaggacataatgtttccaagaaggagggaatgatgagaatcatgaaactggccaaatacaggctaaaggcccaagtggagaaaga

SEQ ID NO: 176037 - DNA, 256 bp, Glycine max
aactaatctagcagaggttcactttacagaactatgcttgtgtttcaggtctttttttcttcctgagcaagaaacaccttttatagaatttagtgaagaatccgctatgggatcaatgttgagccttaatatgaccattgtctcacaagtggagatgaaaacatgtggcatactctaattggcgaggatgggaataaagatacagacacttgtatgtgcttcttttctacgaagaaagtgacccttaaggaatatt

SEQ ID NO: 176038 - DNA, 368 bp, Glycine max
  unsure (1)..(368): unsure at all n locations
agagcaattcaaaagaaaaatgtccagattatttatgacacattcttcacttatgcagctcanatcataatatatatatatattacaatgcattttctagaagaattttagctagttaagtataaaaaagggaaaggcatatattttgtctgacatatagactttggaaccataaagatattaaggcatgtatctgatatgcttggctctgatcaacattttgatcccatttttgcatcccaacaactcgaaacagtatcaaagctctaactagtagtttttggatgctagtatttattggtgcaaaataatgtagtaatcaacatgtatatgagaataatatataatatctactttaagctagcaca

SEQ ID NO: 176039 - DNA, 372 bp, Glycine max
  unsure (1)..(372): unsure at all n locations
tgtctaagctccttcaattttttctggtttttaatattngaagaagaanncctggggaacccttcacccgacaaagacactgccaaaacctatcttctcctttttggacaaaataagacaagccgggggcaaataaaattttttcccatctgaccctggatgccactgtgaacatattcccatctcaactagatcatgacgggtattcaagccatccttccgcttgccttgaatgttaaggagcgtcccaatgacactggcacatacattnttctccacatgcataacatcaatacaatgtctaacgtctaaatagaccagacggaagatcaaagaaatggacttttctttcatatgcaagcctacttttat

SEQ ID NO: 176040 - DNA, 374 bp, Glycine max
  unsure (1)..(374): unsure at all n locations
ttctttgctattcaacacattgataatgaatatattaatgagcaagagcattggaagggaaattctatgattttaagggccacgccataatggggataaagtggtcattttgcttaaaaaaattattccattatactccagcctaaagtatttatccactctattgagtgatttgaaantggggattcattccaatattgtcgtttgtgatatccaagagctacttagtattaaacaatacttgtgtgccttagatataagggaagtctaaaggtgttccaaaggggccttgaaatagtgttgagctaggagagccagacgaatactaatttaatcaaccttattagcggaccctcactacttgaaaggaaacc

SEQ ID NO: 176041 - DNA, 215 bp, Glycine max
ttacataaacatctcgctcgctgtgacaatgttaaaaacatccatacttagcaaaaacacataaatcagtttgcaaggttcaacctttggataatgatcatgatatctaaaaatagaatgattcagattcatatacaacaccaacaacacaataaaatgaaaaggtgaaagattaaatctacttgatgagaggcggaataaagagagtccatctc

SEQ ID NO: 176042 - DNA, 302 bp, Glycine max
  unsure (1)..(302): unsure at all n locations
tcaaagccaagttgaccttgaaaaaaatgaataantagcttaaaggcttaacctcttattttaagctttgcctaaataaaaatgaagaatattcgctacaagcttaatctttggggctaacctgacctttgaaaaaaatgaaaaaatctctgaaaaggtaagcttagggcttaatctcacccgcaaaaaaatgaaacctgacaggctaagcctacttgacctagagaaaatgagagagctcgcaaggtaagtccatacttcactgatctgaaaaaataagaaaaggggagagcttagtcatt

SEQ ID NO: 176043 - DNA, 241 bp, Glycine max
gaaaatatacgaattttcataaattcacactgaaggtgtgcgctaagccccggcgctaaccaaacaacttgagctaagtccagtttctcctcacgatggaattgggctaagcagatagctcacgctaagtccgacagcttgtgctaagccccaacgctaagctaaacaacttgcgctagcccaaggtgctattaacaaccttaacccgctcaatacagctcctggcgacttatccttcctt

SEQ ID NO: 176044 - DNA, 288 bp, Glycine max
  unsure (1)..(288): unsure at all n locations
cgcaacgtggcggacaaaagtgggctgcaactcgaatgggccttattgtcaatgcgaaaagtattttgcgcttcactatccatgttcacacattatttgcagctgtggctacgtgagtatcaactacttccaatatatatatatatatatatgttgggtacacaaatggacacatcttgaaagcttactccgcacaatggtggtatcttgggaatgaagcggcaatttctctttttatggcgcatgacacttancccgatccaactcaattatgcgaaggttggccaa

SEQ ID NO: 176045 - DNA, 434 bp, Glycine max
  unsure (1)..(434): unsure at all n locations
agcttccatgctatctgttgggtgcctaatgatgttaaaggtgtggatgtaatctttccaagactttaattattaatcagttcttcaatcatgcttatataatttgagggtctattttttaaaatgagatgaattggtgttcaaatctttccttaatantcaacccatgattagaggtcaaataaatattgggaaagaaattnaaaacatctgtgggcaatttactatgccctctcctgtatttgggctattttactacataggaatgaaatttttttcaagaattatactataaaattaattggaacacagtgttgcacctaatcaaaagttgaacctggatttgtatcaagtcaaaagtttcaggttcttcatggtttgtcgggtgatatttaaaccacatgagctctttcttttttctatttaagcctaga

SEQ ID NO: 176046 - DNA, 66 bp, Glycine max
aaaggggtaaaaaaatatgagtagcgagtaaaaaagacctttcaaaccctgtattctctataagtt

SEQ ID NO: 176047 - DNA, 294 bp, Glycine max
tagcattttgcttaagagagtgcccactggcaataactctcaaatgtttgcttccagaatggcccgagagcttgctcaagagtccaggaagacaagcggcgaagaactattccgctccgagtacacaatcccgtttaggagcgctgacaccaacacgcttcaaccatcaaggaggtcgttttcgggagcaccgtcactcaggacacgatatctgttttagaagaataggcccggggggcaccactgttatcttgccagttgaccaaaagccttagtttgcctgctcgcacaaga

SEQ ID NO: 176048 - DNA, 269 bp, Glycine max
tttttttttacagaccacaccgacttttcggacaatctcggacccgaggaacgaaaactaccattgtttttaaatctttgattaatgtagcccccaatggtttatgtatacaccttgatttaaacagttttatcaaaccagtacttaaacgtactggttgtttaaagattaccctttctttcctgtctataaataatatgtcaagggaaatggcccatctagaaacatatactagcttgatcccaagacacctagcatctatttgacat

SEQ ID NO: 176049 - DNA, 393 bp, Glycine max
  unsure (1)..(393): unsure at all n locations
cctgcggcatgcattcttgaaactaattcattttcaacccngttatctaacccctctaatagaagnngacaactaacaaaataactataaaatgacancaacggctaaacaattacaacacataacactggtaatgaaccatctaatcaaacaaactaaagaaattggacgatatattgttacacacaattgacactccactagactagacgatactagtagtgttgtccaatcacttctttcaatgtcatccactcttccttctaacaatcttcaccttagttcaataaaagtcctcaaatagatgtactactatttattatgaagtaattacgttaaggagatccaaacagtgcatgaacttggttcaacgagcacgctatgtgaacatat

SEQ ID NO: 176050 - DNA, 375 bp, Glycine max
  unsure (1)..(375): unsure at all n locations
gcttgctctggtatcatgtttcctttataaacttacccatgtggntatgttttaagttctgtggtttatttatttttggcgaaaggaaaagtcccaaactgccccttgaattatcaattgcatttcaactatatggactatggacatataacagcagttgtagtaacctcttacacgttgcttgcgatttttgtaattcgagatgacatggacagatgatgaggcaatgctgaatttggtaaacttaatttctaatgaagagtaccatgaatgaatttgtgataacggcataagttgtcttatttggtggattcataacagcttgccagcgcaaatgctactttttttattttccagcgaatcgatggaaagtgc

SEQ ID NO: 176051 - DNA, 230 bp, Glycine max
  unsure (1)..(230): unsure at all n locations
agaccatgtaattgcgagaaaatgactaactgtacacaattctcacgccatccaatcaaataaattaaaggaagacccagacagacatggaatgatggnncnttgacaatattcagataattgtcaaaacagaacattaatataacttttggatgagatatatcccataagttcatcagacatacttcaatatttatggggtgtggtggtgttgggagggggggtttcat

SEQ ID NO: 176052 - DNA, 399 bp, Glycine max
agcttatcacaagaattattggtagaaagagggcattttcttgtcagaaatgagagtgaaaaagggaaggagaaagtctggaataaggtagaattgagtggatattggattaggtgagagaaaacgggtccttgaagaacatgtttcatttggatttacctcgtgtttttttcccagatcagagaatgaggcttgcataatttagtgtgcatcagatacattttaccaaattatggagtgtcttaaaaatagtatattagaatgtatcgttagcatttctcttactgttttaaccaggaacagcaatacacctttagctatttctcttactgttttaaccaggaacagcaatacacctttagcgataatattattcttctgctttaaggacaaaaataa

SEQ ID NO: 176053 - DNA, 390 bp, Glycine max
  unsure (1)..(390): unsure at all n locations
ctacgctcgagatgaggcagngttgaagggtgaaacttcctgcttttattgttgaccacaaagtggtacctggagatatgtcgcggtggtcaggagaccttggggacgtcatgtggggtgctattgcccaaaaccaagcttgaccaatcccgacccaacccgggcatagtcggtcagtgagaacctgtgatgtacctaagcaggcgagctcctggcagtcaacagataaaaggaataaagaccacaaagcaaggaggcttgtggtggctggccagctgtgaactttgattgatatgtgggttatggcctctggtaatcgattaccaagggtgggtaatcgattacaaggcttataaatgaagacaggagactaagatggtctctggtaat

SEQ ID NO: 176054 - DNA, 350 bp, Glycine max
  unsure (1)..(350): unsure at all n locations
aactattatctataccatttttatggaattataaatgacaggatgaagtggcctaaagtgcttaaagagttcacttgcatgtgaaaaattttcaaaaagaaaaagactcatgttaaaagaataatgcaaccagattaatacttccaaagaaaagaatattttgtaaagacattttcagacaatttaaatatttttatttggctatattagtataaaacatctctaatccatatatttgtttaatattatgctctttttttcattttcttttgatatactttgtgttntaacaacttgaattcaatatgattttgtttatcaattatttttggatttgtacattacttata

SEQ ID NO: 176055 - DNA, 391 bp, Glycine max
agcttgcaactgaaaaactcgatctgcaatatttatatcatttagcaaactagatcgagggactttcttaattattctagtctatgtatatccttgtagctctttcaaggttcataagattacataaaagttaaaactcctatcttttatattttaatggttttaaaatattacaataacactctttatcattctattgtttctattttaattatttgaaaatattatattatatcctctatctatcctgtgcccttaacaccagaggatgttcttatatttttttatataatcacgtattttttttatcttgatttgttaattgcgcaaaccaaataaaatcatgactttgagttggcaataaatcaagaagcaataacaattccatcaa

SEQ ID NO: 176056 - DNA, 451 bp, Glycine max
  unsure (1)..(451): unsure at all n locations
ttttattgagatacatgatatggtacctcttctttattaaacttctctggttcatagtatataaccaacgatttgactcattatattagtggttcatatcatggattgcatatgattattttcaatctgctctatgtaattaattataaactaagttcaggttgagatcaatgtctaatataatgctaatcgcctaagcctattcaggttgagatcaatgtctactcccaatgtacttgatatttcattccctcttaaaagtgttcaactaacctgttgtgtggaactctccgtgatgctcacaattatgatatctgcatttcaccttattattctctgagtcctaatgatggaggaaaggactaaataatttttttaacaaaagtcttgcatttgtgatgactgataagattnacaacgacttttctagggtcttttttgactttgtgac

SEQ ID NO: 176057 - DNA, 384 bp, Glycine max
aatcgaacaactataacaattcactcgaaagtccgattgagtcccgtaatatatcgacatgctcgaaattaaaaaccgaagctcctagcaaattcgaacgacaataacttttcactcggaagtccgattgagtcccgcaatatatcgagacactcgaaatttaaaaccgaagctcgtcgaaaattaaaagacaataaccttgtactcggatgtccgattgagtgccataacatatcgagacgctcgaaatttaaaactgaagctcgtagaaaattcgaacgacaataacttttcactcggaagtcctattgagtcccgtaatatatagagacgctcgaaatttaaaaccgatgctcgcggcaaattcttacgacaataactttt

SEQ ID NO: 176058 - DNA, 443 bp, Glycine max
  unsure (1)..(443): unsure at all n locations
gcttcggtttaaatttcgagcgtctcgatatatatctagtttcaatangactnccgagtgaaatgttattgtcgttcgactttgctacgagcttcggttttaaaattcgagcgtcacgatatattacgggactcaatcagacttccgagtgaaatgttattgtcgttcgaatttgctacgagctnncggtttaaaattcgagcgtctcgatatattacgggactcaatcggacttncaagtgaaatgttattgtcgttctactttggtacgagcttcggttttagaattggagcgncncaatatattacgggactcaatctgacttncnantgaaatgttattgtcgttcgaatttgctacgagcttctgtttaaaattcgagcgtctcgatgtattactggactcantacgaacttccagtgaaatttattgtcgttcaatt

SEQ ID NO: 176059 - DNA, 393 bp, Glycine max
agctttgataatgatataaatatgtgttattttatattggtgttcgagtgtgataatcactacaagagttgtataatatgactcagggggacttggtttgacgtggaaaatatacaggaaattttttacgcgaaaaagaaacttaccttcacacaaacattaataataacaattcccttattaaaatagtgaaaattcttaaaattaataaggtccgcttttaaaaacttagaatagaataagataaaattaactaatggttgtcataacttgaatctgcaatctttatctgcattcttactttgttgaagtgggttttgtttgactagaactacaacaatgtgaaaagctttgctcttctcgataattagtcaaatatgatatttctttttt

SEQ ID NO: 176060 - DNA, 392 bp, Glycine max
agctttgattaagatcttgttaaaagcattttattgtccaaaacaaaaaaggaaaagatggccttaattcaatatatcttgaagcaacaaggcatgaaaacaatagaaacattggttcatccttcatacataaattgtcattacactagccttcattaacatagccaagcctacccatgtatacctgtttgtgggacattctgatgcccttggattcataattcggcatgttatcttcatgttggtcaaccatgtcagttgcattttctaggcaacagtcttcgagttctagtgattgttttatatctctgatcgatgacaaagaaaatgacaaagacctagagacattctgacgtcgtttgaggatagaaagctcttcctggcccaaaaat

SEQ ID NO: 176061 - DNA, 409 bp, Glycine max
tgagagaacttccttgagaagcttctgtgtattttttcactgagaagctagagcttagctacacacacccctttcataactaagctcacctccttgagaagcttccttaagaagattcctaaagaagctagagcttatctatacatacctctctaataactaagctcaccttcttgagaagcttccttaagaagattgatgtgccatcattttcttctattttctaaaccctttttgcaccattttaattactgattggtcttaattgtcaattaatcaggcaggtttattatttgggctcatttagctaatttgatggttttaatctaagttcacgaattaatgaaacatcgggccttaatccggatttttggtattggacttgaagagggaaaattaagccgcgctt

SEQ ID NO: 176062 - DNA, 387 bp, Glycine max
  unsure (1)..(387): unsure at all n locations
agcttatacagacgtgattaaacgagatatggctgatgaatcatcaatcgcgggggcagtgaacaatcttgtttcactgaaaggtccaaaagatgtttctgatagcctaaggaaacttgatcgacttaaagacaaggagaatcaaagcttccgactagctcctggactagacttgaaactttcagcanaagaaaaggaagcaatatatgcaaatagggttgtgttacttcttcatgccaataagattgagcaggtctttcttctttctctgtcttgtccttcttgaatcatcaattttgtgtatttattctttcttttgaaactgggcatgggagcatactgttgatcattactgtactattaaaatttgtaggcacgagaacttgt

SEQ ID NO: 176063 - DNA, 416 bp, Glycine max
tatgcctctcggacaattctcttcaatacaaagactgtgtatttgcgccctatagcaattgagctttcacttcctcaaacgcactcttccccacaaaacaaacgaatttacacacaagggcatgatgccacaacacactggatttggaagttggcaaaagctcatgtatgctcaaatgatgctggcatccatcaactagtaaatcattggtaaggcaatttatcatggaaattctaaattatagaataaatggctagatttacttagtttatttttgcaaatttagattgaactcagattcataaatgacttattcagaagaaatggtggattttctcacattcggccaagagtaaaatacagtggaaaattgttgtgtgcaggttgagaactcatgcatgcatggagccatatat

SEQ ID NO: 176064 - DNA, 354 bp, Glycine max
gctcctattttctctatgaagaacatgttatgtgcttagctacaggtcacctttcattccctacgctactctgagatcatttattgctccacccatacaggcctcacaagaatatgtatccgtgacatactcctttctttggaagccctacttggtattatcgtacaagggctttcagcggtaaattgtattccttctcccgtaacccgagcacactcctttcaaatgggtgtaacagtcaacttgaaactttatctcgcgaagttgtgccttactaatccgttttgaaaccttgacttcctagacccttaacggtgcttcaataaactctttcagacgacttttacatgcaag

SEQ ID NO: 176065 - DNA, 389 bp, Glycine max
ctcaactgatgaagatgaattcgtggctacttcatgcactcctttaatgacaatagcatcacttctggcactaaattactggtagtttgaagccatcttctcaattaaatttctggcttcagcaggagtcatgtctccaagggctccaccactggcagcatctatcatacttctctccatgttactgagtccttcattaaaatattggagaagaggctgctcagaaatctggcggtgaggacaactggcacatagtttcttaaatatctcccagtattcatataagctctctccactgagttgcctaattcctgaaatatcatttttgatggccgtggtcctggaagcagggaaatttttttctaagaatactttcttgaggtcatccc

SEQ ID NO: 176066 - DNA, 453 bp, Glycine max
  unsure (1)..(453): unsure at all n locations
tcaatggctcaatgagcaatgggaaatgatagtcaattaacatgttaagattcctttttctataagagactattgcgatgaagttttatgttatatactccctacggaagcaaggcacatnttgttgggtagagtatggcaatatgacaagaaagcaatccacaatggtctcaccaatgaaataaccttcacccatggaagcaaaaagttaaaacttgttcccttgacaccttcaaaagtggttggggatcaatttcaaattaaactcaaatgggatgaggaaaataatatataacgaaaaaagaacacccctncttggttaacgaggagtgttaggaggtaagtgtctcctccataaagtttgcttaaatggatagtcattctgcttcatataccaagctttaagaatctttccttgttgacaacctgctcaatttttatttgtaaaatgac

SEQ ID NO: 176067 - DNA, 393 bp, Glycine max
  unsure (1)..(393): unsure at all n locations
atagaaggggcgntcctaagttctctacaattgcatcacctctcaatgagctggtgaagaagaatgtggcatttacctggggtgaaaaacaagagcaagcctttgctttgctcaaagaaaagcttactaaggcacctgttctagctcttcctgacttttctaaaacttttgagctagaatgtgatgcctctggagtgggagttggagctgtattgttacaaggtgggcaccctattgcttattttagtgaaaaacttcatagtgccaccctcaactaccccacctatgataaagagctttatgccttaataagagccctccaaacatgggaacattactcttgttccaaggaatttgtctttcatagtgatcatcaatcacttaagtacatta

SEQ ID NO: 176068 - DNA, 481 bp, Glycine max
ctgagccaaaatcccgacttaccatgagaccttgacctaatgtgataatgtcaatccttgccctcagaagaaaactaagaaaagaaagttcccgacccaagaatcggaagaaaacaaaaagaaaatcctcaatcaaaagggtggaagaaagcaaaaaaagggaaagaaaattcttgatcaaagatcggaagataacagaaggaatatatataaaggcctttggactatacaatatctgaacaatacagatgtgtcaccaagaaaacatgaatagaaaggaaaccacgacctatagtggttctctctctttgattgccaaccaaaattctgtgcgtcggtgacttgttcgcctcgcgctaaacaaaaaactgaaaaggaaaaggccaagaacattcatagccaaaaaattcccacacaaaacaccattctccatgaagagtcctactaatccatgatcacgcatgtaatctctgatttgata

SEQ ID NO: 176069 - DNA, 391 bp, Glycine max
tatgttcaatggtgagggttatcattattgaaaaacccgaatgcagatctttatagaagccatagatttaaatatatgggaagccattgaaattggtcccttcattcctacaatggtagggggaaatgaaactatagaaaaacctagagaacaatgggatgaagatgaaaaaagaaaggttcaatataatttaaaggccaaaaatataattacttatgcattaggcatggatgaatattttagagtctcaaattgtaaaaatgcaaaataaatgtgggatacattacaagttacacatgaaggcacaactaatgttaagagatcttgaataaacactctcacacatgaatatgaactatttagaatgaatcaatatgagaccatacaaaat

SEQ ID NO: 176070 - DNA, 326 bp, Glycine max
  unsure (1)..(326): unsure at all n locations
cttggagtntccaagtgccaattcgtcttcttcttttgttcttctttttctggcttcaattcattagtgggctttccttctgtgtccagcatcttgggatgttcccagcctttgatgacagctntccaggttctgctatccagtgatttgaggaaggccaccatccttgctttccagtattcatagttggttccatccagaatgggtggtctgttcactggtcctccttctttctccatgttcatcagaatttatctccctagatctcactcagtgatttagagtgcctgctctgataccaattgaaattctgataccaatgacag

SEQ ID NO: 176071 - DNA, 312 bp, Glycine max
cacaacttttgcttctacagacaaatattgcacacctagaagagaagagtcagttccatattttatttaatctgacctaatatgaaggagagaaagacgcaactgtaacacttatgatgttcttagttggaaaatacaaatactggggcgtcagagccataggaatataaaataggctcataagttttctcacttgctaagactgcgtttactaatagttgagacaggtatcattaataaacaagacaaggtgcttgaaatgccctaggttgactgggcccggcttaagaacgttattatcccaatggctaa

SEQ ID NO: 176072 - DNA, 309 bp, Glycine max
atccatgggactatcaactgtctaccagctgtcataccagtgtctgtaagaatgtctaacgcatactgcccttgagagatgataataccatctcctgacatgagctactgcaattccacgaaaatgttaaagtttcttcaaaaacttattctgtaaatggcctaatagaatgtctcttcagttgagcaatagttccttggccataacccgcgaggactatatcatccacatagatcaccacgtttacacatacactctgagaagaatacatgcgagaactgaagggctgcgtcacttcgttgaacccaa

SEQ ID NO: 176073 - DNA, 351 bp, Glycine max
tagcttcaacatcagaccacttgcagggtgctggaactacttcacatggacttgatggggcctatgcaagttgaaagccttggaggaaagaggtatgcctatgttgttgtggatgatttctccagatttacctgggtcaactttatcagagagaaatcagacacctttgaagtattcagagagttgagtctatgacttcaaagagaaaaagactgtgtcatcaagagaattatgagtgaccatggctgagagtttgaaaacagccagttactgaattctgcacatctgaatgcatcactcatgagttctctgcagcctttacaccccaacaaaatggtattattgaaagga
